United States Patent Application Publication US 2022/0090207 A1 - sequence listing, part 3

SEQ ID NO: 22881 - DNA, 336 bp, Homo sapiens
  chr8:143386707-143387043
  hypo
ggggtgggaggggggtgcaaacggggttccgtgtggacgcccaggaaagcggccaggctggggtgcgggctgtgtggacacccaggaaggcagtcacactgggatgcgagccgtgtggacacccaggaaggcggcagggctggggtgcgggccagaggagaccccgcaggtgctcggtctccctcacctccacagcgggaggatcgggggcctggtgccgctctccccagcagtgcaggacaaaagccaggggaggaagagatggcttagacgcccgggtccctccgcggcctcctcctgaaaggctcacaaagcgctcctttattctccccacaa

SEQ ID NO: 22882 - DNA, 30 bp, Homo sapiens
  chr8:143397324-143397354
  hypo
gtgaaggagccattcgcttcacgaggaaac

SEQ ID NO: 22883 - DNA, 30 bp, Homo sapiens
  chr8:143398748-143398778
  hypo
ctgtacgcgtgaagcgggtatggccagcgg

SEQ ID NO: 22884 - DNA, 191 bp, Homo sapiens
  chr8:143405728-143405919
  hypo
cagctgccagctcggcggctcctgtactaccagccaggtggtgccgttgctgccagcagtcaggtgactgaggagtctgcgaggcctgcctggggggtgtgtcacctgaggcccatttgccctagcgccctgccctagtctgccggggccagaaccgacctgagtacggaggctctcgcatttgcttgtca

SEQ ID NO: 22885 - DNA, 277 bp, Homo sapiens
  chr8:143413442-143413719
  hypo
gcaccctgagtttccatacaccgcagcagctggcgtgtgtgcccggaagctacgagcacctgcacgtggaggctcagagcagcatcactaagagtcaaagcacagccccgctgatgaagcaacagaaacaaggtccagctctgcaccggcagctcagcattggaaacagaaacactggtttccgcacaatgcaggtgagccctgagcacagcacgcacagagatgaaagccagcaggaaaaggccacacgccgcacggttccacacatctaccatgt

SEQ ID NO: 22886 - DNA, 36 bp, Homo sapiens
  chr8:143415310-143415346
  hypo
tgcattagtagaacaacgagaatgaggatgagttaa

SEQ ID NO: 22887 - DNA, 102 bp, Homo sapiens
  chr8:143424740-143424842
  hypo
ggaacatgagcacgcgtggccatggggagcgtcggcacggctagaaatgcctgattctcggtgtgtgtgtctaccccaggcagcaacggcaaatgcccttct

SEQ ID NO: 22888 - DNA, 31 bp, Homo sapiens; identical to SEQ ID NO: 6627
  chr8:143429143-143429174
  hypo

SEQ ID NO: 22889 - DNA, 30 bp, Homo sapiens
  chr8:143442749-143442779
  hypo
acgggctcctcgggcgagcccagggctgag

SEQ ID NO: 22890 - DNA, 804 bp, Homo sapiens
  chr8:143463111-143463915
  hypo
ccagatgacctgggcaagcatcgtcacctccccgcagctcggcgtcctgggccagcccctaatggagcagaagacaagccctgcctgccttggcattgggaacaggcagcgcccgcgggtgccgcagctcatcctgcgtgtgggagacactgagtcacagccacggctcatgcccgcacccactctcagacgctgcccagtcctcccctcggtgagcaggccgccacctcctcctctgacgggtacctgacaccccccctacacacaggccagatgctcggtggaggaggcctggccgttcccaggcccacgcgcccctgccagcatcagccctgtgcagcctccgtgtggaatggggcccctgcgcatgggcatccgagtggcatgtgtgagcgtgtgtgctcatgtgtgcgacagagagccagaggaggaggagggcccagctggggagctgcagttacatgaatcagtgttgttatagcaacttcaactccacgtcaagcagaatgccagccgggcacccccaggcacctcgtagaccacgcccagaatcagcggtggagaagcaccgatcgctaacggcacaaatgggcggtcagaacaccagcaacacacatcctctttctccctcccaacctccatcattccccgggaggccggcctctgcccactgaccagctgccggcactgcccgccagtcccttctgctcgggatggcagcaacaaacagcaagatgccagcgcctgagtcatgcgggcagggggcagggagcacccctgcacgcagctgcacacagcccaaga

SEQ ID NO: 22891 - DNA, 181 bp, Homo sapiens
  chr8:143505867-143506048
  hypo
gggacaccagcctgtggacaccgggcaggcgctggccccaggaccctgggctttcctgcccgctttgttctccctcctgtgtccacggcaggccagccactctgtcatctggacagcccgcattgggctgctgtcacagcgacgccgtcggatggtatgcggagcacagaccccatgccca

SEQ ID NO: 22892 - DNA, 461 bp, Homo sapiens
  chr8:143509145-143509606
  hypo
gttggagctgggattggagcccgccctgcctcggggaagatcctcgctccctttctccacggcacctctgtgattctcgtcacctgccaacaccagcaccagggctgcccctcctgacggccccctcgccgtctttctgggcacactccatcggcacagcgtcttcactgtcctcctgacaaacctcgtgccacccccatcagcttcagcaccacctccacagcagccgtggccagcaccgacgtccttttccgtcaccgtcaagcctcaaaactgggaccgtgggtaatggcgtcaccccatccgccgtctctctctagctgccaacggcgccttcaccagacacgcccggcaccaccttccaggtcagcagtcccagccctgcgtatcggaggcctgctctcccacagcgtccacagtcactgggccaggctcgcacctgtgaggggccaggacccata

SEQ ID NO: 22893 - DNA, 22 bp, Homo sapiens
  chr8:143509628-143509650
  hypo
cggccaccctctgggtcctcct

SEQ ID NO: 22894 - DNA, 55 bp, Homo sapiens; identical to SEQ ID NO: 6628
  chr8:143531681-143531736
  hypo

SEQ ID NO: 22895 - DNA, 526 bp, Homo sapiens; identical to SEQ ID NO: 6629
  chr8:143531983-143532509
  hypo

SEQ ID NO: 22896 - DNA, 1099 bp, Homo sapiens; identical to SEQ ID NO: 6630
  chr8:143532541-143533640
  hypo

SEQ ID NO: 22897 - DNA, 948 bp, Homo sapiens; identical to SEQ ID NO: 6631
  chr8:143533708-143534656
  hypo

SEQ ID NO: 22898 - DNA, 152 bp, Homo sapiens; identical to SEQ ID NO: 6632
  chr8:143556734-143556886
  hypo

SEQ ID NO: 22899 - DNA, 244 bp, Homo sapiens
  chr8:143557843-143558087
  hypo
agccaggtggcccagtgctgccgaactcagagcactgtggccacagagagagaggacgggggcaaagaaccgctcctgtgctgacctaagcccgtcctgcagccgctgggcgcaccagctcccggagccagtccctgcggtccacagatgcccggcggcgcgaggagctgggggacgagctgcagcagtttgggttcccagccccccagaccggtgagctggcgggaggggggtgggtgggact

SEQ ID NO: 22900 - DNA, 222 bp, Homo sapiens
  chr8:143558402-143558624
  hypo
tgcggggtctggccccggtctgactgcagccccatgggcggcaggcctgtgacgctgtagtggggcctgcaggtgacccagcagccgaggagtggtccccgtggagcgtgtgctccagcacctgcggcgagggctggcagacccgcacgcgcttctgcgtgtcctcctcctacagcacgcagtgcagcggacccctgcgcgagcagcggctgtgcaacaact

SEQ ID NO: 22901 - DNA, 174 bp, Homo sapiens
  chr8:143582424-143582598
  hypo
tgtcagttccagggacagtgacggagctggttctgatgaggcgatggcagtgttggagacgagaatgatgatgtgcttatagtggaggtgacgctggtgaccatgggtgaccggtggtcattgtgatgactgtgaagggacagtaaaggtgacggttgtggtgacagtggtggt

SEQ ID NO: 22902 - DNA, 30 bp, Homo sapiens
  chr8:143614782-143614812
  hypo
gagggcttcgtcatcgtcatggtgcactgt

SEQ ID NO: 22903 - DNA, 179 bp, Homo sapiens
  chr8:143623480-143623659
  hypo
ggcgggcccctgcccgacttccccaaccactcactgaccctcaagagggacaaggcgcccaagtcctccttcgtcggtgacggggacatcttcaagaagctggactcggagctgagccgggcccaggagaaggctctggacacgagctacgtgatcctgcccacggccacggccacgct

SEQ ID NO: 22904 - DNA, 287 bp, Homo sapiens
  chr8:143660401-143660688
  hypo
agcctcaaaccgtcagcgttggccaccgccttgcactgcgcccatgcttggagccccgagccccaggccaggccctgcccgcccgctcagccctgctcgccatgctcccgcccttgctgctggggcggccggcagggagcccacctgaggcgcagagggaggccattgccgggcgctgccaccatgaggagtcccgagtcctggggagacaggtcctgtgcagggaacagagggacgtgtcactcacgcctgccggggccagagctcgactccgagggacccccagt

SEQ ID NO: 22905 - DNA, 220 bp, Homo sapiens
  chr8:143662855-143663075
  hypo
gtgggtgaccgccccgtctgcccgtccgtgagtgaccgccccgtctgcccgtccgtgggtgaccgccccgtctgcccgtccgtgggtgaccgccccgtctgcccatccaccccaaaacagaaattgcttgctaggctcctagacgtcatccgaccaaggagaagggaccaggcggcaggcaggggagcgcctcgaccgcgttactctcccttgatggcag

SEQ ID NO: 22906 - DNA, 17 bp, Homo sapiens
  chr8:143819453-143819470
  hypo
cacgtgcacgcaggcaa

SEQ ID NO: 22907 - DNA, 31 bp, Homo sapiens
  chr8:143843555-143843586
  hypo
gccacaggaatggtgtcggaattgaattgag

SEQ ID NO: 22908 - DNA, 31 bp, Homo sapiens
  chr8:143846050-143846081
  hypo
cagcaagcgatggatacgtaggggcccaggc

SEQ ID NO: 22909 - DNA, 426 bp, Homo sapiens
  chr8:144070962-144071388
  hypo
cgacagagacaggagcgccctccttccaaaccataaacctagcatcgctcgacagcaccgaagccacttccagacactctgctgaaaggagtttgggaaacgtgtttggctttctagtctctgcgggagagcaaggtgtgcccacagagggcagaatggatgtagtggggccgcctctggacatcccagcctctgagtctcaaccaagccagcacgccgtcgcgggcgaacccatgcagggctccttgccgtctctgagctgggacgtccacagcgctaagtgactgaacgcgacatgacatgtgcacaggagggctctggaatggccacctgtgtgtctaattcaaaaagctttcattttacacacccctgacacagtgcaccaagagcctggctcccaggctcacagcacgtccatgcatgggg

SEQ ID NO: 22910 - DNA, 31 bp, Homo sapiens
  chr8:144093515-144093546
  hypo
tttccatcccagctgtcgcaaaatacaagga

SEQ ID NO: 22911 - DNA, 363 bp, Homo sapiens
  chr8:144178362-144178725
  hypo
agcatcagctctcaccactagcgttcaacacaacacagtgctggaagctctggccggtgcacacagcaagacaaggaaaccctcgcgttcaacacaacacagtgctggaagctctggccggtgcacacagagagacaaagaaaccctcgcgttcaacacaacacagtgctggaagctctggccggtgcacaaagagagacaaagaaaccctcgcgttcaacacaacacagtgctggaagctctggccggtgcacacagagagacaaggaaaccctcgcgttcaacacaacacagtgctggaagctctggccggtgcacagagcaagacgaagaaaccctcgcgttcaacacaacacagtgctg

SEQ ID NO: 22912 - DNA, 972 bp, Homo sapiens
  chr8:144203467-144204439
  hypo
tcctggctgtgtcatcgcacagctgaaaggagtctggaccagacagctctgtccgcagtcagaactgagggtaagcgcggtcctgtgcacaagtcagcaaaccggagagccagggtgccaggcactgaccccattctatagccatagaatcaaggctcacggagcccaatcaacaaacgctccaagagtccaggaaaaggtcgagggaaagaaataaaggtgtgaccgggagaagagtggggaaggagccgactcaaggctgagtcccgcagccccgtgagggcggagtggaggttacggggcgggagcgggacgggaatctgagctcccagcagccgagccgagaggaaacccctgctcctgcccatgagcccagcagagcacatgccctggatgtcgagacgcggtccacagagagatgggctcctgtgactgtcctcggataggcctctggacgccacgccctagtgcagctcagtgaaaggagctccatggcgttttctcacacgattctattgcagctgacggtagtgaggtcacggcacgcaccttgctgatgaccggggttcagccagacgtaactctgggaaaacagactgagctcagccctttcagccagcggccattcagcttttctgaccatggcccatatcaacaaacacaatatggtatgtgagcgtatacatgtgcacaaacacgcaaatgcaccctcacacaggtacacatgcacgccctcacacgtgtacacacaccctcacacgtgtatacacccatacacgtatacaccccacacacccacatatatgtatacacaccttcacacatgtaacacaccttcacacaccccacacgtgcacacacccacacatacacaccctcacacgtaacacaccctcacacacgtaacacaccctcacacacgtaacacacaccctcacacatgaacacccccacacacgtgcacacccccac

SEQ ID NO: 22913 - DNA, 139 bp, Homo sapiens
  chr8:144208603-144208742
  hypo
cttctgcttttaaagggctggcgtgattcgaccaggcccacctgcatccacggaccctaaggtcggctgacctgggacacacggcacatctgcaacgccccttcccggcagcacccacgggtattggaggagtggtagg

SEQ ID NO: 22914 - DNA, 30 bp, Homo sapiens; identical to SEQ ID NO: 6636
  chr8:144242014-144242044
  hypo

SEQ ID NO: 22915 - DNA, 31 bp, Homo sapiens
  chr8:144293654-144293685
  hypo
gcggggcggggcggggcgggacggggctggg

SEQ ID NO: 22916 - DNA, 30 bp, Homo sapiens
  chr8:144294080-144294110
  hypo
ctgttacaggtggccggccagaaaatgccc

SEQ ID NO: 22917 - DNA, 284 bp, Homo sapiens
  chr8:144343634-144343918
  hypo
ggatggggtgaactccgggatggggccggcagggagcctcacgcttacagagcctggtgttggcactctcctggcttcctccgcaaacctagccacgtggtcagggagcccgggcctagcagacggcccccaccttgacagaatccccagggtcgtgcgtggcggtgggggcgacttcacagccgagaccgggcctaacgctgctgtctcgcagtcacccctgcaggccgctcagggcagggctctggcctgacgggggttcctggacacgcctctgagccggc

SEQ ID NO: 22918 - DNA, 603 bp, Homo sapiens
  chr8:144344205-144344808
  hypo
cctcacggctgtctccggcagcccctgcccgcgcccgcacctctgcacctcccacgcccctctccggcagcccctgcccacacccgcacccctgcacctcccacgcccgtcttgccctggggcccaggtgcaggtctgtgaggagggcagccccgtgctcccgtggccaccgctcagccaaatggattcagcgagggtttttagtgtttgtgcctgtgtccccgtgtgcctgtttcctggtgaggctggatgcctggcatgtctgaacactcacattccccaggcatgcatgtgcagccgccgccgccacccatgtactgtggcgctgacccctcctgtaacagctgtggtcttggcctctcgtgttggtggcagatgtcccatttcccagttactttctgttgtccaaaagtttaactgtcctgccagccaaagctgctgagcattactctgatagaccatcagtccttggtaagtgtcctgtgcatctgggataagcatccgtttgttttcagctgcgctttctgtgacttgctctgcgtgagtcctcggtccacgtgggccgttgcgctggttcccagcctgcccgacacactcactgcg

SEQ ID NO: 22919 - DNA, 79 bp, Homo sapiens
  chr8:144347202-144347281
  hypo
aattgcattgtcgtccgccgctctcctgatgtagttctgtgtttgtccattttgcactgctataaaggaatacctgaga

SEQ ID NO: 22920 - DNA, 68 bp, Homo sapiens
  chr8:144360310-144360378
  hypo
ccaccagcgctctggacgccccactctgccaggtgagaacgagtttaggggtgcgggctggaggtcag

SEQ ID NO: 22921 - DNA, 31 bp, Homo sapiens
  chr8:144360619-144360650
  hypo
gttcttctctggaaaacgggcttgctggggg

SEQ ID NO: 22922 - DNA, 31 bp, Homo sapiens
  chr8:144361913-144361944
  hypo
agggctctgtcaacagcgtgagtggacagtc

SEQ ID NO: 22923 - DNA, 30 bp, Homo sapiens
  chr8:144364998-144365028
  hypo
actcagcctgcacacgtgcagatcctctgg

SEQ ID NO: 22924 - DNA, 30 bp, Homo sapiens
  chr8:144378382-144378412
  hypo
ccctacgcgtgcgccgagtgcggcaaggcc

SEQ ID NO: 22925 - DNA, 350 bp, Homo sapiens
  chr8:144380521-144380871
  hypo
gatttggtggccccaccgttaattaagctcctgacccctgggccggtggtgaggtgggaagatgagcctgtgtctcccatgctgagccaagatcctcaggtaccagtagcggtcaaagcacctgctccctgaaggaagcttacctggcttagcctcattcctgctcgtaagtcaggcattcagcttgcaaagatccccaagcacacaaggagagtcagctgactgagggccaacagaaacagcaggcagccgctgtcagccacaaagaaacgcagatcctgaaactgtcatcatacaggtgagaggatagttatgtgtgaggtgttcaaagaagtcgcgcagtcagtgat

SEQ ID NO: 22926 - DNA, 30 bp, Homo sapiens
  chr8:144413840-144413870
  hypo
ggtcccttcagagccggtctagaatcttcg

SEQ ID NO: 22927 - DNA, 80 bp, Homo sapiens
  chr8:144414329-144414409
  hypo
gcctgccctgaaccagcactgcgctgggtcctgcggatgcagatcaccaaaacccatacgaagggctcaactgaacctag

SEQ ID NO: 22928 - DNA, 31 bp, Homo sapiens
  chr8:144446233-144446264
  hypo
tcagttgtataaaacacgccacaggtgcatc

SEQ ID NO: 22929 - DNA, 30 bp, Homo sapiens
  chr8:144446722-144446752
  hypo
ttctaccatgctcccggcaagctaatgttc

SEQ ID NO: 22930 - DNA, 30 bp, Homo sapiens
  chr8:144454256-144454286
  hypo
ggggccaggctccccgcagctctcctgggg

SEQ ID NO: 22931 - DNA, 232 bp, Homo sapiens
  chr8:144457688-144457920
  hypo
ggtcgggctgtgatcgcctgtggcctccctgcagggctgtgactccctgacgcagatccagtgcggccagctgcagagccgcagggcccagattcaccagcagattgacaaggagctgcagatgcggacgggcgctgagaacctctacaggtcagtgcttgagactgcccggccccgggagcagggcccacctgggtgaggggggcaggacagccacgcaggcagatgtctg

SEQ ID NO: 22932 - DNA, 30 bp, Homo sapiens
  chr8:144459827-144459857
  hypo
cctgcgccccaggccggggctgatcccata

SEQ ID NO: 22933 - DNA, 30 bp, Homo sapiens
  chr8:144460930-144460960
  hypo
gtgcttcctggatgcgcgcttcctcacccc

SEQ ID NO: 22934 - DNA, 30 bp, Homo sapiens
  chr8:144461168-144461198
  hypo
cacgcagattggggcgcgccaggaccgctc

SEQ ID NO: 22935 - DNA, 379 bp, Homo sapiens
  chr8:144462487-144462866
  hypo
tgcctgatgggtgacggcccagcgcaggggccccaggagtgctgggcagcctctgagcaggtgggagaccactgggagcagctcatccctggcccctgctttgcacgtggcagagccctcctgcacagccagctcctcacccccgtggcgcgcacccccaacgaaagtggctgtgatgagccccacagccctggcgttgcccactccttctgccacgtcccagggcccacgggcccacatggtgtgtgacatcccagtgccccgcgtgcaggcaaggcacacctgaagcgtgccatcctggggcaggaggaggcgctgcggctgcacgccctgtgccgcgtcctgcgcgaggtggacctgcttcgggctgtgatctccc

SEQ ID NO: 22936 - DNA, 130 bp, Homo sapiens; identical to SEQ ID NO: 6640
  chr8:144511269-144511399
  hypo

SEQ ID NO: 22937 - DNA, 714 bp, Homo sapiens; identical to SEQ ID NO: 6641
  chr8:144511448-144512162
  hypo

SEQ ID NO: 22938 - DNA, 30 bp, Homo sapiens
  chr8:144519817-144519847
  hypo
aagccaaccagttacggatagaacctttat

SEQ ID NO: 22939 - DNA, 233 bp, Homo sapiens
  chr8:144521389-144521622
  hypo
tggccacggctccacgcccctgacgtggaggctgtgaacaggaggcggcccctccgaggcaggcatttgagtgtgctcagcggagctgttgcagaaggctgcagcaagcatcttccattaacgttacgaccgtgaaatatgacaataaaatgatagccgtatggtcgcaaatttgcagcccgccgagctgcgtggggtttatcgtcactcaaacgcgcggagagctgtaaaat

SEQ ID NO: 22940 - DNA, 76 bp, Homo sapiens
  chr8:144521915-144521991
  hypo
cacctggagattctgacgtggtggtctgagggggcatttaaagctcccctgtgcccgagcccggccatgctgccta

SEQ ID NO: 22941 - DNA, 30 bp, Homo sapiens
  chr8:144546272-144546302
  hypo
caggcccgggctgccgcctgtccccgctgg

SEQ ID NO: 22942 - DNA, 30 bp, Homo sapiens
  chr8:144550648-144550678
  hypo
tcctcttctccctgcgctgccgcgcctgcc

SEQ ID NO: 22943 - DNA, 31 bp, Homo sapiens
  chr8:144559266-144559297
  hypo
agccctgcaacccctccgggccttggtccct

SEQ ID NO: 22944 - DNA, 31 bp, Homo sapiens
  chr8:144574934-144574965
  hypo
tccctcctcagggtcccgtgtcctggcccag

SEQ ID NO: 22945 - DNA, 30 bp, Homo sapiens
  chr8:144583895-144583925
  hypo
gggcgctggtgtgacgttgggatcccatgg

SEQ ID NO: 22946 - DNA, 30 bp, Homo sapiens
  chr8:144588450-144588480
  hypo
cgacgtcgggctgacgacgaccacaggacg

SEQ ID NO: 22947 - DNA, 30 bp, Homo sapiens
  chr8:144589671-144589701
  hypo
gtgtgcatgtgtgtccgtccgtcttcacgt

SEQ ID NO: 22948 - DNA, 344 bp, Homo sapiens
  chr8:144589924-144590268
  hypo
gagagccgccgggcccgccaggagggcagagacagggggaagggcggggcgctgagaggcgaggccggcgtcttcttgacaatgcggtagcgggtcttgatcaccttgctggtgggtgcagtccgcacggcatgcaggctggacgctgtagagaaaacccagggcacagacatgggtcagggaaggccggcaagggtagggtcagagaggccacccacagtgccagctctgcccaccgcctccgccggagcttgaagaccctccatcgccccgtggataaaaccctcaacccatgtggcacacacatccccagggcgcctggcagccgacgcttcaggagctag

SEQ ID NO: 22949 - DNA, 31 bp, Homo sapiens
  chr8:144601156-144601187
  hypo
agcaatgcctgcctcccggtgatgcatcccc

SEQ ID NO: 22950 - DNA, 30 bp, Homo sapiens; identical to SEQ ID NO: 6647
  chr8:144640740-144640770
  hypo

SEQ ID NO: 22951 - DNA, 264 bp, Homo sapiens
  chr8:144658239-144658503
  hypo
caccccacctcctgggccagtcgggccagcgcctcctcgtcaatgttgttgctgactacgatgaggactgactccagccagggcacctggaacctgccgcgtgggtggagaaagggtgggggccacccctcgggtcttcctgattcaccctggtgtccccctgctccccgccccgcctcagtcaaggacacctgtgctcaccttctgcttgggagctcctagggagccccaccacttacttccctgccacggcctgcagtatca

SEQ ID NO: 22952 - DNA, 190 bp, Homo sapiens
  chr8:144676037-144676227
  hypo
ggaggacctgccggacgcagcgcaccatctctcctaacagagaccaagtctgagcttcaaagcttgcgcagacgacaggcacgtgcaagcctctcctctccagcaggagagcccggagcaggacacagcgactctttcaactgcgtcccgacaaacggtcagccccttcgctcctgcagtttatccaagc

SEQ ID NO: 22953 - DNA, 89 bp, Homo sapiens
  chr8:144676811-144676900
  hypo
gaggtgggcaggggacggggtcagccaccggctcagcctgtgcacgcccacccctcccagcagcacccctctccggcccacctggctgg

SEQ ID NO: 22954 - DNA, 54 bp, Homo sapiens; identical to SEQ ID NO: 6650
  chr8:144691795-144691849
  hypo

SEQ ID NO: 22955 - DNA, 40 bp, Homo sapiens
  chr8:145158417-145158457
  hypo
ccaagaggactgaccgcgcgccctccgcccccactcaccg

SEQ ID NO: 22956 - DNA, 197 bp, Homo sapiens
  chr8:145161407-145161604
  hypo
tttgtggggcacttggcgcctcacaccacctgtcaccctatactccccagctataacccagacttggactcagatcccttcggggaggatggtagcctctggtccttcaactacttcttctacaacaagcggctcaagcgaatcgtcttctttagctgccgttccatcaggtgggcaccccccgcctcctcccccac

SEQ ID NO: 22957 - DNA, 118 bp, Homo sapiens
  chr8:145223204-145223322
  hypo
ctccaccctgctggacgccatcaccgataaggaccccctggtgcaggagcaggtctgcagtgccctgtgctccctcggggaggcgcggccggtggagacgctccgtgcctgcgaggag

SEQ ID NO: 22958 - DNA, 101 bp, Homo sapiens
  chr8:145223918-145224019
  hypo
gaaccctaggacagacgtggcccggctggctctcacctcccaggatttcggcctcgcctgatcttggttcagtggttctctgtcaccgctgacagcgttag

SEQ ID NO: 22959 - DNA, 30 bp, Homo sapiens
  chr8:145232213-145232243
  hypo
gcctggcgctgccccgtcactggcactgct

SEQ ID NO: 22960 - DNA, 30 bp, Homo sapiens
  chr8:145234253-145234283
  hypo
cagagagatttgtgcggtttcatcttgtag

SEQ ID NO: 22961 - DNA, 112 bp, Homo sapiens
  chr8:145235313-145235425
  hypo
gtcctctctcacagcgttcggcgtagtccccttcctgccatccgtcctgagctccctgctgcccgtgctgggcgtggccaagcaggacacggtgcgcgtggccttctgctcc

SEQ ID NO: 22962 - DNA, 30 bp, Homo sapiens
  chr8:145236061-145236091
  hypo
ccctggtagctggccgggaggagaacagga

SEQ ID NO: 22963 - DNA, 30 bp, Homo sapiens
  chr8:145661366-145661396
  hypo
ctttgctgtggccccgcggtgggccaggcc

SEQ ID NO: 22964 - DNA, 31 bp, Homo sapiens
  chr8:145679657-145679688
  hypo
gacacatggcaagctgcggtcccagcccgtg

SEQ ID NO: 22965 - DNA, 30 bp, Homo sapiens
  chr8:145680954-145680984
  hypo
aggtatgccactccacgtggccagctctaa

SEQ ID NO: 22966 - DNA, 124 bp, Homo sapiens; identical to SEQ ID NO: 6654
  chr8:145697858-145697982
  hypo

SEQ ID NO: 22967 - DNA, 30 bp, Homo sapiens
  chr8:145721981-145722011
  hypo
tcccccagcctcagcggctgcacctcctcg

SEQ ID NO: 22968 - DNA, 30 bp, Homo sapiens
  chr8:145723477-145723507
  hypo
gagtaaagaggagccggcagtgtctggcct

SEQ ID NO: 22969 - DNA, 30 bp, Homo sapiens; identical to SEQ ID NO: 6656
  chr8:145733644-145733674
  hypo

SEQ ID NO: 22970 - DNA, 31 bp, Homo sapiens
  chr8:145736699-145736730
  hypo
cattttggagcctcctcgttcccacaccctg

SEQ ID NO: 22971 - DNA, 766 bp, Homo sapiens
  chr8:145737999-145738765
  hypo
ctccaactgggcagggcgtgcttacctgtgggccagggcctggagctgggcagggcccccagggcagttcagacggcaatgggtataggtggtcgccagcagctccagccagtggtgtgggtgcagctccaggtagcacagcaaagtctcgatggctgggggcagagcagggctcagcggacgcggggacagcccctccacacccctgtggcttaccccaggttcctcaccctcctccggcatgtccaaagcctgtacggtaagctgtattgggagtgcccgctcatggcccatgcagacccttctgggtcctggggctgcttggtggctaagctgctcagcctcttgaggggggtacttgggcacaggcctctccccacccacggccccttcctgctccgagggcggcctggtgcaggtgcaggtgcaggctgggaacacgcgctgtaccagcctcttcacagccaggaagtccgtgctgtcggcgtgcacatgtctgcgcagctctcgcaggtcttcgccctgcagggcaactttcatgagggtggggtggaccactgggggctcgagcactggcagtgtggggggggggggtgccaacctggggctgcaggaagaggtggcagtgggcaggctgcccgtcacgcccggcccggcccacggcctgcacgtagctctcgaagcttgggggcagccccagatgcagcacagcccgcacatctggccggtccagccccatcccaaaggccaccgtggccaccaccac

SEQ ID NO: 22972 - DNA, 158 bp, Homo sapiens
  chr8:145740330-145740488
  hypo
tgagtgacagcaggggagagacgaccaacgtgaggcaggggctgcgccggctgtagagcagcgctgggagctggtagcacagggacttgccggcacctgtaggcagcaccagcagcgtggagatgcctggatggggcgggagtcagcagcagggttct

SEQ ID NO: 22973 - DNA, 31 bp, Homo sapiens
  chr8:145746134-145746165
  hypo
ccgcttcacctgtctgcgtgagctcagcatg

SEQ ID NO: 22974 - DNA, 31 bp, Homo sapiens
  chr8:145753516-145753547
  hypo
aggaggtcctgaagctcgggaggtcctgaac

SEQ ID NO: 22975 - DNA, 128 bp, Homo sapiens
  chr8:145758486-145758614
  hypo
ggcgcccggggttgccgtggcacctgaagatgccctctgtctggtcaccgttgagcgccagcacctcctcagagagccgtgtctgcacccagggcagctggcgctcggggtagcgctctctctgcatg

SEQ ID NO: 22976 - DNA, 58 bp, Homo sapiens
  chr8:145763000-145763058
  hypo
cccccccgcccagaagcggttagagaagagaaggccaggcggccgaggctggagagca

SEQ ID NO: 22977 - DNA, 31 bp, Homo sapiens
  chr8:145811106-145811137
  hypo
cgctggttgtggcagtcggctgtacacacca

SEQ ID NO: 22978 - DNA, 30 bp, Homo sapiens
  chr8:145823586-145823616
  hypo
cgtgggcctttccgcgttgagtgtaaaggg

SEQ ID NO: 22979 - DNA, 19 bp, Homo sapiens
  chr8:145826500-145826519
  hypo
tgtgtgtgcatggaggcgt

SEQ ID NO: 22980 - DNA, 31 bp, Homo sapiens
  chr8:145828363-145828394
  hypo
tacctgtgtgcatgtgcgtggaggtgtgtgt

SEQ ID NO: 22981 - DNA, 35 bp, Homo sapiens
  chr8:145828605-145828640
  hypo
tgtgtgtgcctggaggcgtgcgtgtgtgctcgtgt

SEQ ID NO: 22982 - DNA, 64 bp, Homo sapiens
  chr8:145844222-145844286
  hypo
tggcgtgagcaggaccgcgggcgcacagccaccgtggcgggcacagttgcgcactggtgacagc

SEQ ID NO: 22983 - DNA, 264 bp, Homo sapiens
  chr8:145844672-145844936
  hypo
ggtgccagaggcccctcgctccgagaagcgcgggtccccatccccgctccagggccggcacgcagcatgcatgtgggcctgtgtgtcccagagggagagtgtgtgcccatgtgcgtgtgcgcccgtgtgcgtgagcccgtgtgtccctgagacagcaggtatgctcgtgtgcgcgtgagctcgtgtgtccctgagagaccgtttgtgtgagcctctgtgtccctgagaaagcgtgtgtgcctgtgtgcacgtgagcctgtgtcc

SEQ ID NO: 22984 - DNA, 41 bp, Homo sapiens
  chr8:145845834-145845875
  hypo
tgtgtgtccaagggagcgtgtgtgcccgtgtctgttagcct

SEQ ID NO: 22985 - DNA, 86 bp, Homo sapiens
  chr8:145849123-145849209
  hypo
gcagggcatgaagcaacgtctgggcaaatgtcagaggccgcagcacccaggcaggcctctgtcaaatgcaccgcccagaatcagga

SEQ ID NO: 22986 - DNA, 48 bp, Homo sapiens
  chr8:145854693-145854741
  hypo
gcaggctctagcgggccgaaggcagagcacggccgtgagacctccagg

SEQ ID NO: 22987 - DNA, 132 bp, Homo sapiens; identical to SEQ ID NO: 6661
  chr8:145911309-145911441
  hypo

SEQ ID NO: 22988 - DNA, 30 bp, Homo sapiens
  chr8:146019250-146019280
  hypo
ctaccaagaccctacgtgcagccaggagac

SEQ ID NO: 22989 - DNA, 30 bp, Homo sapiens
  chr8:146033023-146033053
  hypo
cttccggcagagcacgcagctggctgccca

SEQ ID NO: 22990 - DNA, 105 bp, Homo sapiens
  chr8:146046146-146046251
  hypo
catggtctgaaaccctcgtatgaaggaggagcttctcacagcctgctgctgccccagccacaagaaacacaggagcacaggtagggcccacggagtccttgaggc

SEQ ID NO: 22991 - DNA, 37 bp, Homo sapiens; identical to SEQ ID NO: 6662
  chr8:146078070-146078107
  hypo

SEQ ID NO: 22992 - DNA, 85 bp, Homo sapiens
  chr8:146105088-146105173
  hypo
ttgaacctcatacatttgtttcgtttgcagctggctgctactagaaatggttctgattcggtttcaagaactgtatccttggccg

SEQ ID NO: 22993 - DNA, 100 bp, Homo sapiens
  chr8:146176639-146176739
  hypo
tagataacatgttttcgtgagattgtgcatggatcgtttctaatacggaaatgaattgtacacttggacataaagaatacaaataaggctgggtgcggtg

SEQ ID NO: 22994 - DNA, 83 bp, Homo sapiens; identical to SEQ ID NO: 6663
  chr9:113549-113632
  hypo

SEQ ID NO: 22995 - DNA, 243 bp, Homo sapiens; identical to SEQ ID NO: 6664
  chr9:113897-114140
  hypo

SEQ ID NO: 22996 - DNA, 83 bp, Homo sapiens
  chr9:173862-173945
  hypo
tttggccagtgtaccacgtgctcatttaaaaattaaacttatagggaggccaaggcgggcggatcacgaggtcaggagaccga

SEQ ID NO: 22997 - DNA, 23 bp, Homo sapiens
  chr9:174124-174147
  hypo
caacacagcgagactccatctca

SEQ ID NO: 22998 - DNA, 19 bp, Homo sapiens
  chr9:265216-265235
  hypo
ccaccgtgcccggcctaaa

SEQ ID NO: 22999 - DNA, 686 bp, Homo sapiens; identical to SEQ ID NO: 6668
  chr9:504078-504764
  hypo

SEQ ID NO: 23000 - DNA, 81 bp, Homo sapiens; identical to SEQ ID NO: 6669
  chr9:504994-505075
  hypo

SEQ ID NO: 23001 - DNA, 582 bp, Homo sapiens; identical to SEQ ID NO: 6671
  chr9:841449-842031
  hypo

SEQ ID NO: 23002 - DNA, 30 bp, Homo sapiens; identical to SEQ ID NO: 6672
  chr9:842207-842237
  hypo

SEQ ID NO: 23003 - DNA, 137 bp, Homo sapiens; identical to SEQ ID NO: 6673
  chr9:842610-842747
  hypo

SEQ ID NO: 23004 - DNA, 5 bp, Homo sapiens
  chr9:1042615-1042620
  hypo
cggaa

SEQ ID NO: 23005 - DNA, 30 bp, Homo sapiens; identical to SEQ ID NO: 6687
  chr9:1710358-1710388
  hypo

SEQ ID NO: 23006 - DNA, 30 bp, Homo sapiens; identical to SEQ ID NO: 6688
  chr9:1749159-1749189
  hypo

SEQ ID NO: 23007 - DNA, 252 bp, Homo sapiens
  chr9:2047358-2047610
  hypo
gccgcagccggccccggggcagccctcgcccgtcctccagctgcagcagaagcagagccgcatcagccccatccagaaaccgcaaggcctggaccccgtggaaattctgcaagagcgggaatacaggtaacgcaccccgccagcaaggggccccctgcggtgtgctagcacctgccgcccaagccgaggggggtgaggcgcctgcctccttggttggccaaactgtgattttcacccgtgcggtcggaaaac

SEQ ID NO: 23008 - DNA, 71 bp, Homo sapiens
  chr9:2178122-2178193
  hypo
gtatgtggctcttttccatctcgtactctatggtctcatggccacgtcgcggtgtctgttcacttccatga

SEQ ID NO: 23009 - DNA, 30 bp, Homo sapiens
  chr9:2717516-2717546
  hypo
tcaacagctgactgcgttcagaccctgcag

SEQ ID NO: 23010 - DNA, 79 bp, Homo sapiens
  chr9:2718778-2718857
  hypo
accttcagctgctgctcgagtgcttcacgggcgagggccaccaacgcggccagacggtgggcagcgtgggtaaggtggg

SEQ ID NO: 23011 - DNA, 30 bp, Homo sapiens
  chr9:2726655-2726685
  hypo
ctgcattggacttccgtggatgtctcatgt

SEQ ID NO: 23012 - DNA, 228 bp, Homo sapiens
  chr9:2933764-2933992
  hypo
acacactgttcaagggggcagcggttagtaagcaggacgagggggagccccaggccgcagggagaactcgtgacaacgtcacccctgccccagtcgtaggcccgggcccagtgaggacatgaagcccccgcctcaggctgcaaggaggcgccaccagggctgcaagctccacggagctggtgggacctggagacaggcgagaaccccgccccttccaatttggagcaa

SEQ ID NO: 23013 - DNA, 1132 bp, Homo sapiens; identical to SEQ ID NO: 6692
  chr9:4299034-4300166
  hypo

SEQ ID NO: 23014 - DNA, 47 bp, Homo sapiens
  chr9:4714919-4714966
  hypo
atgaaaagactgaattcggccgggtgtggtggctcaagtctgtaatc

SEQ ID NO: 23015 - DNA, 44 bp, Homo sapiens
  chr9:4987436-4987480
  hypo
agagttgcattatttacggctggtcatggtggctcacgcctgta

SEQ ID NO: 23016 - DNA, 100 bp, Homo sapiens; identical to SEQ ID NO: 6694
  chr9:5022027-5022127
  hypo

SEQ ID NO: 23017 - DNA, 249 bp, Homo sapiens; identical to SEQ ID NO: 6695
  chr9:5054639-5054888
  hypo

SEQ ID NO: 23018 - DNA, 30 bp, Homo sapiens; identical to SEQ ID NO: 6696
  chr9:5064973-5065003
  hypo

SEQ ID NO: 23019 - DNA, 129 bp, Homo sapiens; identical to SEQ ID NO: 6697
  chr9:5069923-5070052
  hypo

SEQ ID NO: 23020 - DNA, 30 bp, Homo sapiens; identical to SEQ ID NO: 6698
  chr9:5072525-5072555
  hypo

SEQ ID NO: 23021 - DNA, 63 bp, Homo sapiens; identical to SEQ ID NO: 6699
  chr9:5073736-5073799
  hypo

SEQ ID NO: 23022 - DNA, 30 bp, Homo sapiens; identical to SEQ ID NO: 6700
  chr9:5078415-5078445
  hypo

SEQ ID NO: 23023 - DNA, 153 bp, Homo sapiens; identical to SEQ ID NO: 6701
  chr9:5080227-5080380
  hypo

SEQ ID NO: 23024 - DNA, 100 bp, Homo sapiens; identical to SEQ ID NO: 6702
  chr9:5081711-5081811
  hypo

SEQ ID NO: 23025 - DNA, 30 bp, Homo sapiens; identical to SEQ ID NO: 6703
  chr9:5090773-5090803
  hypo

SEQ ID NO: 23026 - DNA, 30 bp, Homo sapiens
  chr9:5111405-5111435
  hypo
ggacacgcagcccacgaaggtcgggaaggt

SEQ ID NO: 23027 - DNA, 30 bp, Homo sapiens; identical to SEQ ID NO: 6704
  chr9:5123003-5123033
  hypo

SEQ ID NO: 23028 - DNA, 20 bp, Homo sapiens
  chr9:6423646-6423666
  hypo
ttttaaagaaaagtctcggc

SEQ ID NO: 23029 - DNA, 29 bp, Homo sapiens
  chr9:6462993-6463022
  hypo
tgagtgggccaggtgccgtggctcacgcc

SEQ ID NO: 23030 - DNA, 29 bp, Homo sapiens
  chr9:6463261-6463290
  hypo
caagagtgaaacttcgtctcaataaaaaa

SEQ ID NO: 23031 - DNA, 30 bp, Homo sapiens; identical to SEQ ID NO: 6707
  chr9:6587038-6587068
  hypo

SEQ ID NO: 23032 - DNA, 25 bp, Homo sapiens
  chr9:6863517-6863542
  hypo
tgggcaccatggctcacggctgtaa

SEQ ID NO: 23033 - DNA, 54 bp, Homo sapiens
  chr9:6868490-6868544
  hypo
aacctgtggctgctcacgtccctgatataaagtgcgtggtagttacccatgcac

SEQ ID NO: 23034 - DNA, 38 bp, Homo sapiens
  chr9:6868603-6868641
  hypo
tgctatgtaaatagttgttatcccgaattgtttaggga

SEQ ID NO: 23035 - DNA, 101 bp, Homo sapiens
  chr9:7028537-7028638
  hypo
tgcctgaaattgaggtcggaggtggcacaagtacttcctcagctgcctcgactggtgtctcagtaagttgaatgtccagtggctctgagcccagtccagca

SEQ ID NO: 23036 - DNA, 241 bp, Homo sapiens
  chr9:7028697-7028938
  hypo
gcaccccagagtactctagcccgtggtggcaaggcttgctggaactgggatgtgtgatctccctctgacgtggactggttaaatattccctctgtgggcaggcgccaggtcagctcagccaggtttgctttctcttgtaactgggcagcacggaattcagtgcattctcttacaatttctgtgctctcctgtgccatgtgaccgttgccaggggataagggaggggcggcgttggtgattc

SEQ ID NO: 23037 - DNA, 30 bp, Homo sapiens; identical to SEQ ID NO: 6710
  chr9:7076080-7076110
  hypo

SEQ ID NO: 23038 - DNA, 31 bp, Homo sapiens
  chr9:7128644-7128675
  hypo
tttgattaatctgactcgacagtgtatttaa

SEQ ID NO: 23039 - DNA, 35 bp, Homo sapiens
  chr9:7164653-7164688
  hypo
tcctaccggcttcaatcgcacgccatttgtcccct

SEQ ID NO: 23040 - DNA, 233 bp, Homo sapiens
  chr9:7172201-7172434
  hypo
tgtattttaatgacttcggctcacccagacacacgctgactgggggagaaactgttcaaaagagccagcagtccacctcagtgattgtgtggggttcttttccactcacttcagaagcagccccgttaccttttattgtctcacagaataaccatagcaacggtgcataattagctagagctcctggtaaatcggttttattattgtatttgagaggccgacttttgctgttt

SEQ ID NO: 23041 - DNA, 139 bp, Homo sapiens
  chr9:7785324-7785463
  hypo
gccccacacacacacacgcacaccatcccaccaccaccaatcccaacctttcctttgacttcccatatttcttttgaatgtctgggcagttatgcaggccaggagaggggccgtttcatgactacgccaaatatcctat

SEQ ID NO: 23042 - DNA, 31 bp, Homo sapiens
  chr9:10964598-10964629
  hypo
cacggtggacacacagcgtgattacgatttt

SEQ ID NO: 23043 - DNA, 74 bp, Homo sapiens; identical to SEQ ID NO: 6717
  chr9:12776574-12776648
  hypo

SEQ ID NO: 23044 - DNA, 31 bp, Homo sapiens
  chr9:12910323-12910354
  hypo
attaacaaaaaatgtacgtatgctttattta

SEQ ID NO: 23045 - DNA, 472 bp, Homo sapiens; identical to SEQ ID NO: 6719
  chr9:13279298-13279770
  hypo

SEQ ID NO: 23046 - DNA, 1303 bp, Homo sapiens; identical to SEQ ID NO: 6721
  chr9:14313028-14314331
  hypo

SEQ ID NO: 23047 - DNA, 369 bp, Homo sapiens; identical to SEQ ID NO: 6722
  chr9:14315263-14315632
  hypo

SEQ ID NO: 23048 - DNA, 45 bp, Homo sapiens
  chr9:14316249-14316294
  hypo
gtccgttttcaaagagcgctcttaatgaggcgagcttgccaagtt

SEQ ID NO: 23049 - DNA, 846 bp, Homo sapiens; identical to SEQ ID NO: 6723
  chr9:14322292-14323138
  hypo

SEQ ID NO: 23050 - DNA, 31 bp, Homo sapiens
  chr9:14428822-14428853
  hypo
cttcagaaaacagagacgtctggtaagatta

SEQ ID NO: 23051 - DNA, 207 bp, Homo sapiens
  chr9:14607838-14608045
  hypo
aaggttcctaccacagcgattacccaaattattggagactttcaaacgtaaaaaatgtacatgaaaaatcaatgacaaaaattagagcacttcacagcacagtatcgtgcactgactggatcagtattttccacattgtgggtacttttccgtgatgagaatatctgaaatgcttttgaacactgaaaaactcgctaaaagccagac

SEQ ID NO: 23052 - DNA, 226 bp, Homo sapiens; identical to SEQ ID NO: 6726
  chr9:15306719-15306945
  hypo

SEQ ID NO: 23053 - DNA, 100 bp, Homo sapiens; identical to SEQ ID NO: 6727
  chr9:15306998-15307098
  hypo

SEQ ID NO: 23054 - DNA, 64 bp, Homo sapiens
  chr9:15527747-15527811
  hypo
ggggcagtcccagggcgcggtgaagaggtgacggagggctggctatgggcggctggccggggta

SEQ ID NO: 23055 - DNA, 37 bp, Homo sapiens
  chr9:15533121-15533158
  hypo
ccccggccagaaagacgtgtttactacaaacacagcc

SEQ ID NO: 23056 - DNA, 207 bp, Homo sapiens
  chr9:16268703-16268910
  hypo
ggagcctggggcgggtcgtggccctggagttgtgacactgcaaaatggcagtgtcaggagccttccatgggctgcatcaggcagcgccagcctgcaaatcgctcagagtgcttaaaatctggggcacacctggaaggctcgggcctgcacactgactcatataaataactctttattgtgtagctattaagacgagagattgctttt

SEQ ID NO: 23057 - DNA, 34 bp, Homo sapiens
  chr9:16828976-16829010
  hypo
tgtgtgagcaggggggcggcggggtgggctgggc

SEQ ID NO: 23058 - DNA, 30 bp, Homo sapiens; identical to SEQ ID NO: 6731
  chr9:16871091-16871121
  hypo

SEQ ID NO: 23059 - DNA, 37 bp, Homo sapiens
  chr9:16886661-16886698
  hypo
gccaccgcgcctggccgatgatgtcttgtttaaaact

SEQ ID NO: 23060 - DNA, 84 bp, Homo sapiens; identical to SEQ ID NO: 6732
  chr9:17578710-17578794
  hypo

SEQ ID NO: 23061 - DNA, 596 bp, Homo sapiens
  chr9:18776825-18777421
  hypo
aggaaggtctacatacagactcgcaggcagaggaagctgcacttcgtggtggggggcttcgcctacctgctccccaagacggcggtggtgctgcgctgcccggcgcgcagggtccgcaagcccctcatcacctgggagaaggacggccagcacctcatcagctcgacgcacgtcacggtggcccccttcggctatctcaagatccaccgcctcaagccctcggatgcaggcgtctacacctgctcagcgggcccggcccgggagcactttgtgattaagctcatcggaggcaaccgcaagctcgtggcccggcccttgagcccgagaagtgaggaagaggtgcttgcggggaggaagggcggcccgaaggaggccctgcagacccacaaacaccagaacgggatcttctccaacggcagcaaggcggagaagcggggcctggccgccaacccggggagccgctacgacgacctcgtctcccggctgctggagcagggcggctggcccggagagctgctggcctcgtgggaggcgcaggactctgcggaaaggaacacgacctcggaggaggacccgggtgcagagcaagtgctcct

SEQ ID NO: 23062 - DNA, 12 bp, Homo sapiens
  chr9:19111078-19111090
  hypo
ggagtctcgctc

SEQ ID NO: 23063 - DNA, 20 bp, Homo sapiens
  chr9:19111329-19111349
  hypo
gccaccgcacctgggcaatt

SEQ ID NO: 23064 - DNA, 31 bp, Homo sapiens
  chr9:19376712-19376743
  hypo
aaacatcagaaataaacgtaagcttaacagc

SEQ ID NO: 23065 - DNA, 14 bp, Homo sapiens
  chr9:19396542-19396556
  hypo
gcccgatgagaaag

SEQ ID NO: 23066 - DNA, 45 bp, Homo sapiens
  chr9:19431390-19431435
  hypo
ccctctctgacctgtgcgtaattcttaaaccgctgggtacagaga

SEQ ID NO: 23067 - DNA, 21 bp, Homo sapiens
  chr9:20514950-20514971
  hypo
ttttttttttttgagacggag

SEQ ID NO: 23068 - DNA, 933 bp, Homo sapiens; identical to SEQ ID NO: 6737
  chr9:20620433-20621366
  hypo

SEQ ID NO: 23069 - DNA, 632 bp, Homo sapiens; identical to SEQ ID NO: 6738
  chr9:20621626-20622258
  hypo

SEQ ID NO: 23070 - DNA, 220 bp, Homo sapiens; identical to SEQ ID NO: 6739
  chr9:21031578-21031798
  hypo

SEQ ID NO: 23071 - DNA, 30 bp, Homo sapiens; identical to SEQ ID NO: 6746
  chr9:21971105-21971135
  hypo

SEQ ID NO: 23072 - DNA, 901 bp, Homo sapiens; identical to SEQ ID NO: 6752
  chr9:22446808-22447709
  hypo

SEQ ID NO: 23073 - DNA, 226 bp, Homo sapiens
  chr9:27212708-27212934
  hypo
cttgtacctggccattgagtacgcgccccatggaaaccttctggacttccttcgcaagagccgtgtgctggagacggacccagcatttgccattgccaatagcaccgcgtccacactgtcctcccagcagctccttcacttcgctgccgacgtggcccggggcatggactacttgagccaaaaacaggtttgtccggaggacttcgctttggatatctttcctgtg

SEQ ID NO: 23074 - DNA, 168 bp, Homo sapiens
  chr9:27340152-27340320
  hypo
gcccacattactgacacggagggcgtttccacgatggaggggtgcgtgtgtgtgaatgtgtgcacatatgtgcaggctcccaagtgcacatatacatatgtatggctagataaacacacacactcgccacccacggagaatatttattcataccgatacaaaaatcaa

SEQ ID NO: 23075 - DNA, 436 bp, Homo sapiens; identical to SEQ ID NO: 6753
  chr9:27528667-27529103
  hypo

SEQ ID NO: 23076 - DNA, 764 bp, Homo sapiens; identical to SEQ ID NO: 6754
  chr9:27529157-27529921
  hypo

SEQ ID NO: 23077 - DNA, 30 bp, Homo sapiens
  chr9:27610862-27610892
  hypo
agccggctgcggggcgagctgcggacacgg

SEQ ID NO: 23078 - DNA, 30 bp, Homo sapiens; identical to SEQ ID NO: 6755
  chr9:29213127-29213157
  hypo

SEQ ID NO: 23079 - DNA, 104 bp, Homo sapiens; identical to SEQ ID NO: 6756
  chr9:29213408-29213512
  hypo

SEQ ID NO: 23080 - DNA, 45 bp, Homo sapiens
  chr9:32481579-32481624
  hypo
ctttttctttttttttttcctcgaggcagagtctcgctctgatgc

SEQ ID NO: 23081 - DNA, 31 bp, Homo sapiens
  chr9:32547785-32547816
  hypo
acctacaaactttaaacgggtgaactttatg

SEQ ID NO: 23082 - DNA, 31 bp, Homo sapiens
  chr9:32956634-32956665
  hypo
gcatacccccagccctcgtctcagcttggta

SEQ ID NO: 23083 - DNA, 44 bp, Homo sapiens
  chr9:32999673-32999717
  hypo
aataaaaggtaacaaacaggccgggtgcggtggctcacgcctgt

SEQ ID NO: 23084 - DNA, 13 bp, Homo sapiens
  chr9:32999956-32999969
  hypo
aaaatataaaaat

SEQ ID NO: 23085 - DNA, 90 bp, Homo sapiens
  chr9:33077215-33077305
  hypo
aaatgtactgaaaaagaaaagcgctggggcggagcgcggtggctcgcgcctgtactcccagcgcgcgagttcgagaccagcctgggcaac

SEQ ID NO: 23086 - DNA, 30 bp, Homo sapiens
  chr9:33077904-33077934
  hypo
gttgctttcgtttgatgtaattagttgatt

SEQ ID NO: 23087 - DNA, 30 bp, Homo sapiens
  chr9:33078201-33078231
  hypo
accacgccctgtcacgggactttaggtcaa

SEQ ID NO: 23088 - DNA, 210 bp, Homo sapiens
  chr9:33136434-33136644
  hypo
catactctctgcagaccagaccgcctcaaaatgggttccagaaaacatcagacccagcaagatgcttaatggaaaaacatgtctcgtggtcaaataagaacgggaatgctgcgtattaaatcctgcttctgcaaagtcacgacacacaccaaaggctctgagaagttgtgcagtcgaaaaacccccttcgttatatttaacccaccattt

SEQ ID NO: 23089 - DNA, 79 bp, Homo sapiens
  chr9:33442562-33442641
  hypo
ctgacccctccttccatcccccgtcttccctctagctcttaaactcttgtcagcgcccgcccatgctcttctcctgaaa

SEQ ID NO: 23090 - DNA, 86 bp, Homo sapiens
  chr9:33464280-33464366
  hypo
cccaccaagtggcaaaggtgacgaaagggacatcgcatttgcctcaactgggtggggcattaatcgcccaacctcagcccagaggc

SEQ ID NO: 23091 - DNA, 33 bp, Homo sapiens
  chr9:33834157-33834190
  hypo
tgtttaggtgtagtgacggattcttggagcttc

SEQ ID NO: 23092 - DNA, 30 bp, Homo sapiens
  chr9:34017624-34017654
  hypo
ttaaagaaacaattgtgtggccgggtgcgg

SEQ ID NO: 23093 - DNA, 40 bp, Homo sapiens
  chr9:34050560-34050600
  hypo
atctgaattaaagaatgctgccgggcgtggtggctcacac

SEQ ID NO: 23094 - DNA, 22 bp, Homo sapiens
  chr9:34062521-34062543
  hypo
aacatgggccgggcgcggtggc

SEQ ID NO: 23095 - DNA, 167 bp, Homo sapiens
  chr9:34224347-34224514
  hypo
ttgttatggaccagctcgttattaaacgcattgtagacaacatcgatgatccttgttttgcaaatacaacgctgagccccaggagaaattccctacatgcagccttagggcacggtatttcttgttacctcctcaaacatggactgtgtggacgtggcaggggccaa

SEQ ID NO: 23096 - DNA, 36 bp, Homo sapiens
  chr9:34276111-34276147
  hypo
ataatgaggctgggcacggtggctcacgcctataat

SEQ ID NO: 23097 - DNA, 22 bp, Homo sapiens
  chr9:34316316-34316338
  hypo
aatagagcgagactctattaaa

SEQ ID NO: 23098 - DNA, 214 bp, Homo sapiens
  chr9:34318352-34318566
  hypo
acctagccctgacaggtccatcgtggtgcacgcaaaccacctcccagccacgcgctccctcctgctcctcagcgccttctgcctcctggcggtggccttggcgaccgaggtgaagaaacctgcagccacagcagctcctggcaccgcagagaagctgagccccaaggcagccacgctggccgaacacagcgccggcctggccttcagcctgtac

SEQ ID NO: 23099 - DNA, 695 bp, Homo sapiens
  chr9:34372214-34372909
  hypo
ctgagtcattgactttgatggcggccgcgcgcgaagatagccagtagcgctcgaggatgcccccaaacgcggcgtcggaggagtagacatcgctggtgacgaacggctggggctcctgctggccatccaggcggatgggccagtgttgcgtcctcatctcggcgccaccataccagtgggccgccgcgtcgcccaagaacatggcgtgctccacggcccggcccggcgctgcctcctcccagcgcacgcggtagcacatgaccgtgtccttgggccgcacagtctggatgaagaagtgcagcggcagcccgtcggccgtgagcgagcagcccagcagggcgccatcgcggctgcaggagtcaaggtccagcgcgccggagcggaaggccaggcggaagacctgctctcccttctgattgcggatggagaagccgccagctttcaggtccagcagctccgcgcgaagtcgctccgccttgcgtagggagacgctgtagtagcaccaggccaccaccgcggccagcacaagcagcagccccagaaccgcggagcccagcagcggcttcaggtctttggaaggcttgggcttggcaggtgagaagttgtcgggcaggaaggtgtacatagctgcggctgcgatggcctcggggttctgacgctatgcgtagcagccaggccggcggcggcgggggtag

SEQ ID NO: 23100 - DNA, 31 bp, Homo sapiens
  chr9:34583938-34583969
  hypo
ctggagagaggggctacgcaaagacctggga

SEQ ID NO: 23101 - DNA, 42 bp, Homo sapiens; identical to SEQ ID NO: 6765
  chr9:34646960-34647002
  hypo

SEQ ID NO: 23102 - DNA, 171 bp, Homo sapiens
  chr9:34971470-34971641
  hypo
aggaagcagaagcaggaacctcggtggtccaggaagagagtagtgccggccgcgcagcctgggagcggctccgagatgggcgcggcgtggagcctgaggagtttgacaggacaagtcgattcacaccccctgcgttcatccgccccacccggaagctggatgatgacaaac

SEQ ID NO: 23103 - DNA, 34 bp, Homo sapiens; identical to SEQ ID NO: 6768
  chr9:35072283-35072317
  hypo

SEQ ID NO: 23104 - DNA, 591 bp, Homo sapiens; identical to SEQ ID NO: 6771
  chr9:35161831-35162422
  hypo

SEQ ID NO: 23105 - DNA, 30 bp, Homo sapiens
  chr9:35563519-35563549
  hypo
tctgcctgggctttcgatccttcctctgct

SEQ ID NO: 23106 - DNA, 74 bp, Homo sapiens
  chr9:35608229-35608303
  hypo
ccatccactgctgcaacgtaagagcctcacactccttcctgccccaccctgcccccatccgtaagctgccatgg

SEQ ID NO: 23107 - DNA, 105 bp, Homo sapiens
  chr9:35609215-35609320
  hypo
caggtcctggccctcccgctgtgggcccctcggctgaagagaagatggagtgcgagggcagcagccctgagccggaacctccagggccagcgccccagctgcctc

SEQ ID NO: 23108 - DNA, 31 bp, Homo sapiens
  chr9:35694371-35694402
  hypo
tgtaacaccgtgcattcgtcatatggaaaat

SEQ ID NO: 23109 - DNA, 31 bp, Homo sapiens; identical to SEQ ID NO: 6775
  chr9:35700411-35700442
  hypo

SEQ ID NO: 23110 - DNA, 30 bp, Homo sapiens
  chr9:35711673-35711703
  hypo
tcctgaggggttccccgagaggcctgcacc

SEQ ID NO: 23111 - DNA, 298 bp, Homo sapiens
  chr9:35711910-35712208
  hypo
aagtcagggtcaaaggacaaccgagagggaggaaggagaggcctggcattctttgactcctacgttcccccaccccctaccgtcctcctaccgagtcactcaggagtcgcttgctggcatctccaactgccctcagggcattatccacatcgcgctggccaggtaggcagctgacacagcggttcagagcctgggtcactgctttagccacctggggtgagaaaggagacagggttgcccaagtgaaaagaatttgagagatcgcctccattcacgcgacatgggagatgactagctc

SEQ ID NO: 23112 - DNA, 30 bp, Homo sapiens
  chr9:35713223-35713253
  hypo
tcccagtagctgggcgatggctgagctcac

SEQ ID NO: 23113 - DNA, 30 bp, Homo sapiens
  chr9:35792942-35792972
  hypo
cactacttcaccatcgagggcgtctttgag

SEQ ID NO: 23114 - DNA, 30 bp, Homo sapiens
  chr9:35810229-35810259
  hypo
tcaccctcacacaccggcagctgtggtgcc

SEQ ID NO: 23115 - DNA, 77 bp, Homo sapiens; identical to SEQ ID NO: 6778
  chr9:35814745-35814822
  hypo

SEQ ID NO: 23116 - DNA, 30 bp, Homo sapiens
  chr9:36035973-36036003
  hypo
ctatacttctcagccggatattcaaggctt

SEQ ID NO: 23117 - DNA, 31 bp, Homo sapiens; identical to SEQ ID NO: 6782
  chr9:36257375-36257406
  hypo

SEQ ID NO: 23118 - DNA, 722 bp, Homo sapiens; identical to SEQ ID NO: 6783
  chr9:36257923-36258645
  hypo

SEQ ID NO: 23119 - DNA, 30 bp, Homo sapiens
  chr9:36483383-36483413
  hypo
aaaaaaaaagaaaagcgtacctgggcaatg

SEQ ID NO: 23120 - DNA, 31 bp, Homo sapiens
  chr9:36880260-36880291
  hypo
gtgtggacacccagcccgcacatccaagctc

SEQ ID NO: 23121 - DNA, 944 bp, Homo sapiens; identical to SEQ ID NO: 6788
  chr9:37025407-37026351
  hypo

SEQ ID NO: 23122 - DNA, 838 bp, Homo sapiens; identical to SEQ ID NO: 6789
  chr9:37026433-37027271
  hypo

SEQ ID NO: 23123 - DNA, 772 bp, Homo sapiens; identical to SEQ ID NO: 6790
  chr9:37027324-37028096
  hypo

SEQ ID NO: 23124 - DNA, 434 bp, Homo sapiens; identical to SEQ ID NO: 6794
  chr9:37035489-37035923
  hypo

SEQ ID NO: 23125 - DNA, 736 bp, Homo sapiens; identical to SEQ ID NO: 6795
  chr9:37036401-37037137
  hypo

SEQ ID NO: 23126 - DNA, 121 bp, Homo sapiens
  chr9:37118378-37118499
  hypo
actgcagcctagacctccgcagttcaaacctcagccaggaacagctgggactccaggtgtgggccaccacgccctgttattattattatttttttgacacggagtttctctcttgctgccc

SEQ ID NO: 23127 - DNA, 82 bp, Homo sapiens
  chr9:37118798-37118880
  hypo
cgtcttgctatattaccccggctggtttcgaattctcggccttaagctatcctcccacttcgggctcccaaacaggtgagag

SEQ ID NO: 23128 - DNA, 37 bp, Homo sapiens
  chr9:37119168-37119205
  hypo
tttttcctttaaaaattcactcgtggccgggcgcggt

SEQ ID NO: 23129 - DNA, 29 bp, Homo sapiens
  chr9:37119444-37119473
  hypo
gaaactccgtctcaggaaaaaaaaaaaaa

SEQ ID NO: 23130 - DNA, 28 bp, Homo sapiens
  chr9:37216375-37216403
  hypo
catatgtttatcttggccatacgcggtg

SEQ ID NO: 23131 - DNA, 24 bp, Homo sapiens
  chr9:37227010-37227034
  hypo
gcgagactccgtctcaaaaaaaaa

SEQ ID NO: 23132 - DNA, 397 bp, Homo sapiens
  chr9:37414523-37414920
  hypo
tctgggctggccaaggggtcccgactgggctctctgctaccctctgtggccagctgctcatgtctcttgtacgagagcatcagcttccagcagtcagacaaaagcccaggcagggccggggtgaaagccacactgcgccttgcctgctgcgcgtcatcggaaaatgttcgccccatctgggcttcagtttccatatctgtataatgggcttccagcatgtgccctgccccacccctcaccaagcacagaccagaggcagggccccctcagagaggagacagtcagtcagatgatctctattcaaacccagttctgctccttaccagctgtgtgaccgtgggcaagtccctccactgacctgagcctcagtttcttcgtctgtaacttggggttccta

SEQ ID NO: 23133 - DNA, 30 bp, Homo sapiens
  chr9:37428904-37428934
  hypo
cctactccggcttgcgttctggaaggtatg

SEQ ID NO: 23134 - DNA, 100 bp, Homo sapiens
  chr9:37432302-37432402
  hypo
aggagcagtcctcttgcgcatgctctgctgggtctctgtccctaaaggaacagaatgtaggtgtgagtggatttgtttaaaaaaaaagagtgggccaggc

SEQ ID NO: 23135 - DNA, 3 bp, Homo sapiens
  chr9:37467933-37467936
  hypo
aaa

SEQ ID NO: 23136 - DNA, 36 bp, Homo sapiens
  chr9:37778483-37778519
  hypo
ccagactcttgtctcgaggggaaaaaaaaaaaaaat

SEQ ID NO: 23137 - DNA, 83 bp, Homo sapiens
  chr9:37871178-37871261
  hypo
ccagctattggggaaggtggggggaggggcaggcagtgaggtgggcgggtcacctgagcccaggaggtcgaggcagccttgat

SEQ ID NO: 23138 - DNA, 30 bp, Homo sapiens
  chr9:37914846-37914876
  hypo
tgctgtcatcatggcgatggtggcaggcaa

SEQ ID NO: 23139 - DNA, 174 bp, Homo sapiens
  chr9:37935360-37935534
  hypo
gcctcggtggggcatacgcctttagtgccaggaggaaatgacgggcacacggcttgctctctggcagactgggaagtggtggggagttgttgaagggatggagggctgggatgtagagcactgctatggccacaggtgagcccctcatctctctgagcccgtctccttcagcgt

SEQ ID NO: 23140 - DNA, 31 bp, Homo sapiens
  chr9:37948877-37948908
  hypo
atgggtacccactgcccgcctgctgctgccg

SEQ ID NO: 23141 - DNA, 31 bp, Homo sapiens
  chr9:37973846-37973877
  hypo
cagggctagctcagctcgcagcactgggtgg

SEQ ID NO: 23142 - DNA, 31 bp, Homo sapiens
  chr9:37985468-37985499
  hypo
tgactgcctttgcgtgcggaggcctctaagc

SEQ ID NO: 23143 - DNA, 31 bp, Homo sapiens
  chr9:37985848-37985879
  hypo
agtgagcgcctgcctgcgccaggcactgtcc

SEQ ID NO: 23144 - DNA, 1235 bp, Homo sapiens; identical to SEQ ID NO: 6798
  chr9:38067638-38068873
  hypo

SEQ ID NO: 23145 - DNA, 31 bp, Homo sapiens
  chr9:38131871-38131902
  hypo
aatggagcacttgtctcgcgccaggccctgt

SEQ ID NO: 23146 - DNA, 30 bp, Homo sapiens; identical to SEQ ID NO: 6803
  chr9:68433449-68433479
  hypo

SEQ ID NO: 23147 - DNA, 43 bp, Homo sapiens
  chr9:71454999-71455042
  hypo
aagtatttcacggcccggcacagtggcacatgcctgtaatccc

SEQ ID NO: 23148 - DNA, 29 bp, Homo sapiens
  chr9:71608064-71608093
  hypo
cagactccgtctccaaaaaaaaaaaagtc

SEQ ID NO: 23149 - DNA, 30 bp, Homo sapiens
  chr9:71760329-71760359
  hypo
tgtacattagatcgccgtgtttaaaaccgc

SEQ ID NO: 23150 - DNA, 645 bp, Homo sapiens; identical to SEQ ID NO: 6807
  chr9:71788615-71789260
  hypo

SEQ ID NO: 23151 - DNA, 31 bp, Homo sapiens
  chr9:71884367-71884398
  hypo
atctattccaattacacgtttccaaaatggg

SEQ ID NO: 23152 - DNA, 31 bp, Homo sapiens; identical to SEQ ID NO: 6811
  chr9:72374873-72374904
  hypo

SEQ ID NO: 23153 - DNA, 1378 bp, Homo sapiens; identical to SEQ ID NO: 6812
  chr9:73027516-73028894
  hypo

SEQ ID NO: 23154 - DNA, 266 bp, Homo sapiens; identical to SEQ ID NO: 6813
  chr9:74061492-74061758
  hypo

SEQ ID NO: 23155 - DNA, 330 bp, Homo sapiens; identical to SEQ ID NO: 6814
  chr9:74061787-74062117
  hypo

SEQ ID NO: 23156 - DNA, 31 bp, Homo sapiens
  chr9:74622982-74623013
  hypo
gcagcgtgtatttccgcgtgaagcaccggga

SEQ ID NO: 23157 - DNA, 214 bp, Homo sapiens
  chr9:74853848-74854062
  hypo
taactgatcaaaggtccgcaaagcaaaaagttccatgcgcacagtttaaaaccaggtctgtaaaatgtagatattcgtgatttctctttctatcctaccacagtgcctctagccatatgacaaagtagggattccacctacattaaatgtgttgtagatggaaggggaaaactacaaagctaatccagtcgggaagaatcggcaagttactgtc

SEQ ID NO: 23158 - DNA, 27 bp, Homo sapiens
  chr9:75095638-75095665
  hypo
gagggagggctgcgagggctgccagca

SEQ ID NO: 23159 - DNA, 21 bp, Homo sapiens
  chr9:75118600-75118621
  hypo
agactccgtctcaaaaaaaaa

SEQ ID NO: 23160 - DNA, 31 bp, Homo sapiens
  chr9:75130857-75130888
  hypo
atgattttcaaatgtacgttttatgtctaca

SEQ ID NO: 23161 - DNA, 31 bp, Homo sapiens
  chr9:75160821-75160852
  hypo
ggctttcaaatgtcatcgctcaaaaaagttc

SEQ ID NO: 23162 - DNA, 77 bp, Homo sapiens
  chr9:75715151-75715228
  hypo
gtgtcttgtgcatctactgtgcgtctgactctaacctagaggctgctgagtaaaaagtgtggttgtaggaaactgaa

SEQ ID NO: 23163 - DNA, 16 bp, Homo sapiens
  chr9:75715287-75715303
  hypo
taggtgtggatgcagg

SEQ ID NO: 23164 - DNA, 275 bp, Homo sapiens
  chr9:76089531-76089806
  hypo
ggtgagaaagccctcagggggcgcatcagcgactgctgcatacctctcgtacagggtccaccctccggccacatcccctgtggaccagcacctccgcaggaagcgctctagggcagggttgcccacagactggatcttgctgcggtcgagacggacctgggcttccgggcgcccatcggagcctgcggtgggagtgatggtaccgagtccctcgccagcctctggtaagactctcaggatcacaatccgggcccgtatatgggcctgctgccagt

SEQ ID NO: 23165 - DNA, 640 bp, Homo sapiens; identical to SEQ ID NO: 6819
  chr9:77112700-77113340
  hypo

SEQ ID NO: 23166 - DNA, 150 bp, Homo sapiens; identical to SEQ ID NO: 6820
  chr9:77113558-77113708
  hypo

SEQ ID NO: 23167 - DNA, 481 bp, Homo sapiens; identical to SEQ ID NO: 6821
  chr9:77113805-77114286
  hypo

SEQ ID NO: 23168 - DNA, 31 bp, Homo sapiens
  chr9:77648110-77648141
  hypo
ctttggctcaggagaccgccccacaaaatat

SEQ ID NO: 23169 - DNA, 136 bp, Homo sapiens
  chr9:78686690-78686826
  hypo
agttagcttcaacccccagcacgtgcacatttacagcgccagctggggcccggatgatgatggcaagactgtggacggaccagcccccctcacccggcaagcctttgaaaacggcgttagaatggtaggttttaaa

SEQ ID NO: 23170 - DNA, 42 bp, Homo sapiens
  chr9:78775007-78775049
  hypo
attacaggcatgagccaccgcgcccagctgactcttcagtct

SEQ ID NO: 23171 - DNA, 40 bp, Homo sapiens
  chr9:78866883-78866923
  hypo
ttataaaaagataaaagaggccgggcgtggtggctcacac

SEQ ID NO: 23172 - DNA, 37 bp, Homo sapiens
  chr9:79448381-79448418
  hypo
ttataaaaaccaaatacaggccgggcgtggtggctca

SEQ ID NO: 23173 - DNA, 552 bp, Homo sapiens; identical to SEQ ID NO: 6827
  chr9:79520866-79521418
  hypo

SEQ ID NO: 23174 - DNA, 1641 bp, Homo sapiens; identical to SEQ ID NO: 6832
  chr9:79630723-79632364
  hypo

SEQ ID NO: 23175 - DNA, 747 bp, Homo sapiens; identical to SEQ ID NO: 6833
  chr9:79633305-79634052
  hypo

SEQ ID NO: 23176 - DNA, 31 bp, Homo sapiens
  chr9:80015335-80015366
  hypo
ctgtttatttgcttatcgttttgccattcag

SEQ ID NO: 23177 - DNA, 91 bp, Homo sapiens
  chr9:80116553-80116644
  hypo
ttgtagcttgtctttccgtccttttgatataatcttaaagttgactttttctttgttgttcagattggataatttcttttttttttttttt

SEQ ID NO: 23178 - DNA, 31 bp, Homo sapiens
  chr9:80137053-80137084
  hypo
ttataaacaaagcctacgctttcaacctgtt

SEQ ID NO: 23179 - DNA, 17 bp, Homo sapiens
  chr9:80193189-80193206
  hypo
caaacaaaacaaaaaca

SEQ ID NO: 23180 - DNA, 22 bp, Homo sapiens
  chr9:80215543-80215565
  hypo
cagattagggccggacgcagtg

SEQ ID NO: 23181 - DNA, 31 bp, Homo sapiens
  chr9:80272559-80272590
  hypo
gtttttttttttgagacggagtctcgctctg

SEQ ID NO: 23182 - DNA, 31 bp, Homo sapiens
  chr9:80272888-80272919
  hypo
catgattccactgtaccgtgggagaagaagg

SEQ ID NO: 23183 - DNA, 38 bp, Homo sapiens
  chr9:80304149-80304187
  hypo
ctgggattacaggtgtgagctaccgtgccagccctata

SEQ ID NO: 23184 - DNA, 35 bp, Homo sapiens
  chr9:80315385-80315420
  hypo
cgtgagccaccatgcccggccgattttctgtctag

SEQ ID NO: 23185 - DNA, 42 bp, Homo sapiens
  chr9:80343171-80343213
  hypo
gtgctgggattacaggcgctcgccactgtgcccagccatgag

SEQ ID NO: 23186 - DNA, 43 bp, Homo sapiens
  chr9:80390583-80390626
  hypo
gattacaggcatgagccaccacgcccagcctcctcatctctct

SEQ ID NO: 23187 - DNA, 31 bp, Homo sapiens
  chr9:80475685-80475716
  hypo
atttccctggctcttccgtggaggttgcctc

SEQ ID NO: 23188 - DNA, 90 bp, Homo sapiens
  chr9:80533773-80533863
  hypo
atttgaataatcatttcgacaagtttagggcagacgaggagactctcaattgttaagctcacaaataattttttttgtttgagatggagt

SEQ ID NO: 23189 - DNA, 30 bp, Homo sapiens
  chr9:80534762-80534792
  hypo
agaattgacatgaggccgggagaggtggct

SEQ ID NO: 23190 - DNA, 31 bp, Homo sapiens
  chr9:80546151-80546182
  hypo
acacaaccagcaggtccgcatttccatccct

SEQ ID NO: 23191 - DNA, 16 bp, Homo sapiens
  chr9:80555591-80555607
  hypo
tttgcaagtcggctgc

SEQ ID NO: 23192 - DNA, 31 bp, Homo sapiens
  chr9:80570420-80570451
  hypo
cactttttgtacataacgctatactttgtgt

SEQ ID NO: 23193 - DNA, 21 bp, Homo sapiens
  chr9:80582605-80582626
  hypo
ttcaggtctgctgggcgcggt

SEQ ID NO: 23194 - DNA, 30 bp, Homo sapiens
  chr9:80607204-80607234
  hypo
aactaccttaatttccgtaacagaaaagtt

SEQ ID NO: 23195 - DNA, 1870 bp, Homo sapiens; identical to SEQ ID NO: 6841
  chr9:80645774-80647644
  hypo

SEQ ID NO: 23196 - DNA, 236 bp, Homo sapiens
  chr9:80833877-80834113
  hypo
ctgattgcttcatctgctatgcgtctgtggggatccgcaaagatatgggatccagttagtctctggtgagtcgttaccttggccggatggggacatgttgcctgctgcacccccctcttcgcgctctctcatttcatttcctgcagtgtgccagcaggatggcccacaagccatctactactcggacaagtacttcgacgagcactacaagtaccggcatgttatgttacccagag

SEQ ID NO: 23197 - DNA, 366 bp, Homo sapiens
  chr9:81892876-81893242
  hypo
tttgtaattgttcttcgaaggccgcgggcgagaaagctgttctaattgtacaaatcactgcacagctgaatcacaggcgcagtcccaagtaatctgtgcaaccatttgactgaactttcgcactagctgggggcgctccccggagtctcctgaggccagcgtctgacaatggacataaagcagccgccaaatgagatgcgggaacagttgtatgtcaagcggcagtgattcaattccgggccgtcagaacgcaggcagcccccggccgcggcgtgattggcagtgtgctgatgcaggctcccaaacctcgacctacccatcttgttaaaatggggccccggatgcggtttggcataatgaaaatgg

SEQ ID NO: 23198 - DNA, 178 bp, Homo sapiens; identical to SEQ ID NO: 6843
  chr9:82185550-82185728
  hypo

SEQ ID NO: 23199 - DNA, 30 bp, Homo sapiens; identical to SEQ ID NO: 6844
  chr9:82839233-82839263
  hypo

SEQ ID NO: 23200 - DNA, 632 bp, Homo sapiens; identical to SEQ ID NO: 6845
  chr9:84302533-84303165
  hypo

SEQ ID NO: 23201 - DNA, 213 bp, Homo sapiens; identical to SEQ ID NO: 6846
  chr9:84303267-84303480
  hypo

SEQ ID NO: 23202 - DNA, 31 bp, Homo sapiens
  chr9:84460617-84460648
  hypo
taccggcgtgagccaccgtgagatgtttcaa

SEQ ID NO: 23203 - DNA, 170 bp, Homo sapiens
  chr9:84530342-84530512
  hypo
gcatcatgataccacccgctttcatcgactgttatgcccagaccccgtctgtcaggtgtgtaacagagcaactgctgatatccagcgactgctgtcttgggagtccctgaaagatgctgttccctttgtgtcccctttggcttcttcagcttctgcgactgagtcatcat

SEQ ID NO: 23204 - DNA, 31 bp, Homo sapiens; identical to SEQ ID NO: 6848
  chr9:85834937-85834968
  hypo

SEQ ID NO: 23205 - DNA, 105 bp, Homo sapiens
  chr9:85843822-85843927
  hypo
gctgggagctgtagaccggagctgttcctattcggccatcttcatttcctcgctatttctaacgcatctgcagtgcttgtccccgctgaagtcttgaactcaaag

SEQ ID NO: 23206 - DNA, 31 bp, Homo sapiens
  chr9:85944983-85945014
  hypo
aagaacagaggactggcgaggcatggtggct

SEQ ID NO: 23207 - DNA, 91 bp, Homo sapiens; identical to SEQ ID NO: 6850
  chr9:86238305-86238396
  hypo

SEQ ID NO: 23208 - DNA, 34 bp, Homo sapiens
  chr9:86600600-86600634
  hypo
tgaaaggagttttgccacttgcggtgttcagtag

SEQ ID NO: 23209 - DNA, 31 bp, Homo sapiens
  chr9:86691067-86691098
  hypo
ctaaaatttcttggcacgctttgccactggg

SEQ ID NO: 23210 - DNA, 25 bp, Homo sapiens
  chr9:86964436-86964461
  hypo
ccaccacgtccggcttacttgtttt

SEQ ID NO: 23211 - DNA, 29 bp, Homo sapiens
  chr9:88232863-88232892
  hypo
taaatttctagctgggcgcactggctcac

SEQ ID NO: 23212 - DNA, 27 bp, Homo sapiens
  chr9:88656737-88656764
  hypo
aaaacttgaactggggccaggcgcagt

SEQ ID NO: 23213 - DNA, 26 bp, Homo sapiens
  chr9:88657063-88657089
  hypo
cactcggttgaattgctattgcattg

SEQ ID NO: 23214 - DNA, 22 bp, Homo sapiens
  chr9:88680656-88680678
  hypo
ttaaatatgttcatgtcgggct

SEQ ID NO: 23215 - DNA, 349 bp, Homo sapiens
  chr9:88694096-88694445
  hypo
aacaaaacacctggaggtccacgctccgggagctcgcaatccagtagttgaagcccaagacgatgatgcaggccaccagggcggccagcacgaggggcggcgacttcatgctgcgacgcccgtttcccaagcccatcatctcaaaatcagcgctgagaatctgccaagtaaaagcaaataaataaacatcaatactagttttatcatctccgaagcagaccgtatcatccttacaaccaagaggaaaggagtcttgccaagaagcgtgggctggtagcttctccttgacgtgcaaagctgtcaagggagaagagtatgtgaacggcacgcacagagcccatggtgctgt

SEQ ID NO: 23216 - DNA, 34 bp, Homo sapiens
  chr9:89301325-89301359
  hypo
aaaacaagactgggggctgggcgcggtggctcat

SEQ ID NO: 23217 - DNA, 145 bp, Homo sapiens; identical to SEQ ID NO: 6861
  chr9:89560563-89560708
  hypo

SEQ ID NO: 23218 - DNA, 1047 bp, Homo sapiens; identical to SEQ ID NO: 6862
  chr9:89560739-89561786
  hypo

SEQ ID NO: 23219 - DNA, 406 bp, Homo sapiens
  chr9:89699971-89700377
  hypo
ttccagatttcttccatgacccgaagccagaaggactttaggctttgctgggcatcactgcggctagtaccaccaaatcctccttctgtggacatttcgacaaacgcctcttcagggagtccaggaagagcaggagccgccctggcgctcctgcggagtcgggcactgcataggctcaggcaccgcggaggtgaggggggaagcgggagtctcggagaacgcagcacgcgcgaagctggcgcataaacgagatggcggccacgccgtttgcacggtctccccttttcccctccccctcccctggcgccccgactcctataattaatttcatgtaagaggtattctgagagcgtagttatatcaaaaacttacctgcgttatttgcgtgtgtgtgtgaaaaatgaag

SEQ ID NO: 23220 - DNA, 1254 bp, Homo sapiens; identical to SEQ ID NO: 6863
  chr9:90112493-90113747
  hypo

SEQ ID NO: 23221 - DNA, 30 bp, Homo sapiens; identical to SEQ ID NO: 6865
  chr9:90282276-90282306
  hypo

SEQ ID NO: 23222 - DNA, 150 bp, Homo sapiens
  chr9:90346010-90346160
  hypo
cccactgtgtgagctggtggacggtgatgaggaaggacttgactggggatggcgcatgcatgggaggaattcatcttcagtctaccagcccccgctgtgtcggatacacactcgaatcattgaagatccgagtgtgatttgaattctgtg

SEQ ID NO: 23223 - DNA, 35 bp, Homo sapiens
  chr9:90482723-90482758
  hypo
taaacttaaaacactgaatttcggccaggcgtggt

SEQ ID NO: 23224 - DNA, 35 bp, Homo sapiens
  chr9:90482817-90482852
  hypo
ccaagctttggtccgtagagcaattatcccaggca

SEQ ID NO: 23225 - DNA, 22 bp, Homo sapiens
  chr9:90620673-90620695
  hypo
ttcctcaaaagacatttcagcc

SEQ ID NO: 23226 - DNA, 160 bp, Homo sapiens
  chr9:91119033-91119193
  hypo
cacccattctcttgttcggaaagtcaccaccccagctgacaaagtcattgcagtgggagactcgaaagctggaccctgtgagcaacagggcagctgaagaacccacactctgtgcaagcaaagcactagcgagatagcgcagccacggggatgccaggac

SEQ ID NO: 23227 - DNA, 87 bp, Homo sapiens
  chr9:91614961-91615048
  hypo
gtgagtccactgaaagcggtttctaccttgatagttgggtgtgtggcgtcatcaacatcacagaaggctgatcgatattaccaggtg

SEQ ID NO: 23228 - DNA, 42 bp, Homo sapiens
  chr9:91616971-91617013
  hypo
tggctgtgctcaactccgccatgaacccggtcatctacacgc

SEQ ID NO: 23229 - DNA, 42 bp, Homo sapiens
  chr9:91663872-91663914
  hypo
tctgctttagaaatgatatgccggccgggcacggtgatttac

SEQ ID NO: 23230 - DNA, 236 bp, Homo sapiens
  chr9:91996050-91996286
  hypo
atgggggacatccccaggcagcgcatcccgccccatacctgctggggctctcggtctggtgcagagccacgcaggtcgctgtgggcgggctccaggcgcagtaggggtcccgcgccagcacacagtcctcgcaggtgccgtgcttcccacagaaggccagcggggcctggaccacgcccgagttagagccagcatagacaaacctgttgccctgcgtgtatgagacagagaagaac

SEQ ID NO: 23231 - DNA, 135 bp, Homo sapiens
  chr9:91997067-91997202
  hypo
gggctgctgactgcttttgaacggaactcagctggaaggagggtgccccacatgcagtgcacccacctgaagctcgggggcgtgcaacagacctggaggtggcccgtggagcgcgctctctagcctctgcccagg

SEQ ID NO: 23232 - DNA, 243 bp, Homo sapiens
  chr9:91997530-91997773
  hypo
ggccatgtgtgagccacgtttgtgggaaggattgaggatgacatcccagatcacagttcgggcatcgcgcggcttgtggaggtggcggaaacattctctggcagcaaagccaagctgggtaacttccaagggacagctggtcctgttgggtcccgcggggggcacctgcgaggtggcgtgaacaccatgcagtgcagagcagggtgccctgggtggccaagtggggcccgcctgactcctcac

SEQ ID NO: 23233 - DNA, 30 bp, Homo sapiens
  chr9:92005548-92005578
  hypo
atggctacctgctccgagatgagctcctgg

SEQ ID NO: 23234 - DNA, 44 bp, Homo sapiens
  chr9:92049380-92049424
  hypo
tcctgttactgtctttcgtcagtttaattcgcaggccctagaaa

SEQ ID NO: 23235 - DNA, 135 bp, Homo sapiens
  chr9:92053456-92053591
  hypo
ttatgaagcactttattctgtcgttcctgagacaaacaacatttctagtgttagggatatttgaggcaaaaaatcgaagtattctttatgttctttgactagaatcaaatacaatgtatgttttttcttttcttt

SEQ ID NO: 23236 - DNA, 21 bp, Homo sapiens
  chr9:92054190-92054211
  hypo
ggcacaatgtatgtattttaa

SEQ ID NO: 23237 - DNA, 82 bp, Homo sapiens
  chr9:92140640-92140722
  hypo
gtggtggacaaacaggcgccttcccatttgtccaggtggagaggtgacttcaaagcttaggtgtgaacgtccctgtggaaag

SEQ ID NO: 23238 - DNA, 31 bp, Homo sapiens
  chr9:92178352-92178383
  hypo
gtcagggacctgggttcgctgctttgtgttg

SEQ ID NO: 23239 - DNA, 135 bp, Homo sapiens
  chr9:92227879-92228014
  hypo
atatcatgccctttcataccccggggccttggacgtgctggtccagctgcgtgaactgcatgttttcttgaacggcgactctgcttgcaggtggaatgcatggagtgcacgggcgtctgcctagagaggagatgt

SEQ ID NO: 23240 - DNA, 31 bp, Homo sapiens
  chr9:92238057-92238088
  hypo
gtgggatgttctgaaccgtgcagatggggat

SEQ ID NO: 23241 - DNA, 31 bp, Homo sapiens
  chr9:92720565-92720596
  hypo
ggcaggggaaggggggcgagttctgtgttta

SEQ ID NO: 23242 - DNA, 31 bp, Homo sapiens; identical to SEQ ID NO: 6876
  chr9:92859700-92859731
  hypo

SEQ ID NO: 23243 - DNA, 30 bp, Homo sapiens
  chr9:93658211-93658241
  hypo
catttgttactcatcgggcccagggacatt

SEQ ID NO: 23244 - DNA, 30 bp, Homo sapiens
  chr9:93798705-93798735
  hypo
ggacttcttgatgccgtcacagcctggcag

SEQ ID NO: 23245 - DNA, 31 bp, Homo sapiens
  chr9:93837381-93837412
  hypo
cttccatatcgccacccgcagagcacaacag

SEQ ID NO: 23246 - DNA, 1020 bp, Homo sapiens; identical to SEQ ID NO: 6878
  chr9:93955556-93956576
  hypo

SEQ ID NO: 23247 - DNA, 24 bp, Homo sapiens
  chr9:94116470-94116494
  hypo
aaaacctttcggagaaatctgaaa

SEQ ID NO: 23248 - DNA, 224 bp, Homo sapiens
  chr9:94124706-94124930
  hypo
cccacccactcgtaccgatgtcccatggcccttcctggacggaaagagtcttacaggggttcaaacaagccatacgctgagatgggatttagagtatgtagctcttccagaaactcgggatatcaatttagtgtgtaggtactcatcaaagcacgttgcagtataattaatgctacctagcttttatcagatctctaatgggaaagcttgcatttaagaatact

SEQ ID NO: 23249 - DNA, 446 bp, Homo sapiens; identical to SEQ ID NO: 6879
  chr9:94183543-94183989
  hypo

SEQ ID NO: 23250 - DNA, 40 bp, Homo sapiens
  chr9:94186235-94186275
  hypo
caggggcgggccggggcgggcactccgcggccccgccccg

SEQ ID NO: 23251 - DNA, 31 bp, Homo sapiens
  chr9:94447741-94447772
  hypo
acaccgtgcaatctgccggggcctcagaaag

SEQ ID NO: 23252 - DNA, 540 bp, Homo sapiens; identical to SEQ ID NO: 6881
  chr9:94711539-94712079
  hypo

SEQ ID NO: 23253 - DNA, 157 bp, Homo sapiens; identical to SEQ ID NO: 6882
  chr9:94712294-94712451
  hypo

SEQ ID NO: 23254 - DNA, 40 bp, Homo sapiens
  chr9:94834641-94834681
  hypo
tgtttccaaaatccaacgttggtcacggactcttcttggg

SEQ ID NO: 23255 - DNA, 101 bp, Homo sapiens
  chr9:95003569-95003670
  hypo
tctcatagaatgagaccggagcaaatgattaagcaagtgactgaggtatattttaaatgatcaactttttttttttgagacagggtcttgctctgtcgccc

SEQ ID NO: 23256 - DNA, 39 bp, Homo sapiens
  chr9:95010671-95010710
  hypo
cagctgggtgtggtggcgcaaacttgtaatcttagcact

SEQ ID NO: 23257 - DNA, 105 bp, Homo sapiens
  chr9:95039645-95039750
  hypo
gcagtcagccaagatcgcgctattgcacgatatttgcactccatctcaaaaacaacaacaacaaaaaatcccagccaggtgcagtggctcatgcttgcaattcca

SEQ ID NO: 23258 - DNA, 30 bp, Homo sapiens
  chr9:95374071-95374101
  hypo
ctccaccagccccggcgccaccctggcccg

SEQ ID NO: 23259 - DNA, 30 bp, Homo sapiens
  chr9:95374322-95374352
  hypo
ggggatcatacacagcgtcttgctgcgctc

SEQ ID NO: 23260 - DNA, 30 bp, Homo sapiens
  chr9:95417165-95417195
  hypo
cggagctgaggctggcgccagagagcgtcc

SEQ ID NO: 23261 - DNA, 30 bp, Homo sapiens
  chr9:95417603-95417633
  hypo
tgcgccagagcccagcggcgtcctactggg

SEQ ID NO: 23262 - DNA, 451 bp, Homo sapiens
  chr9:95477394-95477845
  hypo
tgaagcagatgttagctgcagcgtgcggcgccccacagcccctaatcacagtaaatgctgtgcttctcgctgcagaacacctggttggccagcccggtgccctcggccctgtcgctggcacaggcacaggtgtgacttacgctcggtgtggctggcttggtcttcggggcggctttggcacggccacgccgggtctgctcatggtccagctcgagcagctccagccgctgggtcagcgccagcttctgctggatggccatgcgcagcagcgagttcagcgtcttcttctcgtcctcagcagccgccagctgccgctgcatctcatccagctgtgtaatgtactcgtcacacctgtgggtaccaaaaacatgactgaggggcgggcagagccgagcagaggagggcagggcagggcagggctaagctgcacggccctctgacagccctatac

SEQ ID NO: 23263 - DNA, 31 bp, Homo sapiens
  chr9:95482914-95482945
  hypo
cgcctcctccagctgccgctctgagatctcc

SEQ ID NO: 23264 - DNA, 176 bp, Homo sapiens
  chr9:95484976-95485152
  hypo
gatgttctcctcctccagttccgagtagtcctgcagcagacgagcttcccggaatttgtactccttgatgtcatcccgcaggcggccacgctggatctccacattctggttgatctgttgggggagagggaaaggcaggtatgagcagcctccacagggcacgagaggggctcagt

SEQ ID NO: 23265 - DNA, 239 bp, Homo sapiens
  chr9:95492213-95492452
  hypo
gggtgctcacctagcccaggacgcccacctgcccacgcacctgagagtcgacagctgtgtcatgtccatgccccaaaatccaggccagccagcctcccatcgtgtacaccccaggcgagtggcccagcctccaagcaggtgccatccctctccttccctcccactgcccactacccccacatagctggcgtggcaggacagggcttccatgggtagagggcagacgggccgcagtgtgt

SEQ ID NO: 23266 - DNA, 549 bp, Homo sapiens; identical to SEQ ID NO: 6883
  chr9:95570232-95570781
  hypo

SEQ ID NO: 23267 - DNA, 788 bp, Homo sapiens; identical to SEQ ID NO: 6884
  chr9:95570893-95571681
  hypo

SEQ ID NO: 23268 - DNA, 30 bp, Homo sapiens
  chr9:95764727-95764757
  hypo
tggacatggtggtacgcatgtagagcaggt

SEQ ID NO: 23269 - DNA, 31 bp, Homo sapiens
  chr9:95965599-95965630
  hypo
ttgggggcattggtggcgggtggtagcagag

SEQ ID NO: 23270 - DNA, 30 bp, Homo sapiens
  chr9:96051943-96051973
  hypo
gggccggagcccgggcgcaggcccgggggt

SEQ ID NO: 23271 - DNA, 30 bp, Homo sapiens
  chr9:96069180-96069210
  hypo
cgcggccgggcgggcgtgggcctgccctgt

SEQ ID NO: 23272 - DNA, 31 bp, Homo sapiens
  chr9:96081613-96081644
  hypo
gggtgctgaggggctgcgggtgctgggctgg

SEQ ID NO: 23273 - DNA, 26 bp, Homo sapiens
  chr9:96230180-96230206
  hypo
gagacggagtttcgctcttgtcgccc

SEQ ID NO: 23274 - DNA, 179 bp, Homo sapiens
  chr9:96256150-96256329
  hypo
tctggagctcctggagcgctctctcagtgggcctggcagccatccagccttcctgggcccttttcttatggaagagtatctgcttctgaaaactggaagtgtcttccttcaattcctagcggttgcaggtctgacacatgcggtttaaatactagtgcaccttgcgaagtctctgatcg

SEQ ID NO: 23275 - DNA, 374 bp, Homo sapiens
  chr9:96275709-96276083
  hypo
gacttgtggacttatcggtcagttaggaatgtgttgtgtgcacgtgtgtctatgtgcgtgttgcatgcaagtgtgaggtgtctgtgactacacacatgccagtctcattattcccagcttctcatactgcagttgtttttgtttggtacaaaggtggaagctctgccaaggttttttcttgatgcgagccaggatcgaagggctatggtgtttaaagcttgcgagctgaaggcccttggaaggcaggaacctcagataaattgtagtctgtaagattcctggtcgttctctggggggagtcaacaatgatctgtgcttcactcccagcgtctgttgaccatgcttggctctcaggaggccggaccaaggacagc

SEQ ID NO: 23276 - DNA, 188 bp, Homo sapiens
  chr9:96294480-96294668
  hypo
ggacctgcctccggccgctctgctctataggccagttcgtcagtatgtttacggagtcctgtttagtttggcagaaagcagaaagaaaactgagagacttgcttttagaaagaacagacttccaccagaatgtatgtactgtaacaatccattgtttgttttcctcggtacctcgtaatctcttgtgc

SEQ ID NO: 23277 - DNA, 30 bp, Homo sapiens
  chr9:96295075-96295105
  hypo
agctgtagcgaaggtcgtgggactcacgga

SEQ ID NO: 23278 - DNA, 179 bp, Homo sapiens
  chr9:96357851-96358030
  hypo
tgcacatatgtctgagcgttgtgcatggctcctctctgcatgtgcagacacactttatacacagaccgagatttgcatcttctgtgaacaaggatgagtgcggctgtgcatgcgcccactgggcatatgtgtgtatacatacctggtttgcaggtaaatatgtgcgtaaccagagatgc

SEQ ID NO: 23279 - DNA, 328 bp, Homo sapiens
  chr9:96573409-96573737
  hypo
caaggcaatgcctatgggagacgtggtacagtcactccctgctttgtaaagcgctgctgggtctcctgggaaacagcagcgtgcctggcactacgcaaggcccgcacagctgcgccgttgttgtcaccagccgcagttcccaggttgcacatgcctagagaaggtgttggcgggacgcggttgcgcctctgacttcctttaattccgacttctacttgcgtcgttgtgtaggcgtctgagggccacctgacgtcgtctagtgtctccacgccttgacacttgtctattgaaatgcatcttttttttttttttgagacggagtctcgct

SEQ ID NO: 23280 - DNA, 523 bp, Homo sapiens; identical to SEQ ID NO: 6902
  chr9:96716904-96717427
  hypo

SEQ ID NO: 23281 - DNA, 92 bp, Homo sapiens; identical to SEQ ID NO: 6903
  chr9:96717449-96717541
  hypo

SEQ ID NO: 23282 - DNA, 26 bp, Homo sapiens
  chr9:96717780-96717806
  hypo
aaaaggagggggccacgtgaaagagg

SEQ ID NO: 23283 - DNA, 69 bp, Homo sapiens; identical to SEQ ID NO: 6905
  chr9:96717840-96717909
  hypo

SEQ ID NO: 23284 - DNA, 44 bp, Homo sapiens; identical to SEQ ID NO: 6909
  chr9:96722503-96722547
  hypo

SEQ ID NO: 23285 - DNA, 297 bp, Homo sapiens; identical to SEQ ID NO: 6910
  chr9:96722862-96723159
  hypo

SEQ ID NO: 23286 - DNA, 38 bp, Homo sapiens
  chr9:96945350-96945388
  hypo
tttcttttcttctccctcccccgacccaccccagagtc

SEQ ID NO: 23287 - DNA, 121 bp, Homo sapiens
  chr9:96945447-96945568
  hypo
ctccccaactcaagcggtcctcctacctcagcttcccacataacttggactttacgcgcacaccgccatgcctggctaatttttttctgttttacagacggagtcttgctatgttgcccag

SEQ ID NO: 23288 - DNA, 31 bp, Homo sapiens
  chr9:97162004-97162035
  hypo
agaaatgccaggtggtcgatctaggtcttgt

SEQ ID NO: 23289 - DNA, 38 bp, Homo sapiens
  chr9:97591477-97591515
  hypo
acacacacacacacacacgcacacgcacacacacacat

SEQ ID NO: 23290 - DNA, 30 bp, Homo sapiens
  chr9:97719170-97719200
  hypo
gaagaatcacatgagcgtaacaagaccgga

SEQ ID NO: 23291 - DNA, 59 bp, Homo sapiens
  chr9:97719449-97719508
  hypo
taaccaaactgttcagttcttcgtttgcttctctcttttttgttgtttttttgttgttg

SEQ ID NO: 23292 - DNA, 173 bp, Homo sapiens
  chr9:97727388-97727561
  hypo
ataactaagaacctcacgcacaaataattctttgcattctaaatactgctcgtttcctttggtatttttctctgtatatccactgcaggtgcaaggaacgacttcagttgtgaggcatcagtcagtttggggttgtccccccgctcccattttctttgcgtggtccatttttt

SEQ ID NO: 23293 - DNA, 355 bp, Homo sapiens; identical to SEQ ID NO: 6914
  chr9:97767418-97767773
  hypo

SEQ ID NO: 23294 - DNA, 31 bp, Homo sapiens
  chr9:97844496-97844527
  hypo
gccacacaggctctccgcgtggtaattctgg

SEQ ID NO: 23295 - DNA, 387 bp, Homo sapiens
  chr9:97848085-97848472
  hypo
aaccaaatgcatcacctaagtcgtgtgaaatcatgtggtagctcatggctgtgagcggggcggggcggggctttcggaggagctcctgttgttctgggcgcggtgaactctctcttgtatttgcagtccaggccttcgcgtctcctgcgccagcagacggtgcccacggagctcccagctgaggcgctgcttctccgggctgtcgattggacccgccctccggtgcctactgagctgatatcagttctcattttacacactggctcagttcagcaggaacaggagtcgagcccttgagcaaaaagccttcgtgtctgtaagtgcccgaggctcaggagagctggggctcccactcgcggcagacaggcccgcgtccaccctgcgtcc

SEQ ID NO: 23296 - DNA, 224 bp, Homo sapiens
  chr9:97855922-97856146
  hypo
cactataatgaagttgattaccgtctccaccctggcgccggcaagcacgtgtgcaggccctgctttatacacggagggtggcacagtgttcacacgggtctagattggcacgtacataacgctcgcttctctgtgtcgatggctgcattgcatggacgcgctgtaactcgagaggcagtgacaccccaccttctgggggcttcgttcaagtcccagccctgcta

SEQ ID NO: 23297 - DNA, 245 bp, Homo sapiens
  chr9:97865045-97865290
  hypo
ccactaaagggagcctcttgtcgcatgcgcactgtgtgaatggcagcgtggggacgcagagctaagagtaaacgacgtggtgtggaccatgacgttcgctctcctcggccccccctggcagcacacagggcctgcagccggcctgcaacgagcccgccagggtcagtgcagccagcacgggggctccggctgtagcccaggcacgtgccagtgtgtccctgggcgtctgtattgctatcacttgg

SEQ ID NO: 23298 - DNA, 336 bp, Homo sapiens
  chr9:97867220-97867556
  hypo
tgcatttgtctctcgcgtctggcttatttcgctcagtgtaaagccctctaggttgggccgcattgttgcaggtgtgcattttataagagtacacaatagattctcgaaagcattctcgctgtgctggggccgggcccaaagaggtggcacctggcatgtggcagccagtcgtctttagccctgggccaccctcatgactcggattcgtcttagctgagacaccagcacctgggaggcacagcctgggcccactccacaggactgtcctaccaggatggagacaatctcctggccctggttcttggcaggtgggtcatgttacggggactttctgta

SEQ ID NO: 23299 - DNA, 31 bp, Homo sapiens
  chr9:97901310-97901341
  hypo
ccctgaatgaaggaatcgccgaagcagtatc

SEQ ID NO: 23300 - DNA, 135 bp, Homo sapiens
  chr9:97913296-97913431
  hypo
tcaacagctataggtggctggcggctacagtaccgaacagtgcacatttacaggatgtgcctgggactgcagaaagcgccactggacactcgagcttcaagtgccctcttacccgtgctttacttctcttcctgg

SEQ ID NO: 23301 - DNA, 31 bp, Homo sapiens
  chr9:97983531-97983562
  hypo
ctgaaattatgttcaacgagctaaaacaaga

SEQ ID NO: 23302 - DNA, 30 bp, Homo sapiens
  chr9:98054862-98054892
  hypo
aacatcctgtgcaccgtgcgcggctgccgc

SEQ ID NO: 23303 - DNA, 47 bp, Homo sapiens; identical to SEQ ID NO: 6916
  chr9:98268139-98268186
  hypo

SEQ ID NO: 23304 - DNA, 625 bp, Homo sapiens; identical to SEQ ID NO: 6917
  chr9:98273068-98273693
  hypo

SEQ ID NO: 23305 - DNA, 31 bp, Homo sapiens
  chr9:98356425-98356456
  hypo
agaagttgcaggctggcgactggggccacct

SEQ ID NO: 23306 - DNA, 46 bp, Homo sapiens
  chr9:98459834-98459880
  hypo
ataaatagattgttacaataacgtttggttgagggagccaagatgg

SEQ ID NO: 23307 - DNA, 30 bp, Homo sapiens
  chr9:99107784-99107814
  hypo
tggcacactttccccgctttgtggtagtga

SEQ ID NO: 23308 - DNA, 43 bp, Homo sapiens
  chr9:99139374-99139417
  hypo
caggaggcacagtcacagcagcgagaagggactgaggaggagg

SEQ ID NO: 23309 - DNA, 30 bp, Homo sapiens
  chr9:99259300-99259330
  hypo
gcctgaaaagacgtcgtttaacacagagaa

SEQ ID NO: 23310 - DNA, 31 bp, Homo sapiens; identical to SEQ ID NO: 6922
  chr9:99417093-99417124
  hypo

SEQ ID NO: 23311 - DNA, 306 bp, Homo sapiens; identical to SEQ ID NO: 6923
  chr9:99417423-99417729
  hypo

SEQ ID NO: 23312 - DNA, 30 bp, Homo sapiens
  chr9:99883667-99883697
  hypo
tctctatatggcggcggctctgtcgcgcct

SEQ ID NO: 23313 - DNA, 55 bp, Homo sapiens; identical to SEQ ID NO: 6927
  chr9:99983677-99983732
  hypo

SEQ ID NO: 23314 - DNA, 221 bp, Homo sapiens; identical to SEQ ID NO: 6928
  chr9:99983767-99983988
  hypo

SEQ ID NO: 23315 - DNA, 16 bp, Homo sapiens
  chr9:99984041-99984057
  hypo
cgcctggccgtgactc

SEQ ID NO: 23316 - DNA, 45 bp, Homo sapiens; identical to SEQ ID NO: 6930
  chr9:99984107-99984152
  hypo

SEQ ID NO: 23317 - DNA, 84 bp, Homo sapiens
  chr9:100349303-100349387
  hypo
gctcctccccaccacttggcataattctatggagattcatccaagttgttgcatgtaccaatcgtttgctctttttcactggtg

SEQ ID NO: 23318 - DNA, 304 bp, Homo sapiens; identical to SEQ ID NO: 6933
  chr9:100565761-100566065
  hypo

SEQ ID NO: 23319 - DNA, 95 bp, Homo sapiens; identical to SEQ ID NO: 6934
  chr9:100610039-100610134
  hypo

SEQ ID NO: 23320 - DNA, 268 bp, Homo sapiens; identical to SEQ ID NO: 6935
  chr9:100610200-100610468
  hypo

SEQ ID NO: 23321 - DNA, 1144 bp, Homo sapiens; identical to SEQ ID NO: 6941
  chr9:100614891-100616035
  hypo

SEQ ID NO: 23322 - DNA, 198 bp, Homo sapiens; identical to SEQ ID NO: 6942
  chr9:100616270-100616468
  hypo

SEQ ID NO: 23323 - DNA, 245 bp, Homo sapiens
  chr9:100843156-100843401
  hypo
agcgatatctgtggccgcagtggctctgggggccaaggtgttggaacgtcacataactttggacaagacctggaaggggagtgaccactcggcctcgctggagcctggagaactggccgagctggtgcggtcagtgcgtcttgtggagcgtgccctgggctccccaaccaagcagctgctgccctgtgagatggcctgcaatgagaaggtgtgtcctgccggactctactcggttctgctgccgt

SEQ ID NO: 23324 - DNA, 31 bp, Homo sapiens
  chr9:100890721-100890752
  hypo
gacccaggactcctgacgcccactgatgtca

SEQ ID NO: 23325 - DNA, 22 bp, Homo sapiens
  chr9:101019660-101019682
  hypo
acaaaatatttcttttcttttc

SEQ ID NO: 23326 - DNA, 31 bp, Homo sapiens
  chr9:101053059-101053090
  hypo
gtgaagggtagctgggcgcttaccagaaagt

SEQ ID NO: 23327 - DNA, 102 bp, Homo sapiens
  chr9:101216381-101216483
  hypo
tggccctctgcagtgtcttggcgatgacccagatgccatcgtaggcgtacccgtggaacttgctgggccccacgcctgaccgcttgttgttgtactctctct

SEQ ID NO: 23328 - DNA, 157 bp, Homo sapiens
  chr9:101280571-101280728
  hypo
ctgtttcttgccaggacgctaatactgtagatataagtttttcaggtagaaattatcaaagtataattttttatatccatatgttttcacctaagattataagatacactttgtaattcatttcaccactgaccatgcatgcgcgaatccccttaag

SEQ ID NO: 23329 - DNA, 675 bp, Homo sapiens; identical to SEQ ID NO: 6947
  chr9:101469582-101470257
  hypo

SEQ ID NO: 23330 - DNA, 154 bp, Homo sapiens
  chr9:101553961-101554115
  hypo
gaggcagctttctgggtttctcgatgctcagccctccttcccgggagccagttttgcacctcatctaaacccaagacctccctcctcctggcggctggcggccaggccagggctgaactctgtctgaggctccggctgaataccttctgggatg

SEQ ID NO: 23331 - DNA, 249 bp, Homo sapiens; identical to SEQ ID NO: 6954
  chr9:101705946-101706195
  hypo

SEQ ID NO: 23332 - DNA, 450 bp, Homo sapiens; identical to SEQ ID NO: 6955
  chr9:101706314-101706764
  hypo

SEQ ID NO: 23333 - DNA, 31 bp, Homo sapiens
  chr9:102591226-102591257
  hypo
ccagcactacggcgtgcgaacctgcgagggc

SEQ ID NO: 23334 - DNA, 145 bp, Homo sapiens
  chr9:103174496-103174641
  hypo
aagattaaatgacgtcgtatgtatcaagggcttagcgcactgcctggtacgcagaaaaagcccagtaaatggcaagtgctattataaccattatcatgaggttggaggatcgcttgagcctgggaggttgaggctgcagcgagca

SEQ ID NO: 23335 - DNA, 54 bp, Homo sapiens
  chr9:103174700-103174754
  hypo
aaacaaacaaaagcccgggggaaacaaatcaaatgtccccgtataaatgataaa

SEQ ID NO: 23336 - DNA, 30 bp, Homo sapiens; identical to SEQ ID NO: 6958
  chr9:103190004-103190034
  hypo

SEQ ID NO: 23337 - DNA, 20 bp, Homo sapiens
  chr9:104248629-104248649
  hypo
ttttcctggtcctgggaggg

SEQ ID NO: 23338 - DNA, 872 bp, Homo sapiens; identical to SEQ ID NO: 6961
  chr9:104248697-104249569
  hypo

SEQ ID NO: 23339 - DNA, 30 bp, Homo sapiens; identical to SEQ ID NO: 6963
  chr9:105037092-105037122
  hypo

SEQ ID NO: 23340 - DNA, 40 bp, Homo sapiens
  chr9:107144257-107144297
  hypo
gattacaggcatgagccaccgcgcccggctctggtggttt

SEQ ID NO: 23341 - DNA, 267 bp, Homo sapiens
  chr9:107396337-107396604
  hypo
gttgcaggatcccttcagtgccgtttcgccaaccagaaatctctgtggccgccctgagctctgccgggggcctcactcgggtcctccggactcgctccgcccgctcggcccggaaggctgtgttcaactagtgccaccagcccggatcccacaccagccgtggctccacgctcagcctgcggctggactcagcgtgccacagcagcttccgtgttgggcactggcgtctagacgaggtggtggcacccgaaaacttggagatgccag

SEQ ID NO: 23342 - DNA, 31 bp, Homo sapiens
  chr9:107729488-107729519
  hypo
ggaggatgttcattagcggctgtaagaaatc

SEQ ID NO: 23343 - DNA, 31 bp, Homo sapiens
  chr9:108200731-108200762
  hypo
tggatttggtacagtgcggctgtctaataaa

SEQ ID NO: 23344 - DNA, 30 bp, Homo sapiens
  chr9:108282462-108282492
  hypo
gacaccaagaaggacgcactgactcgcctc

SEQ ID NO: 23345 - DNA, 31 bp, Homo sapiens
  chr9:109686799-109686830
  hypo
ccagaccctgtggttccgcccgtatcactgc

SEQ ID NO: 23346 - DNA, 223 bp, Homo sapiens
  chr9:109689778-109690001
  hypo
cagcactgtgattatgggaaccggacggtcaaaggggtactcattcattatcagaagaagcaccgagacttcaaggccaatgcagatgtgatccggcagcatacggccaccattcgaagcctctgcgaccgaaatcagaagaagcctgccagctgcgtgcttgtctccccctctaatctggagcgggacaaaacgaaactccgagcactcaaatgtaggcagt

SEQ ID NO: 23347 - DNA, 292 bp, Homo sapiens
  chr9:109690710-109691002
  hypo
cattgacatcaacccaggtgccgtctacaaatgcaggcattgcccatacatcaacacccgcatccacggcgtactgacccactaccagaagcgacacccgtccatcaaggtgaccgctgaggactttgtgcacgacgtagagcagtctgctgacatatcccagaatgacgtggaggagacgagcaggatcttcaagcaagggtatggcgcctaccggtgcaaactgtgtccgtacacacacggcactttggagaaactaaaaatccactacgagaagtatcacaatcagcct

SEQ ID NO: 23348 - DNA, 38 bp, Homo sapiens
  chr9:109865316-109865354
  hypo
gtcacaatgtgccccgcgcggtggctcaagcctgtaat

SEQ ID NO: 23349 - DNA, 18 bp, Homo sapiens
  chr9:109894958-109894976
  hypo
cctgacccccaggccacg

SEQ ID NO: 23350 - DNA, 21 bp, Homo sapiens
  chr9:110012769-110012790
  hypo
agccaccgtgcctggccccca

SEQ ID NO: 23351 - DNA, 266 bp, Homo sapiens
  chr9:110096155-110096421
  hypo
ccagagcttcctaactcggcttgcgataggtgtagatgtttagagatggtgattttcctcagcccatgaggtcgtcttcaaggcagctggggaacctgggctctagccccaggcaacctcatctgttttcccagcgtgttatacaagtgccgtgtttatcgtgttgaaaagatccggaagctctctcctacatatctgttagctttctagatgagctttgcgtaagtcatggttctccagaaaaaaacaaacggagatttattatg

SEQ ID NO: 23352 - DNA, 35 bp, Homo sapiens
  chr9:110160587-110160622
  hypo
tgggcatggtggcccacgcctgtaatcccagcact

SEQ ID NO: 23353 - DNA, 31 bp, Homo sapiens
  chr9:110328591-110328622
  hypo
tgtgagccaccgcgcccggcccccagtgctt

SEQ ID NO: 23354 - DNA, 21 bp, Homo sapiens
  chr9:110353020-110353041
  hypo
ttgggggacagagtttcgctc

SEQ ID NO: 23355 - DNA, 191 bp, Homo sapiens
  chr9:110390659-110390850
  hypo
tgtacaaatacagatgagggacggcttcccggggtggtcctttgattccagtaagagttatcacggataaagggagggtgcgtatcaggcaaagaatgcatggagtgtttggaggcgcggtgtgcagagcttgcaggaggcagtgtgcggtgagttgtggggactcctacgttgtctgatccctccttttc

SEQ ID NO: 23356 - DNA, 77 bp, Homo sapiens
  chr9:110478887-110478964
  hypo
gacgtgaagggcccagcgctggagatgtgaagggcccagcgctggagttgtgaagggcccagcgctggagatataaa

SEQ ID NO: 23357 - DNA, 71 bp, Homo sapiens
  chr9:110779879-110779950
  hypo
agagctcaagcctcaacattacggctgcctcagtgacttgaaagaaaaccgggcagggcttcttcaaggac

SEQ ID NO: 23358 - DNA, 30 bp, Homo sapiens
  chr9:110813284-110813314
  hypo
tgaacagtgtccatcgaaatgtgaatgtat

SEQ ID NO: 23359 - DNA, 186 bp, Homo sapiens
  chr9:110842927-110843113
  hypo
ctttgggaatctacagcgtctgccgcatgccagatatgacctcacagtgataaaagtaagatcatcgcttgatccaatcactatatctccccacccttcccaccatccacaaacacatgcacctatgtgcgcattttacagactaatcagttgaagctcgcaaaagagaagcgatggccccaaagc

SEQ ID NO: 23360 - DNA, 30 bp, Homo sapiens
  chr9:111033910-111033940
  hypo
ttctaatcctcatgcgtggtgaggaagatg

SEQ ID NO: 23361 - DNA, 31 bp, Homo sapiens
  chr9:111212068-111212099
  hypo
ttcaagagatattggccgggcaggatggttc

SEQ ID NO: 23362 - DNA, 193 bp, Homo sapiens
  chr9:111835845-111836038
  hypo
atttagaaacatgcagcgcaaagttactatacattatatctaatgatacgcactacgggaaataaaaagtacatgctagctccctgttcaacacattacttaagaaaaaaatacataaatagatatgttcaaatacttgacacgtatatgtacatacatttcatttgcatgaatatatcgtataaatgtgttt

SEQ ID NO: 23363 - DNA, 30 bp, Homo sapiens
  chr9:111930182-111930212
  hypo
ccctgcagcaagcacgcgcaggccttggaa

SEQ ID NO: 23364 - DNA, 177 bp, Homo sapiens
  chr9:111951146-111951323
  hypo
agccccaaagagaaagcgtaaagaacacagaaagcacaggtattcatggtctgtgttacctggggagggaagctagcacggtagacttggagtagcgtgcaggactccgcattctagggtgaacatcactaatgcatcaatgtaccctcccccaactcccctcgctcagtcaacgcc

SEQ ID NO: 23365 - DNA, 161 bp, Homo sapiens
  chr9:112040327-112040488
  hypo
gagacaccaaaggcctcgagggatgcgaaggacagtcatgaggtcagagggtaggacactggtcggcccaacctcaaaggaagcggaattggactcagaggtggaaagaggaaaagttgttctgcccttctcccgggtccggtggacggagtgagagtctc

SEQ ID NO: 23366 - DNA, 532 bp, Homo sapiens; identical to SEQ ID NO: 6972
  chr9:112081563-112082095
  hypo

SEQ ID NO: 23367 - DNA, 823 bp, Homo sapiens; identical to SEQ ID NO: 6973
  chr9:112082658-112083481
  hypo

SEQ ID NO: 23368 - DNA, 30 bp, Homo sapiens
  chr9:112664145-112664175
  hypo
aatcccaagatcatcgtggctgggccagag

SEQ ID NO: 23369 - DNA, 21 bp, Homo sapiens
  chr9:113025658-113025679
  hypo
cctgggcgtgtctaaaaacaa

SEQ ID NO: 23370 - DNA, 204 bp, Homo sapiens
  chr9:113592869-113593073
  hypo
ttctcctggagttgaggggctcgggggccgctctcctccgactgcccaccgaactccactggtcccaccggtggatgcccggccggcgggccggtgcctgtgtctgttctatatgctcttctgccgacgtgctcctctcaacgtcctctcaacgaccagccgcttgcgtcttcttcctccaatgtgctcctcaggacgtcctgc

SEQ ID NO: 23371 - DNA, 31 bp, Homo sapiens
  chr9:114320409-114320440
  hypo
gagcaaaactctgtctcggaaaaaaaaacta

SEQ ID NO: 23372 - DNA, 26 bp, Homo sapiens
  chr9:114326074-114326100
  hypo
cgtgcccagagcgattaagcaatttc

SEQ ID NO: 23373 - DNA, 15 bp, Homo sapiens
  chr9:114352193-114352208
  hypo
cgtgagccactgccc

SEQ ID NO: 23374 - DNA, 30 bp, Homo sapiens
  chr9:114619450-114619480
  hypo
gcaaaacaaagaaaaaaaaaccggccaggc

SEQ ID NO: 23375 - DNA, 10 bp, Homo sapiens
  chr9:114670202-114670212
  hypo
ccagcctacc

SEQ ID NO: 23376 - DNA, 38 bp, Homo sapiens
  chr9:114701510-114701548
  hypo
ctgggattacaggcgtgaaccaccgcacctggtcaaca

SEQ ID NO: 23377 - DNA, 20 bp, Homo sapiens
  chr9:114747964-114747984
  hypo
ttttctctcggctgggcgag

SEQ ID NO: 23378 - DNA, 21 bp, Homo sapiens
  chr9:114749646-114749667
  hypo
gtagccaggtgtggtggctca

SEQ ID NO: 23379 - DNA, 105 bp, Homo sapiens
  chr9:114750308-114750413
  hypo
tggccaatgatgaatcgtttagctatagagactcaaggcccttcacaacggaaggcatggcagaagctctcacccacattgcacgtgaaagaggccctgctcaga

SEQ ID NO: 23380 - DNA, 22 bp, Homo sapiens
  chr9:114765804-114765826
  hypo
ctgtaagcgtgtattctatggt

SEQ ID NO: 23381 - DNA, 203 bp, Homo sapiens
  chr9:114830991-114831194
  hypo
aaaaaatatttttagccgttctgcacttcaaaaatacaacttagagagctgatcaaaggatgaatagaaaaagggcaaaaatacaggttgtccaataatccaggtcggaagtgctcgaggtctgctgcaagtgagagcactgagaatggagaagagggaacaaacggaaaccttgctcaggggagagacggcaggaatctggc

SEQ ID NO: 23382 - DNA, 138 bp, Homo sapiens
  chr9:114832552-114832690
  hypo
ctggcattacaggcatgagccaccacgcccagccgctgccttatattttaaacagtctactttttctctccaatgtacaagcctaagcctcgtcaggctggttctcagccacatttcgaggtggaacaaacttgactt

SEQ ID NO: 23383 - DNA, 31 bp, Homo sapiens; identical to SEQ ID NO: 6985
  chr9:114937351-114937382
  hypo

SEQ ID NO: 23384 - DNA, 16 bp, Homo sapiens
  chr9:115067941-115067957
  hypo
cgggcacggtggctca

SEQ ID NO: 23385 - DNA, 36 bp, Homo sapiens
  chr9:115478926-115478962
  hypo
ttcagaaagatacatttgtgccgggcgcggtggctc

SEQ ID NO: 23386 - DNA, 31 bp, Homo sapiens
  chr9:115619370-115619401
  hypo
tttcccgaggcaggcacggagagtgcgtgtg

SEQ ID NO: 23387 - DNA, 108 bp, Homo sapiens
  chr9:115631117-115631225
  hypo
aagtaaagttctttcttgggacggagactcttctacctacacagggcctggcaccctataccggaatgtccctgcagtgccagagacgcagtgctgggaaaacaacca

SEQ ID NO: 23388 - DNA, 7 bp, Homo sapiens
  chr9:116043448-116043455
  hypo
atttttt

SEQ ID NO: 23389 - DNA, 171 bp, Homo sapiens
  chr9:116061825-116061996
  hypo
agtaactgcaatcagcgtgtacaaacctcgctgccttctgctttgttcttagcacacagctggtcagccttctgagatcttagagctggccatcccaccaaccttagggagttaaagcggggagttggagggaggcgcactccagcccagcttctccgtttcaaccagaaa

SEQ ID NO: 23390 - DNA, 31 bp, Homo sapiens
  chr9:116091907-116091938
  hypo
ttaaactatgatacttcgatgcatcctgatt

SEQ ID NO: 23391 - DNA, 31 bp, Homo sapiens
  chr9:116104971-116105002
  hypo
gttattatgcagcatacgactttatcctcag

SEQ ID NO: 23392 - DNA, 30 bp, Homo sapiens; identical to SEQ ID NO: 6989
  chr9:116111661-116111691
  hypo

SEQ ID NO: 23393 - DNA, 31 bp, Homo sapiens
  chr9:116118819-116118850
  hypo
tagaagtgattataggcggcaaaggttaaag

SEQ ID NO: 23394 - DNA, 31 bp, Homo sapiens
  chr9:116128844-116128875
  hypo
ccatgagttttgtcttcggtaccatagggca

SEQ ID NO: 23395 - DNA, 54 bp, Homo sapiens
  chr9:116269882-116269936
  hypo
tacatcatcctggccccgctgaatcctgggagccaggtacggacagctggtgtg

SEQ ID NO: 23396 - DNA, 30 bp, Homo sapiens
  chr9:116337270-116337300
  hypo
ggggacaaagactacgagtccacccatgtt

SEQ ID NO: 23397 - DNA, 90 bp, Homo sapiens
  chr9:116344623-116344713
  hypo
ctgaagttttctgccagtgtgcgcgtgtgcccgcaggtgcacacattcccaagcatctgttcagttcccgagtatgggtgaggtctttcc

SEQ ID NO: 23398 - DNA, 55 bp, Homo sapiens; identical to SEQ ID NO: 6991
  chr9:116639070-116639125
  hypo

SEQ ID NO: 23399 - DNA, 31 bp, Homo sapiens
  chr9:116671456-116671487
  hypo
gagggaatggtcctgtcgcctgttgcagttg

SEQ ID NO: 23400 - DNA, 138 bp, Homo sapiens
  chr9:116671887-116672025
  hypo
agcttgaaggtgccaccgtctcagggcctgggcttgcttggggatgggtggtggctccacagggtggaaatgttcattcctttctcccgagtccagcgcctcctggcctctggtgcttgcatgcggatgctcccatgc

SEQ ID NO: 23401 - DNA, 31 bp, Homo sapiens
  chr9:116708991-116709022
  hypo
cctcgcaggatgtagacgggagtgtgtgtgt

SEQ ID NO: 23402 - DNA, 31 bp, Homo sapiens
  chr9:116728290-116728321
  hypo
ggctggctctgcgactcgttcatcttataca

SEQ ID NO: 23403 - DNA, 31 bp, Homo sapiens
  chr9:116730184-116730215
  hypo
gagaaggtggagatctcgccttttttcagtg

SEQ ID NO: 23404 - DNA, 315 bp, Homo sapiens
  chr9:116750639-116750954
  hypo
gggcccagagccagtgccagccgaggcctcgctgagtgccgagcaaggaacgatgacggaggtgaaggtgaagacagagctgcccgatgactacatccaggaggtgatctggcagggcgaggccaaggaggagaagaaggcggtcagcaaggatgggaccagcgacgtgcctgccgagatctgcgtggtgatcggcggcgtccgcaaccagcagacccttggtgagtgcccagcgtctgtggtcagggtggagaccagggtgggaacatggagtcagagtcctggggaaaagcggcctggcgcctctgccccctt

SEQ ID NO: 23405 - DNA, 77 bp, Homo sapiens
  chr9:116761524-116761601
  hypo
tgggttttaggctgatcgaggggcaggcggggccctgggttttaggctgagctaggggcaggcggggccctgggttt

SEQ ID NO: 23406 - DNA, 83 bp, Homo sapiens
  chr9:116770771-116770854
  hypo
gtgtcgtggccacggacgaggtgaaggaggagcccccggagccattccagaaaatcgggccaagtatgcgggattccctctgg

SEQ ID NO: 23407 - DNA, 341 bp, Homo sapiens
  chr9:116790928-116791269
  hypo
tggaatgtggggctggtggcccgagaggccactcactctgccggctgggagggccctcggggactgagagcgtgaccctctcaggtactgcccccgggtgggagccaccggatgatccagacacgggctctgagtgttcacatccagaggtctccccatctccacgcttcgtggcagcgaagacccagacgaaccagtcggggaaaaaagctccggcctccgtggtccgatgtgccaccctcttacaccgcacccctccagccacccaaacccagacgttccgcactccaaattcgggatctccggcgagcaaggcaaccgcaggtaccaatggcctatgt

SEQ ID NO: 23408 - DNA, 31 bp, Homo sapiens
  chr9:116797924-116797955
  hypo
ctctgccaggcactgacgtgagtgctaagag

SEQ ID NO: 23409 - DNA, 195 bp, Homo sapiens
  chr9:116798415-116798610
  hypo
ctcatgggtctagtgacgggggaggcaggcaggctgggcccggagccctgagcacagagacccggtgtgtgtttgggttcccacttgcaaagctgcctgcagcccagcagaaggtgtctgcgtcggttccacccctcacgtggctgccgcatttctccctccagaaccctacacctgcggcgcctgtgggatcca

SEQ ID NO: 23410 - DNA, 421 bp, Homo sapiens
  chr9:116800626-116801047
  hypo
ccaagcatcttgacttgttttcggagtggagccgtgggctgctttgttctggttcagcgcagccagagaatgcctggccggccatccagcgcaaagccaggctgaatcccagccacactgaatcgggattaaaggcttggctccatagagagaaattaagcatcatgagctgcgcagttcacagcgccgacgataaggaggatcagccttgaataacaccaatctcattatggagctgctgaatggcacagggtaattcccgctaataaacttcctttctgtgctgtaggaaaacctggcgtgccttggtgacgttggagaagcatgctttggcagtaataataccaaagatagctacaattttgtgagtgctttctatgcgtcacttgtggcactgagagctttacgcaggttatttcat

SEQ ID NO: 23411 - DNA, 158 bp, Homo sapiens
  chr9:116810951-116811109
  hypo
ccaacagcatgatccccgaaaaggagcggcagaacatcgcagagcggctgttgagggtcatgtgtgccgacctgggtgcactgagcgtggtcagcgggaaggagttcctgaagttggcccagaccttagtagacagtggtgcccgctatggggccttc

SEQ ID NO: 23412 - DNA, 1086 bp, Homo sapiens
  chr9:116811317-116812403
  hypo
atgtgcttggtgtgaagggtgcggacattcgcgacagcggtgaccttgtgcaccactgggtgcagaacgtgctgtcggagttcgtgatgtcggagatcaggacagtgtacgtgacggattgccgggtgagcacgtccgccttctccaaggccggcatgtgccttcgctgctcagcctgtgccttgaactcggtggtgcagagcgtgctgagcaagcggacactgcaggcccgcagcatgcacgaggtcatcgagctgctcaacgtgtgcgaggacctggcgggctccacgggcctggccaaggagaccttcgggtcgctggaggagacgtctccaccaccctgctggaactcggtgacggactcactgttgctggtgcatgagcgctatgagcagatctgcgagttctacagccgggccaagaagatgaacctcatccagagcctcaacaagcacctgctcagcaacctggcggccatcctgacgccggtgaagcaggcagtcatcgagctgagcaacgagagccagcccaccctgcagctggtgctgcccacctacgtcaggctggagaagctgttcacggccaaggccaacgacgcaggcactgtcagcaagctctgccacctcttcctggaggcgctcaaggagaacttcaaggtgcacccggcccacaaggtggccatgatcctggacccgcagcagaagctgcggcctgtgccaccctaccagcacgaggagatcatcggcaaggtctgtgagctcatcaacgaggtgaaggagtcctgggccgaggaggccgacttcgagcccgctgccaagaagccccgctctgctgccgtcgagaaccccgcagctcaggaagatgatcggctaggcaaaaatgaagtgtacgattacctgcaggagcccctcttccaggctacccctgatctcttccagtactggtcgtgcgttacccaaaagcacacaaaactcgccaagctcgccttctggctcctggcggttccggccgtgggcgccagaagcgggtgtgtaaatatgtgtgaacaagcgcttctaatcaaacggaggcggctgctcagtccag

SEQ ID NO: 23413 - DNA, 30 bp, Homo sapiens
  chr9:116812750-116812780
  hypo
cacacgaccctggtgcgtgtacatacgcct

SEQ ID NO: 23414 - DNA, 219 bp, Homo sapiens
  chr9:116813597-116813816
  hypo
ctgtgctatttggagaccaggcgttggggaggattcacgggttccacagctgcggggtttggtggccgtaggggaagcagtggtttgggagttctgaatgtaagcgccagagctgccctcctggtccgctgtgcgtggtacccagtgtgcatcacactactcaccccctcccggaccctggcagtccacagcgactccgaagtcagcccatagtcacat

SEQ ID NO: 23415 - DNA, 201 bp, Homo sapiens
  chr9:116856484-116856685
  hypo
aactcctgtagcatcccgtacaggttccgctgggcccaggccacccgggctccactgagccctgaggctgcagggaagcaggaggtggtggatccacaggagccccagaccctatccccatcctactctgcctccaggaagcccatacccttgcagtccatttggtccagctggaactgcaggcgacggttctcctcctgg

SEQ ID NO: 23416 - DNA, 194 bp, Homo sapiens
  chr9:116857251-116857445
  hypo
tcccccagcatctccacgcctgtccctcagcttgtgcctgcctatactcaccttgggggcctgtggtcgggtggtgacccgctgagctcggcttgcatatcgcagggtgctgagagtctcaggaaggcactgggctgagggggacacgcaggccacctggggagtgcactccccctgagcgctcctctctgagg

SEQ ID NO: 23417 - DNA, 41 bp, Homo sapiens
  chr9:116971681-116971722
  hypo
gcgggcctcctgccggcgagcgcctgcgcccttccctggcg

SEQ ID NO: 23418 - DNA, 176 bp, Homo sapiens
  chr9:116973313-116973489
  hypo
ttttccgtgtctattacgcagactctagcggggaaccccacctcccacggccacgctgccctggccacctgctgcctggcatcttctgcttctccccctgctttgagtgtgggggccgcatgtggggttgtctggccacaggacctgctgctggcacacggcgtgactggggcctg

SEQ ID NO: 23419 - DNA, 31 bp, Homo sapiens
  chr9:116995057-116995088
  hypo
agaagcttgcttgggccgggcacagtggctc

SEQ ID NO: 23420 - DNA, 31 bp, Homo sapiens
  chr9:117038569-117038600
  hypo
ttctggccttcatttacgtctttaacagtgc

SEQ ID NO: 23421 - DNA, 30 bp, Homo sapiens
  chr9:117161867-117161897
  hypo
aagagcaccttgaccgaccctattaacaca

SEQ ID NO: 23422 - DNA, 22 bp, Homo sapiens
  chr9:117349223-117349245
  hypo
cgcctggccttcagatcttaaa

SEQ ID NO: 23423 - DNA, 31 bp, Homo sapiens
  chr9:118222147-118222178
  hypo
aaatggtatggcaggccgggcgcgggggctc

SEQ ID NO: 23424 - DNA, 353 bp, Homo sapiens; identical to SEQ ID NO: 6996
  chr9:118916733-118917086
  hypo

SEQ ID NO: 23425 - DNA, 30 bp, Homo sapiens
  chr9:123150758-123150788
  hypo
accttgttaggggctcgggcttggatcaga

SEQ ID NO: 23426 - DNA, 212 bp, Homo sapiens
  chr9:123151031-123151243
  hypo
ctctggacacttgaacgagctcagcagtgagccatgcgactcgtggaaccctggcctgtcccacttgggattttgggacctgggctttgaggcgccacacaaaacaacagaatcgtcaaggtgaaatgaaatgaatcatttaatgagaatcttcaaactgtggcactggctgagtactaagcaaatccaggggaagacgtgaagcccaccaa

SEQ ID NO: 23427 - DNA, 30 bp, Homo sapiens
  chr9:123175604-123175634
  hypo
taacacatgagaggccggtttttaacaata

SEQ ID NO: 23428 - DNA, 30 bp, Homo sapiens
  chr9:123176170-123176200
  hypo
aagctgcagcatgcacggtacttgggaaag

SEQ ID NO: 23429 - DNA, 107 bp, Homo sapiens
  chr9:123210295-123210402
  hypo
tctggctctgcagctgcgtcaccacctcctgggtggcagggagacgatacatatttcctaatgaccgggatggttttattaggattggcaagcgggacttcttagcc

SEQ ID NO: 23430 - DNA, 19 bp, Homo sapiens
  chr9:123321471-123321490
  hypo
tttaaaacattgaggccgg

SEQ ID NO: 23431 - DNA, 23 bp, Homo sapiens
  chr9:123362247-123362270
  hypo
ccggccaattcagcttaactttt

SEQ ID NO: 23432 - DNA, 7 bp, Homo sapiens
  chr9:123742891-123742898
  hypo
ggagtct

SEQ ID NO: 23433 - DNA, 17 bp, Homo sapiens
  chr9:123926438-123926455
  hypo
gccggaactttcatata

SEQ ID NO: 23434 - DNA, 105 bp, Homo sapiens
  chr9:123965021-123965126
  hypo
actgcattgatataaacatgacgtatcaatattatataacaaaatattttctctgacctgaaagttcatttttttcttctgactttaaaagaatgtaagccggcc

SEQ ID NO: 23435 - DNA, 826 bp, Homo sapiens; identical to SEQ ID NO: 7002
  chr9:124131809-124132635
  hypo

SEQ ID NO: 23436 - DNA, 206 bp, Homo sapiens
  chr9:124422090-124422296
  hypo
agaaaaagaaagaaaacgtgatgccagtggggactggacccacctaggtggtttctcggcatccctaccctgagaggctgccacaggtctcactggtacttgttcagagcagcagagctttagcgagccacctagtatgtgtgacctgggtgccaggggctgccacagcagatatagccagcccccgccctcgggagctcagaggc

SEQ ID NO: 23437 - DNA, 191 bp, Homo sapiens
  chr9:124443386-124443577
  hypo
gtgaggaaacaggttccgagaggtaaagtcacttgctgcccaagctccaactgctactaagtggcggaaccaagattcgaccccaggtctctgtgactccagggcatgaggcacacccatcctcaggctaggaggcggatccattgccccacacccccccagaaccccatcagcatcgcttttccggctat

SEQ ID NO: 23438 - DNA, 145 bp, Homo sapiens
  chr9:124499855-124500000
  hypo
gcaagatcctgggccgggccggaggggctgctcactggagacctggccatcttcggaagccagatctggctccagagcctcgggggttgcaagtgcccagaaccaggtcagcagagaggcctgcgctcccaccacaaaggtctgt

SEQ ID NO: 23439 - DNA, 54 bp, Homo sapiens
  chr9:124545861-124545915
  hypo
ggccttttaagttgagcgtgcgcactgcatgggaaatagcggccctggaggatg

SEQ ID NO: 23440 - DNA, 31 bp, Homo sapiens
  chr9:124548743-124548774
  hypo
gcaccgtcaccctcaccggtggcccttgtgt

SEQ ID NO: 23441 - DNA, 27 bp, Homo sapiens
  chr9:124666739-124666766
  hypo
caccacgcccagcccaatacattccta

SEQ ID NO: 23442 - DNA, 30 bp, Homo sapiens
  chr9:124893989-124894019
  hypo
tcggagaggcccagtcgggggcaggggctg

SEQ ID NO: 23443 - DNA, 30 bp, Homo sapiens
  chr9:124965034-124965064
  hypo
cttgatggcctgtacgttcccaggctgctc

SEQ ID NO: 23444 - DNA, 222 bp, Homo sapiens; identical to SEQ ID NO: 7006
  chr9:124990563-124990785
  hypo

SEQ ID NO: 23445 - DNA, 255 bp, Homo sapiens; identical to SEQ ID NO: 7007
  chr9:124990828-124991083
  hypo

SEQ ID NO: 23446 - DNA, 31 bp, Homo sapiens
  chr9:125511988-125512019
  hypo
agaaaaaaaaaacaaccgtaacaaagggcta

SEQ ID NO: 23447 - DNA, 31 bp, Homo sapiens; identical to SEQ ID NO: 7008
  chr9:125587779-125587810
  hypo

SEQ ID NO: 23448 - DNA, 31 bp, Homo sapiens
  chr9:125648124-125648155
  hypo
ggtttctttcatttaacgtgttttttgtttt

SEQ ID NO: 23449 - DNA, 26 bp, Homo sapiens
  chr9:125704938-125704964
  hypo
actccgtctcaaaaaaaaaaaaaaaa

SEQ ID NO: 23450 - DNA, 29 bp, Homo sapiens
  chr9:125859123-125859152
  hypo
caggcgtgagccaccgcacctggcccagt

SEQ ID NO: 23451 - DNA, 58 bp, Homo sapiens
  chr9:125870567-125870625
  hypo
ggtctggtgcctggctcgtcagggctgctgggttctcctgtgacgcccttggctcttt

SEQ ID NO: 23452 - DNA, 30 bp, Homo sapiens
  chr9:125877119-125877149
  hypo
ggccatcatcttcccgtccctacccaatcc

SEQ ID NO: 23453 - DNA, 102 bp, Homo sapiens
  chr9:125986775-125986877
  hypo
tcccacccacagacatactcacgattcatcttttcacgcaactttcacggagcatttactacgtgttctaggcctgtactcgatactaagaggagaaagaca

SEQ ID NO: 23454 - DNA, 196 bp, Homo sapiens
  chr9:126100874-126101070
  hypo
ttgcagggagagcactcgagcaggttaatggcagcgtccggccagtggaggaggtggcatttgagtggaggcccccagggtaaggagaagcaactagaggggaacagcatgctggaccaagggaacagcagggatggagatcggccctgttgaggccctgagagaagcaggtcagcttggccgaggctcagagatc

SEQ ID NO: 23455 - DNA, 126 bp, Homo sapiens
  chr9:126152956-126153082
  hypo
tgaagaggtgaccacgtggccaagaagtggagaacagggactgcagcccggatggtccacccccaggggcctcaccctctcctgtgagcggggctcggagtagatgcacacgaggggacaccagcc

SEQ ID NO: 23456 - DNA, 436 bp, Homo sapiens
  chr9:126154146-126154582
  hypo
tgtctgtgaaaaggcaggttgcggcaaacttggctgcccagcgagggctgccagagtcttggtgcagaagaaaggctggccgtccgtcatggatcagaccccatcatcccccacggctgctcccgcctctgcccaccttgtctccgcgtggagttcccatgcagatgacttcccgaaccccttctaatgtttggtttaacgtgtcgccggttagcgcgcgcgtgtgacagtggtgacaggcgaggctgttcctttttaaataccatgtcagagacacggcgtcaggaagcagggacgtgctccatgctctctgccgcgccgggatcgcaccggcttattttttaatgaggaagatctgcatctcgggagtttttttcatgtgtcacatcgcgtggacaaatcagcagcacgtcacgctggcccaaaatgaaatgct

SEQ ID NO: 23457 - DNA, 144 bp, Homo sapiens
  chr9:126158004-126158148
  hypo
ggatgcactggcagcttcatacgcacgtcctaatcacacctggcacacagtaggtgctctttacctgtttgtggttgttaccggacgcccctaccccgcctcccaggtgcttgactgcaagccgcactctgccttcagattcct

SEQ ID NO: 23458 - DNA, 45 bp, Homo sapiens
  chr9:126169446-126169491
  hypo
gggggggtggggagcacggagctggagcctcggaggctggggagg

SEQ ID NO: 23459 - DNA, 30 bp, Homo sapiens
  chr9:126182779-126182809
  hypo
atctccggagagagcgcgctcaggattcag

SEQ ID NO: 23460 - DNA, 168 bp, Homo sapiens
  chr9:126323415-126323583
  hypo
ttgggccacctgtgccgcagattattcctcacttaaccttccctggcctttctctttcattcgggaggtgtttaattaccttggattcacaacgctgcacttcaggtgagcctctcctaatggcctcattaccattttacacaaagaaggagtcgttgattgtaactg

SEQ ID NO: 23461 - DNA, 339 bp, Homo sapiens
  chr9:126348886-126349225
  hypo
ttccaaaagggctggcgtggactcaagggccttcctgaagctcactgttcccaaggaaagaattggagcccagctcgctggacagtgcccggtcccccaaaggatcaaggcaactaggggaatgaagaaaggcaagaaaaactcaaactgggggtggggacaggaagcgcggatgagaagaaagccagaccgtcgccaggtgccggtgcctctcatcttaaccatgccatcagtcagggacactagcatctctgcatgggaaccaagtgggggcgcagagaggtcaaacaagctgcccaaagtcagagctaggaagcagcagtcaacttttgaacacag

SEQ ID NO: 23462 - DNA, 31 bp, Homo sapiens
  chr9:126362199-126362230
  hypo
aacccataccatgagtcggctgagcatggtg

SEQ ID NO: 23463 - DNA, 61 bp, Homo sapiens
  chr9:126442177-126442238
  hypo
ctgcctgctgcctttgtgtgacggcttgagtccccactgcggagtaccacagttgggacta

SEQ ID NO: 23464 - DNA, 1416 bp, Homo sapiens; identical to SEQ ID NO: 7010
  chr9:126770484-126771900
  hypo

SEQ ID NO: 23465 - DNA, 31 bp, Homo sapiens; identical to SEQ ID NO: 7018
  chr9:127061459-127061490
  hypo

SEQ ID NO: 23466 - DNA, 31 bp, Homo sapiens
  chr9:127106879-127106910
  hypo
ggccgggctctgttctcgttacctagatgcc

SEQ ID NO: 23467 - DNA, 425 bp, Homo sapiens
  chr9:127262375-127262800
  hypo
tccttgaagaccatgcacctgcgtgcccagtccacgatggagatgaaggtctggtcggccattctgcacaggaggccgaaggccgccggctggtcggggcggcttttggtgggctcctgcaggcagcccaagatgcgggcccgcacctggtcctcatccggctccagctgcagcagctgcaggatgagctcaggcacgttgggccctccagagaagggctctgggtagccgtacggcagcccaggctgtggggggctggcataaggctccgggtactcagacttgatggcacggccaggaaaggcagggtagaggtagccagccagtggcccgtgggcaccgggcacggccatgggcagtgctggggccccaaagtcgcccagtggcccagcaggtggaccggcggccaggcccttgggctcagg

SEQ ID NO: 23468 - DNA, 94 bp, Homo sapiens
  chr9:127308363-127308457
  hypo
agcctgggcaacaagagcaaaactccatctcaaaaaaatgttcatcttcttcctcgaccccacccagagtaacaaaatacgtatatgatagaaa

SEQ ID NO: 23469 - DNA, 135 bp, Homo sapiens
  chr9:127420614-127420749
  hypo
cagggaccagcaaatccgctttcttccagtgtgcacatgactaaatgtgcttctgtccatcatctgggtcatatatagttcaatgcgagctgagcagacagggctgcaaggaaatctggcgcggttcaatacctc

SEQ ID NO: 23470 - DNA, 22 bp, Homo sapiens
  chr9:127468805-127468827
  hypo
ttttttgagatagtctcgccct

SEQ ID NO: 23471 - DNA, 32 bp, Homo sapiens
  chr9:127500845-127500877
  hypo
tactgaaaaaaggacacgggggccgggcacaa

SEQ ID NO: 23472 - DNA, 94 bp, Homo sapiens; identical to SEQ ID NO: 7021
  chr9:127534415-127534509
  hypo

SEQ ID NO: 23473 - DNA, 131 bp, Homo sapiens
  chr9:127572409-127572540
  hypo
gtgcaccgggagaccacgtggaagacacggctgcggcggaactcctacgggaactgcttcctggtgtgcggcatcctgtatgccgtggacacgtacaaccagcaggaaggccaggtcgcctacgctttcga

SEQ ID NO: 23474 - DNA, 37 bp, Homo sapiens
  chr9:127623916-127623953
  hypo
gactcgccatcgactacgagtgcgccggagccccaac

SEQ ID NO: 23475 - DNA, 30 bp, Homo sapiens
  chr9:127641832-127641862
  hypo
acaggtggtctgcatcgcccagcggcagcg

SEQ ID NO: 23476 - DNA, 78 bp, Homo sapiens
  chr9:127657865-127657943
  hypo
gacagagaccctccacgacagagagcctccacgacagggagcctccacgacagagagcctccacgacagagaaccatc

SEQ ID NO: 23477 - DNA, 34 bp, Homo sapiens
  chr9:127955074-127955108
  hypo
ggacaacagagcgagactccgtctcaaaaaaaag

SEQ ID NO: 23478 - DNA, 31 bp, Homo sapiens; identical to SEQ ID NO: 7023
  chr9:128024544-128024575
  hypo

SEQ ID NO: 23479 - DNA, 25 bp, Homo sapiens
  chr9:128071898-128071923
  hypo
ccaccgtgcccgggcacttaatggt

SEQ ID NO: 23480 - DNA, 157 bp, Homo sapiens
  chr9:128103376-128103533
  hypo
aacaaacaaaaagaaatccttttcttagtaatttatcctgctatccaactccaaataaagcctccaactttttctacagactgaagaacgcaaagatagcgatgatgagaaatcagacaggaacagaccttggtggagaaaacgttttgtttcagcc

SEQ ID NO: 23481 - DNA, 31 bp, Homo sapiens
  chr9:128135856-128135887
  hypo
ttcatcaagtctggccaggcacggtagctca

SEQ ID NO: 23482 - DNA, 19 bp, Homo sapiens
  chr9:128136126-128136145
  hypo
gcaacaagagcaaaactcc

SEQ ID NO: 23483 - DNA, 31 bp, Homo sapiens; identical to SEQ ID NO: 7025
  chr9:128138375-128138406
  hypo

SEQ ID NO: 23484 - DNA, 307 bp, Homo sapiens
  chr9:128200111-128200418
  hypo
tggtgtggccagaggcgtggtgtcaggggcatctgatcccttgcctgttcccacccagggagccggacggcacggacacaggtctccctccgctcacccctctccctgaaacgtgagaaacagcagctttccgcctgcttgaaaaaggaggcaggcgctgtaaggagaagaggaatggggaatgtggccccttccaaggcagcgaagcagagaacatgcaggtggaactgccagctgaaacctacacttgctacttaagaaacggaaagaccatgtctggctgggagtgcagcgtgcctgaggacca

SEQ ID NO: 23485 - DNA, 30 bp, Homo sapiens
  chr9:128365540-128365570
  hypo
agacaatctgtactcggattatgaggctca

SEQ ID NO: 23486 - DNA, 94 bp, Homo sapiens
  chr9:128399988-128400082
  hypo
aggattaaatgagaaacgatgtattaaagtagcatacccacaataggaaggtaggtaggtaatgggtacttattttttgttctgagacggaatc

SEQ ID NO: 23487 - DNA, 160 bp, Homo sapiens
  chr9:128407605-128407765
  hypo
cccaacacctgagaaacgaagctcagtgagaacgcagatgacaatggagttttaaagacaactcaggttcaatgacaaacatagatttttctttctcaagctaattttacttaaaaagataccaaattggccaggtacggtggctcacgcctatgatccc

SEQ ID NO: 23488 - DNA, 225 bp, Homo sapiens
  chr9:128409705-128409930
  hypo
tgtaggaatacaactgaaattcggacaaccacaccaaggataagaaactggctcagatccgagccgtagacagtattcatctactattcatctatagtgcccatcacatttgctctctggtttgttgttcgtggttctgttcctctgctcggtcaggtgcacctaatgtcatggaccactgtcacagtcctcagcactgggcacgatcattcatgtaaagtatag

SEQ ID NO: 23489 - DNA, 29 bp, Homo sapiens
  chr9:128635174-128635203
  hypo
aagcaaaaattgacagaatttcggctggg

SEQ ID NO: 23490 - DNA, 421 bp, Homo sapiens; identical to SEQ ID NO: 7026
  chr9:128651895-128652316
  hypo

SEQ ID NO: 23491 - DNA, 30 bp, Homo sapiens
  chr9:128728891-128728921
  hypo
cgtctggggttttacggtgtgcactgggtg

SEQ ID NO: 23492 - DNA, 275 bp, Homo sapiens
  chr9:128759706-128759981
  hypo
tcattgttgctgccactagctcgggctcagctgccttccctgccatgtgtcgtgtagttgttttcagcacataagctgtcaacgagcgttctttggagatacttgaactggagtggcccaggggcttttcgcctttccgtaagcctgctctgccagggaggcgctgccccaaaggtggcctggccaccgtccagaatggaggcccccggtgctggcctgcccagcagcacctgcggctcagtccctccaggatcggaaggaatcacacctgccac

SEQ ID NO: 23493 - DNA, 31 bp, Homo sapiens
  chr9:128908570-128908601
  hypo
ctcgcactcggtatcccgtgactcatgagag

SEQ ID NO: 23494 - DNA, 31 bp, Homo sapiens
  chr9:128925406-128925437
  hypo
catggtcaaccctcagcgaatgcatctagct

SEQ ID NO: 23495 - DNA, 31 bp, Homo sapiens
  chr9:129265612-129265643
  hypo
ctcctcctgccgcctccgccagccctccctc

SEQ ID NO: 23496 - DNA, 422 bp, Homo sapiens
  chr9:129455240-129455662
  hypo
tgaggtagggcctgtgggccacgggagggaaggagatcttatcctgggccactggggagccacggcaggtgtcaacagaggggacaggctcccatcgggcagcaggttgccgaaggggacaaggctgaggcctgggctgcccccgccccttcatcacaggccgggttgtgtcccccacagtgaagagcgaggatgaagatggggacatgaagccggccaaggggcagggcagtcagagcaagggcagcggggatgacgggaaggacccgcggaggcccaagcgaccccggaccatcctcaccacgcagcagcgaagagccttcaaggcctccttcgaggtctcgtcgaagccttgccgaaaggtgaggggcggccggggggcggggctcaggctgatgcccgcacacccactgcctttctgg

SEQ ID NO: 23497 - DNA, 81 bp, Homo sapiens
  chr9:129627922-129628003
  hypo
tcctcacagcttaacagaatacgtggtgcagaattttacttaaagatactagccaatggggccgggcgcagtagctcattc

SEQ ID NO: 23498 - DNA, 173 bp, Homo sapiens
  chr9:129628463-129628636
  hypo
tcactcccaaatcagtatcttcgggtctaatatttctctctagctccagccccatatttcccacgaccccgtgaaaaacctgagcccagcttgtcctggctgagctacgtggcctccgagtagacaccatgcctcagtctccaggtgctgccgccagaattctgtttgagttc

SEQ ID NO: 23499 - DNA, 31 bp, Homo sapiens
  chr9:129633596-129633627
  hypo
gaaaaaaataggtcagcgtgtatgtgctgct

SEQ ID NO: 23500 - DNA, 15 bp, Homo sapiens
  chr9:129679037-129679052
  hypo
cgatggagtgagact

SEQ ID NO: 23501 - DNA, 219 bp, Homo sapiens; identical to SEQ ID NO: 7041
  chr9:130159224-130159443
  hypo

SEQ ID NO: 23502 - DNA, 30 bp, Homo sapiens
  chr9:130230041-130230071
  hypo
catggtctacccgccgcgggaggtgtgtgg

SEQ ID NO: 23503 - DNA, 21 bp, Homo sapiens
  chr9:130262619-130262640
  hypo
acagagcgagactgtctcaaa

SEQ ID NO: 23504 - DNA, 168 bp, Homo sapiens
  chr9:130266738-130266906
  hypo
tttgcagatctccttacgctctcactagggcccagggaggcctcatggaggatctcgaggctcagtgacctgccaaggacaacagcaagggacagccgcatccctggtctccggccacacagccccgtgttctgcacctcagcccttgttgaccgagggaggcccagg

SEQ ID NO: 23505 - DNA, 96 bp, Homo sapiens
  chr9:130269494-130269590
  hypo
agaccacctgcttggcgcgccgtcgcttttccgagagggtggctgactccggggtgctggggctggggctgccgcccccgccgctgttgctgtact

SEQ ID NO: 23506 - DNA, 66 bp, Homo sapiens
  chr9:130271242-130271308
  hypo
cctcgggtctacctcccgcatgtggatctgggctcgctgcttgaacacggacgtgctggacacatc

SEQ ID NO: 23507 - DNA, 122 bp, Homo sapiens
  chr9:130272604-130272726
  hypo
gatgaaggctgtgccccgagggagccgggtcagcaggggctccccaaggagcacctcccagccatcccagagcccaggtgctggaggctactgtattactattattatcattattattatat

SEQ ID NO: 23508 - DNA, 52 bp, Homo sapiens
  chr9:130279230-130279282
  hypo
ttggacagcacctcctcgaagcgcgccttggcctgctcgtacaccatgtggt

SEQ ID NO: 23509 - DNA, 31 bp, Homo sapiens
  chr9:130311543-130311574
  hypo
tcttcccaagttgcctcgtgacccctgctca

SEQ ID NO: 23510 - DNA, 8 bp, Homo sapiens
  chr9:130326063-130326071
  hypo
attacaag

SEQ ID NO: 23511 - DNA, 79 bp, Homo sapiens
  chr9:130327744-130327823
  hypo
aattgtatggtaggtgaattacgcctcaataaagctattatttttggctgggcgtggtggctcacgcctataatcttgg

SEQ ID NO: 23512 - DNA, 35 bp, Homo sapiens
  chr9:130444668-130444703
  hypo
tctctctctttctcagcgcccgctatgggcactgg

SEQ ID NO: 23513 - DNA, 31 bp, Homo sapiens
  chr9:130446401-130446432
  hypo
ttcatggaggggcctcgcgcagacagctgac

SEQ ID NO: 23514 - DNA, 25 bp, Homo sapiens
  chr9:130448209-130448234
  hypo
gtgagccaccgcgcccagccgacta

SEQ ID NO: 23515 - DNA, 31 bp, Homo sapiens
  chr9:130467717-130467748
  hypo
ctcgtccctcttgccacgtggtgctgacaaa

SEQ ID NO: 23516 - DNA, 251 bp, Homo sapiens
  chr9:130550915-130551166
  hypo
cggagcagcaccaactcgccctcatcagtcagctctgcggctccatcacccctgaggtacggggccccggtccccacggggtgcagagatcgaggtcccccggcagaggaggagtggggagtagaatggaaggagcgctcctctctggaagggaggctggtttggtgacagggcctgtcttggggtggggagtgtgtgggagaaaaaaacacctgacacaggctgtgcgccagtctcggttccatcagctg

SEQ ID NO: 23517 - DNA, 31 bp, Homo sapiens
  chr9:130570904-130570935
  hypo
ggagggggagcaccagcggtccaacgccgcc

SEQ ID NO: 23518 - DNA, 41 bp, Homo sapiens
  chr9:130589224-130589265
  hypo
attcaacccacatctacgccatcctgcggctgtctctccct

SEQ ID NO: 23519 - DNA, 24 bp, Homo sapiens
  chr9:130622503-130622527
  hypo
ggaaaactccgtttcaaaaaaaaa

SEQ ID NO: 23520 - DNA, 86 bp, Homo sapiens
  chr9:130630686-130630772
  hypo
ctcattgtcgtccacacgcccgctggtctctccacgtttcaagagccgctgggtcatggtctcagggcctgcgtccacatacagca

SEQ ID NO: 23521 - DNA, 186 bp, Homo sapiens
  chr9:130635123-130635309
  hypo
caggcccacctgcaaacgcccacccattcataaaccccgagacacagggtcccaggaggaacaggggctgccagggtctcccagagagggaggggcagagcccagggtgcagccccaggcccgggctccctccagtgccagtgaagacccttgctgcaccacccgcctgcccgcaactcacccacc

SEQ ID NO: 23522 - DNA, 30 bp, Homo sapiens
  chr9:130637449-130637479
  hypo
ctacaggagccgctcgcatgaacacagccc

SEQ ID NO: 23523 - DNA, 164 bp, Homo sapiens; identical to SEQ ID NO: 7048
  chr9:130639866-130640030
  hypo

SEQ ID NO: 23524 - DNA, 30 bp, Homo sapiens
  chr9:130672621-130672651
  hypo
gggggctctggccacgtcctctcctcatct

SEQ ID NO: 23525 - DNA, 453 bp, Homo sapiens; identical to SEQ ID NO: 7050
  chr9:130674525-130674978
  hypo

SEQ ID NO: 23526 - DNA, 80 bp, Homo sapiens
  chr9:130675503-130675583
  hypo
tgtggcctgaagccaagtcaccggcctctgtgcgcctcaagtctctcatctataaaatggggaagaaaacaacatctggg

SEQ ID NO: 23527 - DNA, 30 bp, Homo sapiens
  chr9:130710250-130710280
  hypo
ctcccctcagtcagcgtctccctggggacc

SEQ ID NO: 23528 - DNA, 30 bp, Homo sapiens
  chr9:130737542-130737572
  hypo
ggccaccatcccagccgtgccatggaaggc

SEQ ID NO: 23529 - DNA, 30 bp, Homo sapiens
  chr9:130744220-130744250
  hypo
gccatccacaggatgcgtgccctgagtcac

SEQ ID NO: 23530 - DNA, 125 bp, Homo sapiens
  chr9:130868764-130868889
  hypo
tcccctatgccggcatcgaccttgcagtctacgaggtgaggcccaagctggacagatttagaaacctcctcccagcacacctccacctgctgtctccctccttgacggacgcgtggttagtgcag

SEQ ID NO: 23531 - DNA, 105 bp, Homo sapiens
  chr9:130907173-130907278
  hypo
tggagagcagggagcacgggagcatgtggggtaacgcaggggtggccgcagtggagatgcccctttcctggggtgctgggggctgcagtccgggcaggaggggtg

SEQ ID NO: 23532 - DNA, 31 bp, Homo sapiens
  chr9:130910752-130910783
  hypo
atccatcgctgcctcccgaggatgccagcca

SEQ ID NO: 23533 - DNA, 31 bp, Homo sapiens
  chr9:130914349-130914380
  hypo
tagtgggaggggaggccggtcccccatgagg

SEQ ID NO: 23534 - DNA, 31 bp, Homo sapiens
  chr9:130932122-130932153
  hypo
tggggaacctgaagcccgaagaagaaacaag

SEQ ID NO: 23535 - DNA, 42 bp, Homo sapiens
  chr9:131060965-131061007
  hypo
gggtgttcttgctacattgctctgtgcgcgtaccttgatggt

SEQ ID NO: 23536 - DNA, 40 bp, Homo sapiens; identical to SEQ ID NO: 7055
  chr9:131183033-131183073
  hypo

SEQ ID NO: 23537 - DNA, 31 bp, Homo sapiens
  chr9:131394892-131394923
  hypo
gttcaaatcttgcctgcgctccctgggctat

SEQ ID NO: 23538 - DNA, 30 bp, Homo sapiens
  chr9:131395952-131395982
  hypo
cttcatttggcttgcgtcagaaacacaagg

SEQ ID NO: 23539 - DNA, 148 bp, Homo sapiens
  chr9:131411425-131411573
  hypo
ttaaaatggttaaaacgggccagagatggtggttcacagctttcatttcagcactttgggaggctgagtgggaggctcacgtgaggccagttgttcaataccagctgggcaacaaagcaagacctctgactctacagaattttccaaa

SEQ ID NO: 23540 - DNA, 205 bp, Homo sapiens
  chr9:131483896-131484101
  hypo
accctccctctacacccgggcagcagcacccaccatgccaggtacaggccccacagaagcaccaccagctgcagcgccaggtagaccacaaagagtgggtggttgcgctctcccacacagttctccatccaggggcagtggtggtcgtagcggcggacgcaacggcggcactcacggcagtgccgagccctcaggggctgctgtg

SEQ ID NO: 23541 - DNA, 30 bp, Homo sapiens
  chr9:131492163-131492193
  hypo
ggtctggccggggccgctgagcgtgggaag

SEQ ID NO: 23542 - DNA, 8 bp, Homo sapiens
  chr9:131574501-131574509
  hypo
ggcttgct

SEQ ID NO: 23543 - DNA, 24 bp, Homo sapiens
  chr9:131580092-131580116
  hypo
ctttgccaatctgggccgggcgcg

SEQ ID NO: 23544 - DNA, 30 bp, Homo sapiens
  chr9:131653096-131653126
  hypo
taaaccgtgtgtggccgtgactccatgtgc

SEQ ID NO: 23545 - DNA, 80 bp, Homo sapiens
  chr9:131675095-131675175
  hypo
gtagggatggagagacatggacggatctgggagacgctggagggggaattcaaagggacgggagttgatggtgggggtgg

SEQ ID NO: 23546 - DNA, 38 bp, Homo sapiens; identical to SEQ ID NO: 7057
  chr9:131709587-131709625
  hypo

SEQ ID NO: 23547 - DNA, 113 bp, Homo sapiens
  chr9:131776673-131776786
  hypo
gagcggggacacctaccgtggctttggcttctgcagccttggccttcttcagcctcgctttgcaggcatccaagtccagacgccggttttggaggagccgcctctccttctac

SEQ ID NO: 23548 - DNA, 27 bp, Homo sapiens
  chr9:131792372-131792399
  hypo
gccaccacgcccggcctaggtttcacc

SEQ ID NO: 23549 - DNA, 237 bp, Homo sapiens
  chr9:131822153-131822390
  hypo
ccggagtgggtcggccgagccacgcaccctgccctggcttctccccacgtgctctgggtgtggtttctctgttggaggaatctgcctcctctggcctccctacatggcagaaagggctgggggacctttagggtggcccgccgcaggtctgtggcctttgcttatttgctcgacaatcctttcctgagcacccttggaggtccacacccctcagcccttgggcgagcacggagggga

SEQ ID NO: 23550 - DNA, 303 bp, Homo sapiens; identical to SEQ ID NO: 7058
  chr9:131843184-131843487
  hypo

SEQ ID NO: 23551 - DNA, 361 bp, Homo sapiens
  chr9:131854102-131854463
  hypo
atatctgcagggaacaggaaactataaggcgagccctggcctcgaatcatagctaaaaaacaaggatccgagaggtagatttaacagcagatgagagagagttaaaaaggaaaagcaaactggagggtgtgtcagaagacatcccggctgcagtgtggagtgggaaagctaccgggagcagcttcaggcgcacccgcccccgctaactcatcgccttcacttcatccacactcacctgcttaccctgaccccgctccaacctgcccaaggtgcggtgctgggcagaagcccaactcttcaagccctcagaagcctctttgaaatatccacttttcgcggctgggcgcggtggctcacgcct

SEQ ID NO: 23552 - DNA, 30 bp, Homo sapiens
  chr9:131870289-131870319
  hypo
ggtgtgccttgaagcggctggaagccttca

SEQ ID NO: 23553 - DNA, 31 bp, Homo sapiens
  chr9:132004676-132004707
  hypo
tcccatccactggagccgcagagtgggggca

SEQ ID NO: 23554 - DNA, 31 bp, Homo sapiens
  chr9:132089110-132089141
  hypo
gcaagagaacgggggacgaggagcatctagc

SEQ ID NO: 23555 - DNA, 31 bp, Homo sapiens
  chr9:132112538-132112569
  hypo
aggttgctaagccaggcggcccacctttccc

SEQ ID NO: 23556 - DNA, 31 bp, Homo sapiens
  chr9:132142032-132142063
  hypo
catttttatatgccagcgtgtgcatgtatat

SEQ ID NO: 23557 - DNA, 69 bp, Homo sapiens; identical to SEQ ID NO: 7063
  chr9:132145664-132145733
  hypo

SEQ ID NO: 23558 - DNA, 173 bp, Homo sapiens
  chr9:132163289-132163462
  hypo
ccctgcgggccactcccggcctggccaccccaccgcatctccaagccccatctccctcttggggaccgtgtctctgggttttgtgaggctgaattcttctcagctctcaggtgttaagaccatctcctccaagaggcctccctgagccccggcccccacgatgatcctgctgg

SEQ ID NO: 23559 - DNA, 48 bp, Homo sapiens
  chr9:132211771-132211819
  hypo
gtctaatggagagaaccggagcaaggaaacgggcgctggtgagagctg

SEQ ID NO: 23560 - DNA, 340 bp, Homo sapiens; identical to SEQ ID NO: 7066
  chr9:132245128-132245468
  hypo

SEQ ID NO: 23561 - DNA, 89 bp, Homo sapiens; identical to SEQ ID NO: 7067
  chr9:132258285-132258374
  hypo

SEQ ID NO: 23562 - DNA, 223 bp, Homo sapiens; identical to SEQ ID NO: 7068
  chr9:132258618-132258841
  hypo

SEQ ID NO: 23563 - DNA, 78 bp, Homo sapiens; identical to SEQ ID NO: 7070
  chr9:132331031-132331109
  hypo

SEQ ID NO: 23564 - DNA, 100 bp, Homo sapiens; identical to SEQ ID NO: 7072
  chr9:132382254-132382354
  hypo

SEQ ID NO: 23565 - DNA, 271 bp, Homo sapiens
  chr9:132402738-132403009
  hypo
agccaaggctggggacatgggcgcccacccagcgtcgggccgcgtttaagccacctgcccacccccggggctctcgctgaccttcaaagttgagattggccccatgccgcaagagaacgtcggccgcccgcgtcagccccagctcagccatcttgagcagggcgttgctcacgccttcctggtaaaagggagagtgggctttcctctccagcagctcagtgagaacaaggattcggctctcctcgctggcgacataactgggcctgggaca

SEQ ID NO: 23566 - DNA, 323 bp, Homo sapiens
  chr9:132501745-132502068
  hypo
gcccagagacccacacgcgcagcaggctgccaggaaaccaggactcagggcccaccacaatctggaaggaacatcaagtccccaggtatagccacggcggctcttggcccatggtctggtggccaaggaggcatcagctgctggtcacaggtggcgggccgcttcccagaggatctgcagagccatggaggcgcaggggagctgggccagggtgtaggtcacggagcggatgggtgcccgcagcttccccaggtaggccacggtgtgtgccacacggcccacgaggaagaccaggaagtgcatccaggcgacaaaagggttag

SEQ ID NO: 23567 - DNA, 31 bp, Homo sapiens
  chr9:132509499-132509530
  hypo
caacatggaaagtgttcgcaaaataatgtta

SEQ ID NO: 23568 - DNA, 30 bp, Homo sapiens
  chr9:132530230-132530260
  hypo
atggcctaaggaggccgggcgctgtggctc

SEQ ID NO: 23569 - DNA, 30 bp, Homo sapiens
  chr9:132530947-132530977
  hypo
agaacatacacagcgcgtggctgggagcgg

SEQ ID NO: 23570 - DNA, 22 bp, Homo sapiens
  chr9:132535543-132535565
  hypo
gagccaccgcacccagccacat

SEQ ID NO: 23571 - DNA, 95 bp, Homo sapiens
  chr9:132604071-132604166
  hypo
cttagatctcaggaagcgcaccaagaatccgtgcatgagtcccctgcggtgtgtctgactccatcaccatggcgcctgttcgttgctgggctggt

SEQ ID NO: 23572 - DNA, 336 bp, Homo sapiens
  chr9:132633589-132633925
  hypo
cttagggttcatccacgttgcagcgtgtgtgtcggaatgccctgccttttgtatgctggttatttattgttccattgtgtggatggctggggcctttctgcttattcgttcatccgtcagtggacactcaggccgcttccctgttagctattgtgaggaatgctgctctgaccatgggtgtgcacacctctcttctttcatccctttgggtctatgcctatttttaatttctcgaggagccaccgtactgggttccacagtggccaccccatttcacattcccaccagtgacgcacaagagttccagtttctccacatcgtcgtccacactcattt

SEQ ID NO: 23573 - DNA, 30 bp, Homo sapiens
  chr9:132636599-132636629
  hypo
ctcaaaggtagtgccgacagaactggtaaa

SEQ ID NO: 23574 - DNA, 54 bp, Homo sapiens
  chr9:132638504-132638558
  hypo
caccttcatcaaggtgcgtgcggcgaggcggcgcgggggcggctctgccagcct

SEQ ID NO: 23575 - DNA, 378 bp, Homo sapiens; identical to SEQ ID NO: 7074
  chr9:132804283-132804661
  hypo

SEQ ID NO: 23576 - DNA, 918 bp, Homo sapiens; identical to SEQ ID NO: 7076
  chr9:132805028-132805946
  hypo

SEQ ID NO: 23577 - DNA, 31 bp, Homo sapiens; identical to SEQ ID NO: 7077
  chr9:132809114-132809145
  hypo

SEQ ID NO: 23578 - DNA, 52 bp, Homo sapiens
  chr9:132814991-132815043
  hypo
cgcgaatcaccaccctgccaggcctcatttcgtttttagtacagtattatat

SEQ ID NO: 23579 - DNA, 130 bp, Homo sapiens
  chr9:132821075-132821205
  hypo
tttcttttttgagcttcgttcattttgtgccatgtgtcagtaattcattcctttttactgttgaatggtcttccagcgtgtggatatatcttcttttgcttagcagttcaccagtcgatggatgtttggg

SEQ ID NO: 23580 - DNA, 513 bp, Homo sapiens
  chr9:132874159-132874672
  hypo
cttctctcaggtcctcggtcactgagactcacagctgcactgcatcctccgagagggagcttaattgagtctcgcacagacacacctagcgctggctccactctgtctcgcctgctaagatttactggctctgactgcccttgagcccgcatccgcgttcccttctctttctccagtgtcattaccttataggactggcgtcgagatacacaccgtaaatttaattaacagtctctgctgctcaccatcctttttttgggccttgtgtttctgaggaaaagtcagaagatgtattctgaagagccttagctttcatgtgagcttcagaagtatttaaacaatcccggttggctggctgcagagttgatggaggaacggcttcattccgaggtgccgccgtgctctgaaaggagccgcgaccatgcgaggcatttgttagggcagcggttctcaagggggtcctcgggatcaaaactattttcataatcatacggtgtgagtctcttgtgctgt

SEQ ID NO: 23581 - DNA, 507 bp, Homo sapiens
  chr9:132881037-132881544
  hypo
tacttaaagctcttccgatgattctgttgctcacccccattaagaaccattgctataaaggaattctcctccacatgaggaggtcgatgcctggagacagaggcagcaggccaagggcaggcacacccagctgagatggggcagggctggaaggcaggcctcctggatcctgcctggggccttgtctctctccccacactcattctttcaccgtatttgctgctcctcatggtgaggtcagaaatagcccgcccagccttggtgagccttcgctcccacaggagcccaacacccagcccgccacagtccggtgagcagcaggctgtcggtgttcctaagtcagggaaatctttggaagaacaatggagggagtcgtgggaccccaggctgcgacctgctgcctggctgctcactgcatcatgctggtttcaccctgctcagagcgggctccacccctgctcggcatcctgactcatcctatgcatatggcagcgctgcttgcaggag

SEQ ID NO: 23582 - DNA, 60 bp, Homo sapiens
  chr9:132881755-132881815
  hypo
cctaagggcgggcatcgttacttctgccttaacaggtgaagaaaccgaggctcagagagg

SEQ ID NO: 23583 - DNA, 50 bp, Homo sapiens
  chr9:133223981-133224031
  hypo
gccgggcagtccctgacgctggagtgtgacgcgaacggctttccagtccc

SEQ ID NO: 23584 - DNA, 31 bp, Homo sapiens
  chr9:133238734-133238765
  hypo
gtcactttgcttctctcggccaccatttctt

SEQ ID NO: 23585 - DNA, 31 bp, Homo sapiens
  chr9:133266639-133266670
  hypo
ggaagggcaggaggtgcggctggactgtgag

SEQ ID NO: 23586 - DNA, 31 bp, Homo sapiens
  chr9:133303021-133303052
  hypo
ggaggagggaggagacgcgctcctcagacct

SEQ ID NO: 23587 - DNA, 43 bp, Homo sapiens
  chr9:133304500-133304543
  hypo
gggctctcctgcctgccgcccttcctgccgcctttcctccttt

SEQ ID NO: 23588 - DNA, 81 bp, Homo sapiens
  chr9:133305059-133305140
  hypo
ctgccctgcctaggtacggggacacccaccctctggccacaccgctgcagctgccccaggggttaccggatgcagggcccc

SEQ ID NO: 23589 - DNA, 31 bp, Homo sapiens
  chr9:133364355-133364386
  hypo
gggctctgggctctaccgtagtcgctttaat

SEQ ID NO: 23590 - DNA, 119 bp, Homo sapiens
  chr9:133366662-133366781
  hypo
aaagtgagagagtcattaagacgtggcggaggagagagcacctggccgggctgctccggggcctccacggaggctgatcccaccgtggccgcggccacggctgccacttatcctgccat

SEQ ID NO: 23591 - DNA, 25 bp, Homo sapiens
  chr9:133381108-133381133
  hypo
agcgagactccgtctcaagaaaaca

SEQ ID NO: 23592 - DNA, 469 bp, Homo sapiens; identical to SEQ ID NO: 7084
  chr9:133537658-133538127
  hypo

SEQ ID NO: 23593 - DNA, 30 bp, Homo sapiens; identical to SEQ ID NO: 7085
  chr9:133538377-133538407
  hypo

SEQ ID NO: 23594 - DNA, 45 bp, Homo sapiens
  chr9:133585313-133585358
  hypo
aactagagaataaagcatgtgcgcggtggctcacacctgtaatgc

SEQ ID NO: 23595 - DNA, 241 bp, Homo sapiens
  chr9:133592859-133593100
  hypo
gcaggtggatcacctgaggtcaggagttcgaacccagctgtgcaatctagtgagatcttacctctacagaaatttaaaaaattagccaagctcccactggagccaaagagtcgaggctgcggtgagccatgaacacagcactgcattccaatttgggcaatagagggagaccgtgtctctggggggtaaaaaaaaaaaaaaatacagttcattggtagagtttcttaaaggcagccagcct

SEQ ID NO: 23596 - DNA, 41 bp, Homo sapiens
  chr9:133606662-133606703
  hypo
gggttacagacgtgagccactgcgtccggctgctttttcac

SEQ ID NO: 23597 - DNA, 175 bp, Homo sapiens
  chr9:133641497-133641672
  hypo
agcttgtgactgtgagggccccgggccgtggcatgcgttggtgcgctctcaagaatgcggccatggcactcacagacacataccaagaagcctcggcccccagtgcccccgccagcctgctcaggggcatgcggatgactggagcctggaaggcgggtcttgctgggcaggacag

SEQ ID NO: 23598 - DNA, 30 bp, Homo sapiens; identical to SEQ ID NO: 7088
  chr9:133660745-133660775
  hypo

SEQ ID NO: 23599 - DNA, 1217 bp, Homo sapiens; identical to SEQ ID NO: 7089
  chr9:133710180-133711397
  hypo

SEQ ID NO: 23600 - DNA, 30 bp, Homo sapiens
  chr9:133758474-133758504
  hypo
aggcaagtcccagccgggctacagcactgt

SEQ ID NO: 23601 - DNA, 30 bp, Homo sapiens
  chr9:133759952-133759982
  hypo
agccggctctgcctcggaagagggcagggg

SEQ ID NO: 23602 - DNA, 303 bp, Homo sapiens
  chr9:133767698-133768001
  hypo
tgtaagttctcatctcagcagcggaagccagcccgggagtgagcagcatccgaccgccgcctctgacacgggatgggatgcaggagacaccaaaggcgcgtttgaaacagatgctttgcctggccccgggcctgcagccactcccggctgagcgtgggctctccccggggcagagaagttgttttccgaatgttccttgctcttaggaaacctgggaaggagcagccgagtggaagtgaaaagcacatgtgctgtgttcctccgcccctttgaccgactgccggttacagggatctagaggag

SEQ ID NO: 23603 - DNA, 55 bp, Homo sapiens
  chr9:133773837-133773892
  hypo
ctccggttctgctggccgaacccctcctgccctgggaagccgcttcccatgctgt

SEQ ID NO: 23604 - DNA, 549 bp, Homo sapiens
  chr9:133779433-133779982
  hypo
ggacaaggtgcaccagtctagcggtcctcccggaccggccggatcttcatctcagagaacttgagtgagtactgccagccggtccaggaggaccactccacgccgtcggcataggaggcgtgcgcaccgcgcaggtactgcccattgaggttggacgtgtggcagttgcggtaccaccaggcaccgcggtagaaggcggcacagttgttctctgaatggtcgctgtcacggtccttggtggtgaacctcatgccgctgtgcttcaggagggagtcgcctgcgcaggggtgcacacaggtgtgggcacggggggcacgggtacacccactggtgttgcatgtgtgagcagacaccgagacactgcacgtgcacctggacgtgagtgcatacacgtacgcacgtgctctcacacatactgctgtgcacgcgtgcaagcgcacctgcccctccacacccgggtgtgtccatgcagctcacacgcacgcagtcccttctcgggcgtgcctggggctgcccctgggtctaggcggtctctatccctccccccag

SEQ ID NO: 23605 - DNA, 30 bp, Homo sapiens
  chr9:133787179-133787209
  hypo
tagccagtgctccccggtgagcctgccaaa

SEQ ID NO: 23606 - DNA, 30 bp, Homo sapiens
  chr9:133911550-133911580
  hypo
aggtgcaagtgcaacgggcatgccagcgag

SEQ ID NO: 23607 - DNA, 150 bp, Homo sapiens
  chr9:133967062-133967212
  hypo
ggagctgcagatccagggcttcgagagtgacctcgccgagatccgcgccgacaaacagaacctggaggccattctgcacagcctgcccgagaactgtgccagctggcagtgagggctgcccagatccccggcacacactcccccacctgc

SEQ ID NO: 23608 - DNA, 30 bp, Homo sapiens
  chr9:133979441-133979471
  hypo
gatgctctggtccccggggactgaaaagtg

SEQ ID NO: 23609 - DNA, 78 bp, Homo sapiens
  chr9:134126710-134126788
  hypo
cactggctgcccacctcggtcaggctgcaaccaggaaggaggcagcccaccctccaagggacacgtggtccacatgag

SEQ ID NO: 23610 - DNA, 32 bp, Homo sapiens
  chr9:134132751-134132783
  hypo
cgctgagattacaggtgcgagctaccacacct

SEQ ID NO: 23611 - DNA, 596 bp, Homo sapiens; identical to SEQ ID NO: 7091
  chr9:134151950-134152546
  hypo

SEQ ID NO: 23612 - DNA, 30 bp, Homo sapiens
  chr9:134157081-134157111
  hypo
ggggccttttcagccgaagctcagaaccac

SEQ ID NO: 23613 - DNA, 30 bp, Homo sapiens
  chr9:134183530-134183560
  hypo
gtgggcctgtcccgcgtgatgatcggccgc

SEQ ID NO: 23614 - DNA, 31 bp, Homo sapiens
  chr9:134188221-134188252
  hypo
cacgggcctggccatacgtcttccatatgtg

SEQ ID NO: 23615 - DNA, 31 bp, Homo sapiens
  chr9:134225985-134226016
  hypo
tgtttgtttgtttgtttgtgacggagtctcg

SEQ ID NO: 23616 - DNA, 30 bp, Homo sapiens
  chr9:134305365-134305395
  hypo
ggagatccatgattcgtgaaggattcactc

SEQ ID NO: 23617 - DNA, 56 bp, Homo sapiens
  chr9:134400375-134400431
  hypo
ccctgaacacacatgccgggcgggagacctgccctgaggctcggcagcccctcagt

SEQ ID NO: 23618 - DNA, 54 bp, Homo sapiens
  chr9:134406194-134406248
  hypo
cccaacggggttagcacggacttggggctccgaggagcccggccggcggagagg

SEQ ID NO: 23619 - DNA, 39 bp, Homo sapiens
  chr9:134688852-134688891
  hypo
ctgccgttgtttgagacggagtctcactctgtcacccag

SEQ ID NO: 23620 - DNA, 142 bp, Homo sapiens
  chr9:134746511-134746653
  hypo
tgagccctggatccaggtgtgcgtcctgctgtacgccccggattcggtgctcaccctaccatacaccccacattcggtatgcagcacccacacgctttttcctactcaggccctctcctgcggtgggggcaaagataacagg

SEQ ID NO: 23621 - DNA, 118 bp, Homo sapiens
  chr9:134775010-134775128
  hypo
ctcaatggctgttagcgtcctttctcttcggagtgtggtgcagcaggaagggtaacgtaacaggagccctcctggctctgccatcgagatggagcctggtgtgcgctctctagcagac

SEQ ID NO: 23622 - DNA, 253 bp, Homo sapiens
  chr9:134818812-134819065
  hypo
gctgcctcccgagacggtgagcacggctagcgtctgcagcgggctctgcagtgcggcgccccactttgagagcagggctaaggacaggtaggaacagtgtgctcccctcctacacttccaccatatgttacactctgttctgtggcagaatcaaattactttaatttttacctttggaatataggcaaacaagcagtaacacagcagtggtgactagtttacacttgagcagacgcggcgcggaaagacatta

SEQ ID NO: 23623 - DNA, 108 bp, Homo sapiens
  chr9:134902644-134902752
  hypo
tgagaaagaagagaacgcaggagccgtgtccacaaccaggcctcttagagaccagaatgcagcccaccgcagcccaactgctccagcagcttccggccatttgcccta

SEQ ID NO: 23624 - DNA, 129 bp, Homo sapiens
  chr9:134903334-134903463
  hypo
tcatcaactgctggcagtcaccggcctaggtgcccatctctgatctgagcaaccacagccatagtagagtcacagggcacacacacagccggacaacctacgtgctccggccccagctcctccttccac

SEQ ID NO: 23625 - DNA, 595 bp, Homo sapiens; identical to SEQ ID NO: 7095
  chr9:135036692-135037287
  hypo

SEQ ID NO: 23626 - DNA, 31 bp, Homo sapiens; identical to SEQ ID NO: 7096
  chr9:135037501-135037532
  hypo

SEQ ID NO: 23627 - DNA, 880 bp, Homo sapiens
  chr9:135048987-135049867
  hypo
agctgcctccaatcccacctgcgatggggcaggcagtggatggatggacagacgaacggacagacaggcaggccgcaccatgctgcggatgagacggatggatggacagacggacagacaggcaggagcaccatgctgcggatgagatggatggacggacgaacggagaggcaggcaggtcgaaccatactgcggatgagacggacggacggacagacaggcaggccacaccatgctgcggatgagatggatggatggacagacggacagacaggcaggccgcaccatgctgcggatgagatggacggacggacggacagatggacagacaggcaggagcaccatgctgcggatgagatggatggacagacgaacagacaggcaggcaggtcgaaccatgctacggatgagacggacggatggacggacaggcaggcaggccacaccatgctgcggatgagatggacagacggacagacggacagataggcaggccgcaccatgctgcggatgagatggacagacggacagataggcaggccgcaccatgctgcggatgagacggacggacggacaggcaggtcgaaccatgctgcagattagacggacagatggacggacggacagacaggcaggccgcaccatgctgtggatgagatggatggatggacagacggacagacaggcaggccgcaccatgctgcggatgagacggacggacggacggacagacagacaggtcgaaccatgctgcagattagacggacagatggacggacggacagacaggcaggccgcaccatgctgcggatgagaacttgggcttctggagggaggagatggggcccgggggcatcccgcacttctgggatgtgggact

SEQ ID NO: 23628 - DNA, 31 bp, Homo sapiens
  chr9:135130344-135130375
  hypo
gcgagactccgtctcaaaaaaaaaaaaagga

SEQ ID NO: 23629 - DNA, 41 bp, Homo sapiens
  chr9:135196056-135196097
  hypo
aaatgcttaaataagacggttgaaatcgtatggttaaaaag

SEQ ID NO: 23630 - DNA, 79 bp, Homo sapiens
  chr9:135196473-135196552
  hypo
tccaacacctctcctccgtcccccactcctacccagccctcttcccacactcagctccctgccacgcctacatttccca

SEQ ID NO: 23631 - DNA, 30 bp, Homo sapiens
  chr9:135266721-135266751
  hypo
cactagagacattcacggtcacgctaagta

SEQ ID NO: 23632 - DNA, 345 bp, Homo sapiens
  chr9:135267103-135267448
  hypo
gacgggcacgaactgcgtgcctgcctccctcccaacgtgtcccgtgccactgcggggaagtgaccctccgcccaggctctcccaccaccagtttattggggtcctggtccacttggcagttatatttgcacggacagttactgaagtgtggtaaaaaccagcctagtgggtaaaggtcacatggcttcactaaacacacgaggaaaccaaacaaattagtatagagaacagcttaagaaacaaagctcttgcggaagacaggtctacggtgatttccgggcattggatcggttatggctgaaccaggcctgtcagggcttatttcttcagcgaggtgggcactgg

SEQ ID NO: 23633 - DNA, 247 bp, Homo sapiens
  chr9:135275313-135275560
  hypo
aaagaatgcttcttgtcgatctataaatctgaatcatccataaaagaaagttaggtgctagctctgcatacaggaagttcaacaaacactaaggccccacaagctcaccttgtgctttaaattccttaaaccgttccaagtcgtcccggtacatccgcttgattgtgctggtggccctgtccttgatgttaggaatgaactcctgaagctgtttcacggcagaacccaaatccgcatctgaatcatc

SEQ ID NO: 23634 - DNA, 770 bp, Homo sapiens; identical to SEQ ID NO: 7099
  chr9:135286198-135286968
  hypo

SEQ ID NO: 23635 - DNA, 235 bp, Homo sapiens
  chr9:135384262-135384497
  hypo
aggcagcaccaggatttgagccgagtctccctccagggcggctgttcatatccacaggccgcatgcttccaggaggcagagcaaggccctgggcgaggaagtcatttctcatcctgagctccgttcacgttggtgccagtggcctggtgcggaggtgagtcctcagcagcgagatggcggctacgaacaacagttacagcaatgaacggccaacgctgatgagcacctactgggg

SEQ ID NO: 23636 - DNA, 238 bp, Homo sapiens; identical to SEQ ID NO: 7101
  chr9:135462647-135462885
  hypo

SEQ ID NO: 23637 - DNA, 88 bp, Homo sapiens
  chr9:135548232-135548320
  hypo
cacttggcccagttcttggcacgctgtaaatgctcaaggtgaaaatataatgagttgggccgggcgcggtggctcacgcctgtaatcc

SEQ ID NO: 23638 - DNA, 26 bp, Homo sapiens
  chr9:135548559-135548585
  hypo
actccgtctcaaaaaaaaagaaagaa

SEQ ID NO: 23639 - DNA, 31 bp, Homo sapiens
  chr9:135600715-135600746
  hypo
tcccacagccaccctgcgaggcggctacggt

SEQ ID NO: 23640 - DNA, 31 bp, Homo sapiens
  chr9:135624733-135624764
  hypo
gggttcaggtgctggacgctctggcctgcca

SEQ ID NO: 23641 - DNA, 31 bp, Homo sapiens
  chr9:135624971-135625002
  hypo
tgacccagaagaactcgcgactcacagctgc

SEQ ID NO: 23642 - DNA, 173 bp, Homo sapiens
  chr9:135626061-135626234
  hypo
tgaatcccaccagggcgcgagctcccccatgagagcaacttcagagagaagctcccttaggctccctcccctcccaaatctgcacctaacgtcaggctgcatccagagataccaatggaaattaggtacaaattgtaccctggacttgactttgcaatcggaagaaacctcga

SEQ ID NO: 23643 - DNA, 31 bp, Homo sapiens
  chr9:135654706-135654737
  hypo
tgtatttattcattttcggagagacaaggtc

SEQ ID NO: 23644 - DNA, 34 bp, Homo sapiens
  chr9:135735332-135735366
  hypo
tccctttcacggtgttcggcgagaggactggggc

SEQ ID NO: 23645 - DNA, 142 bp, Homo sapiens
  chr9:135745916-135746058
  hypo
cattatatacaccatcgcctgctttaatattgcccagggctactgtaaatgctcactttgtactaaatctgcctttctggcggcgaaggggctgccagcccaagtgccggggctccctctgctccctcgtgtgctcgctcac

SEQ ID NO: 23646 - DNA, 31 bp, Homo sapiens
  chr9:135746338-135746369
  hypo
attcacctaggcggccgggtatggtggctca

SEQ ID NO: 23647 - DNA, 92 bp, Homo sapiens
  chr9:135767902-135767994
  hypo
gaacaactctccaagagtatccgcaggaggtgggcggcaccccatctcaccaaggtcctggccgggtcttcgctctgcccaaaccctcctcc

SEQ ID NO: 23648 - DNA, 30 bp, Homo sapiens
  chr9:135865248-135865278
  hypo
ttccaccagaagtccgacatgaagaagcac

SEQ ID NO: 23649 - DNA, 31 bp, Homo sapiens
  chr9:135898910-135898941
  hypo
gcccactgcagggaaacggttaaaatgcgct

SEQ ID NO: 23650 - DNA, 51 bp, Homo sapiens; identical to SEQ ID NO: 7104
  chr9:135906505-135906556
  hypo

SEQ ID NO: 23651 - DNA, 31 bp, Homo sapiens
  chr9:135908201-135908232
  hypo
agatcagtgaagagatcgtttatcccagaat

SEQ ID NO: 23652 - DNA, 31 bp, Homo sapiens
  chr9:135927292-135927323
  hypo
ggaggtcctagggccacgccctgtgtgtcca

SEQ ID NO: 23653 - DNA, 30 bp, Homo sapiens
  chr9:135943292-135943322
  hypo
actattctgtaccccgggaaggcctgggga

SEQ ID NO: 23654 - DNA, 149 bp, Homo sapiens
  chr9:135945846-135945995
  hypo
ggagtgccaagacctacgcctacctgttttcccatccctctcggatgcccgtctaccccaaatgggtgggggccgaccatgcagatgacattcagtacgttttcgggaagcccttcgccacccccacgggctaccggccccaagacagg

SEQ ID NO: 23655 - DNA, 54 bp, Homo sapiens
  chr9:135962403-135962457
  hypo
ccccgacaggcaactccgagtctgcccccgtccctgcaacgggtgactctcagg

SEQ ID NO: 23656 - DNA, 31 bp, Homo sapiens
  chr9:135978311-135978342
  hypo
cggtgacaaggccccccgggcagcacagggg

SEQ ID NO: 23657 - DNA, 31 bp, Homo sapiens
  chr9:136045257-136045288
  hypo
ggaagaaacacgccccgcagccattaaaggt

SEQ ID NO: 23658 - DNA, 423 bp, Homo sapiens
  chr9:136372632-136373055
  hypo
ggccactggccccttctccttcgggtctcccagcagcgcccgcactgggcagcctttctgacccagcgcctcactcccccaatcccccgcgatggctcagttctgggtctgcctcccccatcagtctgtgcaccatcggaaggcagagcccaggtctgctggacttgtgtgactccttggggttgggaaagctgtgcggcacatggagacactcaggaaggggcgacgtttaaactgggccctgggaccgagccccctgtttcctgctgtttcaggtcaagcgttggggcggcacagcaagaccagggcagagctggtgatatgacacagggcacgattcacccgagatggttggaggggaagggtcacccgtcagtactttcacacgcaaggccacgccacgaggccagcctgtgtctgcct

SEQ ID NO: 23659 - DNA, 71 bp, Homo sapiens
  chr9:136376887-136376958
  hypo
tgtgtatatatgtgcacgtgtgtatgtgtggtgtatggcatgtgtacatgtgtgcacgtgtatgtgtggtg

SEQ ID NO: 23660 - DNA, 350 bp, Homo sapiens
  chr9:136380582-136380932
  hypo
cacaggacacctccccgctgggcttggtacctcaaagaagaagcgtagcatcagggccagcgccccgaagcagaggccggggcctatctgctgggtgtagacgctcttgtctgggtacaggcccttcttctccttcatcttctgtagctgtgaggacaggaggccacagcaaagcttttaggtcacagcactggggaacgcccctccccaaaccagcccgagagctggccctgcacaggctcaccccagccctctcccggcaggagaggaggctcaggagcctcctgccgcacccagcctcagatggcttctgctggacagggcccttcacggtgcgacccagcagagac

SEQ ID NO: 23661 - DNA, 120 bp, Homo sapiens
  chr9:136381249-136381369
  hypo
gtcccagtgcttaggaaggctcgcgtgggcgtttccacttacagaggggtttgcattccgaggaagatgcgggaagtgtggggccacatccctggagccggccttgtgttttctaggcca

SEQ ID NO: 23662 - DNA, 30 bp, Homo sapiens
  chr9:136382255-136382285
  hypo
cctggccaagaccagcgggaggagcaacct

SEQ ID NO: 23663 - DNA, 203 bp, Homo sapiens
  chr9:136382776-136382979
  hypo
aaactccgtctcaaaaaaaaaaaaaaaaaagtcaggttctggccccgccactgccctgccatgacgtcctgttaagttgctgaggcctccatgctttggttccttcataggccaaatggcaaatcagtcccatgctccttggctgtggggaggattgggacgggctttgcaagctgcccaccagaactcgagcgctctcccca

SEQ ID NO: 23664 - DNA, 261 bp, Homo sapiens
  chr9:136383896-136384157
  hypo
ggcaggaggtaaatgaagatccgaggcaggaggagtcagacaggggagaggtgacgggcctcctgggtccccgttcatcgaggctcgcgcagtacgcacccactttgccgcgatgatgaggatggctgtgccgatggggcccgagtacaccccgtagccccatcggtcatggtagatccgcacagcaatggtcaggacgccgaacatcacaaatgttgacctcttgggttcgtcgaagtcggccagtgctggaggggccag

SEQ ID NO: 23665 - DNA, 30 bp, Homo sapiens
  chr9:136385313-136385343
  hypo
tgctcagggctgtcccgtagacactgaaat

SEQ ID NO: 23666 - DNA, 203 bp, Homo sapiens
  chr9:136385570-136385773
  hypo
actgccgagcactcccgcagagggtcctgtggggattaagtggcacatgccagcgaggtgtttaggggctggggtgtgccaagggttcactcaatgtcacctcagcagaattcgctcatctgcactggcaggactgggcggagactgagtggtcactcaggtgaagcccgcttaggtggggcggtctccgggagggaccctac

SEQ ID NO: 23667 - DNA, 335 bp, Homo sapiens
  chr9:136397021-136397356
  hypo
cccacctcgacagctcgggccacgtccttaaactcccgagcctgctgtggccactttgctgtgaggacaggccctgctcccactgcggcagcctaacatcctccccagggaacctccaaagtggtcagccacggcccaccagcccctctgcctcaagcctgcttctctatccccgccgtgttttccctggaaccccaccctcccgggcatcccccacacatattcctgctgtcctatttctaagctcctcagatatctggaaaacactggcggagaaaatccccttcttttttttctctctctttttttctttttgagacggaatctcactcttt

SEQ ID NO: 23668 - DNA, 212 bp, Homo sapiens
  chr9:136402543-136402755
  hypo
caatagcctggaggggggcaccgacgccacggccttctggtggggggagtggaccaagtggacggcgtgttcccgcagttgcgggggtggggtgacatcccaggagcggcactgcctgcagcagaggtgcgaggttgggcacgtggccctgaggggatggcatgagggcagggtagcgggcaggagagggcggttggctcttcagcctggtg

SEQ ID NO: 23669 - DNA, 30 bp, Homo sapiens
  chr9:136407493-136407523
  hypo
acaaacctgctcacacggcctcctgctgga

SEQ ID NO: 23670 - DNA, 42 bp, Homo sapiens
  chr9:136501757-136501799
  hypo
atgtccgaccgtggcgagcttgagaacgcagatctcgtggtg

SEQ ID NO: 23671 - DNA, 31 bp, Homo sapiens
  chr9:136568774-136568805
  hypo
agacaaccccccaccccgccacctgccctcc

SEQ ID NO: 23672 - DNA, 46 bp, Homo sapiens
  chr9:136641168-136641214
  hypo
cgatctcccgggatggcggccggctgatgggcggctggtggcagag

SEQ ID NO: 23673 - DNA, 173 bp, Homo sapiens
  chr9:136648155-136648328
  hypo
gtgccatgtgtgtatgcgtgcatgtgtgtgtgtgtctgaaccatttactaacatggctatagctactgatggccaggcctcacccgccgggagaacccagggtgaccggtgtttctgtgatgagaaacctccatgcacctgttgagaatgttctgtgccgtgtttgggggtgg

SEQ ID NO: 23674 - DNA, 82 bp, Homo sapiens
  chr9:136651135-136651217
  hypo
ctgtgtgaacacatgttctcacgtgtgtacctgctctcttgcccatgctgtacgtgcacacgtgcctctgtatgcatgcatg

SEQ ID NO: 23675 - DNA, 289 bp, Homo sapiens
  chr9:136655638-136655927
  hypo
aacttaaaaaacaaaacaaaacgaacttttctcctcacgtcctgctcactgtacgcatttgtgaccgcctcgcgcaggagctcacggcagcacggacccgccaggtgctgatggtgcagggtgcggccgtccttggcctcctctgcacccacacattttaatttctttctaaaatgaaagatgaagggggcagtatcataatgcccttcagaagcttattttttttttctttcatcgccgacgtatcgcaggtgcttttccgtgccccacgttcgcggagggcattctc

SEQ ID NO: 23676 - DNA, 31 bp, Homo sapiens
  chr9:136656439-136656470
  hypo
cgactgccggccccaccgagcctgggcccaa

SEQ ID NO: 23677 - DNA, 164 bp, Homo sapiens
  chr9:136664523-136664687
  hypo
ggacacctctggcatgcgaggctgacagtccacgactctgataaaggacctgaatctgctcgaagctcacctgacccagccacagtcaagcaaagcacccatggccggtcccacatggcctgcaggggtgtgtccccatggggggatcccgtgtccacagacct

SEQ ID NO: 23678 - DNA, 161 bp, Homo sapiens
  chr9:136672029-136672190
  hypo
acacccgcagggcaggcgagggggtccgctcaaaggggtggagggacacgtttctctctggccgctgacaaaaacttcatttacattctcagcgtcatccgtgcctccagccacgcacgtcagtgctgccctcacccgcagacaagcggagcccagaaacc

SEQ ID NO: 23679 - DNA, 31 bp, Homo sapiens
  chr9:136674468-136674499
  hypo
cggggaggggatgtgacgtggggacagtgcc

SEQ ID NO: 23680 - DNA, 31 bp, Homo sapiens
  chr9:136675284-136675315
  hypo
ccccagcctccccttccgggccactcacctg

SEQ ID NO: 23681 - DNA, 140 bp, Homo sapiens
  chr9:136677320-136677460
  hypo
tcccccaggtcatgctcgctgcacaggaggaggcgggttagaggggaggggaggctcccgccaccctgaccggggagccgcagagcacgagggtccacgagggacgcaggcggctggggccacagcgaggtcacctgccc

SEQ ID NO: 23682 - DNA, 796 bp, Homo sapiens
  chr9:136680459-136681255
  hypo
tttaaggatcaaaatacgcccttagtggtacctttctgacaagtggctacacctgtgtcactcatgccctcccacaccatagagtattttcatctcaccggagctcctgcccttccccatcagtctccttcccgccccgagcaaccacccttctgactgttcttcaccacagacgagccttgtctgtagaatgtcaacggtgttgtgcgttagatttgtttttgtgcctggcttcttcccctcaacattggatcttgtttgagacacatccattctgacttgcccacatttgcagctcattcctgtttactgctgagtactaatccacggcatgaacaacaacgtgctacccatcttccttctttatggacatttgggttgcctccaagttgttgcttattgtgaataaaagctgctatatgagcattcaagttgtgtgtgtgcgtgtgtatgcacgcacgcctgtgtggtgggtggggggttacacaggctttcttttcctttggaaacaaaattccactaggactggaactcctggtcaaaggggaggtctagactcaacctcataagcagctgacaaatgcttttctaaagtgggtgcattctacacccccagccagcagcgctcaccagccccagctgcgccacatcctcatcagcttctgctgttgccggtctttttccattcagcccccagagtgcgtgtggagtgaaacagaactgtggttctatttggcactttcctgatggctaacgctgctgaggggtctcctgcgtccttactgtataccttcct

SEQ ID NO: 23683 - DNA, 120 bp, Homo sapiens
  chr9:136686386-136686506
  hypo
gcaggccagtcctcatcacttcggaacaggcgggccgcagtgggtctcttgttggcaggaacttgactgtcgctcctgagcccctggaggggaggcagcgagggaaactagggttgtctt

SEQ ID NO: 23684 - DNA, 116 bp, Homo sapiens
  chr9:136691770-136691886
  hypo
gccacctaggatgaagcggtggctaaataaagcttggtctcatgtccatgtccttcctttggcctctcttctgccctgagtgggagctttcaaatttctcccgtgtcccttcaatt

SEQ ID NO: 23685 - DNA, 31 bp, Homo sapiens
  chr9:136694948-136694979
  hypo
ccttcttattttttgacgtggctccgctgta

SEQ ID NO: 23686 - DNA, 31 bp, Homo sapiens
  chr9:136696894-136696925
  hypo
aaacttgccctcacaccggccaggagctccc

SEQ ID NO: 23687 - DNA, 31 bp, Homo sapiens
  chr9:136698869-136698900
  hypo
aggaatgaggtggacacggagaagagcagag

SEQ ID NO: 23688 - DNA, 40 bp, Homo sapiens
  chr9:136699683-136699723
  hypo
ggcaaggaatgtgtcacgcccactccgggctccgggtgtc

SEQ ID NO: 23689 - DNA, 73 bp, Homo sapiens
  chr9:136714184-136714257
  hypo
acagttgctgaagaggcggccttggtttgttttgcttgttacagagtaaaaccatcttcgctccctaaaggga

SEQ ID NO: 23690 - DNA, 66 bp, Homo sapiens
  chr9:136718719-136718785
  hypo
ctacagccaacccacacatgccgcccccctttgctgcaccaaagcgcttccccacccagggccagc

SEQ ID NO: 23691 - DNA, 189 bp, Homo sapiens
  chr9:136722068-136722257
  hypo
caaggaccaggtgctgcgctgcacgatgcacagacacagagcaaccccgcgaggcagagtcatgctcccagcctacagaagagacaaaggttccaagagcatccctgcccaaggtcatttggctgacagaagcttccttcatgggacctgacctcccagcctgaggacacctttcggtttccttctcag

SEQ ID NO: 23692 - DNA, 162 bp, Homo sapiens
  chr9:136723289-136723451
  hypo
ctttgtatacctgaggcgttgggccacgcagcgtatgctcacaatgtggtttatggtggggctgtgggcatgcaggatcagtgtggcctctgcaggcgctggggatggagtaactaaggtcagcctcacaggcatgcccaaccccaccggccaccagtgagg

SEQ ID NO: 23693 - DNA, 71 bp, Homo sapiens
  chr9:136725454-136725525
  hypo
cattttttaaaaacctcaattcaaaggaatttctgtgtcctctgagaatccaacaacggaagtccccgtgg

SEQ ID NO: 23694 - DNA, 36 bp, Homo sapiens
  chr9:136731600-136731636
  hypo
agtgtgggggcaactgcgctgcgatgattttaaaga

SEQ ID NO: 23695 - DNA, 110 bp, Homo sapiens
  chr9:136733577-136733687
  hypo
gataacagtgtctacccgtgtggctgtaggtgaatgagacggagcctggcccaaagcagggactcgcgcacagcttgcggaaaggggactgtgcccgatcagaaggtcca

SEQ ID NO: 23696 - DNA, 31 bp, Homo sapiens
  chr9:136737402-136737433
  hypo
ttcctccctgcatgctcggctcccagcaccc

SEQ ID NO: 23697 - DNA, 101 bp, Homo sapiens
  chr9:136743437-136743538
  hypo
aactgcgacccaagcacgatcgaggctgtgtgtttctgaaaggatctgaccgaactgagcactaagattgttcagaatctggccaacgcagctccccatcc

SEQ ID NO: 23698 - DNA, 31 bp, Homo sapiens
  chr9:136743949-136743980
  hypo
acagcagctgagcactcggagtggaagcgcc

SEQ ID NO: 23699 - DNA, 172 bp, Homo sapiens
  chr9:136751546-136751718
  hypo
ctcaaacccatgtccatctgacgccacagtctgagctctggccagggtccagctctaacctcgtcccagacaagaggaagccccagacttgacagcaccacacacctgagcctgggccccgtgtcggagtcagtgaggcccacgtgtttgcgcctgtgtctggggggtgcaa

SEQ ID NO: 23700 - DNA, 102 bp, Homo sapiens
  chr9:136758976-136759078
  hypo
gagagtcgggcgcccacgtgtaccacacacacagttgaatgctttactggacctcacggatcctcacagacctctggaaagttctgtcgtaatctccacctt

SEQ ID NO: 23701 - DNA, 31 bp, Homo sapiens
  chr9:136762241-136762272
  hypo
gttgggcttgtgagaacgcagcactaggaag

SEQ ID NO: 23702 - DNA, 241 bp, Homo sapiens
  chr9:136766769-136767010
  hypo
ggggctcctgccggcccggcctggtgactctacctaggtctgtaggcactgggctgggcccatccctcctggggtatttatttcccccactgttctgacaccaggccctcccgtaagcacagacagccctgctgtccctgactctggaaccccagcgcccactgccacattctaccttttcccaggagacgggccgatggggtcagtggcaatgtgccaccaccatcggagggggctgggg

SEQ ID NO: 23703 - DNA, 31 bp, Homo sapiens
  chr9:136771808-136771839
  hypo
acccatgacctcacgccgcagaacctggcac

SEQ ID NO: 23704 - DNA, 58 bp, Homo sapiens
  chr9:136785102-136785160
  hypo
tctctgcgctgagccacgtgccaggaggccagacaggcctgggcgtgggccccagtgt

SEQ ID NO: 23705 - DNA, 304 bp, Homo sapiens
  chr9:136835361-136835665
  hypo
ggcctggggaagggccccacccgatgaccccacacagcaagcgatgtgaggaaaacccccgcccgccatgtcttgaaaatacaagtctcgtaaaaaggcagtttcccaagcggaggctgggggatggcaccacgttcggtgcttgctgggagccagggaccttggcccacacgaggccaccgaggctcacgggacctcaccagacctcacctgaccacccccacagcccgttctacagaggagcccacagaggcgtggcagtggcgatcacgaggctgtccacggcacccacagccctgtggtt

SEQ ID NO: 23706 - DNA, 31 bp, Homo sapiens
  chr9:136852076-136852107
  hypo
ggaggcacaaagcctgcgtggcacacagcag

SEQ ID NO: 23707 - DNA, 192 bp, Homo sapiens
  chr9:136905411-136905603
  hypo
gagcaggtgctgggcacggcccacaccactggggctgcgtggcgccctgggattggagggggcttggggcgatgtcggagctgcctcagctgggtgaggaggtgaaccaggagcacctgggccctgctctgcccctcactcccgtgacccccagtgagtcatgagccctctccgcctcggcttcttcgcctg

SEQ ID NO: 23708 - DNA, 30 bp, Homo sapiens
  chr9:136923094-136923124
  hypo
ggggtctgcacacccgacacagaggccctg

SEQ ID NO: 23709 - DNA, 108 bp, Homo sapiens
  chr9:137287804-137287912
  hypo
ctggaggtgacaggcccgagtctttgcctgcccctgcggggaggcgggaaacagatgtgcagcaggtacggagagcccaccccgccgagggcccgtagggcccatctt

SEQ ID NO: 23710 - DNA, 35 bp, Homo sapiens
  chr9:137330714-137330749
  hypo
aagcactgaagccccccggccgccaacccctgaaa

SEQ ID NO: 23711 - DNA, 30 bp, Homo sapiens
  chr9:137485433-137485463
  hypo
cacctgcgcctggagcgcctgggcgcagcc

SEQ ID NO: 23712 - DNA, 30 bp, Homo sapiens
  chr9:137485708-137485738
  hypo
gaagtgccaggtgcacgctatgccctgggc

SEQ ID NO: 23713 - DNA, 146 bp, Homo sapiens
  chr9:137645688-137645834
  hypo
tccctagggtccccctgggagcggaggtttgaagggcgagccgggagacgtggggcctcaggtatgtgggatccttgccttcgctgtctggtgggcgcctcccgttctccggcggcagcgacggcgagcatggagggaccccaact

SEQ ID NO: 23714 - DNA, 205 bp, Homo sapiens
  chr9:137646058-137646263
  hypo
tgctctttctcctgagaaaggcggactcgccactgaccctttgtctcttacccctggcagggtcctcgaggtgtgcaaggcccgcctggtccggccgggaagcccggaagacgggtgagtggtgcgagtgtgtgtggtttagtgacagcagcttgggcgctggaggagcccaaatctggggtgcgggcacccccaacagccagct

SEQ ID NO: 23715 - DNA, 30 bp, Homo sapiens
  chr9:137709414-137709444
  hypo
gacccgtgtcactgcgggtggcccgggagc

SEQ ID NO: 23716 - DNA, 30 bp, Homo sapiens
  chr9:137718799-137718829
  hypo
agccttggcccaggcgaggactgagtctcc

SEQ ID NO: 23717 - DNA, 30 bp, Homo sapiens; identical to SEQ ID NO: 7114
  chr9:137835238-137835268
  hypo

SEQ ID NO: 23718 - DNA, 291 bp, Homo sapiens
  chr9:138011544-138011835
  hypo
acagagaccatcctcaagacccgcagcctggactatgccggttacaacaacatgtaccactacgcctggggtggccactcggacatcgacctcatggtggacgagagcgggctgtgggccgtgtacgccaccaaccagaacgctggcaacatcgtggtcagtaggctggaccccgtgtccctgcagaccctgcagacctggaacacgagctaccccaagcgcagcgccggggaggccttcatcatctgcggcacgctgtacgtcaccaacggctactcagggggtaccaag

SEQ ID NO: 23719 - DNA, 304 bp, Homo sapiens
  chr9:138012097-138012401
  hypo
taccaataacactaacaataccgatcttgaaaaatcatcagcagtgcggattctgacatcgagggatggcattacctccgtgtttctccctttcgagccggcgggccacagacgtcggaagaaactcccgtatttgcagctggaactgcagcccacggcgccccggttttcctccccgccctgtccctctctggtcaaacaacatactaaagaggcgaggcaatgactgttggccagttctcaccggggaaaaacccactgttaggatggcatgaacatttccttagatcgtggtcagctccga

SEQ ID NO: 23720 - DNA, 38 bp, Homo sapiens
  chr9:138106858-138106896
  hypo
gttaaacactgacctactggccgtgtgcggtggctcat

SEQ ID NO: 23721 - DNA, 31 bp, Homo sapiens; identical to SEQ ID NO: 7118
  chr9:138120293-138120324
  hypo

SEQ ID NO: 23722 - DNA, 377 bp, Homo sapiens
  chr9:138143893-138144270
  hypo
tttcctgtggagtttcattcacggctgttcacatacccacagcccaggtgcacacacgtgcacacacggaaaatagctcatgcatggacacgcaaatgcgcacccagaacaacacacttcacacgcgttcctagacaccctcacatgcctgcgcacctgcccatgtgcccgtgacatgcatgtgcccgtcttacacacgcacacatacacatttgaacacgcacgctttcacacgtgcagtcacacacctgcctacgcacacctatgtgcccgtgacacagatgcacacgtacgcaacataggcacacgctcacctacgcctccacatggccaaccctggcctcagctccttcaccgtcagtgctggtctgaataga

SEQ ID NO: 23723 - DNA, 31 bp, Homo sapiens
  chr9:138156950-138156981
  hypo
cctcgctgtggacaggcgtgggtgccatgaa

SEQ ID NO: 23724 - DNA, 581 bp, Homo sapiens
  chr9:138289346-138289927
  hypo
ctggtggagcccacaacccagcgaggacctggcacagttggcaatgtgagtggtggcccacgacgcaacttgtgattgtggttgtggtggagtaacaacacctcgtccacacctgcccgtggaatgctgcaggccaggcgctgggtcacactcttcacgcggattatctcgtgtgacacctggcccacacccgtccgtggaatgctgcaggccaggcgctcggttacactcttcacgcggattatctcgtgtgacacctggcccacacccgcctgtggaatgctccaagccaggcgctgggttacactcttcacatggatcatctcgtgtgacacctggcccccacccgcctgttgaatgctgcaggccatgcgctgggttacactcttcatgcggattatctcatgtgacacctggcccacacccgtccgtggaatgctgcaggccaggcgctgggtcacactcttcacacggattatctcgtgtgacacctggcccacacccgtccgtggaatgctgcaggccaggcgctgggttacactcttcacgcggattatctcgtgtgacacctggcccacacc

SEQ ID NO: 23725 - DNA, 43 bp, Homo sapiens
  chr9:138296700-138296743
  hypo
cccatctcaaactcaggccagcgagggctgagatgtgacctct

SEQ ID NO: 23726 - DNA, 90 bp, Homo sapiens
  chr9:138297096-138297186
  hypo
agtgctcaggaaggcacagtgcgtgggaagcctctctccgagaaggatgataaacgtcatctgaaatcggagttccgggccgggcacagt

SEQ ID NO: 23727 - DNA, 30 bp, Homo sapiens
  chr9:138393636-138393666
  hypo
gtctctgctgccaccggtgggagacgcagc

SEQ ID NO: 23728 - DNA, 5 bp, Homo sapiens
  chr9:138456650-138456655
  hypo
ggctg

SEQ ID NO: 23729 - DNA, 255 bp, Homo sapiens
  chr9:138563098-138563353
  hypo
gtatgttcctgggcacacatccgatggctgccagcctgcacgtcacgcccagctgccggagctactgcgggattccagaacaaggaacgtgacatgctcggcctggagcggaacaaggcacctggctcccgcaccctcgacggggccctgcccagtggacacgaccacgtggaagcctcttcctcctggcactgcagagcggatggcggatgcagatcccactttggggatggcgggcactgctggtaaattcta

SEQ ID NO: 23730 - DNA, 304 bp, Homo sapiens
  chr9:138649884-138650188
  hypo
cctacccaggtgcaggctgcccgtgggcctcagcggagacgcaggtgtggccaggcgtgggctgccccttgggcctcagccgagacacaggtgtggccgtgggctgccccgtgggcctcagccgagacacaggtgtggccaggtgcaggctgccccgtgggcctcagccgagacgcaggtgtggccaggtgcaggctgccccatgggcctcagccgagacacaggtgtggccaggtacaggctgccccgtgggcctcagccgagacgcaggtgtggccgggccgtctgctttccactgtccttc

SEQ ID NO: 23731 - DNA, 31 bp, Homo sapiens
  chr9:138654784-138654815
  hypo
actgtagctcgagctccgtgtccacagtggg

SEQ ID NO: 23732 - DNA, 768 bp, Homo sapiens
  chr9:138660476-138661244
  hypo
cttcatcctcagcagcaggaacgaggtggaccgcacggctgcagtgagtgaggctgaggccctgcccaggcgggaggggcaccgtggggccggggagcgggggtccctgagggaagagacctgccccaggctgccggtgccgcccagcagcccacagaggccagcccgtctgcactgaccaaccacccaccccgccaggaccaccagaccatcctgcgcgcctgggccgtgaaggacttcgcccccaactgccccctctacgtccagatcctcaaacctgaaaacaagtttcacgtcaagtttgctggtgcgtctggggcacacgtgggtgatggtgtatctggggcagggcacgtgtgcacacgtgggtgatggtgcatctggggcagggcgcatgtgcacatgtgtgacggtgcgtctggggcaggacgcgtgtgcacacgtgggtgacggtgcgtctggggcaggatgcgtgtgcacacgtgggtgtcggtgcgtctggggcagggcgcatgtgcacacgtgggtgacggtgcgtctggggcagggcgcgtgtgcacacgtgggtgacagtgcatctggggcagggcacgtgtgcacgtgtgtgtcggtgtgtctggggcagggcgcgtgtgcatgctgttgggtgatggtgcgtctggggcagggcgcgtgtgcacacgtgggtgacggtgtgtctggggcagggcgcatgtgcacgcagttaggcgagctgtgtggggcagcgggaggggctggccctggagc

SEQ ID NO: 23733 - DNA, 305 bp, Homo sapiens
  chr9:138661729-138662034
  hypo
tactgtgggggaggagagagccggcagagcggcaggtggaccggcctcccccactgcccgcagaccacgtggtgtgtgaggaggagtgcaagtacgccatgctggcgctgaactgcatctgcccggcgacctccaccctcatcaccctgctggtgcacacgtcccgcggccagtgagtgccccgtgccccgggggaccgacctccatggcggggccggcgcagggagacaacgcagggcctgcttgggggcggggatgggcttcccagaggaggggcacatggcgggcaaaagtcctgcataggg

SEQ ID NO: 23734 - DNA, 204 bp, Homo sapiens
  chr9:138718006-138718210
  hypo
gcaggtcacagagcagcgtgtacacgggcaccagcacacacacacacacacacacggctcaacaacagacacgcaaagaccgaagggaggacgccaagtgtccacgctggccccatgtgagggacggctcagcctcgagccattctcctcactcagtgaccccgcctgtgcccgcgggcatggagttaccgccccacctctgct

SEQ ID NO: 23735 - DNA, 215 bp, Homo sapiens
  chr9:138719253-138719468
  hypo
ggtattcaggttcttccgggtgcaggtagtgcctgtgacagccttccgccggcagctgcacggggggctgcagctcagccagggtccctgcagcagggctgcctaggaaactgcgtttggtcgcgttggagatcggtacaggaggccggctgctcttctggtgtaacactgttttcgctgcagaaatagcgtttttgcatcgttacttacaacac

SEQ ID NO: 23736 - DNA, 267 bp, Homo sapiens
  chr9:138743612-138743879
  hypo
gtcactcatcttgaccgctatatggtcctccacgatttctcacaattatgacaaatgctgccatcacaaagcttgcgtgtgctgtctatgcgtgtacagacgggtgttgcccaggcatactctgagaggggactcgctgggccacgagctaggcacgccctcctgtgtcacctggcaacgcccttctgcctggttgtgcctcgctccagtcccacccacagcactccacagcttgctccttcccacctgcaccgcagcatgaccgac

SEQ ID NO: 23737 - DNA, 41 bp, Homo sapiens
  chr9:138774588-138774629
  hypo
caccaggtgcgccacacgagagcccacggctccagaggatg

SEQ ID NO: 23738 - DNA, 30 bp, Homo sapiens
  chr9:138780730-138780760
  hypo
accttgacagcggagcgccaggtgcacaga

SEQ ID NO: 23739 - DNA, 19 bp, Homo sapiens
  chr9:138796807-138796826
  hypo
ctcaaaaaaaaaaaaaaaa

SEQ ID NO: 23740 - DNA, 41 bp, Homo sapiens
  chr9:138824556-138824597
  hypo
agaggccagaggtaggcggaggcagccgtgcttgggctcag

SEQ ID NO: 23741 - DNA, 30 bp, Homo sapiens
  chr9:138831882-138831912
  hypo
aggtagaaacgcatcgcttatgtggacacg

SEQ ID NO: 23742 - DNA, 186 bp, Homo sapiens
  chr9:138836302-138836488
  hypo
aggaggaagtaaaacccgaatcaaagaacaggagagagaaggaagaatggggagatgaggcgcgggcgaggaaggtccacacacacaggcgcagggacccttcagccctgcagactgtgccatggaggcggctggcagcctgagcggcccctcgctcatggacacccccgacggcaaatgaccctc

SEQ ID NO: 23743 - DNA, 331 bp, Homo sapiens
  chr9:138873214-138873545
  hypo
atgaccctcccccaccctgctcgcaggttgtcgcaggacacgtgttcgtgtccaggtgcgctgggaagggtcctggcggtgctcctctcagcgcaggtcccgaggagctacaggcatgacgctgccttcagaactcccccgagcctgctccttcccagccttggctcgtgaggctcctccgaggaccacgggccttccacggcgtagccctgccacgaagcctccccatgtcttgcctccagcatcacctggccgagacggacctagggcgtccttctccagcatcatctggccgagacggacctagggcgtccttctccagcatcacctg

SEQ ID NO: 23744 - DNA, 31 bp, Homo sapiens
  chr9:138878498-138878529
  hypo
tgcaggggtgccgtgccgggtcctcagcacc

SEQ ID NO: 23745 - DNA, 44 bp, Homo sapiens
  chr9:138901583-138901627
  hypo
catggtcctcccctagcggaggcggcctccgcttgatgggttgt

SEQ ID NO: 23746 - DNA, 92 bp, Homo sapiens
  chr9:138902179-138902271
  hypo
cgggaggaccgactctcgccctggcccagccctggccgctgcctcctgcccgagcggagtcccccgctccccaggtccggccctgagctcag

SEQ ID NO: 23747 - DNA, 38 bp, Homo sapiens
  chr9:138906102-138906140
  hypo
tctcccggccatgctgcggtccccggcctcagctccct

SEQ ID NO: 23748 - DNA, 36 bp, Homo sapiens
  chr9:138907130-138907166
  hypo
caggggcccacccagccgccccggcagcccagcact

SEQ ID NO: 23749 - DNA, 31 bp, Homo sapiens
  chr9:138908323-138908354
  hypo
ctgctctgtgcctgcccgcctgccctccatg

SEQ ID NO: 23750 - DNA, 103 bp, Homo sapiens
  chr9:138910982-138911085
  hypo
gcagcctccacctccccggcccccagctcaccctctgcaggagctgagcttcaaggtccaggctacaactgggctttaacggagaacccgcagagagacttgt

SEQ ID NO: 23751 - DNA, 77 bp, Homo sapiens
  chr9:138911433-138911510
  hypo
atggaggtgaacaaccgcgcccccacacagggaaggtgcaccagggtcacgacgagagggcccggagcagcagcctc

SEQ ID NO: 23752 - DNA, 30 bp, Homo sapiens
  chr9:138916649-138916679
  hypo
accctgaggggctgcgatcctgagaactgg

SEQ ID NO: 23753 - DNA, 31 bp, Homo sapiens
  chr9:138950819-138950850
  hypo
tctggcccctgggccccgccctcctgtctgc

SEQ ID NO: 23754 - DNA, 37 bp, Homo sapiens
  chr9:138970474-138970511
  hypo
ggggccagcccagccccgacatcgggacagaaagggg

SEQ ID NO: 23755 - DNA, 31 bp, Homo sapiens
  chr9:138979873-138979904
  hypo
gaggtgacctggaagacgggcacccccagtg

SEQ ID NO: 23756 - DNA, 986 bp, Homo sapiens; identical to SEQ ID NO: 7122
  chr9:138986170-138987156
  hypo

SEQ ID NO: 23757 - DNA, 91 bp, Homo sapiens; identical to SEQ ID NO: 7124
  chr9:139024429-139024520
  hypo

SEQ ID NO: 23758 - DNA, 137 bp, Homo sapiens; identical to SEQ ID NO: 7125
  chr9:139024749-139024886
  hypo

SEQ ID NO: 23759 - DNA, 31 bp, Homo sapiens
  chr9:139044791-139044822
  hypo
ctgccaggccaggtcacgggtgagcctcgtc

SEQ ID NO: 23760 - DNA, 815 bp, Homo sapiens
  chr9:139051192-139052007
  hypo
ggctggcagggacatggccaccgtgaggagatctatttcccttgccttgcagacgatggaccgggcccgtctgtagagccgtggtggagctggccacacgcacacgcaggcctatttttcaaacaattgattaattccgcagcgatgtttgctgccgtacatcacctatggccgcactgtggggctttccggttctcctcccacctgtaatattccacagctgatggctggaaatggggaaagctttctcgaaaacactcattcggggcttactgaggtcatcaatcagctattttcaaatgtcaactttgaaggcgaaagggggatgctcagaaaacaggaccctcattgggaaagtggggggcaggctggggcagcgggggtctgtcaccctaggaagctggagcctaggtgacctcaagtcttcgaacctggtctgaggggcgactgaaccctgaaagcttgctgttggctctccagatccgcagagacgggttcagggttgccagggtccctcagcggaacctgctgcaggtgtcagaggcctggatatgaccaggcggtcagggcctggtgcacccgagaatgtcaaatccacttcacagagacgtgagcacctgccgggggtgctatttgccccattcctgctgcccctctccgcaaaacaggagcctgaactggctgccccagggtcttcgccagtgtgggaccacggcctggaaacagcggggtcagaatgtgcacgaggcctgggctgcgtgaagcctgtgtcggtgattccaccgcaggcagccgatggagatcccagccctgga

SEQ ID NO: 23761 - DNA, 171 bp, Homo sapiens
  chr9:139069741-139069912
  hypo
ggaactgggatcagcgtggccgtcgcgggcggggacagcactgggggaactgggatcagcgtggccgtcgcgggcggggacagcactgggggaactgggatcagcgtggccgtggagagcggggacagcactgggggaactgggatcagcgtggccgtggagagcgggggg

SEQ ID NO: 23762 - DNA, 113 bp, Homo sapiens
  chr9:139079353-139079466
  hypo
aaagcacgcaggatgcgctgagaacgatggccccttcgctgcagcgtgagaaactcaacgtcacccaaccaggacagggagggaggaagaccgggggccggggagagccacag

SEQ ID NO: 23763 - DNA, 30 bp, Homo sapiens
  chr9:139079953-139079983
  hypo
caaggacgtacatctcggccgggcgcaatg

SEQ ID NO: 23764 - DNA, 152 bp, Homo sapiens; identical to SEQ ID NO: 7127
  chr9:139090399-139090551
  hypo

SEQ ID NO: 23765 - DNA, 155 bp, Homo sapiens; identical to SEQ ID NO: 7128
  chr9:139090586-139090741
  hypo

SEQ ID NO: 23766 - DNA, 30 bp, Homo sapiens; identical to SEQ ID NO: 7129
  chr9:139093837-139093867
  hypo

SEQ ID NO: 23767 - DNA, 30 bp, Homo sapiens; identical to SEQ ID NO: 7130
  chr9:139096732-139096762
  hypo

SEQ ID NO: 23768 - DNA, 30 bp, Homo sapiens
  chr9:139100455-139100485
  hypo
tgtgaaaccaggcccgcatgtttataaaat

SEQ ID NO: 23769 - DNA, 106 bp, Homo sapiens
  chr9:139101083-139101189
  hypo
ctgaagctttggaaaccggggatcctcactcagatggcctaggaagaaaaggaagcgggagagccagagggaaggaggctttgtgcagccacgtgcagcgtgcggc

SEQ ID NO: 23770 - DNA, 35 bp, Homo sapiens
  chr9:139103913-139103948
  hypo
ccagagtttgtgccaccgaacgtattaacagacat

SEQ ID NO: 23771 - DNA, 30 bp, Homo sapiens
  chr9:139106573-139106603
  hypo
gagctcataaccgtgcgtggttcccgtggt

SEQ ID NO: 23772 - DNA, 237 bp, Homo sapiens
  chr9:139106805-139107042
  hypo
gggaactcgtgcccccgcagccacagccctgggtgagctgaccgtgtgagaggagtctgaagtgccattcccctgcctcagtggcctggcgacatgctgcctcccatacagcagtacatgcctttgcacacaccggctgggttaacttgttaggcagaccatcggcccctctggcctgtatgggcacagcttacctgtgccaaccagtgcatctgggtgggtcgaggcttcaacagt

SEQ ID NO: 23773 - DNA, 604 bp, Homo sapiens
  chr9:139110882-139111486
  hypo
attctctccaaaccacgatttctgaattttcttctttgtgtggcttttcaggcaagggaagcgattttttcctcacatccggcaatgacttcaaataagacgaaaagaaggcccgcagaggcttcacgctgtgagagaggggagggcaaaggtgagaagagcctcctttataaaatcctaaagtaggagccgtggcattcaggacagctctgggccacccctttcatcctttgggcatttattggggcatgggagtcagtgggaacagctgacaccccgcctgggctccggctgcgcttccacctgggggataagaggagacacaccaaatccacagatttacaaccagttccagttgtaataagtactatgactcatttatgtttgtggggaccttaaggcgttttgtaaagctgggttgagcatctgccaagatgagctttattctgactgcgatttccaacacgcctaagagccttcaccgacgcgcccacaatctgccagccctgagtgaggcatctggaagtcggggcctggggtggacgtcagcccctccctgatgtcaggcccctgagctccctgcgtgcccaccctgtgtggacag

SEQ ID NO: 23774 - DNA, 31 bp, Homo sapiens
  chr9:139114782-139114813
  hypo
tctggaggcagcctggcgtcaccatcaaacc

SEQ ID NO: 23775 - DNA, 31 bp, Homo sapiens
  chr9:139115298-139115329
  hypo
ctcaaggtgagctgggcgtgtcataaaaatg

SEQ ID NO: 23776 - DNA, 236 bp, Homo sapiens
  chr9:139118752-139118988
  hypo
gagcactggactcccgggaagcccaggacccagcagtccccactccaggctgcggccacctgcgagaccagcccacctgccccctctaggtcatcagttaggccctcatcacacagagcgtctatgtggagctaggagagagaactccaccaacagcacgatgcctctcctaccacagatagtcacagaacaagcggatttgtgctgaacctgcacatcacggagcagggacaagg

SEQ ID NO: 23777 - DNA, 85 bp, Homo sapiens
  chr9:139128187-139128272
  hypo
gtgattctccttcagccggactagacggatattcacaggtatctgaaacaggacgccctctgaaacaggccgcagctgccagctt

SEQ ID NO: 23778 - DNA, 90 bp, Homo sapiens
  chr9:139130638-139130728
  hypo
tgcatctgcctgctgccgggccctcagggacctcgtggttgcccccttgagcgaccaagaccctatcaaagtccttttagccgggcgtgg

SEQ ID NO: 23779 - DNA, 551 bp, Homo sapiens
  chr9:139133093-139133644
  hypo
cttccaccctctccatcctcccgagtccagtgagcacctggcagctctcacgggccgtcagccccgccaaatgcccgctgacacctgcatgtccccctccctctggcccttattgtttctttttccagtaaacggacaatgagcctgtggggaacaccaagttctaattcatctccaagaagcctgcagcctagtcgagtagacaagaaaccagaccaagtgggacagaggagctggcagcaatcacagaatgccctacccttccttcaagagatgtcggatgtgtccagctcccaacccccacctgtcctctacaaagacacaggaatgaactgccatggctccaggtcacccacacctggacacccatcccggcctgtcactcagctgcgtgaccgtgactatcccacgcaacctcacgtgctatcacctgcaacatgagcgcccccgcactcctgaggacaggtgtgggaggactcggcctgttccacgcaacctcatgtgctatcatctacaacataagcgttcccgccctcctgagggcaggtcta

SEQ ID NO: 23780 - DNA, 30 bp, Homo sapiens
  chr9:139262661-139262691
  hypo
ctgagacgcaggagcgaatgtgcaaacacg

SEQ ID NO: 23781 - DNA, 31 bp, Homo sapiens
  chr9:139264174-139264205
  hypo
ctttgtcctgcccctgcgagtgcccacctgg

SEQ ID NO: 23782 - DNA, 30 bp, Homo sapiens
  chr9:139265711-139265741
  hypo
ccaacaccactgcccgctccccgccagcgc

SEQ ID NO: 23783 - DNA, 202 bp, Homo sapiens
  chr9:139269294-139269496
  hypo
tgttctctaaccatatcggaagctaaaaatcggtaacagatatcggcaaaatctctaaatatttggaaattaaataatataccgctaaataacccacagatcagagtggcccccagactaggcaccagactagagaaccaggcacagcaacacatactcaggagtgaggtcggccatgggaccgtcccgtctgccaggtgcc

SEQ ID NO: 23784 - DNA, 35 bp, Homo sapiens
  chr9:139272164-139272199
  hypo
aggctgccaggaaccgcgcccgcaacaggaggtag

SEQ ID NO: 23785 - DNA, 31 bp, Homo sapiens; identical to SEQ ID NO: 7131
  chr9:139294770-139294801
  hypo

SEQ ID NO: 23786 - DNA, 149 bp, Homo sapiens
  chr9:139300479-139300628
  hypo
agggcgtgtgcttctgcggtgtggctccagagcctcctgataagcagagatgctgggtcagtgcagcatccacctgcagccactacagagggagaccacagacggaggcaggcacttttcaaagacctgtggtcacagatgccagttaa

SEQ ID NO: 23787 - DNA, 31 bp, Homo sapiens
  chr9:139302238-139302269
  hypo
cgtcccacagagccatcgcccacagtgccgt

SEQ ID NO: 23788 - DNA, 56 bp, Homo sapiens
  chr9:139317509-139317565
  hypo
gcgcgctcgtgtgacacgcgtttgccctctgcactaggcaacgtgaagccggaaga

SEQ ID NO: 23789 - DNA, 311 bp, Homo sapiens
  chr9:139317949-139318260
  hypo
ggagtgcagcgtgccacgaggagggcggtcggtgcttccctcctcgggctgtgggcacatggggccccgcaggttccttggaggagccctgagctgggaggcagcaaaggctgacctatcaaagcctcccggaggccaccgtgctgggtaccaggactcacctctgacaagcaggagaaggtaagggcccggtcagctccaaggagcgcgctccacgcgcgtgcacacagcttccctggtaataaagagctggcatctttcttagcacggtgttttccttctcgcctggggaggggcggttcttaagggct

SEQ ID NO: 23790 - DNA, 59 bp, Homo sapiens; identical to SEQ ID NO: 7132
  chr9:139334258-139334317
  hypo

SEQ ID NO: 23791 - DNA, 273 bp, Homo sapiens
  chr9:139345552-139345825
  hypo
gacacccatcatgccgtgtgcactgtagacactcggctgtttgtatcaggaggctatttgcatgtgtggtgaattaagaggatggcgctctgggaagcgtgcctcctgcccaaaccctcccggccgccaggcgcaccgtgggcaggctgtactaccttcttaggttccttcgtttctttcttggctgcctgtccgggtctctttgtttcgggagcgggtgagagagacagaggtggctgcgtgggacccgagtcggcacgatcccaccctggg

SEQ ID NO: 23792 - DNA, 195 bp, Homo sapiens
  chr9:139347890-139348085
  hypo
attttccatcaaaattttcttcgcttagctcggaaagtgagtttccaacaggcgcctcctgcggcactatccctgtcaacgggaaagagagcaactatgatctcagtcacgagaaggcgggacgtgtgtgtggcgcacagatcaacaggcacaccaccttcccacccagctaccgccacaccagcatgatctgca

SEQ ID NO: 23793 - DNA, 30 bp, Homo sapiens
  chr9:139349770-139349800
  hypo
ggctgagcaggcagcgggcgctcagggcag

SEQ ID NO: 23794 - DNA, 97 bp, Homo sapiens
  chr9:139351903-139352000
  hypo
gctggctgatcaacaccggggaatacaggtgcggctgcgtcaggatgctcttcgcgatggcctcacagtagtggaaggcttgcgtggccagccccat

SEQ ID NO: 23795 - DNA, 30 bp, Homo sapiens
  chr9:139360261-139360291
  hypo
cacaccctgcttctcggaaggacggattgg

SEQ ID NO: 23796 - DNA, 31 bp, Homo sapiens
  chr9:139361343-139361374
  hypo
gcagagaagcactagcgcgccctggctgccc

SEQ ID NO: 23797 - DNA, 68 bp, Homo sapiens
  chr9:139361591-139361659
  hypo
gatatcactaaagaagcgacaccaccccaggactttatgctccaaggactcctcgagaaacccagctt

SEQ ID NO: 23798 - DNA, 73 bp, Homo sapiens
  chr9:139384887-139384960
  hypo
tgctgggattacaggcgtgagccaccacgcctggccaacgccagcactttcaacgcaccgggaccaagctgga

SEQ ID NO: 23799 - DNA, 30 bp, Homo sapiens
  chr9:139389753-139389783
  hypo
acttgtataaccaacgaacaactacataat

SEQ ID NO: 23800 - DNA, 30 bp, Homo sapiens
  chr9:139407964-139407994
  hypo
cccagggtcacagtcgcacttgtacctgca

SEQ ID NO: 23801 - DNA, 30 bp, Homo sapiens
  chr9:139410895-139410925
  hypo
tgggctctgcgccccggcccccagctctgg

SEQ ID NO: 23802 - DNA, 30 bp, Homo sapiens
  chr9:139412389-139412419
  hypo
ctggcgagggcacacgggtgagaggctgct

SEQ ID NO: 23803 - DNA, 31 bp, Homo sapiens
  chr9:139417760-139417791
  hypo
gatcctcaggacctgccgtgagaccggtcgc

SEQ ID NO: 23804 - DNA, 31 bp, Homo sapiens
  chr9:139420230-139420261
  hypo
ggtgggggttcctgtgcgtttctcagcagcc

SEQ ID NO: 23805 - DNA, 31 bp, Homo sapiens
  chr9:139421469-139421500
  hypo
gaggttccgtgagacgcgctagctgggggga

SEQ ID NO: 23806 - DNA, 247 bp, Homo sapiens
  chr9:139421766-139422013
  hypo
gcaaatccttcacagctttggcgctggccacacccccggtacccgggccactctgtcttcaatgctgtcccggcggccaggtgggtgtgggccgcgaggtgggcgccagggcttggccgagtgaggtggcacccaacagctgccgcgcccacggggatcctcagggcttccatgagtgacccgcaccccaccttccaccgtccccgcatctcctcctatcaggggcggtggggagacccctctgggg

SEQ ID NO: 23807 - DNA, 31 bp, Homo sapiens
  chr9:139429159-139429190
  hypo
tcacagactgtgattgcgaggaccccgatgg

SEQ ID NO: 23808 - DNA, 52 bp, Homo sapiens; identical to SEQ ID NO: 7134
  chr9:139440853-139440905
  hypo

SEQ ID NO: 23809 - DNA, 30 bp, Homo sapiens
  chr9:139456531-139456561
  hypo
tctcctggccgcctcgagtcccacagccga

SEQ ID NO: 23810 - DNA, 31 bp, Homo sapiens
  chr9:139484155-139484186
  hypo
gtgctcccgccaccacgcgatgccctctcat

SEQ ID NO: 23811 - DNA, 141 bp, Homo sapiens
  chr9:139501901-139502042
  hypo
caggtgtttggggaggcggagcagagggttcccaggccagggacccaagggggtgggcccagtggctaattccagatggagccaacatgcaccagggaggctgtgcggggagggcccggacagtgacgcccccacggctgt

SEQ ID NO: 23812 - DNA, 169 bp, Homo sapiens
  chr9:139509480-139509649
  hypo
gaaacccaggcaggaccgtaaaacccaggcctcgacccgtcagcctccagccgctctccgaggcaccttgcagggggtgggatggcagtggggagcctctcacaacaggaactggggtcccagatgctgcccggagcctggaactgcgagtggccgtggcggtggctgt

SEQ ID NO: 23813 - DNA, 31 bp, Homo sapiens; identical to SEQ ID NO: 7136
  chr9:139580673-139580704
  hypo

SEQ ID NO: 23814 - DNA, 196 bp, Homo sapiens; identical to SEQ ID NO: 7137
  chr9:139581074-139581270
  hypo

SEQ ID NO: 23815 - DNA, 181 bp, Homo sapiens
  chr9:139586024-139586205
  hypo
gcctgggtcccagtccgagaggggtgtggtgtggggctgaagagcccagggtcagggtcaggcagcccgacccagcgaggagaccctgggtgaccttggatcagccctgcctctctaggcctcagtttccctttcgtgcagggtgcgtgtgatgattcagtgggaccgaggcttgggacgg

SEQ ID NO: 23816 - DNA, 415 bp, Homo sapiens
  chr9:139586753-139587168
  hypo
gccgccccccaatttcgggagcgacttcacctttccacaggatcatcctcttggcaagatgaggctgaggccgggggttcggggctcagcatcgaaagccggggcctgggtgccacaggccgtgacctcttccaccaaatgagagaaacggcaagacctccaggaagggccgtcggagcccagacgaggctgcagcttcctttggtgaagcgtccgagggccggctctggcgcctacaggggcttccgacgctgggtccttctcaggctgagcgccgcactcccacggccacccgggtggtgcacacagtttccagggtgtccaggcagcccccagtggacctggtgtccacgtcctcctctgaaccatgccaggcctgggccgtgggcatccgtgctgccgtgtggggcagggg

SEQ ID NO: 23817 - DNA, 160 bp, Homo sapiens
  chr9:139598242-139598402
  hypo
ccagaaagtccaatatcgaggtgcaggcagattccgtgtctggtgagcgcccgcctcctgatagacgtcacgtggtgaatgcagtcaggggtctcctggcagccggggtgggggtctcttcttttttttttttgagatggagtttcgctcttgttgccca

SEQ ID NO: 23818 - DNA, 30 bp, Homo sapiens
  chr9:139604153-139604183
  hypo
cagggccggctatgcgctcaccaggcactc

SEQ ID NO: 23819 - DNA, 30 bp, Homo sapiens
  chr9:139634181-139634211
  hypo
tgcagcatctgctccggacgcctctcgctg

SEQ ID NO: 23820 - DNA, 31 bp, Homo sapiens
  chr9:139641115-139641146
  hypo
gtgcagggggaaggcacgctggtgaggaggg

SEQ ID NO: 23821 - DNA, 30 bp, Homo sapiens
  chr9:139641387-139641417
  hypo
gccatgcatgtggtcgggtgcgcctgcctg

SEQ ID NO: 23822 - DNA, 31 bp, Homo sapiens
  chr9:139687078-139687109
  hypo
aaggccacagcagccacgtgggcacccgaga

SEQ ID NO: 23823 - DNA, 30 bp, Homo sapiens
  chr9:139693181-139693211
  hypo
gggcttcaaggagacgtgagcataagagca

SEQ ID NO: 23824 - DNA, 831 bp, Homo sapiens
  chr9:139698437-139699268
  hypo
atcacctgggtatacccggggtggagaaggggtggccaggagcaacggagctgagaactcctcaagaggcaaccccactaagcgctggcaacgagagtggcgagggtgagagcagtgtctggggtgcgtgagcaggggttagcagatgacggttttagctgcccaagggcacgctggaagaggccaggttttggggaagaggatgaatctgtcttcaggcaggctgaatgcacttccgtgagttctaggtggacctggccaggaggcagctgggggccagcggctggagggcagcagagcgtctgggctggcacatgctctgaggcatgggcaaggagggccgtgagctgaggggccacgggcacaagtggtttaggaaaagggtgtggccattggccggggatgcagttccaaagtctagtaaggtgagcatggccaaccgcccgctggctttactgccattaggggccttgttgagacagctccccaaccctgtgcccacccgcatgtccccagaggaacatgaggcaaagggaggcgtccttcatcgaggagcgccgggcaagggagaaccggctcaaccagcagaagaagctgatcgacaagatccacacgaaggagaccagcgagaagtaccgccgggtaagccccaggccagggcctggctggctgcccatccccatgacagctgggtggacacaggctcagggccaccactcagggcccactccctgccaaggatgtctcatcccttccccgcccccacctcccatcagggccagatggacttggacttcccctcgaacctgatgagcacggagaccctgaaat

SEQ ID NO: 23825 - DNA, 31 bp, Homo sapiens
  chr9:139700525-139700556
  hypo
ccaggacatcactagccgcttcctggcccag

SEQ ID NO: 23826 - DNA, 30 bp, Homo sapiens
  chr9:139704131-139704161
  hypo
tactctagaacatacgacgacaaagaagat

SEQ ID NO: 23827 - DNA, 252 bp, Homo sapiens
  chr9:139717804-139718056
  hypo
atggtacccacccatcgtcttcctcccctgcctgccggtcacctggtctgattctagcaagaaagatgaaacaggtggcagcagaaccggctctccttgtagttgctcttaaagctgcagcttgggttcggttcgtttaatttgccttttctttttctcttcccgtccccagtgaagatagtgatccggggagacaggaacacgggcaagacagcgctgtggcaccgcctgcagggccggccgttcgtggag

SEQ ID NO: 23828 - DNA, 30 bp, Homo sapiens
  chr9:139718360-139718390
  hypo
gagtgggcacgcgggcgcctcgggggctga

SEQ ID NO: 23829 - DNA, 30 bp, Homo sapiens
  chr9:139719277-139719307
  hypo
agagcccacagggccggcgcacagaagctc

SEQ ID NO: 23830 - DNA, 31 bp, Homo sapiens
  chr9:139731838-139731869
  hypo
ccccactggcggccaacgggcagagcccatc

SEQ ID NO: 23831 - DNA, 31 bp, Homo sapiens
  chr9:139732505-139732536
  hypo
cagcctccagggtgcccgagcagcaggtggg

SEQ ID NO: 23832 - DNA, 30 bp, Homo sapiens
  chr9:139735323-139735353
  hypo
ggctgtggggtgtgcgctgccccggcacct

SEQ ID NO: 23833 - DNA, 188 bp, Homo sapiens
  chr9:139787532-139787720
  hypo
ggctaccacctcagtttgccacggctggtatgcatctgtgagctccggaacatccacatagctctgccgcccacaggagcaggtgcacccaccttcgagaaagtgggagaaacaggtgtggcgtccccaccgagggaccttgagcactgggcaggcagagccccagcgtcccttctgttgggtggttg

SEQ ID NO: 23834 - DNA, 136 bp, Homo sapiens
  chr9:139794947-139795083
  hypo
gaaggggaccctgaaagaatacgaggtaaagatgcctgcgtgtggcatggtgacagaagctccagcagtcgggagtcgtccacgctccccaagcagttatgaccttgtcctgcacgttcctctcactggggctgaa

SEQ ID NO: 23835 - DNA, 31 bp, Homo sapiens
  chr9:139803919-139803950
  hypo
taaactgtcagatggacgggcctgaccatag

SEQ ID NO: 23836 - DNA, 285 bp, Homo sapiens
  chr9:139804356-139804641
  hypo
tcccttcttttgaaggcgcaccacgaggtctgccccaagttccccttaacttgtgacggctgcggcaagaagaagatcccccgggagaaggtgagtgtccttcacctccttggaggaccgcagggcggggcccatgtgttggacgtgagggtcccgtgggtgggggtggggcaggttatgacccttgtgcccaaaggaacagcagtgcaaagcccctgtaacgttgggtcatggatgcgttcagggtggcggccgctctcctgagtgggccgggggccaggtggc

SEQ ID NO: 23837 - DNA, 350 bp, Homo sapiens
  chr9:139805156-139805506
  hypo
ctggccaggcctgcccgcgggctcagcctgacaggtgtgtgcctgtctttctgatttgcttctgtttaaatataggtcacagcccaagtcctgaaatgggtagggctgggggacgggacagggctgtctcctcacctctttccacttgtctgttaaatgtcccgcactgtgagcttggccgagtgctgtctgaaagcatcctttcccttcacctggagactggagcgccatagaggctatggctgctgccatgcccccttcagaggccaggacgcctgcctggggcccgtgtctgtgaggctgtgtcccctgctggtggggcctggaggtgcccccgagaggtgccctct

SEQ ID NO: 23838 - DNA, 164 bp, Homo sapiens
  chr9:139809858-139810022
  hypo
aaacacatcagtcctctgtatcgggggtccacgccgtggatccagccaaccgtaggttggaaatgttcaggtaaaaatgcactgaacacgcgcggacattttttattgacacagcgttcacgttgtattggtcatgagtcaccgagagctgatttcaggtatga

SEQ ID NO: 23839 - DNA, 143 bp, Homo sapiens
  chr9:139814739-139814882
  hypo
gccatgctactgagctcggtgctggaggcaaagcccctcttgggagaccagagccacgcggggtcagagctcctgcagaggtgcgagagcctggagaagaagacggccacttttgagaacattgtctgcgtcctgaaccggga

SEQ ID NO: 23840 - DNA, 31 bp, Homo sapiens
  chr9:139817151-139817182
  hypo
aggatgggcctgggcacgtggtggaggacgg

SEQ ID NO: 23841 - DNA, 282 bp, Homo sapiens
  chr9:139818347-139818629
  hypo
tacctgaacggcgacggcaccgggcgaggaacacacctgtccctcttctttgtggtgatgaagggcccgaatgacgccctgctgcggtggcccttcaaccagaaggtgaggccgtccctgcaggcttcgctagggccgcacctgggagtccctctgggcagtgcagcttctgtggtgcagggttgtgcgggacaaggtggcttgggctcgctggaccaggtgtctgcagcaggcacgtcaccctgtgatgctgtgtcacgcggtggagagctctggcagttt

SEQ ID NO: 23842 - DNA, 31 bp, Homo sapiens
  chr9:139835148-139835179
  hypo
aagttgcccaggaggccgagggggccttggg

SEQ ID NO: 23843 - DNA, 943 bp, Homo sapiens
  chr9:139836025-139836968
  hypo
cgtgtatgtctatgacgtggtccagcgcgtcgaagaaggcatcggagccccggccctcacccagcacgggccctgccgtggtcatctggtgtggcaggatctgcttgatgcctgcagggagggctacggtgagggtccctgtccaatgccccaaggacatcactccagggcagcttcctacctcagtggtgtctctggggctgtgagcaccacagaggtccgtgggcactgcctgctccgggggccccagacctgaatcaggcccgtcggttgcttgctggccagcggccctgcctgcgtttgttttcactgctcatcccacaggccccaggtctgggcttgtgaccccaggggcgagtgaacgatcccagctttgcctgtggacttgcttgctgtctgcccctcaggacccctgcccggcctcccccaagctcctaggaccgaggcgggcagcatggcggcaggggtgtaccgatctggtgtggggagtaggtgaggcagccagtggtgaagatgaggtacttgctcttggcgcctgtggcactgcgctcgggtggcttggtgtggccctgggccagcagctcggccaccttggtctctagcatgcgctccgacagctgtggctgcgcccgcccctccagcacgcggtccagaaagtgccgcaagccctccttggcgtgggcgggggccgggccagccaccacctcctcgttgtcgctgcccaggtcaaagatgcggcagggggacgtggccgggtcaccggcttccagcagcaggtcagggctgtcgaagcggctgcagtcggccaccatcaccgtgcggacggtgctggcattgaggttctggatcttgaacagccgcttcaccacgttgacgttctctgactccacatcctgggggcgggggcacgtgccaggtgggcgccgggcgccaggccccagga

SEQ ID NO: 23844 - DNA, 30 bp, Homo sapiens
  chr9:139847299-139847329
  hypo
ccacccctgcccaccgccgcccctgcccac

SEQ ID NO: 23845 - DNA, 30 bp, Homo sapiens
  chr9:139847543-139847573
  hypo
cagtggctcaggtgcgccatgggccctgtc

SEQ ID NO: 23846 - DNA, 24 bp, Homo sapiens
  chr9:139856856-139856880
  hypo
caccttgcccggccctcaaattca

SEQ ID NO: 23847 - DNA, 30 bp, Homo sapiens
  chr9:139902478-139902508
  hypo
cacttgtgctggcccgccccggccctcctg

SEQ ID NO: 23848 - DNA, 30 bp, Homo sapiens
  chr9:139902713-139902743
  hypo
ctgcaagtgtccctcgcccactctgccccc

SEQ ID NO: 23849 - DNA, 30 bp, Homo sapiens
  chr9:139903846-139903876
  hypo
ccaggcaccgcaggcgaccgttcaccatga

SEQ ID NO: 23850 - DNA, 30 bp, Homo sapiens
  chr9:139912554-139912584
  hypo
cgggcaggccctctcgtcctcacacctgtc

SEQ ID NO: 23851 - DNA, 30 bp, Homo sapiens
  chr9:139913421-139913451
  hypo
atgccactgggcagcgagaagttgtcctgt

SEQ ID NO: 23852 - DNA, 30 bp, Homo sapiens
  chr9:139915373-139915403
  hypo
agcagggccagggccgacaggacatccaca

SEQ ID NO: 23853 - DNA, 611 bp, Homo sapiens
  chr9:139934776-139935387
  hypo
gtgggggtggcagtgccggggcggccactcaccgctccaggcacagcatctgttgccgttggtgctggtagtggtacatctccgcgctctgtgccagccgctggtccccaggctgtgggaaggaggaggcgagggtcagttggcggccagagttgggcgggagcctcagggctgaagggggccacacaccgagatccggggagctgcaggtgagccaggggccttcgcagtggcgtagtcggccttctgagtcaggcggatctcacgctgcagcctgtggggagtggggcctgagacctctgagcgtgtggcaccctccctgccctgcccgcggccactggctcacctgcaccagcagagggaggctacggagagggcggctgcaccggccacacagaacgccaggatcagcactgcaggagggggcgtgtgagggcggccttctgcagggcgccctgctgcccctgcccacccccgaccaagacctaccaagggcgaggccgtcgccttgccctccccggggctccaggggcgacatgtgcaccgggtcggatgacacaggggagcccagggaggtgtggggcgtgggcgtgggggttcctggagtggag

SEQ ID NO: 23854 - DNA, 31 bp, Homo sapiens; identical to SEQ ID NO: 7140
  chr9:139948416-139948447
  hypo

SEQ ID NO: 23855 - DNA, 31 bp, Homo sapiens; identical to SEQ ID NO: 7141
  chr9:139964409-139964440
  hypo

SEQ ID NO: 23856 - DNA, 30 bp, Homo sapiens
  chr9:140007684-140007714
  hypo
gtcggaacgcttcccgcacaccctgggtgc

SEQ ID NO: 23857 - DNA, 19 bp, Homo sapiens
  chr9:140030219-140030238
  hypo
cgcccggctgggaggtgtt

SEQ ID NO: 23858 - DNA, 31 bp, Homo sapiens
  chr9:140088446-140088477
  hypo
cacagctggggggccacgctttgtgcccaaa

SEQ ID NO: 23859 - DNA, 138 bp, Homo sapiens
  chr9:140107259-140107397
  hypo
caaagggctgggctccagccacgctgacgtcacacaggcctacctggcgccggtccccacttttacaaaaaggcgtgctgtgaagtgttgacgactttgagcctggaggaggaccccgtatgctcctgccaccccaga

SEQ ID NO: 23860 - DNA, 136 bp, Homo sapiens
  chr9:140111067-140111203
  hypo
tgcccagccagccctgcgctcccccaccctgacagtgagctgtgtcctcgtccccccacccccttcccagtcaaggtggtggcctgggccgctccacctcaccggtgcagtgacccaggacggcatcagcagccca

SEQ ID NO: 23861 - DNA, 31 bp, Homo sapiens
  chr9:140120570-140120601
  hypo
gacatgccgggacatgcggggtggctgttgt

SEQ ID NO: 23862 - DNA, 31 bp, Homo sapiens
  chr9:140133735-140133766
  hypo
aggagactgtcagggccgacctgatggtgta

SEQ ID NO: 23863 - DNA, 6 bp, Homo sapiens
  chr9:140137587-140137593
  hypo
ccatgg

SEQ ID NO: 23864 - DNA, 111 bp, Homo sapiens
  chr9:140157541-140157652
  hypo
ggtgctgcagtttctgcgcacgctcttcctgcgcacgcggaatgtgcactactgcacgctgcgggctgagctgctcatgtccctgcacgacctggacgtgggtgaaatctg

SEQ ID NO: 23865 - DNA, 214 bp, Homo sapiens
  chr9:140166924-140167138
  hypo
gcctcctgccccagccctgcacggccttttccaggaaggagaacgtgcaccggcacgcgctgcggctcctcattcacctgcaccccagggtggccccgtctaagctggaggcgttgcagaaggccctggagcctacaggccaggtgggtgcccgggggggctgcatctgaaggcacctggtccctaccagcccgtgtgtgcttgccaagctgcc

SEQ ID NO: 23866 - DNA, 506 bp, Homo sapiens; identical to SEQ ID NO: 7148
  chr9:140195883-140196389
  hypo

SEQ ID NO: 23867 - DNA, 288 bp, Homo sapiens; identical to SEQ ID NO: 7149
  chr9:140197129-140197417
  hypo

SEQ ID NO: 23868 - DNA, 31 bp, Homo sapiens
  chr9:140198309-140198340
  hypo
cttaaggagggggagccgctgggctgcctgc

SEQ ID NO: 23869 - DNA, 201 bp, Homo sapiens
  chr9:140216161-140216362
  hypo
ctgggcttgttggagcagccccgacctgctgctccaggcggaatattgatgtggccctaactgcggaacgttctggaagcagcccgtaccctccaccgggaactgccgagagccagcacagcccacagtcccccttgctcccgtgtcgcccacggagaccctggcgccttgagtggaggcgcaaaaggcagcatcaactcc

SEQ ID NO: 23870 - DNA, 31 bp, Homo sapiens
  chr9:140260841-140260872
  hypo
ggagagctctcccacgcgcctgctgcccccc

SEQ ID NO: 23871 - DNA, 496 bp, Homo sapiens
  chr9:140265441-140265937
  hypo
tctttcggccgggcgcggcggtgagcagtggagcatgcatcgcctgccgggcggccccgctcggggacaatggctttcttcgcagaaggggcctgtgcgggacaagaccccctttgtgtggggattcctgcctcggagcgcgagggaggcgcattcagccggccccagacagtctttgaaaggctctgtaacagaagacggcccgaaacactagcctgccttctgcctccctgcactctccgcaggcacggccgccattcagcgtcgcgccacatgagggggaccctccatcctgcattgtcctgtgccgggacatggtggcttctcagcgccatgcacccgccgcgagacgacggccccgggcgtggcaggtgacagcgccaggggtggggcccgcgcggcccacacaggggacactcctgtgagggcccggccagggcagcccccgatgcccgtgcccaggttccaatgcacctcctcacggtgaggggtcttg

SEQ ID NO: 23872 - DNA, 426 bp, Homo sapiens
  chr9:140267956-140268382
  hypo
tctccccgctggccccggcagctctccagcatgtccagaagcccggccagggggtcgtccaaggcagcaaacccccgccaggcttcctcccggagctgtggagacacaaaaccacactggcactttgtcttgcactcaaagcctcctggcaaggcctccccaccgcagagaggttttttaaaatttaatccattcagaaggtagctgtggccattcagccgccatctgcgcctccgtgacttttcatgccgccgttctggtccgctgcaccccaggcccccaggggcggtggtcattgtctgcactaattatcccataaagacagagggcctgttctccaggcagacagagggccgctggcctgggaggcaaccgtagcccgagccacaggttcacaagtcactttacctgcggcactcgcgggac

SEQ ID NO: 23873 - DNA, 30 bp, Homo sapiens
  chr9:140328722-140328752
  hypo
ttccccaagtgcttcgtggtccccgccggc

SEQ ID NO: 23874 - DNA, 30 bp, Homo sapiens
  chr9:140333124-140333154
  hypo
gctcagacgcctcccgtggccaaggaccac

SEQ ID NO: 23875 - DNA, 30 bp, Homo sapiens
  chr9:140352173-140352203
  hypo
agatggtgtacactcgaggctgagggccct

SEQ ID NO: 23876 - DNA, 30 bp, Homo sapiens
  chr9:140359462-140359492
  hypo
aggcaggcaggactcgagactgacctcaaa

SEQ ID NO: 23877 - DNA, 410 bp, Homo sapiens
  chr9:140379672-140380082
  hypo
cccaccaaagacagtgattcacggagcgactgaaaggaatgtgaggctcagagtaaaccagacaaacgctgcaggtgaggcctcatcggagtaaaccagacaaacgctgcaggtaaggcctcactggagtaaaccagacaaacgctgcaggtgaggcctcatcggagtaaaccagacaaacgctgcaggtgaggcctcatcggagtaaaccagacaaacgctgcaggtgaggcctcattggagtaaaccagacacactctccaggtgaggcctcatcggagtaaacaagacatactctccaggtgaggccttatcctctgaaccaatcgtcgcagggctttccaccactcactccaggaacagtaaacaacacacgggctagacatcaataggcccgtttctcttgtctg

SEQ ID NO: 23878 - DNA, 30 bp, Homo sapiens
  chr9:140380752-140380782
  hypo
tgggatgcacacggcgccgtggcagcactg

SEQ ID NO: 23879 - DNA, 162 bp, Homo sapiens
  chr9:140388965-140389127
  hypo
atggcctgtgccaccctcacccgcaccaccctcacccgcgccctcacctgctctgcgccctcacctgctccgcaccctcacctgcgccctgccctcacctgctccgtgacctcatccactccgcaccctcacctgctccgcgccctcacctgtgccctgccc

SEQ ID NO: 23880 - DNA, 30 bp, Homo sapiens
  chr9:140394124-140394154
  hypo
ctgggccagggccccgctgcccccacccct

SEQ ID NO: 23881 - DNA, 239 bp, Homo sapiens
  chr9:140396596-140396835
  hypo
gctcccagaggtgacccgggagtgcccaacacactggaacccagaaggcagaggttgcagtggacccggagcctgtggagaggccctggggcaaaccaagggtgagggagcgtctgcgggcaccacacccacgaaggtttgaaacatcaggtgtgtaaacccccagtccacagtgatgatgaaataaaaataagaagccccacccagcatctttggaaaatgatcgaaaaacaaaccat

SEQ ID NO: 23882 - DNA, 31 bp, Homo sapiens
  chr9:140397066-140397097
  hypo
cttcaggagaagaaagcggcctccctgagga

SEQ ID NO: 23883 - DNA, 103 bp, Homo sapiens
  chr9:140401367-140401470
  hypo
cacccatttctcagcggaatacagaggaaccgcgcagacactaaccgcagacacatgccacacagatgccgcagccacatggcgctgcgggaaggaaccaggc

SEQ ID NO: 23884 - DNA, 31 bp, Homo sapiens
  chr9:140416957-140416988
  hypo
taaccttcattattcccgaacccactcagaa

SEQ ID NO: 23885 - DNA, 122 bp, Homo sapiens; identical to SEQ ID NO: 7151
  chr9:140445954-140446076
  hypo

SEQ ID NO: 23886 - DNA, 31 bp, Homo sapiens; identical to SEQ ID NO: 7153
  chr9:140473463-140473494
  hypo

SEQ ID NO: 23887 - DNA, 30 bp, Homo sapiens
  chr9:140481483-140481513
  hypo
caggcgattgtccacggtcacagcgttgag

SEQ ID NO: 23888 - DNA, 30 bp, Homo sapiens
  chr9:140483462-140483492
  hypo
cactgaacattcaacgcaccaataaaccta

SEQ ID NO: 23889 - DNA, 25 bp, Homo sapiens
  chr9:140487964-140487989
  hypo
tttttagacagagtctggcttcgtc

SEQ ID NO: 23890 - DNA, 31 bp, Homo sapiens
  chr9:140538197-140538228
  hypo
cacgttgctcctctgtcgctgcttttgagag

SEQ ID NO: 23891 - DNA, 43 bp, Homo sapiens
  chr9:140576166-140576209
  hypo
gtctcccctgcacctctggatcgcacacactcattctgctttt

SEQ ID NO: 23892 - DNA, 31 bp, Homo sapiens
  chr9:140576695-140576726
  hypo
ggccaaaatcgtcctctttaaagcagccact

SEQ ID NO: 23893 - DNA, 175 bp, Homo sapiens
  chr9:140577313-140577488
  hypo
tgggtcactccagcccagctgcgaacaggtgcgctgcctgcaggggctgccctgcacgtgcgagtgagtgcccacacgctgcaccagttggaactgagagtcaggcggaagggcctgtgtgccctggccttaactctgggtttgcaggattttcgcacaccacttttatttcagt

SEQ ID NO: 23894 - DNA, 701 bp, Homo sapiens
  chr9:140587005-140587706
  hypo
ccgagcccggcctcagatggtgtttttccatcaactttttctttttacttagaaaggagtttttaaaaccataaaaagtgagaaaactctcttttagacgttgatatcttccatgtgtgggaggagctagatgatctgcgcgctggtcagaagcacgttgcatggtgtgtgtgtgtcggacggcagtgaacaatgctcaggcgcctgctccagccctggtgaagccatcatgctccagtgcgcagtgtctgttgctgctgggtgtgggagcaccaaggaagagacctgggcaggagctgacttcagagccggctgaggaggggtgaacacgtgcgggcagtggtagggtgtcttttggaaaaaagggacaatcagaagcctgagagtccggggtggatgtggccacaagggttgtccttggaatcggctggacggcacctctgcctgcctcacctgggggctttggaccctttggcgaatgggcacagcagaggttttcagcatggcaataataagactttttagaaaggaaaagtgtagtgggtggatggaaagagcaggttaattgttaaactcgtaggggagatgggctgagggccggagccacagcgtggagttggagacgcacagtgaggccgggctaaggggactggacttgtttttgaacagttcaagttagcgggtatctaacaagcagtgac

SEQ ID NO: 23895 - DNA, 30 bp, Homo sapiens
  chr9:140587996-140588026
  hypo
cgcagtggtgcaggacgctggccgataccc

SEQ ID NO: 23896 - DNA, 21 bp, Homo sapiens
  chr9:140588505-140588526
  hypo
acacagtggctcaggacgctg

SEQ ID NO: 23897 - DNA, 80 bp, Homo sapiens
  chr9:140588765-140588845
  hypo
taccccccacacagtggcgcaggacgctggccgatacccaccaggcgatggtgctggactctggccgataccccccacac

SEQ ID NO: 23898 - DNA, 105 bp, Homo sapiens
  chr9:140592431-140592536
  hypo
ctgttgtgagggcagcgtgtgagggcggtgtggctcgcggaggcctcaatccccactgtcgtgagggcagcgtgtgagggcggcgtggctcgcggaggcctcact

SEQ ID NO: 23899 - DNA, 540 bp, Homo sapiens
  chr9:140606077-140606617
  hypo
gtgaggggagttggggcgaggggagtcggcggggctgcacccctctgtaaggcgtggcgcacacatagggttcggatgttcttggagagcctgcaccaccaagagcgcccccaggaaatgagggcaggtggcgccagacgagctgtgctgtgctccacagtgaagggagagtggtgttctggctggacccataagggtggcggccgtgggagcagctcagacactggacttgcctaaggctctcccagctggagcctgctcctctccagacagcgcgcaaggcctggctcctcatggactgtgggctgtggcccctgccgtgttctcctttcaccctagatggcctcgctgtgcctgtgggttctcgtccacccactggctgtgcactgtggtgaccgctgcccgcctctgccgctacccctagccggccctccagggttgcccccacctcctgcgccatccacctcctgcagcctgactgggtgttttcttcctgtactttggccccttcctgttgccgtcctttctgtgtctttgaac

SEQ ID NO: 23900 - DNA, 284 bp, Homo sapiens
  chr9:140611159-140611443
  hypo
gtcttgtgaaaacagcgatgccagcagtcatgcaaatgctgcaaagcacactcaggacagcgcaagggtcaacccccaggatggcaccaacacactaactcggatagcggaaaatggggtttcagaaagagactcagaagcggcgaagcaaaaccacgtcactgccgacgactttgtgcagacttctgtcatcggcagcaacggatacatcttaaataagccggccctacaggcacagcccttgaggactaccagcactctggcctcttcgctgcctggccatg

SEQ ID NO: 23901 - DNA, 509 bp, Homo sapiens
  chr9:140615062-140615571
  hypo
attttatataaatggaattataatgtatgtaaccttttgagagtagcttttgtcactcagcatagttctcttaagatcatccaagttacgtcattagcccgtcccgttctctgctgaggccttggtgttctgtggggtgtggacagccttgtacgtcggcactcacccgctgaaggacactgggcatttttactttagagctgctcggggcatttacgtacacgttttggatgtaagatttacttctgtgggtcaaacacacaggagcataatcactgggttctatggccttcgggtgtttcattgaacgaggaaattgctgaaccacactccagagtggctgcagcctttcacacgcccaccggcgatgttgcagtggccgcctttctcccctcctcgccggcgtcctcgccagcgttagctcttacccactttttatttagcgcttctgttgggtgcgctggtgtttcctcgaggcttcagcgtgcgtatccctgtgactgctgatg

SEQ ID NO: 23902 - DNA, 31 bp, Homo sapiens
  chr9:140620042-140620073
  hypo
agtagggagcccaggtcgttctatgtctgtt

SEQ ID NO: 23903 - DNA, 135 bp, Homo sapiens
  chr9:140620769-140620904
  hypo
gtgtccatcagttggacgactctagggacctcctgtaagtggaatggtacaacgtttgttcttttgtggctgacttacttcattcggcacagtgtccccgaggctcatccacgctgcagcgcgggccccagcttc

SEQ ID NO: 23904 - DNA, 30 bp, Homo sapiens
  chr9:140622978-140623008
  hypo
caggtaaagaggacccggcaactgtctctg

SEQ ID NO: 23905 - DNA, 258 bp, Homo sapiens
  chr9:140623352-140623610
  hypo
gtgaggaccaccgcccgctccagctgctctgccaccagccacctcgctccaggcgtgctcctcactctcctgggctggctgcttctatggccagttccgggagtggatgaacgtttgattccttaccggggaccttttgtgggaggtgctgggagggcaccgggacctcagagtgagcgctgcgtcagggctccctgggctttcaaacctcctcagcttctgggatgggatgtgtgcgtttggcgctgtcctgaagag

SEQ ID NO: 23906 - DNA, 154 bp, Homo sapiens
  chr9:140645281-140645435
  hypo
gcctgtgacatgtataaaggtcgattgtaagactggggtattaaatcagtggtcaaggggtcatgaactttttaataactatggttgggccagttgactaatattttgggaaaaggcagcctgcacttgtgtcagggcacgtaacaaatgtgag

SEQ ID NO: 23907 - DNA, 181 bp, Homo sapiens
  chr9:140647979-140648160
  hypo
gggacatgttcagttggtcagcgaggcccacgtgctgctgctgtgcctaccttaaatgtcccccgcccactgtggcctgcacgtggcctcctgtggaggggtgggggcgcctgctgtgcatccgtgtgtgacatgtggcatggatgcccttgctgcatccggattttagaagcagatgctt

SEQ ID NO: 23908 - DNA, 30 bp, Homo sapiens
  chr9:140652670-140652700
  hypo
taagagtcaactggcgaagcccaagcatgg

SEQ ID NO: 23909 - DNA, 668 bp, Homo sapiens
  chr9:140653936-140654604
  hypo
ctgtctctggtgaggtcgggggaaggtagctctaaaggaaggatggtgccgagcatcagggccaaagggcgagagccaacacaaagccggaggagaaatggcagggagtagaggctcctcagcttgtgtgacattttgtaaactgcctcccagaattgatttccctgtgtttgatcagcgccgattggtcagtcagcgattggcctgttcagtcatgctcttgatgtagatcatcagtgtgtagaagagacaggcggtgcgcccactgtgctggtgctggccgtgtggcccgggaccccagagggaggcagtggtcaagtggcgctggatggcgtctggggctctgggagacctgggtggtgtgtgtttcagatgggacaggcgccatcggcctgtggagtgtgctgagcgggtcagtgggggcaggtgatgccgctggttgtgggtcagggggtccaggcttgagccttgggccaaggagaatatgaagatgagaagtcctctccgtatgcattcgtctctttccccgttgccttgctcttgggcctgccttattgaggctgaatggcgatgtcacccagcagcaacaggaggcagagggtctgagcctgggaggggccaggagtcggtaaccatggcaacgtgggctagggcgggagaggcagagc

SEQ ID NO: 23910 - DNA, 30 bp, Homo sapiens
  chr9:140658421-140658451
  hypo
ctggtgcctgttggcgtggccggggtttct

SEQ ID NO: 23911 - DNA, 88 bp, Homo sapiens
  chr9:140680277-140680365
  hypo
cctgggtgccctccccgggaacagcagccgttttggtctcaccgccctgcaagtgcctcgcatagcagggttccgtttgtttgctttt

SEQ ID NO: 23912 - DNA, 162 bp, Homo sapiens
  chr9:140682706-140682868
  hypo
catgctgaagccattgctgggcggtggcagatgaccgagcggctggtaggactggcatgcagcactcagggggcccaggacgttggcgaaggctccacccgcaccgccttctgccagcgcctcagccggggtgacgctcacgcaggtgtaaggaggttgcag

SEQ ID NO: 23913 - DNA, 26 bp, Homo sapiens
  chr9:140703365-140703391
  hypo
actccgcctctaaaaaaaaataaaaa

SEQ ID NO: 23914 - DNA, 613 bp, Homo sapiens; identical to SEQ ID NO: 7154
  chr9:140703846-140704459
  hypo

SEQ ID NO: 23915 - DNA, 102 bp, Homo sapiens
  chr9:140704675-140704777
  hypo
gttccgatgccgccccgcgtggaccgtcggtgatgggtccggaggcggttccgatgccgccctgcgtgaaaggcgctcctcgcacggcgccaactggaggag

SEQ ID NO: 23916 - DNA, 30 bp, Homo sapiens
  chr9:140705975-140706005
  hypo
ctggctgccaagtgcgacctccacgccgtg

SEQ ID NO: 23917 - DNA, 573 bp, Homo sapiens
  chr9:140707363-140707936
  hypo
attgttagtgatgacggacattttataaatctcatctgtatcacattttcaagtcagctttaaatgttttgtggccttacattttcccttttagcctctttctttctcgggattcagatgtcaccttaaagaacaaggaaggagagacgcccctgcagtgtgcgagcctcaactctcaggtgtggagcgctctgcagatgagcaaggctctgcaggactcggcccccgacaggcccagccccgtggagaggatagtgagcaggtgagcccagccccaggacggctttgtggcaaatcagcggtcagcagggctttgggaacttgcggtgaaagctgctcctgaagccgaaacatccccaggctgcagtccaaattgtcagggccaggtgtttgccagccgccccactgcacgctgtgccaccccctgggcagagcacgtcagccaccaggtgacacctgtcctttccatggcagggacatcgctcgaggctacgagcgcatccccatcccctgtgtcaacgccgtggacagcgagccatgccccagcaactacaagtacgtctctcagaactg

SEQ ID NO: 23918 - DNA, 961 bp, Homo sapiens
  chr9:140708199-140709160
  hypo
ccaaggcttcttaccgacccaaagcagtggcaggcatctttgtgccttttttgtaacctcacactcaggggccccggtgtggcttcgtgctgggggcacaggcgagaggagcccttgcgaggcctgcaggacgacctggatccctgcacctcccagcccccggagagatgggtccagcacatgccagctttcccagcctccgagtgcatgcagcctggtgccctcactgcttgcgccttctcgagcactttccttgtggctctgcttgtgggcagctccctcctcttcccaggccgggcactgcccaggcccccccccccccccgccccccgccccacaaggtgtgtcaggctctgtgttcttgcctttcccatcgagcatctggccacaaatgcagccgccgcccagcccttcacccaccccacgtcacccactgccgcgtcgctgccctgcctgccccctgtccctctgtcagggtcctcagccagagctccctcccacaggcactcgacatgtttctgcctgcacagccttctccctaagaggccacacactcacgtggtgcctttgagaagcacttaccagaatcagggttaacagaactggaagacgtagttgtgactgggaggggaaatggaaggcctgtgcctgcacgtctgaccccccggcgcctctcttctcagtactgcgtgtgcatcgacgactgctcctccagcaactgcatgtgcggccagctcagcatgcgctgctggtacgacaaggtgagggcggcctcgtgtgcgtgggctcaggtggtaagtgccgctggtccgggtctgcaaaaacagtgcaggcgtctgtgaccccagcgctgtcgtggcagcgtcgggaaggagttggaggtgagctgggtgtgacaggcaggggaggcacagcgggcaccagcacccgagtcagggtcgtgagccgaggacatggctgc

SEQ ID NO: 23919 - DNA, 166 bp, Homo sapiens
  chr9:140709435-140709601
  hypo
ctgctgaggaggagacgggagtggggagtagccctggctagcaggggtgcaattcaggggagggatgtctaagcagaggcggagagttcctggtctcccgagttcagaggtcacggtgggggcggaagccagcatggcctgggtaaagagacgcgagcagggagag

SEQ ID NO: 23920 - DNA, 520 bp, Homo sapiens
  chr9:140727433-140727953
  hypo
ggaggcagcttcccgcgcctttggctttgggggctgtggctggtcctgtcctgcggccgtgctcgcctggtttactgtcttgtcactgcccgcgccgtgaaggttgacggagagctgctctcgtccacgcctttacccgcttgttggtttgggttttaacctcttgacctctgagcgtccctggctctctggttaatgttcatgctggggcaggttgtggaccaggtgtctctgccggcaggccccgccctctcggaactcggtcctggaaagccccaggtgcctccttccccgtctgcctggctgtcgtctgtggtgttgcctcttcccgtcgctgggtaacaaaccacgccacccacccgcagctcgccatggcggccacccactcggcccagtgtgcgcagcaggggttgggcgtgccgggcctcgggctgcacaggcagggtgctgctgagcccaggtccctgtggttgcgtgggcagcgtctaggttccttgctagctgccggccgggaccacct

SEQ ID NO: 23921 - DNA, 31 bp, Homo sapiens
  chr9:140728257-140728288
  hypo
ttctgtgggcagcctccgcctgacggtcctc

SEQ ID NO: 23922 - DNA, 30 bp, Homo sapiens
  chr9:140731430-140731460
  hypo
gtgggctgggttcccgccaagcccgggctc

SEQ ID NO: 23923 - DNA, 48 bp, Homo sapiens; identical to SEQ ID NO: 7155
  chr9:140773114-140773162
  hypo

SEQ ID NO: 23924 - DNA, 30 bp, Homo sapiens; identical to SEQ ID NO: 7156
  chr9:140876711-140876741
  hypo

SEQ ID NO: 23925 - DNA, 31 bp, Homo sapiens
  chr9:141069526-141069557
  hypo
agtgcgggaaccagatcggggccaaggttgg

SEQ ID NO: 23926 - DNA, 195 bp, Homo sapiens
  chr10:373929-374124
  hypo
aatgtgaaggcgagccgtgaatgtctgcgtcttggagtggaacccagagctgctaagggggcggccaccaaaaccccaaccgtcaggccctgcgaaccctttcaaggcagcctcggcacacggacaaccgacaagggtcctgagcaaggaggacgcacagctcgagctggctttgacattcgtgctcagtgtaca

SEQ ID NO: 23927 - DNA, 30 bp, Homo sapiens
  chr10:422172-422202
  hypo
acccaggccgacctcggcccccgacagagc

SEQ ID NO: 23928 - DNA, 31 bp, Homo sapiens
  chr10:426251-426282
  hypo
cctggaagatggttaacgtgcagaagaggct

SEQ ID NO: 23929 - DNA, 336 bp, Homo sapiens
  chr10:482140-482476
  hypo
cttgaccacagattctacctccggtttctctgtgtatgcagtgattgtttgcttaatattgcacattgtgggtaacgtgttgagcacgctcaggatcccataagcttcttcggaagctttccagctcttgttttagcaggcagcgcaggcactgctgggtcatcgtgaccatgggcaggcttggattgatttgctgctggtgtggatgggtggagagctccagtcctgcacccactccgatctccgcctcctggacttggcagggtggcatgctccgcccacaccagagctctctccgagctccgcctcctggacgtagtagggtggccatgctcc

SEQ ID NO: 23930 - DNA, 30 bp, Homo sapiens
  chr10:482898-482928
  hypo
gctctctccgagctccgcctcctggatgtg

SEQ ID NO: 23931 - DNA, 312 bp, Homo sapiens
  chr10:524502-524814
  hypo
ctgtcttattcccactcatcccgtgtccgggcgtgctggggctgcagacacatccaaattcccatcttattctcaactcatcccgtgtctgggcatgctaggggtgtagacacatccaagttcccgtcttattctcactcatctcgtgtccgggcgtgctgggggtgtagacacatccaaattcccgtcttattctcactcatcgcgtgtccaggcgtgcagatacatccaaattcccatcttattctcactcatcgcgtgtccgggcgtgctgggggtgcagatagcaacgtctctatggctcaccttagc

SEQ ID NO: 23932 - DNA, 159 bp, Homo sapiens
  chr10:545442-545601
  hypo
ttacatggcggcaggtgagagggaggtgtgcgagggggaggacaggacctactgaaatagtaccatataatatctgacagagcagccaagggctggtggctgcaggtcgcaggaagggaacacagttaccaaaaaaacagatctcgtgagatctcccaa

SEQ ID NO: 23933 - DNA, 31 bp, Homo sapiens
  chr10:583732-583763
  hypo
atttttttttttcccccgagaccgagtctcg

SEQ ID NO: 23934 - DNA, 353 bp, Homo sapiens
  chr10:669049-669402
  hypo
ggagccagtgaggtggctgcacggagcacgcgtgtgaagattcaggagcacgagcatcaggtgacaggagggggcacggaggcagcaccagatggatgtgtgccgaggggatgctgcagccgggctggcgagggaggtcacaggaacgggcgcaggcatctccctccagccgcacttgacaggagggggcacagaggcagcaccagacggatgcctgccaaggggacgctgcagccgtgctggcgagggaggtcacgggaatgggcacaggcgtctccctccagccgcacttaggttttcatgaggacgggtgcagagaaggggatgaaaccgaaatgctgtggggctgaggg

SEQ ID NO: 23935 - DNA, 220 bp, Homo sapiens
  chr10:669946-670166
  hypo
tgaagccaacacagttgggctcgaaccgccaccctgctccttctctctgcacccgggacccgccctgagcccctgagtgcgaggactcgggaactgcccagcccaagggcgcagcccctgaccagagaagggagccgcacggcgaggcccccagcacatggatggagggatctgttatctcggtcccagggtcccaagcggggaaggcctggggctccca

SEQ ID NO: 23936 - DNA, 30 bp, Homo sapiens
  chr10:678248-678278
  hypo
gtaactggaaaccacgcgggcaccagcgtg

SEQ ID NO: 23937 - DNA, 30 bp, Homo sapiens
  chr10:678905-678935
  hypo
gaccacacaggcaccggtgtgaactcagac

SEQ ID NO: 23938 - DNA, 314 bp, Homo sapiens
  chr10:679193-679507
  hypo
gtaccctttccaaataaaacccggggccgcctgtgtacccaagagcctgggcactgagcagagagagaaaacgtccagggcaacagcgttcacattccggcggtgccatagagcagacggggggagtccgaggcggtgccgcagagcggacgcggggagtccgaggcggtgctgcagagcggacgcggggagtccgaggtggtgccgtagagtggatggggagagttcgagccacaggtggccacgcctcccctgcctccggccggtgcccactgctcacgcattcctctctcggcccatcctgagccaggggg

SEQ ID NO: 23939 - DNA, 161 bp, Homo sapiens
  chr10:685211-685372
  hypo
gtccacacgtggggacgcgtcaggtcgggagggtgctgcccggctcacggtccacacgtggggatgtgtcaggtcgggagggtgctgcccggctcacggtccacacatggggatgtgtcaggtcgggagagtgctgtccggctcacggtccacacatgggg

SEQ ID NO: 23940 - DNA, 31 bp, Homo sapiens
  chr10:685731-685762
  hypo
ggtacacacaaatcagcgacatcactagaac

SEQ ID NO: 23941 - DNA, 153 bp, Homo sapiens
  chr10:746637-746790
  hypo
gtgtggtgtgtgtgcaggcatcggcgtgcacctgtgcgtggtgtgtgtgcacgcataagcatgcacctgtgtgtgtatgtaaagaaaggctaggaatgaacagagctccctccacacggaagaaaatatgacgcatgggaagatgtcttccct

SEQ ID NO: 23942 - DNA, 230 bp, Homo sapiens
  chr10:769016-769246
  hypo
cagtgaacaaaacaaagttgccgcccttgtggaggatgaattctagtggcgagagacagacagcaacaggggacatgcccgtgcagcacgctgagcaacggtggcgccatcatcaccacaccccacgtcacatgacagggatacagtacgtgtcaggggtttcactgtgtgggaaaaggtcacgccatcatcaccatgcccagcgtcacgtgacatggatagagtacatg

SEQ ID NO: 23943 - DNA, 30 bp, Homo sapiens
  chr10:819061-819091
  hypo
tttttttttttttttttgagacggagtttc

SEQ ID NO: 23944 - DNA, 181 bp, Homo sapiens
  chr10:819330-819511
  hypo
gattacaggcgtgaaccactgcgctcagcctggcgagatttcattttattgataaatgtaagtttttgcactgaactaaccccagacttcactaacgtgggtaggaagacatggctcctaggtgtagacgcaacccccagggctcttggacggagatcacgtggaatccagagtccagtga

SEQ ID NO: 23945 - DNA, 203 bp, Homo sapiens
  chr10:819723-819926
  hypo
ggccccccagaactcctagagcgccctgagatcttcgggttctgatggtggcaggttctgctggggcgggtggtgggccctgctagggagggtgacgggccctgctggggagggtggcgggccctgctggggagggcggcaggccctgcgggagcatgtgagcagggacatgatggggtcgcgcattttgcagggaaaccagc

SEQ ID NO: 23946 - DNA, 30 bp, Homo sapiens
  chr10:851424-851454
  hypo
tggacgcggcctggcggcctctgcggagcg

SEQ ID NO: 23947 - DNA, 195 bp, Homo sapiens
  chr10:863714-863909
  hypo
agtcctctgtcttcaaattgccggcagctccaggtaatggagggaagctggacagccccagctcgaagcttggcgacggaggctttggtggcgttggagactgtgtctggctgctctgcaacagaatgacaccccagggtcacggtatggagagagaaggccaagcagcttctcgtttccacacctgtctggaaa

SEQ ID NO: 23948 - DNA, 181 bp, Homo sapiens
  chr10:868645-868826
  hypo
catcactgtgacacccgcgactctgaatgcagtggtgtgaaggcctgagaccctgaagaggtgtgcttcccccagctgatcctaacagtagctccaccaaggcagccacctggcgcctggggctcctcatgccattcaacccagctgggccgtgccctgccatggccgccatgcaagggta

SEQ ID NO: 23949 - DNA, 29 bp, Homo sapiens
  chr10:872924-872953
  hypo
tcacacatggccgggcgcagtggctcatg

SEQ ID NO: 23950 - DNA, 31 bp, Homo sapiens
  chr10:894780-894811
  hypo
agagagcaccagaaaccgccatgacatggac

SEQ ID NO: 23951 - DNA, 18 bp, Homo sapiens
  chr10:941141-941159
  hypo
taacgtaaaataaaataa

SEQ ID NO: 23952 - DNA, 135 bp, Homo sapiens
  chr10:978805-978940
  hypo
ccacacctgggatcaaggccccggcccttccccaaacccccaacccacacccgggaccaaaaggccccggccccacgtttcctagaggcgctgggttcgggcccacgttgcaacgagtcagatgctcttggtagc

SEQ ID NO: 23953 - DNA, 30 bp, Homo sapiens
  chr10:986656-986686
  hypo
atgacgggagaagtgcgggagcgcaggaga

SEQ ID NO: 23954 - DNA, 30 bp, Homo sapiens
  chr10:1011233-1011263
  hypo
tgctgattcacttccgaggcacaatcagaa

SEQ ID NO: 23955 - DNA, 264 bp, Homo sapiens
  chr10:1120772-1121036
  hypo
agtagtttagaaagccaggttcgcgcaggcgcaggaggtctgtcgttgccgagaactgcgacgtccacgtgcacacagtgctggctgcggcctgaagagctggctgcttcccgcacgtgcgtgcaggtgctttcaggtgtgtgttggtgtcgatgtgatggaagaaattcatttaaaagctttgctgagtcacggcagtagtgtcttgagttttctcaagtggtaccaaaagttcaacaactcgtttgagagtctgtgaaattg

SEQ ID NO: 23956 - DNA, 30 bp, Homo sapiens
  chr10:1147964-1147994
  hypo
gtgcgtccctgtgacgtgcgttcccttgct

SEQ ID NO: 23957 - DNA, 31 bp, Homo sapiens
  chr10:1148513-1148544
  hypo
aggagtaaggcgggggcggggggtgccccac

SEQ ID NO: 23958 - DNA, 31 bp, Homo sapiens
  chr10:1166112-1166143
  hypo
gggtgatgagaaaggccgggatggagcttcg

SEQ ID NO: 23959 - DNA, 329 bp, Homo sapiens
  chr10:1167472-1167801
  hypo
ctgctctcgtaacccgtgctgctctcgttacccaggctgggcgtttgcttgtgtcctgccccgtgtgatgccgtggtttccagttgggcagtttccccccaggagacagtgtttgttgtcacccctggggaggggtctgctctagtttctaatgtgcctgggcagggcggctgctacatccacaggccaggatgctgcaccacagggaagggccccgaccagacatcaggtcctagcgggggaataagtgtcagcaatccacaccgcagctgtgggcaccacgaccaggcctttgagaatgcagacgtgaaaacggtcgccgccgcatc

SEQ ID NO: 23960 - DNA, 31 bp, Homo sapiens
  chr10:1199245-1199276
  hypo
gcagtacccagagggccgacatctgttgcct

SEQ ID NO: 23961 - DNA, 30 bp, Homo sapiens
  chr10:1206626-1206656
  hypo
ctggcacgttcgcacgtggccatgtcagct

SEQ ID NO: 23962 - DNA, 30 bp, Homo sapiens
  chr10:1222489-1222519
  hypo
ttatggcaaagctacggcaaatctgggaga

SEQ ID NO: 23963 - DNA, 44 bp, Homo sapiens
  chr10:1230857-1230901
  hypo
gcccccacagctcctccgcccagtggtggcgttgataatctcca

SEQ ID NO: 23964 - DNA, 30 bp, Homo sapiens
  chr10:1246321-1246351
  hypo
ttctgaaaatgagtcgttagagtggaaact

SEQ ID NO: 23965 - DNA, 30 bp, Homo sapiens
  chr10:1251847-1251877
  hypo
tcaggtggaggtcacggggcagcccgctgg

SEQ ID NO: 23966 - DNA, 652 bp, Homo sapiens
  chr10:1252096-1252748
  hypo
ggccaagtctaccctgcaacacgctggtaaaatgtaaaattccttcgcacgagagtgaagaggatgatccccaggtgcgtctctccattcccgggtcctaacgattcctccttaagccggctacctgcgcgggggccacgctctcccactgggaggatggtttctgggacatgcggcgtctcctccttgtgcctgtgcgtctgagagaactggggcgtctccttgaactgggacgtctcctcctcgtgcctgtgtggtctgagagaactggggcgtctcctccaactggggcgtctcctcctcgtgcctgtgcgtctgagagaactgcggggtctcctcctcgtgcctgtgtggtctgagagaactgcggggtctcctcctcgtgcctgtgcggtctgagagaactgcggtggccccttgtgggcctcttggttctggggacagaggacacttttcactcagcccggggacctttggttctttctgtgaagatggcgcccatgagatgacgccttgtgactcaggtacctcagccctgcgcctccgtctctgcgtctctgtattgggttggtggcgtccacactgtctgcgtcgttgctgagcatcccaggtccccactcagcccggcctcgtgttttctcttgtcctcctg

SEQ ID NO: 23967 - DNA, 608 bp, Homo sapiens
  chr10:1259925-1260533
  hypo
ctgtgcccagacctggcattgcgtgggttcgcacctgtgtccagcgttgtgtagctttgcacctgtacccggacctgccggtgacacataggtttgcacctgtgtccagcatcgtgtaggtttgcacctgtgtccagcgtcatgtaggtttgcacctgtgtccagcgtagtgtaggtttgcacctgtgcccggacctgctggcgttgcatgggtttgcacctgtgtccagcatcgtgtaggtttgcacctgtgcctggacctgccagcgttgcatgggtttgcccctgtgcctggaccttctggcgttgtgtaggtttgcacctgtacccagcgtcacgtgggtttgcacctgtgcctggacctgccggcgtcgcatgggtttgcacctgtgcctggacctgccagcgttgcgtgggtttgcccctgtgcctggaccttctggcgttgtgtaggtttgcacctgtacccagcgttgcgtgggtttgcccctgtgcctggaccttctggcgttgtgtaggtttgcacctgtacccagcgtcgcgtgggtttgcacctgtgcctggacctgccggcgtcgcgtgggttcgcacctgtgtttagtccacca

SEQ ID NO: 23968 - DNA, 286 bp, Homo sapiens
  chr10:1443298-1443584
  hypo
catgcctcccattgtgtgtcccggcagccacaaacaccgtcaggcccagcgtcaccctccccacctcccggatgagaaggagcctccggagcagctgagggacccactgtggaggcagccgggtgggggacggcccggtgtgtgtggtctggtcgtgactttcccacaaggcatcacccatgggaaggaggcgtgatgatggtaagcagcacagagccctgcggggaccagggttttggaacaccccggccttcggtcatgctgcgggaagcctgggtcctctccc

SEQ ID NO: 23969 - DNA, 233 bp, Homo sapiens
  chr10:1558645-1558878
  hypo
gcttgttcacctgtgcgggctttgtgtgggctgctctgtgctatgcgggctgctctgtgcgggctgctctgtgctgtgtgggctgctctgctctgtgcgggctgctgtgtgctgtgcgggctgctctgtgcttgggaaaatgaaggttggcatgatttcctgcggcaatgccctcccgttttatgccttaataagggctagaaagaaaacattttcctcgagctgcatgcgaa

SEQ ID NO: 23970 - DNA, 385 bp, Homo sapiens
  chr10:1585130-1585515
  hypo
cagaccccactcagacgcagttgggaccctggatcacagctgtccgtccgcccgagcagattcttgtccaggtgtttttccacttgcagctccgcgctgggcagcttcaggcctgttacagcgacggtgcggcttccctgcctgggttgttgggacggaagggattccaccctggggcggtgtggggtggcttccctgctctccctgctctctgcgttcccacggtgcaggatggcggcgttgagagccagaaacgaaaccctgagaagcagaagccgggcgtcctgcccgccctcctctaccaggcctcatctggagggctgcgccaggtccttccaacttcaaagagttgcctgtgaagggcgtcctccaggtgggtctgcag

SEQ ID NO: 23971 - DNA, 405 bp, Homo sapiens
  chr10:1708435-1708840
  hypo
ctttctgagatagcacagccccgagggtcggcagggcactgagggccacctgccctgcctgccccgccagggcgagcatctgaatccacattctcctgggccgcagctcatctgcgagtcggagcctccgaaggggggccagtagcacatgtcccagcctctctcgcccaggtgatcctcatgaccagacgcggctttgctacaagacagctcagactgtgttcccccaatcgtgttcccgcaggaaagctgcccgaggatttttgtcatgcacacgccgctgccagcccattagctctccctgcttcccatggtctgccgcatctggggtatccagcgtcctcctgcagccgagggggaattctgaatgttttgctagaaaccgtctcatcaacattcagtttc

SEQ ID NO: 23972 - DNA, 31 bp, Homo sapiens
  chr10:1720646-1720677
  hypo
tcacactcaaggtcaccgagaactttggggc

SEQ ID NO: 23973 - DNA, 443 bp, Homo sapiens
  chr10:1994740-1995183
  hypo
cagagccataaaatcaggccccgtccttagggctccgtccccagttccgtgaccggccctctgctctgtgctgacacccagcaccctccccggcctctgctccgaggggaaaataaaacaggggccttcaggcctcaccgctggctcactccatcgcagcaaatcgaccgagggtcctctgctgcgtccttgcggcctgttgtcttactcagcggccctgacacccggcatttatttaaagcctcgaggctggatgcggttgcgacagcagggcgtgttcagaggaaagaaggggctggagcccgggcactcgggttaggcaacgtcaaggggctcgggaggagagtgggctccgccaaggcggtggctgcaggggccacgtgtggcctcttggaacacggaggaaggaagcgctgaaggacgtaaggactgtctgtaaaatc

SEQ ID NO: 23974 - DNA, 208 bp, Homo sapiens
  chr10:2006675-2006883
  hypo
atgcagataatccagtatcaacgcggggcggactggagacccaggaaacgcctgaaaggagggccgtgcaggacgaagcccccaggacacgcgaggagacccggccgcgcgccgcgtggggcttgggagcctccgaggggccatgcccagcctggaataaccatttcggtttttgctagatggctgcggagacaatggatgaatgaca

SEQ ID NO: 23975 - DNA, 173 bp, Homo sapiens
  chr10:2416381-2416554
  hypo
gtaatcctgacctaggctgtgcggtatgttacatgtgcagcgtgttacagtgtgtcacatgtgcagtgtgttgcagcgtgtcacatatgcagtgtgttgcagcgtgttgcatgtgcagcattttacagcgtgttacagtgtgttacatgtgcggtgtgttgcagcatgctaca

SEQ ID NO: 23976 - DNA, 186 bp, Homo sapiens
  chr10:2610007-2610193
  hypo
tatattcttggaatcacgggaaaggtcaacagagacaggaggatttctccagtgcgtttcaaggcctccacttcctttatctctcctgacagctccttggatacaatgtcacaaatcttggcctgagcaagaatgtgcaagtgggagcgagggtgagaaattggggtcgttcgcatcatctatcac

SEQ ID NO: 23977 - DNA, 222 bp, Homo sapiens
  chr10:2620064-2620286
  hypo
agggtaaaagtcatcctgtaacgacaattctaaacagtgctaaagcgtttcatgagagtggcctgggcgtcctcccaccacagccgctgtgcgcagcggagcagagggaaggagaacccgggcagagctgcacacctgctgcgggaggggctgcgtctcgcacttcttctgtccggggaggcgccttgctctgaccttcctcctcaaaacacgggcgcggtg

SEQ ID NO: 23978 - DNA, 102 bp, Homo sapiens
  chr10:2620525-2620627
  hypo
ctgggcaaaatagcgagactccgcctcaaaaacaaaacaaaacaaaaaaacacgcaagtggaattccagaaaagtcaccacgtctgcacaatgagaagtcca

SEQ ID NO: 23979 - DNA, 458 bp, Homo sapiens
  chr10:2932054-2932512
  hypo
ctcagatgagaacagcaccaccgtacgtggtcaccaagccgcaaaagccaggcgtaagcgaacagcttccagcgtcttaatcagagaaaatgagcaacaaagtttccccgacacatttgatgcatacgtaattgtcaccgtgctgcatgctaattaagcatcattcctacgtcgttttctaaatgactatgattggaacgatggttgcacagccaccggcagcgttcaggggagcagagcagggcggcgggagatggggcggaaggggaaactcctccggagccccctcccacagggagctggtggcccacgaacccgggaggcagcctcacgggcagcgtctcctccagtgaaccctcatggcctggagtccggagggccacctgcccggcgctctggctgaaaaaggtggctgctgcctttggtttcctccgcccgctgtctcctctagcatggag

SEQ ID NO: 23980 - DNA, 583 bp, Homo sapiens; identical to SEQ ID NO: 7160
  chr10:3109444-3110027
  hypo

SEQ ID NO: 23981 - DNA, 333 bp, Homo sapiens; identical to SEQ ID NO: 7161
  chr10:3110422-3110755
  hypo

SEQ ID NO: 23982 - DNA, 92 bp, Homo sapiens; identical to SEQ ID NO: 7162
  chr10:3111190-3111282
  hypo

SEQ ID NO: 23983 - DNA, 31 bp, Homo sapiens
  chr10:3150920-3150951
  hypo
cacgtgtgaccatcctcgggcacgtgcagag

SEQ ID NO: 23984 - DNA, 31 bp, Homo sapiens
  chr10:3151633-3151664
  hypo
cacgccgtgcgcctgccgctgatggagtgcg

SEQ ID NO: 23985 - DNA, 511 bp, Homo sapiens
  chr10:3160806-3161317
  hypo
tctgccatctgccagccacaacggcatgagtgaaaaggcagacgtttaccgctccttaattaaaaccacagactggggaaggcggccgggtggggaccggcgtggcgtcctgcggaccgcgtggagtttggggtgtctgacatcgttctccacgtggctattttcagcgttctcccggggaagtacttggaagagatcgccacacagatgcgcacgcacagcatcaacgcgctgctgatcatcggtggattcgaggtacgttaccgtttctctcttgccggtcttgcaggtgtgagccgcgccctgtgttggctaaacattaagctacttgttggctactggccacgatccgagatgataggttcccagacccagcggccactggagaattgtagaacagcaggatagcaggtggtaagacgtggcctacgagtggcccagttccagtaaagcaacttaaccgagaagcaaaagcttgactccttaacccgggcctcatctattcagtgag

SEQ ID NO: 23986 - DNA, 30 bp, Homo sapiens
  chr10:3162176-3162206
  hypo
aatgtgccgggttccgatttcagcatcggg

SEQ ID NO: 23987 - DNA, 30 bp, Homo sapiens
  chr10:3168654-3168684
  hypo
cacacttccaccctcgcgccccacacgcga

SEQ ID NO: 23988 - DNA, 31 bp, Homo sapiens
  chr10:3192624-3192655
  hypo
atacaaacatgacaagcgctgtcagaagaca

SEQ ID NO: 23989 - DNA, 30 bp, Homo sapiens
  chr10:3192934-3192964
  hypo
aatgaaacgtgtcacggaacaaaacgtgcc

SEQ ID NO: 23990 - DNA, 30 bp, Homo sapiens
  chr10:3196495-3196525
  hypo
tttctcttgaaggaacgttaggagcggggc

SEQ ID NO: 23991 - DNA, 547 bp, Homo sapiens
  chr10:3196874-3197421
  hypo
tcattactgaattgttcgtttttcgtatattctgaatacaggcctttatcagacaccatttttgcaaatgttttttcccagaggccaaactacctttgagaatccatttgggtccccttctctcccgtggcctcctcccttccttcgttccacccggctgctcccccagcggctgccaatccccgtctcacttttcttttcactcccaccatcctggcctaggtcgtcatgtcatgcttaggtgtctaattgcctctcagcagttttctccatccaatttctctatttttctgcaaaactatcctgaatgaggctgcagctacactgctcactgacccgacagttctcctgccttaatacatgaagcacccgtgtgctccccatcttccatacaggccctccccagagccacagggcacacctgtctcccccacacacgctgtcctccctccatgcccaccgctccaccatccctgtgtgcctcacgcctgtcccacagaatcctggtgctgctctgtggctggcacacacccggtatgcctgagac

SEQ ID NO: 23992 - DNA, 30 bp, Homo sapiens
  chr10:3216597-3216627
  hypo
cacaaacacgctctgcgcatcacccgtctt

SEQ ID NO: 23993 - DNA, 30 bp, Homo sapiens
  chr10:3243875-3243905
  hypo
ctggagggaagttcacggtgatgctgagtg

SEQ ID NO: 23994 - DNA, 31 bp, Homo sapiens
  chr10:3277259-3277290
  hypo
tgttgcagtggtgtcacgcatgccagctggg

SEQ ID NO: 23995 - DNA, 351 bp, Homo sapiens
  chr10:3329665-3330016
  hypo
atgtccaaccttcctcctgtgcgttgttctggtttcacatgttcgtgttgtaattgagtgcgtgcacactcagtaaatgcgaaatggtttcatcacaaccgcaccgatgcagttcctaaaagaaacacacgacagccgattttgcttctcaaaatcgctgcattcagggtttccgccgtcaccctgctggcagtgaactagaggacccgtcccaccggagctggtccatggagaggtgccacagcctgtgagccacggcagagcggagaagcctgggacccctgtcacctctcagagcagcgcctcacatggcagaaggagctgctttccgaagagctaaaggttgccata

SEQ ID NO: 23996 - DNA, 121 bp, Homo sapiens
  chr10:3330465-3330586
  hypo
ggtgagggctcccccgcgccgccctggcgtccaggtggtgagggctgcacggaaacgtggacttcggcagaacatgtgtgcgccacggagcggctgcgtgcagcccgcaggtgagaccgtc

SEQ ID NO: 23997 - DNA, 398 bp, Homo sapiens
  chr10:3342839-3343237
  hypo
gagcacctgcttgccttttgacgggtgggaatctgggcttgactgtgtcgccgtccacagcaggttgctacagcgggttcagcaatggcacctggtccatcgttccccgctcaggatttttccccgagctgtttggaaatcgctggatgctccatttttcaaattcgcttcacgtgtagatgaatttggcaaaagtcagagaaacagcgagtagccaaacaaacgggaataatttaagctgcagatcataagctcccggtgggcaaggacgaaaccttcatctgttctccaaaatgttccacgcagctcagtgggcattctctgatgctgattaccacggctcgattgacacgtttagctcctgtggggacagcgtcgctcatgatgaagagaatcaa

SEQ ID NO: 23998 - DNA, 31 bp, Homo sapiens; identical to SEQ ID NO: 7166
  chr10:3862627-3862658
  hypo

SEQ ID NO: 23999 - DNA, 30 bp, Homo sapiens
  chr10:3983404-3983434
  hypo
ctaggccgctaagacgtcaggggagctgat

SEQ ID NO: 24000 - DNA, 61 bp, Homo sapiens
  chr10:5523230-5523291
  hypo
gactcattgcaggtcgctctgcggtgaggacgccacaggcaccagcgtgcttctcctcagg

SEQ ID NO: 24001 - DNA, 316 bp, Homo sapiens
  chr10:5530491-5530807
  hypo
agtggggctctataaggctggcgttcgcctccagggttctccccgacactggatgccaacctgcccaggggcagaagggaggttgggcgtggggagtgccgggtacagtcagagttgccaggacagtttggagcagtgcctcttaatcttggccgcacagcacctgggagctttaaatagacccccacgcctgggcgcccccaccgctgacccaccagggctcagtgcagggggatggctcacacggcacattctccagaagctcctggggtagcttccaggtgcagccggggttgggaatcgctggcttatgcaa

SEQ ID NO: 24002 - DNA, 30 bp, Homo sapiens
  chr10:5531062-5531092
  hypo
agcgggaacggagggcgacctgcgcagcct

SEQ ID NO: 24003 - DNA, 303 bp, Homo sapiens
  chr10:5538685-5538988
  hypo
cactggccaggctctgagcaccgggcaagaaggaacaggtcgcaatgagtgaccgcaagagatcatggtgactcctgaaaacgcccaggccccgcctcagtgccccgggctacccctggccccccaggctttgtgctgaagccgagataaagtggacaggcgcacctcactcctccacaggtgtgccccacccccccacccgcaggtctgcccgagagcacggcaggtgggaaagagacgaatcctgactccaaggccagggccgccacctccccaaagcccgatttcacccaatgctaccat

SEQ ID NO: 24004 - DNA, 192 bp, Homo sapiens
  chr10:5540250-5540442
  hypo
agatgcacacatacagagacacgcatacagacacacagacacacacacagatgcacacacagacgtacacgtatattatttgcagccgaagagaggcaggctgcgtgcagaggctggcagctgggctccgtctgtccatgcgaggcgcccgctcctgtttgtgcgggacacgtgcccaggtcctcaccagca

SEQ ID NO: 24005 - DNA, 1089 bp, Homo sapiens
  chr10:5540652-5541741
  hypo
gcacacatggaactcggcagtcctttatttagatcaatgcggggctgaggggccctcattccactgcagggcaaagggggaccaggcccaaggaggcctccttctgcccaaggtctggaggcagagaggggctcgcaggcggcccgagggcgccgcatccaggccccggagcgcaaagccttcctcccagggggaggcagtttcccatccaccgaccaggtttccccggagagtcccagcacaaaagcagcagcgggcggtggccctgaaggctcagagcgcagccagggggacacaggcggggagcctcactcctgggcgagcatcctcgcgaactcctcgtagttcacccgcccgtcctggtccacgtcggcctcgcggatcatggcgtccagctcctcctgcggcagcggctgccccagccccgccatggcccgcctgagctcgtccacggtgatgtggccgtcgccatcctggtcgaaggcgcggaaggcgacctgcaggtcctccaggccggccctggccttcttcgccgccgtcaggaactcctggaagctgatttcgccgtcgccgtcgctgtcaacctcggagatgagtttccttagctgggcctccgagaggttcttgcccgtggccttcagcgccgcgcccagctcctgggcattgatggtgccgtttccatccgtgtcaaccgcggagaaagcctttttgtactgggcctcctcctcaggagtcagctcaccggccatgcctgcgtctcctgcacctcgcggagcctccgagctgctgcccaccggccctcaacctgctgctctcagagctcgtggtccagagtgcaggcagccgcagggatccgggcagcgtctgtcccagacagttctgccttggcatgggaaccccctccttttctgcaatcggaacaaagggaggagggaggctccccaccctccaaatgccctggggtgagagcctcctcccagggagggccagatcagctgcagacaggaaatgcaggaatgggagttgggagagctgtcaggtgccaggtgggaactgccatggggtcggggtatcggatggctagcctgc

SEQ ID NO: 24006 - DNA, 482 bp, Homo sapiens
  chr10:5567101-5567583
  hypo
cctgtttgacaaggatggggacggctgcatcaccacccgcgagctgggcacggtcatgcggtccctgggccagaaccccacggaggccgagctgcgggacatgatgagtgagatcgaccgggacggcaacggcaccgtggacttccccgagttcctgggcatgatggccaggaagatgaaggacacggacaacgaggaggagatccgcgaggccttccgcgtgttcgacaaggacggcaacggcttcgtcagcgccgccgagctgcgacacgtcatgacccggctgggggagaagctgagtgacgaggaggtggacgagatgatccgggccgcggacacggacggagacggacaggtgaactacgaggagtttgtccgtgtgctggtgtccaagtgaggccggcgcccaccatgctcctgggcgcccacgcggcccacagggcaagaacccggggcctcccgcctcctcccccatccccctg

SEQ ID NO: 24007 - DNA, 31 bp, Homo sapiens
  chr10:5571209-5571240
  hypo
tgactcagttcacccacggcagtgagtgtgt

SEQ ID NO: 24008 - DNA, 30 bp, Homo sapiens
  chr10:5576241-5576271
  hypo
accacgtcccactgcgctcccagggcaggg

SEQ ID NO: 24009 - DNA, 30 bp, Homo sapiens; identical to SEQ ID NO: 7168
  chr10:5615942-5615972
  hypo

SEQ ID NO: 24010 - DNA, 30 bp, Homo sapiens
  chr10:5683748-5683778
  hypo
gcacttggcgggagcgctgctgctccacgt

SEQ ID NO: 24011 - DNA, 31 bp, Homo sapiens
  chr10:5784320-5784351
  hypo
tgctgaagtatccttccgtgatcctaactgc

SEQ ID NO: 24012 - DNA, 181 bp, Homo sapiens
  chr10:5796176-5796357
  hypo
cttgaacccaggatgtggaggttgtagtaagccactgtgctcccagcctgcccgacagagtgagactccacaacagagcagtaatcttagttctcacttcctttccagatgaagtgataatgattttcatgaagaagagagcatggcaatgctaagttttattcatagcagaagtactttt

SEQ ID NO: 24013 - DNA, 31 bp, Homo sapiens
  chr10:5809843-5809874
  hypo
agctcaagaatatactcgggtcagttaacta

SEQ ID NO: 24014 - DNA, 31 bp, Homo sapiens
  chr10:5863341-5863372
  hypo
gcaggggttcctaactcgagtataattgtac

SEQ ID NO: 24015 - DNA, 318 bp, Homo sapiens
  chr10:5875004-5875322
  hypo
ccctgtagaacaaggcgctgccactcaagccagttccctgagaaccagtcggaccaggacaggcccctgaccacacccggcaaactggagtcctggccaaaggtgctgtgagtccatgaggtgctggcagggaggtgctcagaggagggtgcgcagaggcggagggagccaggatggaggctgcagggagcaggggcaggcaggcacggcagggaccacgagctcctgggatgcagacaagacttgcgggggtgcacggagacagagcaatttccccagtactttgttgccacgtttttgtgctgatggcatcagatg

SEQ ID NO: 24016 - DNA, 91 bp, Homo sapiens
  chr10:5901981-5902072
  hypo
aaaaaaaaaaaagtgcgataccacacagctttggtgatgggtatgcctgggaaggaatcttggcaaaagcgatgtctgtggtgctcaagac

SEQ ID NO: 24017 - DNA, 30 bp, Homo sapiens
  chr10:5935938-5935968
  hypo
ggaaaaacatagaacggaaagcccagccca

SEQ ID NO: 24018 - DNA, 31 bp, Homo sapiens
  chr10:5939819-5939850
  hypo
gcattttggattcagacgtattttctgagat

SEQ ID NO: 24019 - DNA, 632 bp, Homo sapiens
  chr10:5953028-5953660
  hypo
cctgtactgcatagccgtgcttctctacgccatgagggagaaggggattaacatcagcaataggtaatgccccgggaggaggggaggggatgctgtgataatgggagagtcccagacacagcagcaggtccagccctgccacttagcagtgttagcacctggcaggctgtgggacccacctgctccacctcagtgtcatcttctgcaggagccaggggctgagagtttgatgtggaaaggctggtaagagcgccttatgaacgtgcagttctgagcggctgcgagataccactaaggctgattttaccatcatgggtcctgcagccttaggggaagcccctcgccaagagaagcctttcttattcacccgtggcctcgcttccctaggaaaatgttaggctctacttcctccatatcccacttgtgggatggaaaagactcatccaccttatcctccatgcgggagaggctatggcgtgtcggctgctgattcacaggggccccgatggtttcctcagcagggtggggagtgcctggggggttgtgcatttgacaaacactgaacacctgtgtgtgtccgacagttgtccacgagccggtccactgtgaccggcttagaggagttagaggag

SEQ ID NO: 24020 - DNA, 369 bp, Homo sapiens
  chr10:5960373-5960742
  hypo
ataccttccggggtgcggtcaacgccctgttcacagtgccccacacccacgtcttctatctcacgcaggtaagtgcgcactctgcatgggaggcattgcatctctctcccaatgtcttacgtgccaggccctgtgaaaggtggtatgccaggctcaccagatctagcaaatccttgcttctaagccatggttctcaaagtgtggttctcaggggtctgccaagtcacactgttttcataagaggtgtgtgcacagcggtcgtctgaggaagagctgctgcggctgaactgtgaaccgatggctgctgccgccttgtacatttgtgcttagaacagttgttagaccagcgctggttgttcagacttgtgt

SEQ ID NO: 24021 - DNA, 169 bp, Homo sapiens
  chr10:5962671-5962840
  hypo
aaggctgtacacaccccgagtgtagggaagaatgatatcttgccagctggaggggcgaaggaagcagggtcttgggctgagttttgaaggttaggaagtgactttggtggatgaaagtcagacagaaaaccgcgtgggctgaggcagggcagcacggacaatgtgcagg

SEQ ID NO: 24022 - DNA, 30 bp, Homo sapiens
  chr10:5969442-5969472
  hypo
ctcgagccaagaagcgtctcatcatgacca

SEQ ID NO: 24023 - DNA, 31 bp, Homo sapiens
  chr10:5998387-5998418
  hypo
acagcaggacagtggacgtggagatagccac

SEQ ID NO: 24024 - DNA, 270 bp, Homo sapiens
  chr10:6003509-6003779
  hypo
ctgcgtgtgaaacacgggaagcctgggctctggcctgaactctccgggctgtgtgggaggaaagcgtcctgatgagcttgctctcaggaacagaggctgccttgtgttcagcgtcttccctgtcttccttgtccttccctggaaggtggctgcccctgcactgtaagggtgtggcgtaactgtgctgttccctctccatgaaaaatgtgtcttccattgtgacagccacggaatctaggaaacgtgaggccaagcgctgtggctctctgg

SEQ ID NO: 24025 - DNA, 31 bp, Homo sapiens; identical to SEQ ID NO: 7172
  chr10:6019532-6019563
  hypo

SEQ ID NO: 24026 - DNA, 49 bp, Homo sapiens
  chr10:6135598-6135647
  hypo
tttctggtggcactaacgtattcataaacactttcggtaaagttctcaa

SEQ ID NO: 24027 - DNA, 18 bp, Homo sapiens
  chr10:6160975-6160993
  hypo
ggctggtgttatggcttg

SEQ ID NO: 24028 - DNA, 122 bp, Homo sapiens
  chr10:6162103-6162225
  hypo
gttcagctaagagccgtgcggtgagtctcctgacgttttatggcacttgacgctggtaaccactcccttcccgaggacggagaccgcggccctgccagtatcgctcacgctttacctcttcc

SEQ ID NO: 24029 - DNA, 300 bp, Homo sapiens
  chr10:6531083-6531383
  hypo
gtgctccaaattccacattgtcggcaaaactcgcataactcacattcgccctatttagaaggtgtcaggtttcaacttcggtagccccagctccattttcttatgcatcaccgtgacaccaagtgaggttgtcagctaggattgaacatagagggatggagttttactttgctccttaaaactgtagccacatctaggcttctctgtgacttgcatggccgcgaagaaaggccaccaccatctccacgagaaggtcctaagtctttgttactaacctatcaggccgtaactcagtttctt

SEQ ID NO: 24030 - DNA, 45 bp, Homo sapiens
  chr10:6647893-6647938
  hypo
ttacaggcgtgagccaccgcgcccggctggtgaccagaagtttct

SEQ ID NO: 24031 - DNA, 26 bp, Homo sapiens
  chr10:6953233-6953259
  hypo
acttgaattaacagtggctcacgcct

SEQ ID NO: 24032 - DNA, 74 bp, Homo sapiens
  chr10:6984457-6984531
  hypo
ggctgggttatgatagaataacggcactgaactaccttacctatttgaagtacgggaactcctaaacacactta

SEQ ID NO: 24033 - DNA, 288 bp, Homo sapiens
  chr10:7202878-7203166
  hypo
ttctgggctctcctcaaggaccggagagatggcacagagacaactttcatggcgacgccaggctgcgccctcctgtgcagtggtcccagccatctcctccctggcacgtgcacagacagtgctcacccatggtgaccgcaactgcacagagaaacgctgaagttaaactgtcagggtgaaggatacggagagtcttgggcgcttggctccacgggaagcaaacactttcccctgcgacagtggctgtatccttcctgagctcctggcgggccacacactctagcttcc

SEQ ID NO: 24034 - DNA, 30 bp, Homo sapiens
  chr10:7205123-7205153
  hypo
atggagatgcctgccggccttccttcactc

SEQ ID NO: 24035 - DNA, 30 bp, Homo sapiens
  chr10:7212853-7212883
  hypo
gcacatcaaacaatcgacacgcggcaacca

SEQ ID NO: 24036 - DNA, 30 bp, Homo sapiens
  chr10:7213828-7213858
  hypo
gccctctgtccccacgcccgggcatcacct

SEQ ID NO: 24037 - DNA, 30 bp, Homo sapiens
  chr10:7214157-7214187
  hypo
ccgggggcctgtagcggtggccccgcggtc

SEQ ID NO: 24038 - DNA, 30 bp, Homo sapiens
  chr10:7214428-7214458
  hypo
gctggcaggtgccccgggcagaacatacct

SEQ ID NO: 24039 - DNA, 215 bp, Homo sapiens
  chr10:7252610-7252825
  hypo
aacaccagcagaatgcaaagccggtgtgagtgcccgcaagcaagacctggacgctggaagccccacctgccctctgggcgtgttccctttgcagatgcctatcaagaagcccagcgcgcaaagcctccctgggtcagctctggagccgaaggcctgggaaaacaaaaccaaaaacaaaaccaaaaacggtgggcgaaactggtggccaggatcaa

SEQ ID NO: 24040 - DNA, 30 bp, Homo sapiens
  chr10:7255520-7255550
  hypo
agccaggacgttcacggagaagagcagaga

SEQ ID NO: 24041 - DNA, 103 bp, Homo sapiens
  chr10:7290463-7290566
  hypo
gatccactctaggggctgggtcgaagagcgagggaggaaaacccaccttagtcaccgacgcaggagagatgtaaaagggctcgcacatattcactgtctcaag

SEQ ID NO: 24042 - DNA, 43 bp, Homo sapiens
  chr10:7352681-7352724
  hypo
gcaggtttgaaaaaaaggcttcgtgtgcaaaaaatgtcagcca

SEQ ID NO: 24043 - DNA, 30 bp, Homo sapiens
  chr10:7392001-7392031
  hypo
cttcattcagggccccgggaggcactgccc

SEQ ID NO: 24044 - DNA, 302 bp, Homo sapiens
  chr10:7409502-7409804
  hypo
ctaagaccattagggattctacgcaaggttctctctgctccttgcaaaattacaggcgtcatgaaggatggcggctcgtaaatcgaagcctttgaaacaggggctcaccgtccggcggcatcaacaccttgttgttctgtgtgcaccaccccacggggtgcaaatccgcgatgactacgtcacaccagaagtcggccctgcggtcctccccgtaaccgcagtagcgcagaagcagcagctgcccgcacgtggtaatgatcgtggccacccagtacgtgtccgggttgttcttattagccact

SEQ ID NO: 24045 - DNA, 301 bp, Homo sapiens; identical to SEQ ID NO: 7174
  chr10:7449888-7450189
  hypo

SEQ ID NO: 24046 - DNA, 3166 bp, Homo sapiens; identical to SEQ ID NO: 7175
  chr10:7450490-7453656
  hypo

SEQ ID NO: 24047 - DNA, 30 bp, Homo sapiens
  chr10:7583473-7583503
  hypo
ttccccctgtcttttcggcggggctttggg

SEQ ID NO: 24048 - DNA, 191 bp, Homo sapiens
  chr10:7618438-7618629
  hypo
acgctctgcaccaccggttcgggtcccatggcagccgacatgccgtgggcctcctccaggccatccatgcgtgggaccggccccctcagcttcatggaggtgaagggagtgaggaagcggtagctcacagccagggcctgggcccgctgccgcagccgctccttctccggttcatcgtcactttgcagcca

SEQ ID NO: 24049 - DNA, 42 bp, Homo sapiens
  chr10:7679268-7679310
  hypo
ggatattcacgtccacgctcagcctcccggacagctgctggg

SEQ ID NO: 24050 - DNA, 165 bp, Homo sapiens
  chr10:7780610-7780775
  hypo
ttccagattccaccccgtcttgggccaatccttcaccaacgcccgtgatctccatgctggcacaaggatctcaggtgctagagtccacgccacccccacatgtgatgagaggtaacgcttctacactgcttgcacgtcccagaactcagccgaccataatcctgg

SEQ ID NO: 24051 - DNA, 185 bp, Homo sapiens
  chr10:7871222-7871407
  hypo
tgttattaaccttttacgtgactatggtacgtgtatcacaattaatgaacaatattgacatgttattattaagtgacgcccgcactgtattgacattccttagtttttactggatgtcctttttctgtttctggatcccatccaggatatcatattgtgtttggttgtcacgtctccttagactt

SEQ ID NO: 24052 - DNA, 168 bp, Homo sapiens
  chr10:7985033-7985201
  hypo
gtccttacttagcagcggttgtgatcctgctcagatcaaaggagtccaatcctgtggttccggttccctgtagctccgtgagactctgagaactccactcggcctccagcgctgcctttgccgttgccttgaatgaaacaggcgctcgatgttggcctcaccttgctt

SEQ ID NO: 24053 - DNA, 30 bp, Homo sapiens
  chr10:8051085-8051115
  hypo
ctcgcagaacaggccgaagaccccaccgcc

SEQ ID NO: 24054 - DNA, 288 bp, Homo sapiens
  chr10:8055583-8055871
  hypo
atatgcctgtttattcggttaacagtataaagtaatcattctgatctggcctctttttgttttttttcccattccctccatttttgccgcttccgctttgcaaacatcagatccgagatgagtggggcaatcagatctggatctgccctgggtgtaacaagcctgacgatgggagtcccatgattgggtgtgacgactgcgatgactggtaccactggtgagtgcccagggcgccctgccggccacactcattaggcagcatcagccgctcctgagatgaagcatcca

SEQ ID NO: 24055 - DNA, 30 bp, Homo sapiens
  chr10:8056845-8056875
  hypo
aggctggaacacaccgcgcacctggattgt

SEQ ID NO: 24056 - DNA, 755 bp, Homo sapiens; identical to SEQ ID NO: 7189
  chr10:8096614-8097369
  hypo

SEQ ID NO: 24057 - DNA, 30 bp, Homo sapiens; identical to SEQ ID NO: 7190
  chr10:9423701-9423731
  hypo

SEQ ID NO: 24058 - DNA, 30 bp, Homo sapiens; identical to SEQ ID NO: 7191
  chr10:10043570-10043600
  hypo

SEQ ID NO: 24059 - DNA, 30 bp, Homo sapiens
  chr10:10687296-10687326
  hypo
ttttaaacctttgtcgcaattgtgattaag

SEQ ID NO: 24060 - DNA, 235 bp, Homo sapiens; identical to SEQ ID NO: 7192
  chr10:11059428-11059663
  hypo

SEQ ID NO: 24061 - DNA, 225 bp, Homo sapiens; identical to SEQ ID NO: 7193
  chr10:11059932-11060157
  hypo

SEQ ID NO: 24062 - DNA, 120 bp, Homo sapiens; identical to SEQ ID NO: 7194
  chr10:11060314-11060434
  hypo

SEQ ID NO: 24063 - DNA, 116 bp, Homo sapiens; identical to SEQ ID NO: 7195
  chr10:11060512-11060628
  hypo

SEQ ID NO: 24064 - DNA, 14 bp, Homo sapiens
  chr10:11060741-11060755
  hypo
ggagctctggtggc

SEQ ID NO: 24065 - DNA, 30 bp, Homo sapiens
  chr10:11081057-11081087
  hypo
gcatcgaccatgtaacggcgataacagccg

SEQ ID NO: 24066 - DNA, 73 bp, Homo sapiens
  chr10:11199117-11199190
  hypo
gtcacccatgcacatgactgccgtcggcgccagggtctttgctggtacttccgtgcctctcacacatgcatgg

SEQ ID NO: 24067 - DNA, 43 bp, Homo sapiens
  chr10:11297088-11297131
  hypo
ccaggcttcaccagttcacagcggatccatgctactttgcctt

SEQ ID NO: 24068 - DNA, 222 bp, Homo sapiens
  chr10:11317671-11317893
  hypo
gactgtatttgaaagccagctcgttgaaggattccttcttctaatgagctgcgccagtagtaactgaggtgtggtgattagcgaaaggtcactcctgccgtgccaccttccgtgccgatttccctacctaacacggggccagggaaggcagcgagcgcaataaatcagaacacaggtgcccattaacctgccgtgaggaacggtcagagagccttttccttg

SEQ ID NO: 24069 - DNA, 30 bp, Homo sapiens
  chr10:11322284-11322314
  hypo
cgagaagcctagtccggctaagaagggaga

SEQ ID NO: 24070 - DNA, 30 bp, Homo sapiens
  chr10:11344071-11344101
  hypo
tggaagaacagaaccgtaacttaccactct

SEQ ID NO: 24071 - DNA, 30 bp, Homo sapiens
  chr10:11381868-11381898
  hypo
ctgcacagcacaaccgagccattcaaacag

SEQ ID NO: 24072 - DNA, 30 bp, Homo sapiens
  chr10:11386128-11386158
  hypo
atgtgccctggtggcgaccggggcacagcc

SEQ ID NO: 24073 - DNA, 299 bp, Homo sapiens
  chr10:11472667-11472966
  hypo
ctggtggcaccggagcgcacacacctgggccgtgccagagctctccgtggaagagggcgatctcacccttcatccatcatccaggcagaaggcaagcagaccatttccccaagcagcacttctctccaacaagcagtggtcataaaagcagaggctctgaaactttaagaggccataaaccctttggcaacgacacacggctccgagaacacacgcatgaataaataaaaccaatactctgctgctgagacatcgctacatccagaaggacccagagcaacagacgcagagaaaagcaa

SEQ ID NO: 24074 - DNA, 130 bp, Homo sapiens
  chr10:11732004-11732134
  hypo
cagcaggctggggggttgcctcgtggttctggaggagcgagcggctcagccatccacacaactccttcaccagcctttcctcacccgcctggagatagccttggacttcgccctcagccagagccagaag

SEQ ID NO: 24075 - DNA, 194 bp, Homo sapiens
  chr10:11870931-11871125
  hypo
aacaccagctggagaacgtagcatttgagctgggccaacaagggcagcatagggggcaatttaggccaacatggtggaattgaggagtcagttattatgccgcaaggggttagccttccagtcgggggcatggaccagcgaagctttctgagtaggttgcagtggcagatcttgtttcccggctctcctgtgga

SEQ ID NO: 24076 - DNA, 42 bp, Homo sapiens
  chr10:11894967-11895009
  hypo
gaagttaagaggatctcgtgccttccccggtgaggacattca

SEQ ID NO: 24077 - DNA, 47 bp, Homo sapiens
  chr10:11898438-11898485
  hypo
ggctgctcggaaagggcggagagctctgcactcgcatggttctcaag

SEQ ID NO: 24078 - DNA, 30 bp, Homo sapiens
  chr10:11950036-11950066
  hypo
tagggtcactgccacggagcctcagcgggc

SEQ ID NO: 24079 - DNA, 25 bp, Homo sapiens
  chr10:12117184-12117209
  hypo
tttcttttttttgagacggagtctc

SEQ ID NO: 24080 - DNA, 1774 bp, Homo sapiens; identical to SEQ ID NO: 7202
  chr10:12390891-12392665
  hypo

SEQ ID NO: 24081 - DNA, 43 bp, Homo sapiens
  chr10:12671579-12671622
  hypo
tcctgattatagtcatcgcagacaaggacgtgttctccacctg

SEQ ID NO: 24082 - DNA, 30 bp, Homo sapiens
  chr10:12680724-12680754
  hypo
ccgattgcatcccacgtaggctgtgcagcc

SEQ ID NO: 24083 - DNA, 213 bp, Homo sapiens
  chr10:12707776-12707989
  hypo
ttcagagtgcagtctgcagatcggcagtaccgatatctcctgggagctggttggaaatgcagccttcgaggccccaagcaaacctgctgacgcagggcctgcagtggggccagacccccaggcgattcatctgcacgttgaagtttgagcagcgctggtctaacacagtatttctcaagctctagtttacacgtgtagattatctgagcatct

SEQ ID NO: 24084 - DNA, 30 bp, Homo sapiens
  chr10:12874192-12874222
  hypo
atcttcatctcatacgtgaggcaataggag

SEQ ID NO: 24085 - DNA, 30 bp, Homo sapiens
  chr10:13146883-13146913
  hypo
gcaggaccgggaggcgagtcggccagaaag

SEQ ID NO: 24086 - DNA, 38 bp, Homo sapiens
  chr10:13150490-13150528
  hypo
catgatgtcataccctcgtctccctcccccatttccca

SEQ ID NO: 24087 - DNA, 43 bp, Homo sapiens
  chr10:13263685-13263728
  hypo
agtcagcaagaatcacatcatcgctcagggaagacagcatgac

SEQ ID NO: 24088 - DNA, 121 bp, Homo sapiens; identical to SEQ ID NO: 7205
  chr10:13341451-13341572
  hypo

SEQ ID NO: 24089 - DNA, 171 bp, Homo sapiens
  chr10:13692404-13692575
  hypo
tgcatgagcatgaactcgtgtatgtattcgtgtatgtatgtaggtatttcaagcagtgcctacattcccaccgcagctctttcaaacctggttaattctacttctggctgtcagccctatctccatcacctttagcagatgatcgccctcccataccgggggagaaaaagg

SEQ ID NO: 24090 - DNA, 94 bp, Homo sapiens
  chr10:13711292-13711386
  hypo
ctcaagtgatctgcgcactctggcctcccaaagtgctgggattttgcagcgaaaggcgtgggccaccacgcccggccacatgagctttagtttt

SEQ ID NO: 24091 - DNA, 31 bp, Homo sapiens
  chr10:13735187-13735218
  hypo
taacatttccaaaccacggctgcctcccttc

SEQ ID NO: 24092 - DNA, 89 bp, Homo sapiens
  chr10:13739453-13739542
  hypo
ctttctagaatggaaaatatcacagcgacctaacagactcggtggggagaggaccgggaggacatgggcattgtcggggagagtctctc

SEQ ID NO: 24093 - DNA, 472 bp, Homo sapiens
  chr10:13771116-13771588
  hypo
ggcctggtctctagacgcatggaaagcgttcaggtccactcagactgtgctgcgatctgaaagaatgataacatacgagaaggccctttggtcctacactgtgaatgagtaaggggcagctgcaaaatgctaagaatgctgagtgcattaagtgaagtgtttctcccaggtgtgcacagggtgtggcttccaaggggaatgtggatgctggaatgagggaggcagccacctaggccggtcaagtcagaggcccagcaaggagaaagcgagccaaggcaaacgccgacagaagagaacgataaatccgcggcgcactcggcagaacgtacaccgcaccgcataatttagcggggcaatgccgccgggagtccacgccaagttaatggaatatttcctgtaaatattattttcccttcctgtctcatcatctcatttcattcaaaaatctttactaatccgggggagtgaaagt

SEQ ID NO: 24094 - DNA, 206 bp, Homo sapiens; identical to SEQ ID NO: 7208
  chr10:13933332-13933538
  hypo

SEQ ID NO: 24095 - DNA, 338 bp, Homo sapiens; identical to SEQ ID NO: 7209
  chr10:13933596-13933934
  hypo

SEQ ID NO: 24096 - DNA, 143 bp, Homo sapiens; identical to SEQ ID NO: 7210
  chr10:13933982-13934125
  hypo

SEQ ID NO: 24097 - DNA, 1 bp, Homo sapiens
  chr10:13934168-13934169
  hypo
c

SEQ ID NO: 24098 - DNA, 30 bp, Homo sapiens
  chr10:14492011-14492041
  hypo
tggcattctgaccacgtgaacagaaatggg

SEQ ID NO: 24099 - DNA, 30 bp, Homo sapiens
  chr10:14562020-14562050
  hypo
aatatagtagtcatcgacatcatccttatc

SEQ ID NO: 24100 - DNA, 161 bp, Homo sapiens
  chr10:14626300-14626461
  hypo
tgccaaccagatatggaaaaacgcagtgtataaccaagtgaccaggggaaaaccccaaggtggaaaaggacctccgaggtccagctgccgatgagaattatgctttcgcaccccatggccctcggcactcagagtctttcgctccattttcaccataaaca

SEQ ID NO: 24101 - DNA, 31 bp, Homo sapiens
  chr10:14735179-14735210
  hypo
atttaaggtatatggccgggcgcggtggctc

SEQ ID NO: 24102 - DNA, 356 bp, Homo sapiens
  chr10:14816163-14816519
  hypo
gagtttgtttgctgaaacattcgccacatgatcccaacgctcctccagctccatcccgtctataatcgcagagcgaacactcactcaccttgggcgtgtcaataattgatggtctggggatggaagcgtgaaacaccactgcttcacagtccgccccatcatccagggacccgggcacatcttcaggcgtctccgcgggctgggccgcagtgcggtgacttgaattccgattcgcactgccatttctctctgcatgggtgctcgaatcttgccttttctctggagctccttctgcgcttgggtgtcttggctgtctgcctgctttggccacaggctgcacacggacggtggaatga

SEQ ID NO: 24103 - DNA, 30 bp, Homo sapiens
  chr10:14816958-14816988
  hypo
ctaggcagggcagacgcttcagggtagggt

SEQ ID NO: 24104 - DNA, 37 bp, Homo sapiens
  chr10:14851281-14851318
  hypo
gcgcgagccacggcccggcctgactaaggtagtcttt

SEQ ID NO: 24105 - DNA, 121 bp, Homo sapiens
  chr10:14966087-14966208
  hypo
ggacacacatcaagtacgaagcagagaaagatgtttccacacaaggtactgagctgccgcaggctgtgtgctcacgctaacgggagtgcttgctctctctcactcgcgtgcgctctctctc

SEQ ID NO: 24106 - DNA, 31 bp, Homo sapiens
  chr10:14975093-14975124
  hypo
gtgcactctggtattccgccagcatgtcaac

SEQ ID NO: 24107 - DNA, 50 bp, Homo sapiens
  chr10:15140582-15140632
  hypo
ttagatgtaggttaagaggtccggcccggcgcggtggctcacgcctgtag

SEQ ID NO: 24108 - DNA, 28 bp, Homo sapiens
  chr10:15140871-15140899
  hypo
agactccgtctcaaaaaaaaaaaaaaaa

SEQ ID NO: 24109 - DNA, 30 bp, Homo sapiens
  chr10:15256407-15256437
  hypo
cagttccttcgtgccgggggcctcggggcg

SEQ ID NO: 24110 - DNA, 61 bp, Homo sapiens
  chr10:15345842-15345903
  hypo
taaaggagttaggaatacaagcgtgggcagaaaagttcacgtatgaaagagattaagtcaa

SEQ ID NO: 24111 - DNA, 122 bp, Homo sapiens
  chr10:15484067-15484189
  hypo
gatcccgtctcaaaaataaaacgaaacaaaacaaaattctggcttgggaactttccagctcggcctctacttacctttctagcgtcatggctccacactgcgtttccttatctgggaatccc

SEQ ID NO: 24112 - DNA, 814 bp, Homo sapiens; identical to SEQ ID NO: 7216
  chr10:15761292-15762106
  hypo

SEQ ID NO: 24113 - DNA, 30 bp, Homo sapiens
  chr10:16715185-16715215
  hypo
agaagcgttcatctccggtacctggtagga

SEQ ID NO: 24114 - DNA, 151 bp, Homo sapiens
  chr10:16715648-16715799
  hypo
ctccatctcaaatgacgcaggtggaaggatgagcaacggcacagcctcctgcagcacacagatgcttctcaatggggctgatcaggagacctctggcacccaaagactgcgtgatgactgagggactctttatgctcgcttctgcctaggt

SEQ ID NO: 24115 - DNA, 50 bp, Homo sapiens
  chr10:16769342-16769392
  hypo
ttttctgagataaatacgtgtttctggcaaattcacgaccacagtgaagg

SEQ ID NO: 24116 - DNA, 30 bp, Homo sapiens
  chr10:17156913-17156943
  hypo
ttatctcagagagagtcatgacgggataat

SEQ ID NO: 24117 - DNA, 132 bp, Homo sapiens
  chr10:17157464-17157596
  hypo
cccacctctccagcttgctctcgcattaaatcctcacagatgccatggacacagcgtgccacagaacccccttcacagtcgtcatatttggatgcacactggggtccgtacgtctcaggtgggcagtgacaa

SEQ ID NO: 24118 - DNA, 1182 bp, Homo sapiens; identical to SEQ ID NO: 7224
  chr10:17270072-17271254
  hypo

SEQ ID NO: 24119 - DNA, 797 bp, Homo sapiens; identical to SEQ ID NO: 7225
  chr10:17271443-17272240
  hypo

SEQ ID NO: 24120 - DNA, 59 bp, Homo sapiens; identical to SEQ ID NO: 7227
  chr10:17495386-17495445
  hypo

SEQ ID NO: 24121 - DNA, 621 bp, Homo sapiens; identical to SEQ ID NO: 7228
  chr10:17495474-17496095
  hypo

SEQ ID NO: 24122 - DNA, 307 bp, Homo sapiens; identical to SEQ ID NO: 7229
  chr10:17496544-17496851
  hypo

SEQ ID NO: 24123 - DNA, 82 bp, Homo sapiens
  chr10:17509665-17509747
  hypo
attacaagcgtgagccaccgtgcctggcctttggagagcattttcttacactcttacattcgctgaattacttaggatggct

SEQ ID NO: 24124 - DNA, 633 bp, Homo sapiens; identical to SEQ ID NO: 7231
  chr10:18429517-18430150
  hypo

SEQ ID NO: 24125 - DNA, 30 bp, Homo sapiens; identical to SEQ ID NO: 7238
  chr10:21785720-21785750
  hypo

SEQ ID NO: 24126 - DNA, 384 bp, Homo sapiens
  chr10:21797646-21798030
  hypo
ccccgcagaccctgcggtctccaggcccggtaggctttttcaggttccgcaggcctggccgaaccggccagatcccgcgttccaagcgtctggagaactggagacaaagcccaagatccaatcccaccgcagagcggctcaagccggcgcccgggacccgcgggcctaggcgcgacccccagcagcctgtgaccgaagaggggagcccgggacccctccgcctctccgcagccctctcgggcggggtcccccaggcccgcccggttccccctgccgcactcagccagctgcttttggaggcctgcgagttccaaacacgccttcccattaattaaaacctggaaagcctggccactttcttctcaggccgaggcagcatctcca

SEQ ID NO: 24127 - DNA, 54 bp, Homo sapiens
  chr10:21915338-21915392
  hypo
aagctgaaggggaagcaggtacgtgtgcagaacgggagaccaaacatgagaggc

SEQ ID NO: 24128 - DNA, 18 bp, Homo sapiens
  chr10:21998445-21998463
  hypo
caccgcatctggctgcag

SEQ ID NO: 24129 - DNA, 167 bp, Homo sapiens
  chr10:22042866-22043033
  hypo
gtgaggtggcttgggaggacacgggtctgggagtgggagaggagaaggggcacggtggggctgtcacgtggctggtggatgtgccacgtccccacatgcattcagcacattccctctcgaggatcctcgctctcctgctgtgacccggggtggcagctgtcatctgt

SEQ ID NO: 24130 - DNA, 151 bp, Homo sapiens
  chr10:22047484-22047635
  hypo
gccgtggaaagtaagccgaaccctagctgtcgcctggcactgaccacatacggagatggcctcagggcctctggacagccaccaggtgtacctgctgagtccaaagttattcacatggcagaatcgaagatgatcacggtaataccatcta

SEQ ID NO: 24131 - DNA, 31 bp, Homo sapiens
  chr10:22288660-22288691
  hypo
cgtgagccaccacacccggctccttgactct

SEQ ID NO: 24132 - DNA, 20 bp, Homo sapiens
  chr10:22540686-22540706
  hypo
aaaacaaaaagagaaagtat

SEQ ID NO: 24133 - DNA, 1110 bp, Homo sapiens; identical to SEQ ID NO: 7243
  chr10:22540740-22541850
  hypo

SEQ ID NO: 24134 - DNA, 225 bp, Homo sapiens; identical to SEQ ID NO: 7244
  chr10:22542024-22542249
  hypo

SEQ ID NO: 24135 - DNA, 38 bp, Homo sapiens
  chr10:22567377-22567415
  hypo
gtgttcgagcgggcagcgggagtgagcataggggcaca

SEQ ID NO: 24136 - DNA, 83 bp, Homo sapiens; identical to SEQ ID NO: 7251
  chr10:22634091-22634174
  hypo

SEQ ID NO: 24137 - DNA, 295 bp, Homo sapiens; identical to SEQ ID NO: 7252
  chr10:22634324-22634619
  hypo

SEQ ID NO: 24138 - DNA, 167 bp, Homo sapiens
  chr10:22869799-22869966
  hypo
ctcgctttacagactcgacaggtgcagtgctctaatgcggcccgggaggctcctttgtagaatggatgagtctgccaactcctgtctgcagacactttgaagtcccaaggcagatgaggctgcaaatggaccaaacactgaacaatgctggccgtcccgtgtgtggc

SEQ ID NO: 24139 - DNA, 30 bp, Homo sapiens
  chr10:22901509-22901539
  hypo
cagctcagcagagggcggaggcggcagcag

SEQ ID NO: 24140 - DNA, 68 bp, Homo sapiens; identical to SEQ ID NO: 7254
  chr10:23002244-23002312
  hypo

SEQ ID NO: 24141 - DNA, 559 bp, Homo sapiens; identical to SEQ ID NO: 7257
  chr10:23461903-23462462
  hypo

SEQ ID NO: 24142 - DNA, 129 bp, Homo sapiens; identical to SEQ ID NO: 7258
  chr10:23462485-23462614
  hypo

SEQ ID NO: 24143 - DNA, 758 bp, Homo sapiens; identical to SEQ ID NO: 7266
  chr10:23983617-23984375
  hypo

SEQ ID NO: 24144 - DNA, 135 bp, Homo sapiens
  chr10:24863038-24863173
  hypo
gtttagagattcctgcgtgtttcaaggggatgtggaagccgggctgtgtccagtctgtggtaagaggaaagcatatagaagcccatgccccctgcgtgtgcacgcagtggctagagtttgcgttaaaccacttca

SEQ ID NO: 24145 - DNA, 142 bp, Homo sapiens
  chr10:24908407-24908549
  hypo
atgggatggaagccaaagaatcgccaggcggactggtactcgaggcttttctttcctccattctttttatgtggacctctcgacgtgcatcattgggcagccagcaggtagtgtctgacccggtctcctggtcatttactgc

SEQ ID NO: 24146 - DNA, 127 bp, Homo sapiens
  chr10:24988588-24988715
  hypo
actacattatatccttcggtaaagagaaggcatcaagcacccagactttggagtctcactccctgggcctgcgtgctgctctgcaccttcttagctatgtggccccgacaagagacttaagcccttg

SEQ ID NO: 24147 - DNA, 165 bp, Homo sapiens; identical to SEQ ID NO: 7267
  chr10:25012545-25012710
  hypo

SEQ ID NO: 24148 - DNA, 507 bp, Homo sapiens; identical to SEQ ID NO: 7269
  chr10:25463829-25464336
  hypo

SEQ ID NO: 24149 - DNA, 93 bp, Homo sapiens; identical to SEQ ID NO: 7278
  chr10:26505008-26505101
  hypo

SEQ ID NO: 24150 - DNA, 16 bp, Homo sapiens
  chr10:26505441-26505457
  hypo
cgctttcctgagtccg

SEQ ID NO: 24151 - DNA, 233 bp, Homo sapiens; identical to SEQ ID NO: 7281
  chr10:26727583-26727816
  hypo

SEQ ID NO: 24152 - DNA, 184 bp, Homo sapiens; identical to SEQ ID NO: 7282
  chr10:26727867-26728051
  hypo

SEQ ID NO: 24153 - DNA, 31 bp, Homo sapiens
  chr10:26840145-26840176
  hypo
tcacgtgtttcagccccgttggtacttggta

SEQ ID NO: 24154 - DNA, 160 bp, Homo sapiens
  chr10:27020993-27021153
  hypo
aaacaaaacagtcagccgagctccactttctttgacttaatcattcttcatgctccacccatttccggaaagatgtgaggcatccctctgatgctgagcgcaagtctgtgcacctctttgccttcttgtatgttgtgctatgttgcgtccaatttgtggc

SEQ ID NO: 24155 - DNA, 31 bp, Homo sapiens
  chr10:27033792-27033823
  hypo
tttctaaatgtcagaggggtccgggcgcagt

SEQ ID NO: 24156 - DNA, 90 bp, Homo sapiens
  chr10:27089295-27089385
  hypo
agagtgagactgtgtctcaaaaacaaaaacaaaactcctgaatctaatcacaaggaagcattacacatacccatacggagacacattcta

SEQ ID NO: 24157 - DNA, 37 bp, Homo sapiens
  chr10:27096988-27097025
  hypo
ccagcctgggcgtcacgagactctgttcaaaaaaaca

SEQ ID NO: 24158 - DNA, 29 bp, Homo sapiens
  chr10:27144599-27144628
  hypo
cataagaaccctgtttagggccgggtgcg

SEQ ID NO: 24159 - DNA, 31 bp, Homo sapiens
  chr10:27233660-27233691
  hypo
gaaaaaagacaaggttcggcagctgttttca

SEQ ID NO: 24160 - DNA, 31 bp, Homo sapiens
  chr10:27478290-27478321
  hypo
tgggcatagtggctcacgcctttatttccag

SEQ ID NO: 24161 - DNA, 23 bp, Homo sapiens
  chr10:27488710-27488733
  hypo
tgcttaagaaaactggttagacg

SEQ ID NO: 24162 - DNA, 32 bp, Homo sapiens
  chr10:27846957-27846989
  hypo
agcgatacaccgtctcaaacaaacaaacaaaa

SEQ ID NO: 24163 - DNA, 30 bp, Homo sapiens; identical to SEQ ID NO: 7284
  chr10:27928208-27928238
  hypo

SEQ ID NO: 24164 - DNA, 91 bp, Homo sapiens
  chr10:27978842-27978933
  hypo
gacagctcttgctaaccggaagcatctgattatgttcctttcctattaatctattaaatacacacctattaaattccgatggcatacagat

SEQ ID NO: 24165 - DNA, 2271 bp, Homo sapiens; identical to SEQ ID NO: 7286
  chr10:28031375-28033646
  hypo

SEQ ID NO: 24166 - DNA, 498 bp, Homo sapiens; identical to SEQ ID NO: 7287
  chr10:28033688-28034186
  hypo

SEQ ID NO: 24167 - DNA, 229 bp, Homo sapiens; identical to SEQ ID NO: 7288
  chr10:28034326-28034555
  hypo

SEQ ID NO: 24168 - DNA, 434 bp, Homo sapiens; identical to SEQ ID NO: 7289
  chr10:28034873-28035307
  hypo

SEQ ID NO: 24169 - DNA, 30 bp, Homo sapiens; identical to SEQ ID NO: 7290
  chr10:28035639-28035669
  hypo

SEQ ID NO: 24170 - DNA, 30 bp, Homo sapiens
  chr10:28824536-28824566
  hypo
gacatgaaaagatgcgagacgccggagatc

SEQ ID NO: 24171 - DNA, 30 bp, Homo sapiens
  chr10:28860337-28860367
  hypo
cacatctgttacatcgcaggtacagtaacc

SEQ ID NO: 24172 - DNA, 66 bp, Homo sapiens; identical to SEQ ID NO: 7292
  chr10:28966235-28966301
  hypo

SEQ ID NO: 24173 - DNA, 57 bp, Homo sapiens; identical to SEQ ID NO: 7293
  chr10:28966637-28966694
  hypo

SEQ ID NO: 24174 - DNA, 152 bp, Homo sapiens
  chr10:29300089-29300241
  hypo
tacaccgtgtagcctaggcgtggagtaggctgcgccatccaggtttacagacgtgcactttatgatgttcccacaatgacaaaatcacctaatgatgacgttctcagaatgtgtctgtcgttaagcaacacgtgtatatgtatttaaatttt

SEQ ID NO: 24175 - DNA, 120 bp, Homo sapiens
  chr10:29311493-29311613
  hypo
caccacagagatatgtgtgcacgcgtgccacacacacacgcacatgtctgagccccattttgacactggccccgagcttcagcctgtgttgtgttttacggtctgactggttgcacagaa

SEQ ID NO: 24176 - DNA, 79 bp, Homo sapiens; identical to SEQ ID NO: 7296
  chr10:29738054-29738133
  hypo

SEQ ID NO: 24177 - DNA, 30 bp, Homo sapiens
  chr10:29759212-29759242
  hypo
gatcttgttcgcagcggtccttccgacctc

SEQ ID NO: 24178 - DNA, 31 bp, Homo sapiens
  chr10:29993108-29993139
  hypo
ctaccatgctcaaaatcgtaaccactcctcc

SEQ ID NO: 24179 - DNA, 759 bp, Homo sapiens; identical to SEQ ID NO: 7297
  chr10:30024793-30025552
  hypo

SEQ ID NO: 24180 - DNA, 35 bp, Homo sapiens
  chr10:30981746-30981781
  hypo
tattgggagatcgcttcgctcggtctgctcaccga

SEQ ID NO: 24181 - DNA, 31 bp, Homo sapiens
  chr10:31076407-31076438
  hypo
tattccttgttcatgtcgccatgcaggctag

SEQ ID NO: 24182 - DNA, 30 bp, Homo sapiens
  chr10:31108169-31108199
  hypo
ggaatcatctcctaccgccccgcttctgct

SEQ ID NO: 24183 - DNA, 30 bp, Homo sapiens
  chr10:31133814-31133844
  hypo
accaccataaagcacgaagctctgaaggaa

SEQ ID NO: 24184 - DNA, 31 bp, Homo sapiens
  chr10:31137749-31137780
  hypo
tgtattcatgtggtctcgaaggtgctgtttg

SEQ ID NO: 24185 - DNA, 1719 bp, Homo sapiens; identical to SEQ ID NO: 7303
  chr10:31608395-31610114
  hypo

SEQ ID NO: 24186 - DNA, 34 bp, Homo sapiens
  chr10:32171068-32171102
  hypo
cctgacctcgtgatccgcccgcctcggcctccca

SEQ ID NO: 24187 - DNA, 73 bp, Homo sapiens
  chr10:32205231-32205304
  hypo
tcttcctcctccctttttccacgtttcaacaaccaccacccccgacacacacgcctgcttatatattttactt

SEQ ID NO: 24188 - DNA, 31 bp, Homo sapiens
  chr10:32332318-32332349
  hypo
taagatgaagctgagacgcaaatgcaaatag

SEQ ID NO: 24189 - DNA, 37 bp, Homo sapiens
  chr10:32333608-32333645
  hypo
taaaaaaaaaaaaagaagacaacgacagaggacacaa

SEQ ID NO: 24190 - DNA, 18 bp, Homo sapiens
  chr10:32585161-32585179
  hypo
caatgttctgcttcttaa

SEQ ID NO: 24191 - DNA, 41 bp, Homo sapiens
  chr10:33293519-33293560
  hypo
ttagagacagagtttcactctcgccactgaggctggagtgc

SEQ ID NO: 24192 - DNA, 31 bp, Homo sapiens
  chr10:34063104-34063135
  hypo
acaagtagctggacatcgtgaggaacacatc

SEQ ID NO: 24193 - DNA, 183 bp, Homo sapiens
  chr10:34276836-34277019
  hypo
gtcacatcctcactcccgctattttagcttcaagtgtcctagaacctagcagtccaaaccaagacctgtggctctgccattcggacctttgcctttgggtgttagttaactgagtacgctcctgtaccgacaagatgcagcctcctgagcccttttccatccccatcccgtataactaacact

SEQ ID NO: 24194 - DNA, 28 bp, Homo sapiens
  chr10:35023510-35023538
  hypo
ccacctcggcccatatggggcattttta

SEQ ID NO: 24195 - DNA, 39 bp, Homo sapiens
  chr10:35044023-35044062
  hypo
cttcaagaagaattgctgggccgaggctgggcgcggtgg

SEQ ID NO: 24196 - DNA, 1921 bp, Homo sapiens; identical to SEQ ID NO: 7309
  chr10:35102969-35104890
  hypo

SEQ ID NO: 24197 - DNA, 1 bp, Homo sapiens
  chr10:35254676-35254677
  hypo
t

SEQ ID NO: 24198 - DNA, 30 bp, Homo sapiens
  chr10:35299079-35299109
  hypo
tttgacgctcatgacgtggcactggtgatg

SEQ ID NO: 24199 - DNA, 123 bp, Homo sapiens
  chr10:35503792-35503915
  hypo
gctttgcaggggggaacgttgcacatctcgcacacccttgcgcgtgggatccacagcgctcccacacccgtgcgcgtgggatccggagctccccgcacacccgtgcgcgtgggatccacagct

SEQ ID NO: 24200 - DNA, 35 bp, Homo sapiens
  chr10:35621533-35621568
  hypo
tcatctgagttttttttgagacggagtcttgctct

SEQ ID NO: 24201 - DNA, 30 bp, Homo sapiens
  chr10:35781947-35781977
  hypo
tcttggccaggcctcgccctgtaagtcaga

SEQ ID NO: 24202 - DNA, 200 bp, Homo sapiens; identical to SEQ ID NO: 7312
  chr10:35929589-35929789
  hypo

SEQ ID NO: 24203 - DNA, 199 bp, Homo sapiens
  chr10:36639322-36639521
  hypo
gactgtataccaggaacggctaggctctgtttaggttctgtgacaacttagagaataaaaccccacccctatctttaaggtgtccacagtgagtgtgggaaacacccacataaagagtcaataatgcaaccatatagcagttcattgaggtgggcgttagtgacagagtctcgctctgccacctaggctagagtgcagt

SEQ ID NO: 24204 - DNA, 43 bp, Homo sapiens
  chr10:36930095-36930138
  hypo
gaaatgaatattcaacaaatacgcaatgaggtgatccattgtt

SEQ ID NO: 24205 - DNA, 31 bp, Homo sapiens
  chr10:38301639-38301670
  hypo
gtgaggcaccgtgtctggccaagagtcaata

SEQ ID NO: 24206 - DNA, 30 bp, Homo sapiens; identical to SEQ ID NO: 7317
  chr10:38654417-38654447
  hypo

SEQ ID NO: 24207 - DNA, 35 bp, Homo sapiens
  chr10:43131975-43132010
  hypo
atattgactcttggccaggcacggtggctcacact

SEQ ID NO: 24208 - DNA, 1210 bp, Homo sapiens; identical to SEQ ID NO: 7318
  chr10:43248908-43250118
  hypo

SEQ ID NO: 24209 - DNA, 617 bp, Homo sapiens; identical to SEQ ID NO: 7319
  chr10:43250136-43250753
  hypo

SEQ ID NO: 24210 - DNA, 30 bp, Homo sapiens; identical to SEQ ID NO: 7324
  chr10:43572780-43572810
  hypo

SEQ ID NO: 24211 - DNA, 30 bp, Homo sapiens
  chr10:43605397-43605427
  hypo
ccttgcagagcagcccgtggcgcctcctct

SEQ ID NO: 24212 - DNA, 30 bp, Homo sapiens
  chr10:43815765-43815795
  hypo
ttgccaagaccactcgctacaatgtgtctc

SEQ ID NO: 24213 - DNA, 89 bp, Homo sapiens
  chr10:43906026-43906115
  hypo
agccatccgcccacctacgcctcccagagtgttgggattactggattgagccacgcatctggctgaacgttattttttaaatcaccaga

SEQ ID NO: 24214 - DNA, 28 bp, Homo sapiens
  chr10:43915512-43915540
  hypo
tgtctccgttttccaaagtgctgggatc

SEQ ID NO: 24215 - DNA, 273 bp, Homo sapiens
  chr10:44163387-44163660
  hypo
gcgagtggggtgggccgcgagcgggaggaacacgcacgtcccggggcggccggaggggccccgcttgcgcagggggttgtcagaagactcgcacgcggcaggaggcctggccgtgggtgcagagttcccagtaggacgcccacgaaaaaaacctaactcccattatgttctgtaattctagtctagcccctatttcatgcttgatagagagcagtcgaccccttcttggtgaattctgccaagttagtcacttctcagtcatgttaattaatt

SEQ ID NO: 24216 - DNA, 92 bp, Homo sapiens
  chr10:44163719-44163811
  hypo
ctcactgcagcctccgcacctccgactccagcgatcagattcgcctgggttgtccagctttcaagtccaccggggtccccatggaacttctg

SEQ ID NO: 24217 - DNA, 30 bp, Homo sapiens
  chr10:44198425-44198455
  hypo
cccagctctggcctcgcgtcactacgctct

SEQ ID NO: 24218 - DNA, 31 bp, Homo sapiens; identical to SEQ ID NO: 7333
  chr10:44420042-44420073
  hypo

SEQ ID NO: 24219 - DNA, 454 bp, Homo sapiens
  chr10:44500932-44501386
  hypo
atatttttgggttagctttaccgctacagaaaagtaaggtaaatgaccccgcattcacggagggtgactgtgcaaagcgtgaacatgcgccgagtttatgaagcgggtgtcggagccagcgctgcttctcgctgacccgcatgccccggccggccaggaacctgcgcctgagtgccctggtgtttctcttttttcccacgaaagcacgtgtgaagggcagagccacgtttatcaagaagtcatttttcccgttcgccggcattacaccattagcattacaggggccacctacacctcgtatttcgattccacagctccggagaacctgcggtgctgcggccactctgtgggtgtccccccacccccatctccactgcgagctctccggcctgggcacgcagctgctgacacacatcagcatggtgccctggccggcatctgctctgtggctggt

SEQ ID NO: 24220 - DNA, 30 bp, Homo sapiens; identical to SEQ ID NO: 7335
  chr10:44848905-44848935
  hypo

SEQ ID NO: 24221 - DNA, 253 bp, Homo sapiens
  chr10:44874107-44874360
  hypo
ctcctgaatccactttagcttcgggtcaatgcacacttgtctgttgttgttcttcagccgggctctgtgaaaacagaatggcaacagtgtgcggctgcacaggaggaaggcgcggctgcaacgtgtgcatccgctcccccaacacccatctagggccctcgctggcaccccgtgctccacttggtacgctcaggctccagaggtgctcgcggtgtgctggggaaagctcagcgctggcagtgcaggaagttcc

SEQ ID NO: 24222 - DNA, 31 bp, Homo sapiens
  chr10:45419799-45419830
  hypo
tcctgggtgagtccctcgtccagcttgggtt

SEQ ID NO: 24223 - DNA, 30 bp, Homo sapiens
  chr10:46010010-46010040
  hypo
tgattttcaaggaacgaggcagtgaatgaa

SEQ ID NO: 24224 - DNA, 51 bp, Homo sapiens; identical to SEQ ID NO: 7340
  chr10:49514478-49514529
  hypo

SEQ ID NO: 24225 - DNA, 220 bp, Homo sapiens
  chr10:49541832-49542052
  hypo
acgttgggtcagcaacggccagaggaaatcctaaggccaaacagtatctgtggcctccctacctttgggcatcttctggtcgccaatttgctgcaagtcacagctcccaaatctggttgtgcaggctccaaagcagtggagcctggcgcttctgccatctccacctcctggatctcagagctgctggatggctccacccaccacccgctgagctggcccc

SEQ ID NO: 24226 - DNA, 30 bp, Homo sapiens
  chr10:49542400-49542430
  hypo
tctggccgtttccctcgcagaacggaactg

SEQ ID NO: 24227 - DNA, 41 bp, Homo sapiens
  chr10:49592261-49592302
  hypo
tccagcctgggcgacagagcgagacagtctcaaaaaataaa

SEQ ID NO: 24228 - DNA, 31 bp, Homo sapiens; identical to SEQ ID NO: 7344
  chr10:49892636-49892667
  hypo

SEQ ID NO: 24229 - DNA, 156 bp, Homo sapiens
  chr10:50340032-50340188
  hypo
gttggaagccatttcgaaggaggagccgttccacctctgcctcttgatgaactgggcttcatggatgcggggcttcctggtgaccggctcgaagccggcctccgtctcccaggccacagccacaccccgcacagtctgcacgtgcgtgtagaaggc

SEQ ID NO: 24230 - DNA, 1309 bp, Homo sapiens; identical to SEQ ID NO: 7346
  chr10:50605568-50606877
  hypo

SEQ ID NO: 24231 - DNA, 82 bp, Homo sapiens
  chr10:50724264-50724346
  hypo
caccaaaacttatagccaaaccgaatgggctttccccgaataaattgtttgcacccgtgacgaccaaaataaggaaccatga

SEQ ID NO: 24232 - DNA, 119 bp, Homo sapiens; identical to SEQ ID NO: 7349
  chr10:50817753-50817872
  hypo

SEQ ID NO: 24233 - DNA, 162 bp, Homo sapiens; identical to SEQ ID NO: 7350
  chr10:50818152-50818314
  hypo

SEQ ID NO: 24234 - DNA, 112 bp, Homo sapiens; identical to SEQ ID NO: 7351
  chr10:50818519-50818631
  hypo

SEQ ID NO: 24235 - DNA, 69 bp, Homo sapiens; identical to SEQ ID NO: 7352
  chr10:50818986-50819055
  hypo

SEQ ID NO: 24236 - DNA, 30 bp, Homo sapiens; identical to SEQ ID NO: 7355
  chr10:50969982-50970012
  hypo

SEQ ID NO: 24237 - DNA, 30 bp, Homo sapiens; identical to SEQ ID NO: 7356
  chr10:50970560-50970590
  hypo

SEQ ID NO: 24238 - DNA, 119 bp, Homo sapiens; identical to SEQ ID NO: 7357
  chr10:52177703-52177822
  hypo

SEQ ID NO: 24239 - DNA, 210 bp, Homo sapiens
  chr10:52180039-52180249
  hypo
gttcactaccaataggcgtaacatgaaggcttctttcatatctggaccattttttccattcctggttcaggcattcgtcccctctgcctgagtcactgaggttgagtgtcttctagccgctgttccagcaggcgggcccctccctctatgcctctcaacacatcatcatcatcatcacatgacaaatgtcaaagtcgagcatgccatcat

SEQ ID NO: 24240 - DNA, 127 bp, Homo sapiens
  chr10:52369821-52369948
  hypo
acattgtagcatcatacgcacctccccgcctttgcttccactaagtcaaatggtcttccagtgatgccagcggtatcattttgtttcccatcccacccgtaagacacagaaacgtcaagccgcacag

SEQ ID NO: 24241 - DNA, 16 bp, Homo sapiens
  chr10:52372715-52372731
  hypo
ttaaaaacaaagaaag

SEQ ID NO: 24242 - DNA, 30 bp, Homo sapiens; identical to SEQ ID NO: 7361
  chr10:52833595-52833625
  hypo

SEQ ID NO: 24243 - DNA, 31 bp, Homo sapiens; identical to SEQ ID NO: 7367
  chr10:54072981-54073012
  hypo

SEQ ID NO: 24244 - DNA, 30 bp, Homo sapiens
  chr10:58775425-58775455
  hypo
gaacgaaggagctaacgcatttcctgccct

SEQ ID NO: 24245 - DNA, 290 bp, Homo sapiens
  chr10:59866612-59866902
  hypo
aggcactggacaggagggccccgggagtgtggtcacccaggcggaggttcggcggccagcgaggagcgaggtgcgcatctttctacgggggctcagcccaccgaagctctcatccgtcaatgggcgggttcgttcagcaagcagccactgcgaagtcttcggaaggggtttgcgggagagaagacgggtcatgatcttggagccataagtcctgcccgccctgggctctggtttccgtggcaggcaggaatcagcagtgcctggtcttcggaaaaacccaacctggcttc

SEQ ID NO: 24246 - DNA, 30 bp, Homo sapiens; identical to SEQ ID NO: 7371
  chr10:60262026-60262056
  hypo

SEQ ID NO: 24247 - DNA, 30 bp, Homo sapiens; identical to SEQ ID NO: 7380
  chr10:61164087-61164117
  hypo

SEQ ID NO: 24248 - DNA, 30 bp, Homo sapiens
  chr10:61552611-61552641
  hypo
tggcgttgagtagacggctccattggatga

SEQ ID NO: 24249 - DNA, 30 bp, Homo sapiens
  chr10:62668835-62668865
  hypo
ggagggaacacacacgcaggtatggcatgt

SEQ ID NO: 24250 - DNA, 30 bp, Homo sapiens; identical to SEQ ID NO: 7382
  chr10:62703726-62703756
  hypo

SEQ ID NO: 24251 - DNA, 31 bp, Homo sapiens
  chr10:63669395-63669426
  hypo
tttctgagtgactgaacgacataattaaaat

SEQ ID NO: 24252 - DNA, 30 bp, Homo sapiens
  chr10:63671388-63671418
  hypo
ttctttgcactgcacgagcggcacccagtt

SEQ ID NO: 24253 - DNA, 42 bp, Homo sapiens
  chr10:63757868-63757910
  hypo
gctaaacatctccatccgtggaaaagccgccagcctgaggaa

SEQ ID NO: 24254 - DNA, 23 bp, Homo sapiens
  chr10:63931000-63931023
  hypo
ttttttttttttgatacggagtc

SEQ ID NO: 24255 - DNA, 376 bp, Homo sapiens; identical to SEQ ID NO: 7386
  chr10:64574691-64575067
  hypo

SEQ ID NO: 24256 - DNA, 596 bp, Homo sapiens; identical to SEQ ID NO: 7387
  chr10:64575127-64575723
  hypo

SEQ ID NO: 24257 - DNA, 104 bp, Homo sapiens
  chr10:64945156-64945260
  hypo
gctgggattataggcgtgagccactatgacgctcagcctcaagttatttatttttaattgagaaagaaaaagcctacaggtcacatttacggttacttatccta

SEQ ID NO: 24258 - DNA, 31 bp, Homo sapiens
  chr10:64983779-64983810
  hypo
tacaggcatgagcctccgagcccagccttat

SEQ ID NO: 24259 - DNA, 30 bp, Homo sapiens
  chr10:65160317-65160347
  hypo
ttttctgcctttcccccggccccgagatgg

SEQ ID NO: 24260 - DNA, 31 bp, Homo sapiens
  chr10:69836219-69836250
  hypo
ttcaagtgtgtgtattcgtgtcctaggcttg

SEQ ID NO: 24261 - DNA, 2 bp, Homo sapiens
  chr10:69853848-69853850
  hypo
ga

SEQ ID NO: 24262 - DNA, 336 bp, Homo sapiens
  chr10:70184282-70184618
  hypo
caggcctgaggccgccgctagccggagcatcaccatgaagttcaatcccttcgtgaacttggaccgcagcaaaaaccgcaaacgtcacttccatgcccccttgcacgtgcaccggaagatcatgtcatccccgctctccaaggagctgcggcagaagtacaatgtccgctccacacccatccgcaaggacgacgaggtccaggtagttcaaggacactacaaaggtcagcaaattggcaaggtagtccaggtgtacagaaagaaagatgtcatctacactgagcaggtgcagcgtgagtaggccaacagcacaaccgtccacgtgggtactcaccc

SEQ ID NO: 24263 - DNA, 169 bp, Homo sapiens
  chr10:70218970-70219139
  hypo
ttgacttagatttaagcggtacctgccaaaaatataatagtaaatagacttagacttaagcggtacctgccaaaaatatgatagcgaatatgaaagtataaatatgagaaaagtaaacgaggacaaaaaaatacatataagcaacccaactgttcgtcagccaataaat

SEQ ID NO: 24264 - DNA, 35 bp, Homo sapiens
  chr10:70266165-70266200
  hypo
ctgtaccccagcctgggcagcgagactctgtctca

SEQ ID NO: 24265 - DNA, 121 bp, Homo sapiens
  chr10:70483198-70483319
  hypo
ttaataccttagattaacttttaattgatttaattctgttagagtttagctactcattcattacaatatactgtatttggcatgttaagttgtcagtattaatgagttatgtttaaaagta

SEQ ID NO: 24266 - DNA, 23 bp, Homo sapiens
  chr10:70586517-70586540
  hypo
tgagactccgcctcaaaaaaaaa

SEQ ID NO: 24267 - DNA, 1174 bp, Homo sapiens; identical to SEQ ID NO: 7398
  chr10:71078139-71079313
  hypo

SEQ ID NO: 24268 - DNA, 23 bp, Homo sapiens
  chr10:71110631-71110654
  hypo
taaaaccaaagctggccgggcgc

SEQ ID NO: 24269 - DNA, 30 bp, Homo sapiens; identical to SEQ ID NO: 7399
  chr10:71122697-71122727
  hypo

SEQ ID NO: 24270 - DNA, 31 bp, Homo sapiens
  chr10:71128907-71128938
  hypo
gagcacttctgccaagcgctgttaaggtgtg

SEQ ID NO: 24271 - DNA, 110 bp, Homo sapiens
  chr10:71144612-71144722
  hypo
ccaggatgcctctgggcttcacgttctcatttccctgccagcagacgagtctggacgcggtgagtctctgttcttagggctcagtgatcgggcagcactgagtcccctgt

SEQ ID NO: 24272 - DNA, 30 bp, Homo sapiens
  chr10:71160984-71161014
  hypo
gcgccagggcctgccggcgcggggaggaaa

SEQ ID NO: 24273 - DNA, 31 bp, Homo sapiens
  chr10:71174692-71174723
  hypo
ggccttacaggaggagcgtcttgcccccgct

SEQ ID NO: 24274 - DNA, 191 bp, Homo sapiens
  chr10:71245587-71245778
  hypo
gcctgggccaaaaaggcgatttgatgtatattttggaggcagtaccatcagaggctgttatgccggctagaggagtgaggagaggggcaggttgacagggtgatgcctggcatcctggccctggcagggtttgcagaatccgggccccttagagccagaaaggttctcgtggctcccggctccagctcctt

SEQ ID NO: 24275 - DNA, 604 bp, Homo sapiens; identical to SEQ ID NO: 7402
  chr10:71332279-71332883
  hypo

SEQ ID NO: 24276 - DNA, 31 bp, Homo sapiens
  chr10:71568580-71568611
  hypo
ctcctcgcagcgtccccggccctggacccag

SEQ ID NO: 24277 - DNA, 159 bp, Homo sapiens
  chr10:71639772-71639931
  hypo
gccagatgggtatttgcggagggggagctggaaagcatcctgggctgggccggggagagactcaggcctgggcagccttgctaagtctcccctctctccctgtgtctccctgtttcccgccactccaatggatcctgttcttctcgcttccccggcctg

SEQ ID NO: 24278 - DNA, 30 bp, Homo sapiens
  chr10:71871349-71871379
  hypo
tcctcgctgaagaacgtgtacttcctgctc

SEQ ID NO: 24279 - DNA, 30 bp, Homo sapiens
  chr10:72032484-72032514
  hypo
aacaaatcagctcttcgcagtcgaggcaca

SEQ ID NO: 24280 - DNA, 30 bp, Homo sapiens; identical to SEQ ID NO: 7411
  chr10:72238427-72238457
  hypo

SEQ ID NO: 24281 - DNA, 186 bp, Homo sapiens
  chr10:72288399-72288585
  hypo
agggtacaggctaggccgctgtcataaagtaacccagataagatgccttcctcaggacgaagctcatctcttacatgcaagtccacgaggacatccaggctgggatggctgctccgtgatcatccaggccccttctccctcattgctccaacatcatcaacatgtggcttccgtcttatgatctaa

SEQ ID NO: 24282 - DNA, 114 bp, Homo sapiens
  chr10:72442675-72442789
  hypo
atgacccagcactgggcctgccggacaaccgtctgggtgaggaggcataaactcctgtagttagatgaggggacagcatttgtcgtcctctccgtggctatctggccatctgct

SEQ ID NO: 24283 - DNA, 189 bp, Homo sapiens
  chr10:72765319-72765508
  hypo
agcctatcatgggctaaaactcgagccaagcgccagagtgggacagatgcacaggtccgtcctcagcctcccaagctcccgctcactaagtaaacacctgtgcgtgggctcgtcgctcacctccctaatgagctcatcgctcacccggctctccatcgcgctccatccgtcttcaccttgctgccatgg

SEQ ID NO: 24284 - DNA, 38 bp, Homo sapiens; identical to SEQ ID NO: 7413
  chr10:73113222-73113260
  hypo

SEQ ID NO: 24285 - DNA, 193 bp, Homo sapiens
  chr10:73288225-73288418
  hypo
gcccgtcccttctgcacggctggccttgcagccggcctgcggcagacacagcttttttgtttttggttaaaaagcctcatcggagcgttatgatattggaatgtgaagggtaattgagctgaaagctattctcttcctgcgaccagcgcgataggagtgattgaggtgcccgggcctccgcagcagcctggga

SEQ ID NO: 24286 - DNA, 30 bp, Homo sapiens
  chr10:73421686-73421716
  hypo
cctcacaccctgcgcgcacacacacagaac

SEQ ID NO: 24287 - DNA, 185 bp, Homo sapiens
  chr10:73445876-73446061
  hypo
taagcttttgtagagcgagccgctgatttagaactaatagcgaatgcagcgccaagatccggggaaatatcaccgctaataagtttctgcctcatgctctgtcactgacattctccacaccgtttcgtgcagccaagcagaagcttaaatgtataagtatatggggcgctcgcacccgcaccagg

SEQ ID NO: 24288 - DNA, 43 bp, Homo sapiens
  chr10:73455133-73455176
  hypo
tcagctgggtgtgtctcccagcgccccttatggcttcacaggt

SEQ ID NO: 24289 - DNA, 31 bp, Homo sapiens
  chr10:73483375-73483406
  hypo
tcaggccaaggaaatgcgggcaagaagtagc

SEQ ID NO: 24290 - DNA, 134 bp, Homo sapiens
  chr10:73515005-73515139
  hypo
gaaaaggaattgtgcctgcatcgtgcctttgcgaatcccaggggctgaactgggggctggagcaggtcactcgcaccgtccacccaccccaggcagggaggaatactcacggcggttggaggctgcctgccttt

SEQ ID NO: 24291 - DNA, 35 bp, Homo sapiens
  chr10:73553181-73553216
  hypo
acatcaatgactcccgccccgagttcctcaacccc

SEQ ID NO: 24292 - DNA, 30 bp, Homo sapiens
  chr10:73574840-73574870
  hypo
acgctgctggccaccgacctcaacagcctg

SEQ ID NO: 24293 - DNA, 31 bp, Homo sapiens
  chr10:73767276-73767307
  hypo
agccgctgtggcacatcgagcgcacagtgtc

SEQ ID NO: 24294 - DNA, 107 bp, Homo sapiens
  chr10:73767528-73767635
  hypo
gcaagaaccgccgctgcggccccctcaacgtgacgctggccgcagaggcctgccgccgcaaggagcacatggccctcaaggcggtgcgcatccggcagctggagttc

SEQ ID NO: 24295 - DNA, 56 bp, Homo sapiens
  chr10:73767880-73767936
  hypo
ccgctacatgctggtgcgctacgaggacgtggcacgcgggccgctgcagaaggccc

SEQ ID NO: 24296 - DNA, 31 bp, Homo sapiens
  chr10:73822605-73822636
  hypo
tcctcatcctcccagccgacaccgcttccaa

SEQ ID NO: 24297 - DNA, 364 bp, Homo sapiens; identical to SEQ ID NO: 7419
  chr10:73847427-73847791
  hypo

SEQ ID NO: 24298 - DNA, 25 bp, Homo sapiens
  chr10:73925165-73925190
  hypo
gcccggccaagttgaagctcttcta

SEQ ID NO: 24299 - DNA, 205 bp, Homo sapiens; identical to SEQ ID NO: 7421
  chr10:74032649-74032854
  hypo

SEQ ID NO: 24300 - DNA, 102 bp, Homo sapiens; identical to SEQ ID NO: 7425
  chr10:74079590-74079692
  hypo

SEQ ID NO: 24301 - DNA, 193 bp, Homo sapiens; identical to SEQ ID NO: 7426
  chr10:74079752-74079945
  hypo

SEQ ID NO: 24302 - DNA, 31 bp, Homo sapiens
  chr10:74115963-74115994
  hypo
tgctactacagtaatccggatgagagtcagg

SEQ ID NO: 24303 - DNA, 85 bp, Homo sapiens
  chr10:74518789-74518874
  hypo
ctctttatgtctgttccgcaagtctgcatgtagggtaatagtacttctgttcatctgtagcaggacgagccgcagacaaaactcc

SEQ ID NO: 24304 - DNA, 41 bp, Homo sapiens
  chr10:75384237-75384278
  hypo
ttacaggcgtgagtcaccgcgcccagccaaaaagccattat

SEQ ID NO: 24305 - DNA, 35 bp, Homo sapiens
  chr10:75493100-75493135
  hypo
gagggcgcgcagggggcgggcggggtgctgttcgc

SEQ ID NO: 24306 - DNA, 30 bp, Homo sapiens
  chr10:75501526-75501556
  hypo
tgagccaccatgcccggccctagtgggtgc

SEQ ID NO: 24307 - DNA, 32 bp, Homo sapiens
  chr10:76013803-76013835
  hypo
tgtgagacaccgtgcctggcctacactgtcag

SEQ ID NO: 24308 - DNA, 32 bp, Homo sapiens
  chr10:76019175-76019207
  hypo
ggatgtgttataaactcgatgtaatcattttt

SEQ ID NO: 24309 - DNA, 35 bp, Homo sapiens
  chr10:76538432-76538467
  hypo
tgtacaggcactcttgggcacgacttgacatggct

SEQ ID NO: 24310 - DNA, 62 bp, Homo sapiens
  chr10:76585430-76585492
  hypo
aggttagccggggacccgggtggccggaggcagcggcgagcggtgcacgtgcttgcagacac

SEQ ID NO: 24311 - DNA, 31 bp, Homo sapiens
  chr10:76655265-76655296
  hypo
catagtttcaccaaaacgctcttcttcttaa

SEQ ID NO: 24312 - DNA, 41 bp, Homo sapiens
  chr10:76780378-76780419
  hypo
ctgaaaagcctctctccgatctgggccgtctctcctacctg

SEQ ID NO: 24313 - DNA, 43 bp, Homo sapiens
  chr10:76796682-76796725
  hypo
gagcttacctggctgccccatcgtcccattccacagcagacaa

SEQ ID NO: 24314 - DNA, 123 bp, Homo sapiens
  chr10:76797319-76797442
  hypo
aaagcaggagacttggtgcagcgtggcatgctcctctgtgacccagagccggggagcccgtccctcccattttgctgagaggctgagcgctcagctctgcccgggggcagctctgggtcctcc

SEQ ID NO: 24315 - DNA, 30 bp, Homo sapiens
  chr10:76818192-76818222
  hypo
tcctcctccatcttcggcgacagcctcttg

SEQ ID NO: 24316 - DNA, 47 bp, Homo sapiens
  chr10:76968472-76968519
  hypo
gattaaaaaaatgaggtaggccgagcgcggtggctcacacctgtaat

SEQ ID NO: 24317 - DNA, 29 bp, Homo sapiens
  chr10:76968758-76968787
  hypo
gagactccgtctcaaaaaaaaaagaagaa

SEQ ID NO: 24318 - DNA, 31 bp, Homo sapiens
  chr10:76998105-76998136
  hypo
tgcatgcgtgccctttcggccctcctgggac

SEQ ID NO: 24319 - DNA, 249 bp, Homo sapiens
  chr10:76998418-76998667
  hypo
ccaggatccgggggcggctgtgatcttgttcccattttccagagcaggaaagctcagagaccaccgcccagaccctgcagccaacagaggaaacgcgcgtacctctcccttgaaccctgggacccagagggaacaggccttcttggctcctctgctgggacgagggcccagctcgagctggcctgagggccctgcgctcaggtggtgccgctgaccgctctctcccttcagcccgggggtccaggttgc

SEQ ID NO: 24320 - DNA, 244 bp, Homo sapiens; identical to SEQ ID NO: 7437
  chr10:77159882-77160126
  hypo

SEQ ID NO: 24321 - DNA, 31 bp, Homo sapiens
  chr10:77838045-77838076
  hypo
catgagccacggctcccggccaatattaact

SEQ ID NO: 24322 - DNA, 30 bp, Homo sapiens
  chr10:77909913-77909943
  hypo
caaaagcccctccgcgctacacacttctgt

SEQ ID NO: 24323 - DNA, 1904 bp, Homo sapiens; identical to SEQ ID NO: 7442
  chr10:79396526-79398430
  hypo

SEQ ID NO: 24324 - DNA, 31 bp, Homo sapiens
  chr10:79565637-79565668
  hypo
tgctgggcagggccatcgagaccctgctgcc

SEQ ID NO: 24325 - DNA, 541 bp, Homo sapiens
  chr10:79601536-79602077
  hypo
caactcaggaggcttctaatccggacaccacgcactctgcagcccctcttcccgggatgctgtaggagaggctgaaagccagccaccggcccacccacctacctgccgcagcgcctccatctcctcattggccgccttcttctcagatgtgctgctcttgagcttggactcggccagctccacttcggtctgcagcttgtccagctcagagatgacctggtcacgctcactcatgatgagcttgtactcgctgtacacagcgtcccgctcctccctgtatttctccgactcctttgctgtcttcacctgcgtggttctcagctcggtcagctctgactgcagcagctccatctcccactgcaggtccttgttctgcgccgtggccttgttcagctcatggtggatcgcctcaaacctggcaagagaggtggcgagatgtgggaagggcgggggccctgcccggtcagtggccggctgcgctgctgcctcccgccagctctactgtgctggacagtcaagcgtgaagtttcaagtgaagtca

SEQ ID NO: 24326 - DNA, 30 bp, Homo sapiens
  chr10:79602350-79602380
  hypo
caaggtcatcaagttcgctcgaagagcaca

SEQ ID NO: 24327 - DNA, 30 bp, Homo sapiens
  chr10:79626162-79626192
  hypo
tgagccactggtttcggcacaaacaagcag

SEQ ID NO: 24328 - DNA, 30 bp, Homo sapiens
  chr10:79628926-79628956
  hypo
catggtggacaggacgctgtaggtagaacc

SEQ ID NO: 24329 - DNA, 48 bp, Homo sapiens; identical to SEQ ID NO: 7446
  chr10:79686981-79687029
  hypo

SEQ ID NO: 24330 - DNA, 30 bp, Homo sapiens; identical to SEQ ID NO: 7447
  chr10:80159487-80159517
  hypo

SEQ ID NO: 24331 - DNA, 30 bp, Homo sapiens
  chr10:80232164-80232194
  hypo
ctccagaccgcttccggagggaaagcagca

SEQ ID NO: 24332 - DNA, 50 bp, Homo sapiens
  chr10:80540447-80540497
  hypo
tctgagcactccatcccggaagtgccagagtgctacgcagggttgggcca

SEQ ID NO: 24333 - DNA, 31 bp, Homo sapiens
  chr10:80638009-80638040
  hypo
cgtgagccaccgcgcccggccagttcccagg

SEQ ID NO: 24334 - DNA, 31 bp, Homo sapiens
  chr10:80714408-80714439
  hypo
ctagtcaggggtctagcgaagaggggtctgg

SEQ ID NO: 24335 - DNA, 38 bp, Homo sapiens; identical to SEQ ID NO: 7448
  chr10:80733745-80733783
  hypo

SEQ ID NO: 24336 - DNA, 64 bp, Homo sapiens
  chr10:80739955-80740019
  hypo
gcaagagacaggagcacggtttatgcgtactgggacagtcagtgagattcggtgaaggacatga

SEQ ID NO: 24337 - DNA, 19 bp, Homo sapiens
  chr10:80762723-80762742
  hypo
attagcaatggtgcagctg

SEQ ID NO: 24338 - DNA, 13 bp, Homo sapiens
  chr10:80769688-80769701
  hypo
accaccgctctgg

SEQ ID NO: 24339 - DNA, 34 bp, Homo sapiens; identical to SEQ ID NO: 7449
  chr10:80827232-80827266
  hypo

SEQ ID NO: 24340 - DNA, 102 bp, Homo sapiens; identical to SEQ ID NO: 7450
  chr10:80828550-80828652
  hypo

SEQ ID NO: 24341 - DNA, 76 bp, Homo sapiens
  chr10:80840368-80840444
  hypo
ggtgtgatttcttgtttggtgtttggcgatggggctgtgaagctgtgagtttgacgtcagtttatctcctgcaaaa

SEQ ID NO: 24342 - DNA, 39 bp, Homo sapiens
  chr10:80870192-80870231
  hypo
agacttgatgtccatccgtcccaccgaagaagagttcaa

SEQ ID NO: 24343 - DNA, 31 bp, Homo sapiens
  chr10:80882864-80882895
  hypo
tggcctgggctgcaaccgcaggcaaaggctg

SEQ ID NO: 24344 - DNA, 283 bp, Homo sapiens
  chr10:80921745-80922028
  hypo
gcctcatggtcagtgccgggcctctactgtgggtagacccgctgacctcccactttcattgcagcaggatggagctggagtgaggtggaggggccgcaagctgctgaccggcgtgtggaacactggtggtttgcagatcactgaggtaggtgtgccacggggctggcgggaggtggctgggtcggacgcaggtgagtcctcatgagggcaggtgctagccctagcacgctggacctttgactcgggcctcagccctgaggggcaggagcgggcacaagccacc

SEQ ID NO: 24345 - DNA, 31 bp, Homo sapiens
  chr10:80927517-80927548
  hypo
gcgcatacaccctagacggagctaggagggt

SEQ ID NO: 24346 - DNA, 159 bp, Homo sapiens
  chr10:80930974-80931133
  hypo
tgtcctgatgagatctcgtttgaggcagctgggtctgggctaatgccagagaaggaattcttcactgccgggccttcactccaccggggatgaggccagggcctagaacttagggactggcctgggctgtcgctcagaggatgccgggggccagagctt

SEQ ID NO: 24347 - DNA, 60 bp, Homo sapiens
  chr10:80956203-80956263
  hypo
accagttgaggcagagcgggtagataggggacctgaaagcaccttcggcccttaatattc

SEQ ID NO: 24348 - DNA, 24 bp, Homo sapiens
  chr10:80957700-80957724
  hypo
gaccccgcacagtgtcgttattaa

SEQ ID NO: 24349 - DNA, 33 bp, Homo sapiens
  chr10:80958500-80958533
  hypo
aaatttggagccgggcgcagtcgctcacgcctg

SEQ ID NO: 24350 - DNA, 18 bp, Homo sapiens
  chr10:80958772-80958790
  hypo
gagcgagactcagtctca

SEQ ID NO: 24351 - DNA, 37 bp, Homo sapiens
  chr10:80961550-80961587
  hypo
ctgaccacctacctatcgaggccgttattggcatgct

SEQ ID NO: 24352 - DNA, 38 bp, Homo sapiens
  chr10:80971719-80971757
  hypo
agtcagaaagacttttcgggtcccgccccctgccagta

SEQ ID NO: 24353 - DNA, 429 bp, Homo sapiens
  chr10:80974662-80975091
  hypo
cagagtgaagccagagcggcaacagcttgcaaagccacccaagggtcccctggagcgccccgtcccacactgccccccaggggaccgatggccctcccagtctgccgcctctcaccctgccagtccctacttctgagattttaaggagatgggtgggaccttcaggctccaaacacaccattgctgttatggaagccccccatttgctggggcttaaggctagagacagaccccaggctgagcgtgggagtcctgcggtttctagctgaggttgagggggctgcagggtgcttggcacggagcagcattacaatgcctgccccatcccggaagccttagtcgattaagcagctctgacctgaagccctgtgggaagcagcttgttctaaatcaccgctttttttttttttttgagaaggagtcttgctg

SEQ ID NO: 24354 - DNA, 76 bp, Homo sapiens
  chr10:80975873-80975949
  hypo
cattggctctgggctccgtgactcacctgccctcctcccctcttgctttcaggtggtcagtcgggtggcagcccag

SEQ ID NO: 24355 - DNA, 29 bp, Homo sapiens
  chr10:80991615-80991644
  hypo
tgagccaccgtgcccggtcatgcctggtg

SEQ ID NO: 24356 - DNA, 33 bp, Homo sapiens
  chr10:81017843-81017876
  hypo
atgaagttaaatgggccgggcacggtggctcat

SEQ ID NO: 24357 - DNA, 191 bp, Homo sapiens
  chr10:81023806-81023997
  hypo
aggaaaaattacatgcggaatggaaagcaggcgctcagggtggctcctgctggaatgagagctggagtgcaggctccgtggttcctgggcatgcgggtgtggctcagttctcaccttgcagatggagtgggactgttgacccaggccagcctggggactgcctcctcacctccctgcgcaggctgaccttg

SEQ ID NO: 24358 - DNA, 31 bp, Homo sapiens
  chr10:81032681-81032712
  hypo
aaggccccaaggtcctcggcaccagcccctg

SEQ ID NO: 24359 - DNA, 31 bp, Homo sapiens
  chr10:81035987-81036018
  hypo
caagatggtgactgagcgcagccagttcccc

SEQ ID NO: 24360 - DNA, 434 bp, Homo sapiens
  chr10:81036656-81037090
  hypo
cccctctttgcctccacggaccactacttcctgcacgcgggccattctgaccccctcttcatgacagaaacttttgtatcctccttcaagggtgtcagtcccatcttacagttgagaatactgaggcctcccaagagggctgagtaagtcttctggcgtcacacgaatctgggagcaaaaccagcatggatagcacccagtctggggagagttgggggggggtcttggtgtggcagagcatgatgaacaagcacccactgactgtcctgtccttcctgcagccttgttgtcctcctggtgcgaagagctcggccgcctgctgctgctccgacatcagaagagccgccagagcgatccccctgggaaactccccatgcagccccctctcagctccatgagctccatgaaacccactctgtcgcacaggtaagtgg

SEQ ID NO: 24361 - DNA, 229 bp, Homo sapiens
  chr10:81050808-81051037
  hypo
aactccccacagtttgcggggcagcagcagcagttctcagccaaggctggccccgctcagccctacatccagcagagcatgtatggccggcccaactaccccggcagcgggggctttggggccaggtgagcagggctgacctgtggcagaagccatggacgccacccctcttcctccttccagtggggagggacccacttaaatcccagctccacgctttctgccctga

SEQ ID NO: 24362 - DNA, 81 bp, Homo sapiens
  chr10:81058070-81058151
  hypo
gcccctgggatgagtgcggtgtatgtccatagccatggccccttctgtctccgtaatcccataactcgtgcgtgtcttttc

SEQ ID NO: 24363 - DNA, 31 bp, Homo sapiens
  chr10:81059049-81059080
  hypo
tcttctgacaccttcacgtgttcagcatcat

SEQ ID NO: 24364 - DNA, 30 bp, Homo sapiens
  chr10:81059399-81059429
  hypo
cagacacttaggcacgtgctggaacacaag

SEQ ID NO: 24365 - DNA, 82 bp, Homo sapiens
  chr10:81060538-81060620
  hypo
tgaacaccaactggcccgcctcggtgcaggtcagcgtgaacgccacgcccctcaccattgagcgcggcgacaacaagacctc

SEQ ID NO: 24366 - DNA, 31 bp, Homo sapiens
  chr10:81063476-81063507
  hypo
gacatgccccttcctcgcgaaggcagggcct

SEQ ID NO: 24367 - DNA, 202 bp, Homo sapiens
  chr10:81063750-81063952
  hypo
tctgtgcctcctgccccgcagtcaagcggaatttcagcagcgtggctgcctcctcgggcaacacgaccctcaacggggaggatggggtggagcagacggccatcaaggtgtctctgaagtgccccatcacattccggcgcatccagctgcctgctcgaggacacgattgcaagcatgtgcaggtgagcggccccagaaagca

SEQ ID NO: 24368 - DNA, 266 bp, Homo sapiens
  chr10:81065767-81066033
  hypo
tcacctgggtgtctgtcggagctggaggtgcttttatgcccaaagccaggcaccccggagcctcagctctgccacccttcctcccccagctccgagtttgaagaggtcaccatcgatcccacgtgcagctggcggccggtgcccatcaagtcggacttacacatcaaggacgaccctgatggcatcccctccaagcggttcaagaccatgagtcccagccagatgatcatgcccaatgtcatggagatgatcgcagccctgggccc

SEQ ID NO: 24369 - DNA, 182 bp, Homo sapiens
  chr10:81073339-81073521
  hypo
cccttggttggggggcgcgggcatataacctgtcagaagcaaacaggagcggcaacttctaactttgctccaagccactctctttttaaacagcaacaatttaaagctatgaagtcacctggagaaaaggaacgttgctcttggacagcaagcaaaccatttctctccgtctgttctgtttt

SEQ ID NO: 24370 - DNA, 30 bp, Homo sapiens
  chr10:81142185-81142215
  hypo
caagggctgcacttcggagacgtcggagcc

SEQ ID NO: 24371 - DNA, 30 bp, Homo sapiens
  chr10:81146036-81146066
  hypo
gcacagggaagcagcgtctcctcgggctgg

SEQ ID NO: 24372 - DNA, 31 bp, Homo sapiens
  chr10:81153953-81153984
  hypo
ggagtaaactgaggtccggtaagggaaaagt

SEQ ID NO: 24373 - DNA, 31 bp, Homo sapiens
  chr10:81921253-81921284
  hypo
gtgccctgccccccaccgtggccccacacct

SEQ ID NO: 24374 - DNA, 30 bp, Homo sapiens
  chr10:81924865-81924895
  hypo
actccctggggccccgggccatcgccctgc

SEQ ID NO: 24375 - DNA, 22 bp, Homo sapiens
  chr10:81958869-81958891
  hypo
tgagaccaagtcttgatctgtc

SEQ ID NO: 24376 - DNA, 66 bp, Homo sapiens
  chr10:81966565-81966631
  hypo
gttacaaacaagctgctggttcgattttcctttttttttttttttttctgagacggagtctcgatc

SEQ ID NO: 24377 - DNA, 53 bp, Homo sapiens; identical to SEQ ID NO: 7456
  chr10:82213690-82213743
  hypo

SEQ ID NO: 24378 - DNA, 30 bp, Homo sapiens
  chr10:82268203-82268233
  hypo
tactccaaattggccggttgtggcaagctg

SEQ ID NO: 24379 - DNA, 30 bp, Homo sapiens
  chr10:82297778-82297808
  hypo
ctctcctgggatgccgtgcttggtgaccca

SEQ ID NO: 24380 - DNA, 30 bp, Homo sapiens; identical to SEQ ID NO: 7459
  chr10:84158654-84158684
  hypo

SEQ ID NO: 24381 - DNA, 163 bp, Homo sapiens
  chr10:84618970-84619133
  hypo
gggattacaggtatgatccaccgcacccggccagtagtctaactttttaaaacacagatcaatattttcctggaacatgcttttccatatcccatagaccagggtttaaatgatcacacttgggacccttgtatgatcagaatcatctcgctccgttactttt

SEQ ID NO: 24382 - DNA, 30 bp, Homo sapiens; identical to SEQ ID NO: 7460
  chr10:85233864-85233894
  hypo

SEQ ID NO: 24383 - DNA, 30 bp, Homo sapiens; identical to SEQ ID NO: 7461
  chr10:85247485-85247515
  hypo

SEQ ID NO: 24384 - DNA, 30 bp, Homo sapiens; identical to SEQ ID NO: 7462
  chr10:85416512-85416542
  hypo

SEQ ID NO: 24385 - DNA, 34 bp, Homo sapiens
  chr10:86016116-86016150
  hypo
gttttcttatccctgtgtcgcggactaaaaaatt

SEQ ID NO: 24386 - DNA, 43 bp, Homo sapiens; identical to SEQ ID NO: 7466
  chr10:86088146-86088189
  hypo

SEQ ID NO: 24387 - DNA, 30 bp, Homo sapiens
  chr10:86296485-86296515
  hypo
ttgtttagtgttgacggagggtgcagtgga

SEQ ID NO: 24388 - DNA, 93 bp, Homo sapiens
  chr10:86306480-86306573
  hypo
ccatttgaacatgcacttggccgaggcagccctgggtgctctgcagggaacatacgctaacagctccccttcgagcactgcctgggagaagtg

SEQ ID NO: 24389 - DNA, 31 bp, Homo sapiens; identical to SEQ ID NO: 7470
  chr10:88148418-88148449
  hypo

SEQ ID NO: 24390 - DNA, 38 bp, Homo sapiens
  chr10:88200327-88200365
  hypo
ttacaggcgtgagccactgcgcccggccttttttcact

SEQ ID NO: 24391 - DNA, 24 bp, Homo sapiens
  chr10:88237802-88237826
  hypo
actctgtctcggaaaaaaaaaaaa

SEQ ID NO: 24392 - DNA, 30 bp, Homo sapiens
  chr10:88414306-88414336
  hypo
agtcaccataactgcgacactcactcattt

SEQ ID NO: 24393 - DNA, 654 bp, Homo sapiens
  chr10:88441136-88441790
  hypo
cgtgtggcctctaaccgctctcttctctctcccctgcatggcctgccctgtgccaggaccccgctctggacacgaacggcagcctggtggcacccagccccagccctgaggcgagggccagcccaggcaccccaggcaccccggagctcaggcccacctttagccctgccttctcccggccctccgccttctcctcactcgccgaggcctctgaccctggccctccgcgggccagcctgagggccaagaccagcccagagggggcccgggacctactcggcccaaaagccctgccgggctcgagccagccgaggcaatataacaaccccattggcctgtactcggcagagaccctgagggagatggctcagatgtaccagatgagcctccgagggaaggcctcgggtgtcggactcccaggagggtaggtaacggacatacagctctccacaggtggcctgggccacctgggtcctcggtgctcggcagagacctggtcaggtggtcagagcgaggcactggccccaatccagccagccccgagcccatgaggtcagcagtgatcctgcggcatttgccatgagccgggcatgctagcgatttatacaaccaaccacgctggggtgacatgtcggattttgcagaggaggaaac

SEQ ID NO: 24394 - DNA, 30 bp, Homo sapiens
  chr10:88615949-88615979
  hypo
ttcattcactacatcgttgtagtgagcagg

SEQ ID NO: 24395 - DNA, 30 bp, Homo sapiens
  chr10:88702780-88702810
  hypo
tggcgggcctcggccgcggccgccttcagc

SEQ ID NO: 24396 - DNA, 31 bp, Homo sapiens
  chr10:89420153-89420184
  hypo
ttctgccaggtctggtcgctggggttttgtc

SEQ ID NO: 24397 - DNA, 30 bp, Homo sapiens; identical to SEQ ID NO: 7476
  chr10:89692890-89692920
  hypo

SEQ ID NO: 24398 - DNA, 30 bp, Homo sapiens; identical to SEQ ID NO: 7477
  chr10:89717657-89717687
  hypo

SEQ ID NO: 24399 - DNA, 43 bp, Homo sapiens
  chr10:90029837-90029880
  hypo
gagtcatttctttaagccagccgggaacatgagtcttctaaac

SEQ ID NO: 24400 - DNA, 37 bp, Homo sapiens; identical to SEQ ID NO: 7482
  chr10:91295628-91295665
  hypo

SEQ ID NO: 24401 - DNA, 31 bp, Homo sapiens; identical to SEQ ID NO: 7483
  chr10:91295738-91295769
  hypo

SEQ ID NO: 24402 - DNA, 30 bp, Homo sapiens; identical to SEQ ID NO: 7486
  chr10:92617414-92617444
  hypo

SEQ ID NO: 24403 - DNA, 137 bp, Homo sapiens
  chr10:93567139-93567276
  hypo
gaggtaaagcttctcggcagcgcggctgaactcctcccaggtctggtactgcggcatcgtggcctagagtggaaaagtaaagagaagcaaggcctcagaacccggcccaacaaactacctacgtccgggagtcgcca

SEQ ID NO: 24404 - DNA, 215 bp, Homo sapiens
  chr10:93572697-93572912
  hypo
ttccttgttgaacttacgtgtggacaatttgttttcatctaggttttgggcggaaagacgtagttgaatatttgcttcagaatggtgcaaatgtccaagcacgtgatgatgggggccttattcctcttcataatgcatgctcttttggtcatgctgaagtagtcaatctccttttgcgacatggtgcagaccccaatgctcgagataattggaat

SEQ ID NO: 24405 - DNA, 709 bp, Homo sapiens; identical to SEQ ID NO: 7490
  chr10:93647031-93647740
  hypo

SEQ ID NO: 24406 - DNA, 18 bp, Homo sapiens
  chr10:93682877-93682895
  hypo
gagcgaaactcggtcaaa

SEQ ID NO: 24407 - DNA, 223 bp, Homo sapiens
  chr10:93811936-93812159
  hypo
ctccagtacttgtggctgggtcggcccgtggctcagctccagcggaacgggacgtgacgagggcggtcgcctccctccttcaccagcggtttgtggaactcccgcccggctcgggaatgtatgctcgcccagcagtattcacagtaatactgcagacaggtgacgttggcacagaagaacggggcaaacttcccaccacagcgtgtgccctggcactcatcac

SEQ ID NO: 24408 - DNA, 38 bp, Homo sapiens
  chr10:93843637-93843675
  hypo
tctccaaaaaatcttcaggatcgccgggcacggtggct

SEQ ID NO: 24409 - DNA, 38 bp, Homo sapiens
  chr10:94310595-94310633
  hypo
cagcctggcaacagagcgagactcggtctcaaaaaata

SEQ ID NO: 24410 - DNA, 30 bp, Homo sapiens
  chr10:94429554-94429584
  hypo
gaccccggctgcagcgctgctcctgccggt

SEQ ID NO: 24411 - DNA, 203 bp, Homo sapiens; identical to SEQ ID NO: 7494
  chr10:94450516-94450719
  hypo

SEQ ID NO: 24412 - DNA, 1136 bp, Homo sapiens; identical to SEQ ID NO: 7499
  chr10:94833812-94834948
  hypo

SEQ ID NO: 24413 - DNA, 61 bp, Homo sapiens; identical to SEQ ID NO: 7504
  chr10:96122755-96122816
  hypo

SEQ ID NO: 24414 - DNA, 52 bp, Homo sapiens; identical to SEQ ID NO: 7506
  chr10:96162364-96162416
  hypo

SEQ ID NO: 24415 - DNA, 436 bp, Homo sapiens; identical to SEQ ID NO: 7507
  chr10:96162849-96163285
  hypo

SEQ ID NO: 24416 - DNA, 38 bp, Homo sapiens
  chr10:97118424-97118462
  hypo
tcacacacacacacacagacacgcacatgcacagacat

SEQ ID NO: 24417 - DNA, 30 bp, Homo sapiens; identical to SEQ ID NO: 7509
  chr10:97208010-97208040
  hypo

SEQ ID NO: 24418 - DNA, 59 bp, Homo sapiens; identical to SEQ ID NO: 7510
  chr10:97321333-97321392
  hypo

SEQ ID NO: 24419 - DNA, 30 bp, Homo sapiens; identical to SEQ ID NO: 7511
  chr10:97659562-97659592
  hypo

SEQ ID NO: 24420 - DNA, 367 bp, Homo sapiens
  chr10:98129780-98130147
  hypo
tcatcacactctgccccggccccagcgtctccgggacttaccccagagccacagaagcggccgagcctgggcgctgagctgtcgtagccgtcgtaggcttccatgtagtcgtagccgcagtcggcctcctcctcaacctcaaaggtccggaatgtcagctccacgccgtagccgtcctctgccacgatcacccagtcacagcgggcctcgctcgggtagttgttgtccccaaactgggcgtgggaatagagctctttggtctgcacttcagccttcagcctgcccccgcactctggagcagagagaagtgagatgtcccctcagcacaagacaccctcgtgcctcccgcctgcgtctgctcggcttt

SEQ ID NO: 24421 - DNA, 137 bp, Homo sapiens
  chr10:98350861-98350998
  hypo
caggtttcctggcttccgaaacaatctcttccctataccatgctaactcttactgcagagatagcaaagacattttatcctaaatgggctttggcgactagcctaaatattaaatttgaactcaattgaacatggac

SEQ ID NO: 24422 - DNA, 31 bp, Homo sapiens
  chr10:98403875-98403906
  hypo
cactgccccctgggggcgtttggaaaatcta

SEQ ID NO: 24423 - DNA, 30 bp, Homo sapiens
  chr10:98469537-98469567
  hypo
ggacagcagcaccacgacacagcgggtgct

SEQ ID NO: 24424 - DNA, 11 bp, Homo sapiens
  chr10:98526508-98526519
  hypo
aagaattatga

SEQ ID NO: 24425 - DNA, 30 bp, Homo sapiens
  chr10:98645908-98645938
  hypo
acaggtatgagccaccgtacctggctaaag

SEQ ID NO: 24426 - DNA, 30 bp, Homo sapiens
  chr10:98740820-98740850
  hypo
tctgtagatttgttcgtagactcgtcagac

SEQ ID NO: 24427 - DNA, 23 bp, Homo sapiens
  chr10:99042885-99042908
  hypo
cacccgcccggctgttactatgt

SEQ ID NO: 24428 - DNA, 82 bp, Homo sapiens
  chr10:99206758-99206840
  hypo
tccggccttttcccggttttttaaactgcagcttccagtcctgcggtccgatcctcttcgcggcccctcatccccacttcag

SEQ ID NO: 24429 - DNA, 30 bp, Homo sapiens
  chr10:99330432-99330462
  hypo
gcgccaccagttcccggtacccagggagca

SEQ ID NO: 24430 - DNA, 30 bp, Homo sapiens
  chr10:99331793-99331823
  hypo
ggcttagtgctttccggagacccctttctt

SEQ ID NO: 24431 - DNA, 31 bp, Homo sapiens
  chr10:99375942-99375973
  hypo
attcatttgttcacctcgaatcaacaacagg

SEQ ID NO: 24432 - DNA, 23 bp, Homo sapiens
  chr10:99449195-99449218
  hypo
acagcgcccggcccgttaaaaag

SEQ ID NO: 24433 - DNA, 22 bp, Homo sapiens
  chr10:99451149-99451171
  hypo
aatggtacaagctgggcgccgt

SEQ ID NO: 24434 - DNA, 30 bp, Homo sapiens
  chr10:99481793-99481823
  hypo
acagccatgagcaaccgcgccggacctctc

SEQ ID NO: 24435 - DNA, 181 bp, Homo sapiens
  chr10:99626198-99626379
  hypo
aagagacatagccatgcggggcctgaatctcctgaactacagccagtttcctgagattagaacctgtgtgtatgcacatgtgaatgtatgtgtgagtgcacatgtgtgtaagtgcagtgtgcgtaaatgtgtgagtctgcgtgtgttagcatgcctgtatgtgagcgcgtgtgtgagcgca

SEQ ID NO: 24436 - DNA, 16 bp, Homo sapiens
  chr10:99790437-99790453
  hypo
cgcggcagctggagcc

SEQ ID NO: 24437 - DNA, 13 bp, Homo sapiens
  chr10:99790746-99790759
  hypo
aggccggagggaa

SEQ ID NO: 24438 - DNA, 260 bp, Homo sapiens; identical to SEQ ID NO: 7527
  chr10:99790917-99791177
  hypo

SEQ ID NO: 24439 - DNA, 31 bp, Homo sapiens
  chr10:100078103-100078134
  hypo
ttgctatggcagctgtcggaaatggatccag

SEQ ID NO: 24440 - DNA, 175 bp, Homo sapiens
  chr10:100170636-100170811
  hypo
gctgctgagagccacacgcccagggccagtgaagtgggatcaagtggggaggtactcacagccaccagtccgttgtgtcctgcaacaaaacgggacagggaaggaaaacatcactggtcagcgggcgggcagacagacagtccttgaggaatgtgctccccgctgcccgtcccca

SEQ ID NO: 24441 - DNA, 143 bp, Homo sapiens
  chr10:100171091-100171234
  hypo
gctggcatgctgctgcgccaacgtcccgtctcgcatggcagcatcagcatccaggggagtgctggtcatgtaggtagttgctatcaagcgcggcttgttttgtccacgtgtggttcacaatcggcacagtggtgccctagaag

SEQ ID NO: 24442 - DNA, 267 bp, Homo sapiens
  chr10:100178669-100178936
  hypo
ctagcacttctgttgtacacacgtcctgggcacttctgagggcacggaggaaagctgggagcctgcaggccgggggagcagagcttgggctccggcttcctcacttacagcctcggtggccctggccatggcgtctgatctccggatcattgtgtctccatccgtacaacggggtcaggaatccctgccccagccactttacagggctgtgagggggtaactgagagaacagtggtggagagccccagtaaccgccctgccctatgg

SEQ ID NO: 24443 - DNA, 9 bp, Homo sapiens
  chr10:101493072-101493081
  hypo
taaaaataa

SEQ ID NO: 24444 - DNA, 30 bp, Homo sapiens; identical to SEQ ID NO: 7546
  chr10:102430769-102430799
  hypo

SEQ ID NO: 24445 - DNA, 31 bp, Homo sapiens; identical to SEQ ID NO: 7553
  chr10:102484026-102484057
  hypo

SEQ ID NO: 24446 - DNA, 153 bp, Homo sapiens; identical to SEQ ID NO: 7554
  chr10:102484092-102484245
  hypo

SEQ ID NO: 24447 - DNA, 292 bp, Homo sapiens; identical to SEQ ID NO: 7555
  chr10:102484269-102484561
  hypo

SEQ ID NO: 24448 - DNA, 357 bp, Homo sapiens; identical to SEQ ID NO: 7565
  chr10:102586048-102586405
  hypo

SEQ ID NO: 24449 - DNA, 254 bp, Homo sapiens
  chr10:102766371-102766625
  hypo
gggtcagtgagggccgtgcgcggggtctacaggaggccgcccgagctcgggagctggagctggaagcctgttcccaggagctgcagcgacaccgccaggaagctgagcagctgcgggagaaagctgggcagttggatgctgaggcggccggactccgggagccccctgtgccacctgccaccgctgacccattcctcctggcagagagtgatgaggccaaagtgcagcgggcagcagccggggttgggggcagc

SEQ ID NO: 24450 - DNA, 361 bp, Homo sapiens; identical to SEQ ID NO: 7576
  chr10:102822533-102822894
  hypo

SEQ ID NO: 24451 - DNA, 62 bp, Homo sapiens
  chr10:102872321-102872383
  hypo
gtgggcaggagggctgcggcagtgaggagagccttgatttggacaggcgtctcacattgagg

SEQ ID NO: 24452 - DNA, 58 bp, Homo sapiens; identical to SEQ ID NO: 7583
  chr10:102973586-102973644
  hypo

SEQ ID NO: 24453 - DNA, 780 bp, Homo sapiens; identical to SEQ ID NO: 7584
  chr10:102976889-102977669
  hypo

SEQ ID NO: 24454 - DNA, 438 bp, Homo sapiens; identical to SEQ ID NO: 7586
  chr10:102989800-102990238
  hypo

SEQ ID NO: 24455 - DNA, 31 bp, Homo sapiens
  chr10:103002233-103002264
  hypo
tgcagccaatcaatcccgtcactctgggggg

SEQ ID NO: 24456 - DNA, 203 bp, Homo sapiens; identical to SEQ ID NO: 7591
  chr10:103348787-103348990
  hypo

SEQ ID NO: 24457 - DNA, 30 bp, Homo sapiens
  chr10:103411731-103411761
  hypo
aatcaaagattcaccggccctttcaaatcc

SEQ ID NO: 24458 - DNA, 31 bp, Homo sapiens
  chr10:103425892-103425923
  hypo
tccattttccactctccgctcccacacactt

SEQ ID NO: 24459 - DNA, 11 bp, Homo sapiens
  chr10:103548965-103548976
  hypo
gaaaatgaggc

SEQ ID NO: 24460 - DNA, 22 bp, Homo sapiens
  chr10:103549449-103549471
  hypo
gccaggcacagtggctcgtgct

SEQ ID NO: 24461 - DNA, 74 bp, Homo sapiens
  chr10:103553396-103553470
  hypo
attaaaatgctgtgcgacctgcaaagaaacaatgtgaagtgtatacctagagccgctgcgcttcgcaggcgcgg

SEQ ID NO: 24462 - DNA, 31 bp, Homo sapiens
  chr10:103606761-103606792
  hypo
tctgagccaaaggtcccgatgactggacaaa

SEQ ID NO: 24463 - DNA, 30 bp, Homo sapiens
  chr10:103869733-103869763
  hypo
gccacgtctttatccgcatcatgtcgtcaa

SEQ ID NO: 24464 - DNA, 43 bp, Homo sapiens
  chr10:103897006-103897049
  hypo
aatcgcttgaacccaggagaccgaacccatgagtgtcatgggg

SEQ ID NO: 24465 - DNA, 7 bp, Homo sapiens
  chr10:103930134-103930141
  hypo
accgcgc

SEQ ID NO: 24466 - DNA, 61 bp, Homo sapiens; identical to SEQ ID NO: 7600
  chr10:104170201-104170262
  hypo

SEQ ID NO: 24467 - DNA, 248 bp, Homo sapiens; identical to SEQ ID NO: 7601
  chr10:104170407-104170655
  hypo

SEQ ID NO: 24468 - DNA, 35 bp, Homo sapiens
  chr10:104230569-104230604
  hypo
tatgatggcttcctgacgctcgtggacctgcacca

SEQ ID NO: 24469 - DNA, 240 bp, Homo sapiens
  chr10:104239033-104239273
  hypo
ggcaatgtggtttgtgcgaggctgtgcgagggacaggcttgggctaagagaagggaggtgagttggttaagcgcactgcagtccgcggggcgctacgttgctttcacacatacctgctgctgtggcccacacctggcaggggcctttggtcataggacggcgtgggggagaatactgtgtgaagtctgggattggggtgggtcttggtgtcacaggtgagggtgccggtgaagacaggct

SEQ ID NO: 24470 - DNA, 527 bp, Homo sapiens
  chr10:104416698-104417225
  hypo
ccctggggccctgcagctccacgcagcacttggtggccctgccgggcggcgcccaaccagtgcactcaagccccgtgttccccccatcgcagtatcccaatggctccgccgcccagcagcccatgctcccccagtatggcggccgcaagattctcgtctgttctgtggacaactgttactgttcttccgtggccaaccatggcggccaccagccctacccccgctccggccactttccctggacagtgccctcgcaggagtactcacacccgctcccgcccacaccctccgtcccccagtcccttcccagcctggcggtcagagactggcttgacgcctcccagcagcccggccaccaggatttctacagggtgtatgggcagccgtccaccaaacactacgtgacgagctaacgccacgcaggcggcggggcgctggggaatcttcctccccagcccccgggctcgggagttatgcatccagagacctgcccttctaccttcctcgcctcccctcttcctcattcc

SEQ ID NO: 24471 - DNA, 30 bp, Homo sapiens
  chr10:104455554-104455584
  hypo
tgagccatcgcaccaggcctgatttaaaat

SEQ ID NO: 24472 - DNA, 19 bp, Homo sapiens
  chr10:104581680-104581699
  hypo
ggagttttgctcttgtcgc

SEQ ID NO: 24473 - DNA, 30 bp, Homo sapiens
  chr10:104596875-104596905
  hypo
cagctggtggtggccgacaatcactgtagt

SEQ ID NO: 24474 - DNA, 30 bp, Homo sapiens
  chr10:104837126-104837156
  hypo
gtgaagttggcagccggggcatggcgttca

SEQ ID NO: 24475 - DNA, 30 bp, Homo sapiens
  chr10:104837439-104837469
  hypo
cccagtgggcatcaccgtcgatctcgctgg

SEQ ID NO: 24476 - DNA, 215 bp, Homo sapiens
  chr10:104837799-104838014
  hypo
ctcacagagtgtcgtcgcccacctccctggtccttgctcttgttaacccaagatgctgctacacagatgccaaatggaaatcttccacagggctttttcagtaaacacgtgatgtggagtgcaagctcctccccttcccactagaacatactttaacagaaaacgagtcggaccttctagctgcactctgtactgtgtgccgagaaggcatttct

SEQ ID NO: 24477 - DNA, 31 bp, Homo sapiens; identical to SEQ ID NO: 7607
  chr10:104951847-104951878
  hypo

SEQ ID NO: 24478 - DNA, 202 bp, Homo sapiens; identical to SEQ ID NO: 7608
  chr10:105036456-105036658
  hypo

SEQ ID NO: 24479 - DNA, 182 bp, Homo sapiens; identical to SEQ ID NO: 7609
  chr10:105036700-105036882
  hypo

SEQ ID NO: 24480 - DNA, 998 bp, Homo sapiens; identical to SEQ ID NO: 7610
  chr10:105036893-105037891
  hypo

SEQ ID NO: 24481 - DNA, 24 bp, Homo sapiens
  chr10:105119650-105119674
  hypo
taaaattgaacacagccgggcgtg

SEQ ID NO: 24482 - DNA, 30 bp, Homo sapiens
  chr10:105215408-105215438
  hypo
gctcttgaggaaggcggcctgcgtgaagca

SEQ ID NO: 24483 - DNA, 30 bp, Homo sapiens
  chr10:105216247-105216277
  hypo
ctcactgcagggcacggggcaggatgctcc

SEQ ID NO: 24484 - DNA, 30 bp, Homo sapiens
  chr10:105238595-105238625
  hypo
agaaacagggcgagcgggggcgtcagcagc

SEQ ID NO: 24485 - DNA, 77 bp, Homo sapiens
  chr10:105725849-105725926
  hypo
gttttaccctcaagggagtgtcgcagtcatcagttgagaagtgggggcccggcgcggtggctcacgccagtactttg

SEQ ID NO: 24486 - DNA, 30 bp, Homo sapiens
  chr10:106075721-106075751
  hypo
ctgtggcgttctcccgcgggaacagcagcg

SEQ ID NO: 24487 - DNA, 30 bp, Homo sapiens
  chr10:106094151-106094181
  hypo
tccatccaggttaccggatcatcctcttga

SEQ ID NO: 24488 - DNA, 1420 bp, Homo sapiens; identical to SEQ ID NO: 7617
  chr10:106399497-106400917
  hypo

SEQ ID NO: 24489 - DNA, 110 bp, Homo sapiens; identical to SEQ ID NO: 7618
  chr10:106401322-106401432
  hypo

SEQ ID NO: 24490 - DNA, 680 bp, Homo sapiens; identical to SEQ ID NO: 7619
  chr10:106401510-106402190
  hypo

SEQ ID NO: 24491 - DNA, 42 bp, Homo sapiens
  chr10:111674529-111674571
  hypo
ggtgaccaagggcgagactccgtctcaaaaaaaaaaaaaaaa

SEQ ID NO: 24492 - DNA, 135 bp, Homo sapiens
  chr10:111684021-111684156
  hypo
agagggttgtaccaccccacccgtgtggttacagcagccccccaaatatcccctcaccatcccgcacctgcacagtccagcctgaacaaagccgccagaccagtcctttgaagcgtgacaccaggtcacttcttt

SEQ ID NO: 24493 - DNA, 602 bp, Homo sapiens; identical to SEQ ID NO: 7633
  chr10:111767197-111767799
  hypo

SEQ ID NO: 24494 - DNA, 40 bp, Homo sapiens
  chr10:111946084-111946124
  hypo
ttaaagaaactgctggctgggcgtggtggctcatgcctgt

SEQ ID NO: 24495 - DNA, 31 bp, Homo sapiens
  chr10:112030559-112030590
  hypo
ggtgttggccggttgcggtggctcatgccta

SEQ ID NO: 24496 - DNA, 142 bp, Homo sapiens; identical to SEQ ID NO: 7639
  chr10:112327447-112327589
  hypo

SEQ ID NO: 24497 - DNA, 77 bp, Homo sapiens; identical to SEQ ID NO: 7640
  chr10:112328694-112328771
  hypo

SEQ ID NO: 24498 - DNA, 40 bp, Homo sapiens; identical to SEQ ID NO: 7641
  chr10:112333463-112333503
  hypo

SEQ ID NO: 24499 - DNA, 69 bp, Homo sapiens; identical to SEQ ID NO: 7642
  chr10:112335092-112335161
  hypo

SEQ ID NO: 24500 - DNA, 73 bp, Homo sapiens; identical to SEQ ID NO: 7643
  chr10:112337177-112337250
  hypo

SEQ ID NO: 24501 - DNA, 81 bp, Homo sapiens; identical to SEQ ID NO: 7644
  chr10:112337591-112337672
  hypo

SEQ ID NO: 24502 - DNA, 80 bp, Homo sapiens; identical to SEQ ID NO: 7645
  chr10:112338384-112338464
  hypo

SEQ ID NO: 24503 - DNA, 119 bp, Homo sapiens; identical to SEQ ID NO: 7646
  chr10:112340660-112340779
  hypo

SEQ ID NO: 24504 - DNA, 177 bp, Homo sapiens; identical to SEQ ID NO: 7647
  chr10:112341679-112341856
  hypo

SEQ ID NO: 24505 - DNA, 82 bp, Homo sapiens; identical to SEQ ID NO: 7648
  chr10:112342318-112342400
  hypo

SEQ ID NO: 24506 - DNA, 166 bp, Homo sapiens; identical to SEQ ID NO: 7649
  chr10:112343140-112343306
  hypo

SEQ ID NO: 24507 - DNA, 123 bp, Homo sapiens; identical to SEQ ID NO: 7650
  chr10:112343597-112343720
  hypo

SEQ ID NO: 24508 - DNA, 215 bp, Homo sapiens; identical to SEQ ID NO: 7651
  chr10:112343939-112344154
  hypo

SEQ ID NO: 24509 - DNA, 388 bp, Homo sapiens; identical to SEQ ID NO: 7652
  chr10:112349361-112349749
  hypo

SEQ ID NO: 24510 - DNA, 162 bp, Homo sapiens; identical to SEQ ID NO: 7653
  chr10:112350168-112350330
  hypo

SEQ ID NO: 24511 - DNA, 143 bp, Homo sapiens; identical to SEQ ID NO: 7654
  chr10:112350747-112350890
  hypo

SEQ ID NO: 24512 - DNA, 152 bp, Homo sapiens; identical to SEQ ID NO: 7655
  chr10:112352829-112352981
  hypo

SEQ ID NO: 24513 - DNA, 154 bp, Homo sapiens; identical to SEQ ID NO: 7656
  chr10:112356154-112356308
  hypo

SEQ ID NO: 24514 - DNA, 153 bp, Homo sapiens; identical to SEQ ID NO: 7657
  chr10:112357895-112358048
  hypo

SEQ ID NO: 24515 - DNA, 17 bp, Homo sapiens
  chr10:112359152-112359169
  hypo
actttttgttcttataa

SEQ ID NO: 24516 - DNA, 160 bp, Homo sapiens; identical to SEQ ID NO: 7658
  chr10:112359410-112359570
  hypo

SEQ ID NO: 24517 - DNA, 109 bp, Homo sapiens; identical to SEQ ID NO: 7659
  chr10:112360195-112360304
  hypo

SEQ ID NO: 24518 - DNA, 110 bp, Homo sapiens; identical to SEQ ID NO: 7660
  chr10:112360778-112360888
  hypo

SEQ ID NO: 24519 - DNA, 543 bp, Homo sapiens; identical to SEQ ID NO: 7661
  chr10:112361393-112361936
  hypo

SEQ ID NO: 24520 - DNA, 818 bp, Homo sapiens; identical to SEQ ID NO: 7662
  chr10:112362230-112363048
  hypo

SEQ ID NO: 24521 - DNA, 405 bp, Homo sapiens; identical to SEQ ID NO: 7663
  chr10:112363987-112364392
  hypo

SEQ ID NO: 24522 - DNA, 384 bp, Homo sapiens; identical to SEQ ID NO: 7664
  chr10:112403518-112403902
  hypo

SEQ ID NO: 24523 - DNA, 632 bp, Homo sapiens; identical to SEQ ID NO: 7665
  chr10:112431814-112432446
  hypo

SEQ ID NO: 24524 - DNA, 157 bp, Homo sapiens
  chr10:112524284-112524441
  hypo
taatgcagcaggaatggctcccggtggcatgtgactgcccttccaggcgggtatgccgtgctcaggcactgctctttctctttcgctccctccctccctcgcttgcataccccctccgctgcccctttccagactcgagagagtttgagtgaaggct

SEQ ID NO: 24525 - DNA, 30 bp, Homo sapiens
  chr10:112696771-112696801
  hypo
ggaagtggtaggggcgtcggaaagggttgg

SEQ ID NO: 24526 - DNA, 30 bp, Homo sapiens; identical to SEQ ID NO: 7669
  chr10:113005648-113005678
  hypo

SEQ ID NO: 24527 - DNA, 30 bp, Homo sapiens; identical to SEQ ID NO: 7670
  chr10:113134325-113134355
  hypo

SEQ ID NO: 24528 - DNA, 211 bp, Homo sapiens
  chr10:114200385-114200596
  hypo
acaattggaagaggatctctccgggctgcactcatgtcgatcttcactgtgttccacccaaaggagagctatcgcagcaacaatagcacacgcacaaaatgtttggttatggtaactggtcagactctactgtgacacgtaaaacaacttgatcaaagagataacaacgtggccctgtggccaacgcaaacacagctatttttattttatt

SEQ ID NO: 24529 - DNA, 220 bp, Homo sapiens
  chr10:114571438-114571658
  hypo
tctcaaaaaaaaaaaaaaaaaaaaaaaaaaaaagagtgcagtccatgcctggaagtagaggagaactggctattggagaacactcgtaatgcctgttccagtggaattcctgggctcctcgagcaagagcagagaactgtgccaggtgcagtgccgcgcctgtcccctgcactggaaccagccttctgtgattccggctgccacacgcaggagctcgttt

SEQ ID NO: 24530 - DNA, 225 bp, Homo sapiens
  chr10:114591692-114591917
  hypo
agaggctgaggtttcggccgctgtacactcagcagccccgcgctcttgccggccgacaccacagtgtgggaatcgagaatatcggcttcggcttggaatttaaggaggaggagagaaaaaggatagctcggctggtcttcaatgattttcttgtaaaacttttacaagggagacttaggctgtttgatgtgttctagacaatcaaatgcccgccgagtctgcggc

SEQ ID NO: 24531 - DNA, 34 bp, Homo sapiens; identical to SEQ ID NO: 7673
  chr10:114709863-114709897
  hypo

SEQ ID NO: 24532 - DNA, 31 bp, Homo sapiens
  chr10:114817202-114817233
  hypo
tataggcgtgagtcaccgagcctggccccag

SEQ ID NO: 24533 - DNA, 30 bp, Homo sapiens
  chr10:114867620-114867650
  hypo
ctatattggtcaagcgttgctggcaggggc

SEQ ID NO: 24534 - DNA, 31 bp, Homo sapiens
  chr10:115370274-115370305
  hypo
gacacatgcaacacctcgcataaagttcagg

SEQ ID NO: 24535 - DNA, 30 bp, Homo sapiens
  chr10:115671807-115671837
  hypo
cggttctcttaagtacgtgatttcgtgaag

SEQ ID NO: 24536 - DNA, 694 bp, Homo sapiens; identical to SEQ ID NO: 7675
  chr10:115804794-115805488
  hypo

SEQ ID NO: 24537 - DNA, 34 bp, Homo sapiens
  chr10:115925580-115925614
  hypo
tgggcaacagagcgagacactttgtctcaaaaaa

SEQ ID NO: 24538 - DNA, 82 bp, Homo sapiens
  chr10:116011527-116011609
  hypo
caggagttggcatggtcgtgatctctgaatgcagtgagcagaaaacctgtaatttttttttttttttttttttgagattcag

SEQ ID NO: 24539 - DNA, 22 bp, Homo sapiens
  chr10:116011848-116011870
  hypo
gccaccccgctggcctgttttt

SEQ ID NO: 24540 - DNA, 263 bp, Homo sapiens
  chr10:116045908-116046171
  hypo
gcctgacctggtctggagcctcgatggcattcccttccgtggtggccccaccctgacgggcagtgccttgcggcaggcggcagagcgtggcttcgggagcgccaccaggacaggccaggaccggccacgtagagtggtggttttgctcactgagtcacactccgaggatgaggttgcgggcccagcgcgtcacgcaagggcgcgagagctgctcctgctgggtgtaggcagtgaggccgtgcgggcagagctggaggagatca

SEQ ID NO: 24541 - DNA, 39 bp, Homo sapiens
  chr10:116282621-116282660
  hypo
tagctaggccaggtgcggtggctcacgcctgtaatccca

SEQ ID NO: 24542 - DNA, 900 bp, Homo sapiens; identical to SEQ ID NO: 7679
  chr10:116527433-116528333
  hypo

SEQ ID NO: 24543 - DNA, 30 bp, Homo sapiens; identical to SEQ ID NO: 7680
  chr10:116852455-116852485
  hypo

SEQ ID NO: 24544 - DNA, 31 bp, Homo sapiens; identical to SEQ ID NO: 7682
  chr10:117350835-117350866
  hypo

SEQ ID NO: 24545 - DNA, 31 bp, Homo sapiens
  chr10:118741274-118741305
  hypo
aaaccatgatctcagccgggtgcggtggctc

SEQ ID NO: 24546 - DNA, 31 bp, Homo sapiens; identical to SEQ ID NO: 7688
  chr10:118764376-118764407
  hypo

SEQ ID NO: 24547 - DNA, 756 bp, Homo sapiens; identical to SEQ ID NO: 7699
  chr10:118896662-118897418
  hypo

SEQ ID NO: 24548 - DNA, 579 bp, Homo sapiens; identical to SEQ ID NO: 7700
  chr10:118897478-118898057
  hypo

SEQ ID NO: 24549 - DNA, 405 bp, Homo sapiens; identical to SEQ ID NO: 7704
  chr10:119000749-119001154
  hypo

SEQ ID NO: 24550 - DNA, 185 bp, Homo sapiens; identical to SEQ ID NO: 7705
  chr10:119001328-119001513
  hypo

SEQ ID NO: 24551 - DNA, 100 bp, Homo sapiens
  chr10:119180986-119181086
  hypo
cttgggaggccttcccgcgtgtaatccccacttgctctgttggccctataaatatcaggtaactgtcatccacctactgctatatacttttttttttttt

SEQ ID NO: 24552 - DNA, 309 bp, Homo sapiens; identical to SEQ ID NO: 7706
  chr10:119256045-119256354
  hypo

SEQ ID NO: 24553 - DNA, 1661 bp, Homo sapiens; identical to SEQ ID NO: 7720
  chr10:119302458-119304119
  hypo

SEQ ID NO: 24554 - DNA, 155 bp, Homo sapiens; identical to SEQ ID NO: 7729
  chr10:119312935-119313090
  hypo

SEQ ID NO: 24555 - DNA, 30 bp, Homo sapiens
  chr10:119498852-119498882
  hypo
atgacagggtggtccgaaatagtaaaaata

SEQ ID NO: 24556 - DNA, 31 bp, Homo sapiens
  chr10:119904561-119904592
  hypo
tgcaaatacacacaagcgcacctcttttctc

SEQ ID NO: 24557 - DNA, 48 bp, Homo sapiens
  chr10:120011732-120011780
  hypo
catcaaatccaccaacgagccaacaattatggtcgaacacctggcttc

SEQ ID NO: 24558 - DNA, 31 bp, Homo sapiens
  chr10:120476537-120476568
  hypo
aagggactggtaatgacgcagattcctttgc

SEQ ID NO: 24559 - DNA, 17 bp, Homo sapiens
  chr10:120500413-120500430
  hypo
ggcgacagtgtgagatt

SEQ ID NO: 24560 - DNA, 53 bp, Homo sapiens
  chr10:120601876-120601929
  hypo
tcaggcaggagcccagcgcccccgggtgcagctgcagccgcccaaaccatggc

SEQ ID NO: 24561 - DNA, 30 bp, Homo sapiens; identical to SEQ ID NO: 7734
  chr10:120670186-120670216
  hypo

SEQ ID NO: 24562 - DNA, 94 bp, Homo sapiens
  chr10:120822533-120822627
  hypo
ctaggattagacgtgagccaccgcgcctagccaagatcacctttaacaaggtgacgtggattatccttccagtgtggcacgtttcttcagcttt

SEQ ID NO: 24563 - DNA, 65 bp, Homo sapiens
  chr10:120840485-120840550
  hypo
ggcctgtcctggatagcgttagggagacagttcacaggctcttcaatcttcgagcgagaattagg

SEQ ID NO: 24564 - DNA, 152 bp, Homo sapiens
  chr10:120926966-120927118
  hypo
aaagcaggggtttgtccgttgttcgctcttgtgcctggaaaacagcacctggtgcggggtaggcactcaaggatttactgaaacaacgagaaaatgtttccctatctgtcttgcccctaaaccgagttccttgagtgcggaaccagcatctt

SEQ ID NO: 24565 - DNA, 22 bp, Homo sapiens
  chr10:120937188-120937210
  hypo
ctccatgcgcttaaagcaacac

SEQ ID NO: 24566 - DNA, 31 bp, Homo sapiens
  chr10:121088294-121088325
  hypo
gcagggcggtgcttcccggccctggctaaac

SEQ ID NO: 24567 - DNA, 31 bp, Homo sapiens
  chr10:121128015-121128046
  hypo
cccactgtgaagctaccgaaatgggaggcat

SEQ ID NO: 24568 - DNA, 30 bp, Homo sapiens
  chr10:121172883-121172913
  hypo
tttcctgctgtgaacgttcacactcatgca

SEQ ID NO: 24569 - DNA, 132 bp, Homo sapiens
  chr10:121265439-121265571
  hypo
atgaaagtttaattagcgggatatcatatctgctttaagaacttggtttcgcttgtatatgaaaatcgctgaaagaaggtggaagcaccgccgtctctgaattgcggctctagaatgcgtcctctcttcaca

SEQ ID NO: 24570 - DNA, 71 bp, Homo sapiens
  chr10:121265789-121265860
  hypo
acagcagatgagcagacgaagcagctcaagtcagcccttgccccagagcgccaggacgggccacacagaag

SEQ ID NO: 24571 - DNA, 30 bp, Homo sapiens
  chr10:121266566-121266596
  hypo
tcccatcctgaccctcgtgaggcagatggc

SEQ ID NO: 24572 - DNA, 392 bp, Homo sapiens; identical to SEQ ID NO: 7735
  chr10:121301541-121301933
  hypo

SEQ ID NO: 24573 - DNA, 44 bp, Homo sapiens; identical to SEQ ID NO: 7736
  chr10:121356078-121356122
  hypo

SEQ ID NO: 24574 - DNA, 97 bp, Homo sapiens
  chr10:121429521-121429618
  hypo
tatccccagcctgggatgcagcgattccgaactgaggcggcagcagcggctcctcagaggtcccagtcacctctgcggggcatgccagaaaccactc

SEQ ID NO: 24575 - DNA, 28 bp, Homo sapiens
  chr10:121488642-121488670
  hypo
ttttgggggagggggaaagggcggggcg

SEQ ID NO: 24576 - DNA, 31 bp, Homo sapiens
  chr10:121507663-121507694
  hypo
agccaggtgtgccagccgtggcagggcaggc

SEQ ID NO: 24577 - DNA, 31 bp, Homo sapiens
  chr10:121508292-121508323
  hypo
gctcacggactccacccggaacctgcagctc

SEQ ID NO: 24578 - DNA, 175 bp, Homo sapiens
  chr10:121550360-121550535
  hypo
cttctcttaacatagccgtattcacgctcccacgcccttccttacccttgtcagctgtgcggcacttctcctgcagcccctaattactgcttcttcaagtttaactaatctccggacccaaagtgtatgttattaagctgatttcattagtgcatgtgagcgtaggaggagaggg

SEQ ID NO: 24579 - DNA, 62 bp, Homo sapiens
  chr10:121591476-121591538
  hypo
tatacacaagcttaccgaaacagcaataatggacgtgcgccacttaccgagccaccacgagc

SEQ ID NO: 24580 - DNA, 30 bp, Homo sapiens; identical to SEQ ID NO: 7739
  chr10:122216833-122216863
  hypo

SEQ ID NO: 24581 - DNA, 30 bp, Homo sapiens
  chr10:122393515-122393545
  hypo
ctgcaggacagggccggaggccagccagat

SEQ ID NO: 24582 - DNA, 31 bp, Homo sapiens
  chr10:122846742-122846773
  hypo
tgagaaccacgctgcccgtactcttctttgg

SEQ ID NO: 24583 - DNA, 35 bp, Homo sapiens
  chr10:123037579-123037614
  hypo
gggtacttattaagaaagtttcgggctgggcgcgg

SEQ ID NO: 24584 - DNA, 35 bp, Homo sapiens
  chr10:123037853-123037888
  hypo
tggagcaagactccgtctcaaaaaaaaaaaaaaaa

SEQ ID NO: 24585 - DNA, 85 bp, Homo sapiens
  chr10:123063522-123063607
  hypo
gacagagcaagactcagtactccccgaccccgaaaaaaaaggttgctccttctacttcaaagccgggaaacaataaaaaatggtg

SEQ ID NO: 24586 - DNA, 30 bp, Homo sapiens
  chr10:123532108-123532138
  hypo
cttctccagagaggcgaggaatccagaaac

SEQ ID NO: 24587 - DNA, 31 bp, Homo sapiens
  chr10:123706878-123706909
  hypo
cgtgagccactgtgcccggcctgcttcctat

SEQ ID NO: 24588 - DNA, 18 bp, Homo sapiens
  chr10:123880276-123880294
  hypo
tctttctttttttttttg

SEQ ID NO: 24589 - DNA, 31 bp, Homo sapiens
  chr10:123910387-123910418
  hypo
ggttgattctatgccacggactattcggaag

SEQ ID NO: 24590 - DNA, 43 bp, Homo sapiens
  chr10:123971194-123971237
  hypo
gccaagaagaagaagacgcccctaaagacgtaagttcaggggt

SEQ ID NO: 24591 - DNA, 40 bp, Homo sapiens
  chr10:123977731-123977771
  hypo
acacgtgtgagccaccgcgcctgaccgatttctaacagtt

SEQ ID NO: 24592 - DNA, 581 bp, Homo sapiens; identical to SEQ ID NO: 7749
  chr10:124134303-124134884
  hypo

SEQ ID NO: 24593 - DNA, 30 bp, Homo sapiens
  chr10:124138748-124138778
  hypo
cttttctctctgcagcgagatattttgata

SEQ ID NO: 24594 - DNA, 46 bp, Homo sapiens
  chr10:124712594-124712640
  hypo
catgactcttcttttttgagacggagtctggctctgtcgcccaggc

SEQ ID NO: 24595 - DNA, 378 bp, Homo sapiens; identical to SEQ ID NO: 7754
  chr10:124896154-124896532
  hypo

SEQ ID NO: 24596 - DNA, 215 bp, Homo sapiens
  chr10:125617036-125617251
  hypo
cagggaggcaggtgatgccagcgatggaaggcggcgtggagatggaaggcggcgtggagatggaaggcggcgtggagatggaaggcggcgtggagatggaaggcggcgtggagatggaaggcggcgtggagatggaaggcggcgtggagatggaaggcggcgtggagctgctgagttgaaggctagggcaaaacggagaagaacctgagcaatgc

SEQ ID NO: 24597 - DNA, 43 bp, Homo sapiens
  chr10:126101960-126102003
  hypo
aaagatattgttgaccaggtgcggtgactcatgcctataatcc

SEQ ID NO: 24598 - DNA, 30 bp, Homo sapiens; identical to SEQ ID NO: 7773
  chr10:126107522-126107552
  hypo

SEQ ID NO: 24599 - DNA, 30 bp, Homo sapiens; identical to SEQ ID NO: 7774
  chr10:126107766-126107796
  hypo

SEQ ID NO: 24600 - DNA, 30 bp, Homo sapiens
  chr10:126149556-126149586
  hypo
aaataatgtagcatcgagtggtattttata

SEQ ID NO: 24601 - DNA, 30 bp, Homo sapiens
  chr10:126185131-126185161
  hypo
ttcgccacataccccgtggacctgctgttc

SEQ ID NO: 24602 - DNA, 94 bp, Homo sapiens
  chr10:126190196-126190290
  hypo
tattctggaactggacagtgatgatggtggcacgacgttctgaatgtgctcgatgccagtgaattgaatactctggtcacggtcataaatttta

SEQ ID NO: 24603 - DNA, 30 bp, Homo sapiens
  chr10:126190715-126190745
  hypo
gagcagtgataaaaccgggaaatcaacact

SEQ ID NO: 24604 - DNA, 264 bp, Homo sapiens
  chr10:126198878-126199142
  hypo
cctggggtcctgagcgcactttggtatgcggagcccacaagctggcctggacaggcatcactgctccaggcagctgtgcacccagccggccctggcgtcccggcccccagcctccgcctccctcgccgacagcttcccggggctctgcctggaggcagcctcgctttatcccgcagaacctccacgctgttcctgcatgagaactcttcctccaagagaccacgttcctctggtcctgtctccgtgggccacatccacaaatgt

SEQ ID NO: 24605 - DNA, 31 bp, Homo sapiens
  chr10:126237288-126237319
  hypo
cgggcaggtggatcttcgagaatggagctcc

SEQ ID NO: 24606 - DNA, 143 bp, Homo sapiens
  chr10:126238652-126238795
  hypo
gggcctccgagccaggctcctcgttgcaaatggacttctctcctttgcgtgctgtgaactgggcgtgaacacctcctgtgatggggagctcactccttgccgagggagcctggtaagctgccggcacagtcatcctcataccc

SEQ ID NO: 24607 - DNA, 56 bp, Homo sapiens
  chr10:126265355-126265411
  hypo
tgcaaagccctgccctcgtgcacctgtccttccgtagcccacgatacctcatccag

SEQ ID NO: 24608 - DNA, 31 bp, Homo sapiens
  chr10:126276742-126276773
  hypo
gccacaggcacaacacgcgtccctcagcctt

SEQ ID NO: 24609 - DNA, 18 bp, Homo sapiens
  chr10:126287148-126287166
  hypo
gaggccagggccagcacg

SEQ ID NO: 24610 - DNA, 60 bp, Homo sapiens
  chr10:126287225-126287285
  hypo
ccatccctatccacctgtccaccctgatgcagttcctgccatccacgtgtccatctgtct

SEQ ID NO: 24611 - DNA, 31 bp, Homo sapiens
  chr10:126287859-126287890
  hypo
cacccatccacccaggcgagcacctgccatg

SEQ ID NO: 24612 - DNA, 31 bp, Homo sapiens
  chr10:126290723-126290754
  hypo
acgtgagcccagatttcgattcttgtgcgag

SEQ ID NO: 24613 - DNA, 30 bp, Homo sapiens
  chr10:126296156-126296186
  hypo
ctcttgttccctctcggggctggttgcttt

SEQ ID NO: 24614 - DNA, 31 bp, Homo sapiens
  chr10:126296748-126296779
  hypo
gatccagtgcctgtgccgggcttcctcccca

SEQ ID NO: 24615 - DNA, 31 bp, Homo sapiens
  chr10:126305775-126305806
  hypo
gtccccctgcctgctccgcaaccccagggcc

SEQ ID NO: 24616 - DNA, 31 bp, Homo sapiens
  chr10:126306137-126306168
  hypo
cggttcctgcccctctcggggaggttggctg

SEQ ID NO: 24617 - DNA, 59 bp, Homo sapiens
  chr10:126312439-126312498
  hypo
cagttctggggggctgcggtgaaacaggaatgctcctaacacttcgtccacagcctttc

SEQ ID NO: 24618 - DNA, 108 bp, Homo sapiens
  chr10:126314665-126314773
  hypo
ctgacgcccgaacgcgtgccagcgttttctgcgagctgtcatgtgaggggcctggggcgtggcctgctgcgagtgttttctgtggcctcgcacgtgaacgcagcagga

SEQ ID NO: 24619 - DNA, 218 bp, Homo sapiens
  chr10:126317367-126317585
  hypo
tgtccctcctcttgggcgggatcaagtcccacgtgctagtcacacttcgcagctcccaaagcaccaggctgagaagcgacttcagctgagcccacctctttcctgggcctctgcagttcatgggcttccctcgcctccctgaaggttcttgctgggagcatccctctctgtgtcactggcacgagaatccccggctcaggccccgcttctagagaccc

SEQ ID NO: 24620 - DNA, 31 bp, Homo sapiens
  chr10:126323262-126323293
  hypo
tatggcaacgtgaggacgcactaatacaccc

SEQ ID NO: 24621 - DNA, 191 bp, Homo sapiens
  chr10:126325796-126325987
  hypo
tgggcctcacagggtccgcaggtggcaggagacaaccagacatgccatgaggcagcgcaggtccaggacgtacctggcaggacgtgggtgcctggctttggctccagccgccttgtgctgggcatgccctggggaagtcttgcttgctctgggcccatctgcacaatgagggtcttcggcttgagccccgg

SEQ ID NO: 24622 - DNA, 307 bp, Homo sapiens
  chr10:126331964-126332271
  hypo
cccagggtttctcggcgcggtgattgcgcctggctctttcagcgtggctgcaggaatctatacaggtccacttaaatcagtctgaagctgtgaaagcctccatcactcgtcgcccgggcccggccgcccaaacagagccccgggagggccagcgggggggtgcagggctgggaggacagtgccaattaaaaatctgagcctgtgggcctttctctctcttgttttcattcctacagctacattgtgtccactggcagcggattccaaaggcgaagaggctgcattcacggcccggagctttagagcc

SEQ ID NO: 24623 - DNA, 31 bp, Homo sapiens
  chr10:126334816-126334847
  hypo
ctgtgtgagtgcagctcgctttctttaggca

SEQ ID NO: 24624 - DNA, 297 bp, Homo sapiens
  chr10:126370281-126370578
  hypo
cggctgcgggaaaggccgctggagcgtctcgccagctctggtgttgaggcaggtgtgctgttggctgagggaggacagtattccacaaaggaaaactgctcatgtgagcaagagagggaccgctgcaggtccagccggcctcctcccacggggtgcaggtcagggctccaggtgtcacctgcctgtccacacggggctgagcctggcaccccttggcagggctgccctccaaatcggtggtggagtcctgcctggtcgcagggtgaggagagcacgttggcccgggaagggaggctg

SEQ ID NO: 24625 - DNA, 29 bp, Homo sapiens
  chr10:126380993-126381022
  hypo
aaagcataggccaggcgcggtggctcatg

SEQ ID NO: 24626 - DNA, 2 bp, Homo sapiens
  chr10:126464744-126464746
  hypo
ct

SEQ ID NO: 24627 - DNA, 31 bp, Homo sapiens
  chr10:126497161-126497192
  hypo
gaaataccagacagtgcgagaagaattctat

SEQ ID NO: 24628 - DNA, 31 bp, Homo sapiens
  chr10:126667503-126667534
  hypo
aggccaataattccagcgccttgggaagctg

SEQ ID NO: 24629 - DNA, 30 bp, Homo sapiens
  chr10:126688777-126688807
  hypo
cttcccacccagaccgcggcggcgccactg

SEQ ID NO: 24630 - DNA, 91 bp, Homo sapiens
  chr10:126691141-126691232
  hypo
gtttaggggacacacacggcaggggtcatttaggggacgcacccagcaggggtggtttagaggacatgtggccagtcgcattctcccctct

SEQ ID NO: 24631 - DNA, 30 bp, Homo sapiens
  chr10:126694132-126694162
  hypo
gagtggacaggaagcgtgcagcacaaagct

SEQ ID NO: 24632 - DNA, 37 bp, Homo sapiens
  chr10:126709395-126709432
  hypo
gtgtggagggggtctgcgctgtcgagggggacacact

SEQ ID NO: 24633 - DNA, 31 bp, Homo sapiens
  chr10:126715119-126715150
  hypo
agccgggtctccagctcggggggatgctgtc

SEQ ID NO: 24634 - DNA, 962 bp, Homo sapiens
  chr10:126715487-126716449
  hypo
ggaaggtggacaggtcagcttcgtaagtctcgtaagccatcttggatgggatgctttcccgggcaggcccgtagccacgattcagggcccctggggccacccctgtgctgccttcgggggcagcagctgaactggggtccacaaccaggcacgtcggggccacctgtctggcaggggcagggtcaatgggtctttcgctgatgtcgctgaagacctggctgagggggtaggcaggcacctccgccccatacctggtgtcgggctgctcccgtccataccgcccgggagatgcagccctgctctgtgtctgccgcccctgagggatcattttacctccaggatcccggtacaggtgaccggcgtcctgcagggcaggtgaccggccttgcattggatcccatgacgttctgctgccaagcactccgtagctggggaccggccggctgactcctgggtcccgatagaggggaggctctttgggtaccctagcagctccagacggatcactgtagtactcccgtggcagcagggggctgcgaccagacatcactgcctgtctgctgtcgtagaaggtgaagtcaggagtagacccctttcttgcagccactgagttataaacggcctcccggtacaggtagggctcggcggccacgggcagggcagcgtcctgtggtcggtggtttggctcaaaccaagtcccctctgctgtgccatacgtcagggagcttctcctccccagaggccgcagggactcggcgttctcccaggggccctcgtaccacccagcagcatcccagctctgagaacgaccaatatttatatgcctgctgggaactggcattggaaaaaaaatgactgcggatgaggcagaggagaagcttttctttataaatcttcaattacatacatcaaaaacagacctggctgtgtgctaacccttccgagacggcagggacaaccaa

SEQ ID NO: 24635 - DNA, 31 bp, Homo sapiens
  chr10:126727934-126727965
  hypo
atgcacacaagacaatcgtcagttatttctg

SEQ ID NO: 24636 - DNA, 18 bp, Homo sapiens
  chr10:126732290-126732308
  hypo
aaccgtgcccggccgacc

SEQ ID NO: 24637 - DNA, 307 bp, Homo sapiens
  chr10:126732715-126733022
  hypo
agcctgggatcccaaacgacaggactcactcctggaaagcttccttcaccgcagcctacagggcctctcagtgcacccacaggctcatccaggagcctgtgcgaccactgtgccaagatgaggagacagcaacagtccaggcggtggtgacacccagctcttgcacacatagccgaggatcctgctggtgtggtgctggcggcacatctgcagatacggtgccagttaacagggccttgagaacgccagcccaccaatgacttctgcccagaaaacactctgacttttcatccggagttaacagcca

SEQ ID NO: 24638 - DNA, 90 bp, Homo sapiens
  chr10:126751062-126751152
  hypo
cacccgctggcagcacgcagcagaactcagcgcgaggggttagagttagggttagggtcgctgccatcagtaataaaaaatacggaggga

SEQ ID NO: 24639 - DNA, 262 bp, Homo sapiens
  chr10:126767710-126767972
  hypo
gtctcgaggaaaaaaaaaaaaaaaaaaaaaaggtggaaaaaccagcccctgatgggccaccaggagctttcgggagcctgcccgggatatcacccggctccaccatgtgtgacgctcctgctctaaagtacacggaggacacagggcacagcgcctttcacagccactggctcacatgccagtccacggttcccagcggtggcggcattcctctccagggaggaaaatgctacagaatattcaccaccggtcaattcatctg

SEQ ID NO: 24640 - DNA, 371 bp, Homo sapiens
  chr10:126771969-126772340
  hypo
agttcccaggacagggctgtccgaggacacaacactgacagccatgtgcagacccccgacctgggcgaggataccgccctctgagactcagtcgcctgtctacaaaaaaggaaaagataccacattaccgtgaccatctagtctaatgaaaatgccaccaggatcaaagaccataacgcaaagccctctgtttgcaccttagtccgaacaagcacccaggatacactcgctgttgtttgtttgtttgttttaaggcaggatctcactctgcctcccaggctggagtgcagtcttgacctcctggactccagccgtcctgccacgtcagcttctcaagtagctgtgactgtaggcacgcaccatcacaccca

SEQ ID NO: 24641 - DNA, 39 bp, Homo sapiens
  chr10:126772639-126772678
  hypo
gcgcctggccccagctacgttttttgattttttgtagag

SEQ ID NO: 24642 - DNA, 200 bp, Homo sapiens
  chr10:126775427-126775627
  hypo
aggccctcagggagggggctccgcctctagaacacaagttcagtgggagcgcggccactgcacctgcggatcctgaggaacagtccacgacacacacgtgcgcccacacacacgatctctgaatggatggatgactgagtctgaagagatcatgagccagccctgattcttcagccctaacttcaaccttgaaaggaaaa

SEQ ID NO: 24643 - DNA, 114 bp, Homo sapiens
  chr10:126789759-126789873
  hypo
acccagtgacctgaatctaaccgcctttcatgtgaagtggccgtgttcccggcctctcccagtgtggctctcgagagaaagcctcatgtcttcgtcctctccatggctggcctc

SEQ ID NO: 24644 - DNA, 31 bp, Homo sapiens
  chr10:126792359-126792390
  hypo
gtgtccgggaaagaggcgagcttcccccagg

SEQ ID NO: 24645 - DNA, 30 bp, Homo sapiens
  chr10:126810201-126810231
  hypo
cagaactgaattcccgggtccaaaatatat

SEQ ID NO: 24646 - DNA, 30 bp, Homo sapiens
  chr10:126819037-126819067
  hypo
gccacacgacttggacgcagctgctgttaa

SEQ ID NO: 24647 - DNA, 291 bp, Homo sapiens
  chr10:126819439-126819730
  hypo
acccagagagggcaaagggctcgctgtccaagctggagaaaatccctgggtatcgcctccgacccactgtatctcaaatacgatgtgtgttggctcggctcttccaaaaaccgaagccaagacacgatcagctctggaagagacttcttggggaggcagacaggcggggaggcagagggagacgcaagtctgacagcagatgcagatgagatggcagggaaggcaggaggctggggaggaggagtcttcacctgctgtccccggctgggagcagcccgcagagtgcaggct

SEQ ID NO: 24648 - DNA, 312 bp, Homo sapiens
  chr10:126830137-126830449
  hypo
agaagtcacaggagcacggaacaggaagcagggagacagcacacagtaagcacatggcaagcacacagtaaacacacggcaagtacatggcaaatacacagcaggtacacagcgagcacacagtaagcacacggtaaacactcagcaagtacatggcaaatgcacagcaggtacacagcgagcacacagtaagcacatggcaagcacacagtaaatacacagcaagcacacagcaagtacacagtgagcacgcggcaaacacacgacatgcacacggttagcacactgcccggctccctccaaagccacttc

SEQ ID NO: 24649 - DNA, 53 bp, Homo sapiens; identical to SEQ ID NO: 7776
  chr10:126847634-126847687
  hypo

SEQ ID NO: 24650 - DNA, 161 bp, Homo sapiens; identical to SEQ ID NO: 7779
  chr10:126849984-126850145
  hypo

SEQ ID NO: 24651 - DNA, 30 bp, Homo sapiens
  chr10:127451325-127451355
  hypo
tctagctctagagacggcagtacaacagtg

SEQ ID NO: 24652 - DNA, 30 bp, Homo sapiens
  chr10:127464222-127464252
  hypo
tcctacctgagcagcgtggaggtcggcaat

SEQ ID NO: 24653 - DNA, 260 bp, Homo sapiens
  chr10:127817215-127817475
  hypo
gtgggaatgtgtgcaagtgggcgcctgtgcgagtgtgtggtgtgtgtgtgggaatgtgtgcaagtgggcgcctgtgcgagtgtgtggtgcgtgtgtgggaatgtgtgcaagtgggcgcctgcccatgtgagtgtgtggtgcgcgtgtcggaatgtgtgcaagtggacgcctgcgcatgtgagtgtgtggtgcgtgtgggaatgtgtgcaagtgggcgcctgtgcgagtgtgtggtgcgcgtgtgggaatgtgtgcaagtg

SEQ ID NO: 24654 - DNA, 37 bp, Homo sapiens
  chr10:127937967-127938004
  hypo
ccttagaaaaccaacaccaggcggggcgccatggctc

SEQ ID NO: 24655 - DNA, 35 bp, Homo sapiens
  chr10:128767589-128767624
  hypo
gaacaccaggaggctgcgtgcgcctgaaattctgg

SEQ ID NO: 24656 - DNA, 31 bp, Homo sapiens
  chr10:128779078-128779109
  hypo
aatctcatgcaggaagcggtagctgggctgc

SEQ ID NO: 24657 - DNA, 38 bp, Homo sapiens
  chr10:128804955-128804993
  hypo
gctcaggctctgattgcgtttcccgcttgtttgctgcc

SEQ ID NO: 24658 - DNA, 255 bp, Homo sapiens
  chr10:128813791-128814046
  hypo
ttcaggcagctctgcctggagcgagcgggtcttcctatttcaaggaacggtgcccccgggacttgctagtggttgtgcctgcaaggggcaccgtctctgtaagctgcgcctcctcctaccccaactccccgtggttctgctgacttgaccttcacgctggtccctctcccaccctccatagtggcattcacgtcctgccagccagctaggatcatgcggtggcctccctgctgcgattccatccccactgtgctc

SEQ ID NO: 24659 - DNA, 31 bp, Homo sapiens
  chr10:128816348-128816379
  hypo
agaaaagagccgagagcggctggggctttgt

SEQ ID NO: 24660 - DNA, 31 bp, Homo sapiens
  chr10:128862778-128862809
  hypo
aacacaaatggaggacgcgtgggccagtttt

SEQ ID NO: 24661 - DNA, 39 bp, Homo sapiens
  chr10:128874461-128874500
  hypo
aaagatccattaagaaaatatcggccaggcacggtggct

SEQ ID NO: 24662 - DNA, 32 bp, Homo sapiens
  chr10:128891889-128891921
  hypo
ttacaggtgtgagccatcgcacccatggcctt

SEQ ID NO: 24663 - DNA, 205 bp, Homo sapiens
  chr10:128999160-128999365
  hypo
ctcaaaatggagtcgctgtggttcggatgcctctgacatctgcatattccaaagagactcatagatgagcccaacctaagtctgtgatgggcaggttacacccgtcagttcagaagctgtggtagcagatcagccagtgctcaacgcctacgagggaaaagtaactcatatcgccttcgacctgtagggtcgagatcattccctt

SEQ ID NO: 24664 - DNA, 132 bp, Homo sapiens
  chr10:129065862-129065994
  hypo
tttaagaattctcagagatcacgcgcacctcgtcgggagtgcctggctggtactgatgccgcatcccgctggcacttaatgccggaggaggcacttcatgttacgaggaccgaagccaagtgccctctctat

SEQ ID NO: 24665 - DNA, 31 bp, Homo sapiens
  chr10:129159705-129159736
  hypo
ctatcaaacaatagctcgaaaaggtagaatc

SEQ ID NO: 24666 - DNA, 213 bp, Homo sapiens
  chr10:129195395-129195608
  hypo
tgagcatcagttacacgggcagcgactcctatgtgatctgagcatgagttacacgggcagcgtctcctgtgatctgagcatcagttacacgggcagcgactcctatgtgatctgagcatgagttacacgggcggcgactcctatgtgatctgagcatgagttacacgggcggcaactcctatgtgatctgagcatgagttacacgggcggtgt

SEQ ID NO: 24667 - DNA, 365 bp, Homo sapiens
  chr10:129195667-129196032
  hypo
agttacatgggcagcgactcctatgtgatctgagcatgagttacaagggcagtgtctcctatgtgatctgagcatgagttacacgggcagcaactcctatgtgatctgagcatgagttacacgggcggtgtctcctatgtgatctgagcatgagttacatgggcagtgtgtcctttgtgatctgagcatgagttacacgggcagcgtctcctatgtgatctgagcatgagttacacgggcagcgactcctatgtgatctcagcagcgtctcctgcatgacacaggtagtagctcctctatgacccgggcagcgactcctgtgtgacccgggcagcgactcctgtatgacacgggcagcgactcct

SEQ ID NO: 24668 - DNA, 197 bp, Homo sapiens
  chr10:129236891-129237088
  hypo
catttctttgcattgacgtctatttttccccattaaaaaatagacaaaatatttctatataaatctctaaaagacgagggttccccttttgaaatatgccctaaataccatcctcccatcgtaaatgaacaattccttaatatcatcatcaaatatccggtcagacttcacatttgccctatcgtgctaagtgttct

SEQ ID NO: 24669 - DNA, 58 bp, Homo sapiens
  chr10:129237714-129237772
  hypo
tccgcagggcctggggcgaggccgctctgctgctaggctctgccgctctgttggactt

SEQ ID NO: 24670 - DNA, 777 bp, Homo sapiens
  chr10:129245251-129246028
  hypo
tgcaggggcctggcttggcttcgaaagcagtagcagcagcagcggagacggtcctgtggcacccagctgtttaacttccaccgaggcagggggcccgagcagggacagaagaggccggggtgaacatcaccctttctacagtggctcgatgccttgcttcacactccagttttagtgttcgtgtgatacttgctattctctttctagaacattgccgttaggagagggtcccaccctttgtgttcgctccctccctgccctcatctgctctgttgacaaacgttttctgccagatgaagtgtttctgctgtgcctgcctctctgggagggaacgtggagcagctccctgagcattcaggctccgtggggaagtcgggctgattttaaatagatcccggttttccaggcttggagctgaacggcatgacgggggcggacgtggccgatgtcccaccccctctgcctctcaaaggcagcgtggcagattacgggaatttgatggaaaaccaggacttgctgggctcgccaacacctccacctccccctccacaccagagggtaagtcggcaatctgaaacacaggctttcattgcttcgcctccacaaagtaggacgagtccctcattccagatactagcaggtttacttcgggctagtgagcacatgaggaaaaccatgtatgatgggcccgggtttgattttgcaaaaagatatcgaagcagtaaggactccagtgggtaagatctgtggctctgcgtcattatcaataactgcatc

SEQ ID NO: 24671 - DNA, 223 bp, Homo sapiens
  chr10:129907593-129907816
  hypo
tctctaatacactgccgtcttaagggagggcttgcagagcatttatcagatggctgttttgctgcattctgtgcactgaagaacacatttcctcctgaaataaaaacatacacaataaaaacattctattagtgtctcatgtcaatcgagtattacagcctcataaaatatggtaaaaaactaaatatttagcttcgtattcactgaacgacatgaggctact

SEQ ID NO: 24672 - DNA, 30 bp, Homo sapiens
  chr10:129964196-129964226
  hypo
gcagggcagggcaccgccttggcagtgcag

SEQ ID NO: 24673 - DNA, 31 bp, Homo sapiens; identical to SEQ ID NO: 7794
  chr10:130009066-130009097
  hypo

SEQ ID NO: 24674 - DNA, 30 bp, Homo sapiens; identical to SEQ ID NO: 7795
  chr10:130009107-130009137
  hypo

SEQ ID NO: 24675 - DNA, 284 bp, Homo sapiens
  chr10:130203289-130203573
  hypo
cccaggtcaacaggaccccctcgcacagcggtgtgatgtgtaagctgcacaacatcagggcgggagttgatgtggcccacagtgtgaacggcgccctccaagatgagcagtgtgatgctccgcagagtcgtagacaggaaaagtggaggctgaagtgggaccggacagcactggcacggcttgactttggcaatggacaacagggaaaatggaggcgcaggtgagaaaggaaggcaggtgaagcgcccgactcactccaagccgggggtctgaatcagatctgc

SEQ ID NO: 24676 - DNA, 217 bp, Homo sapiens
  chr10:130300170-130300387
  hypo
gtgacctctggctcaaagacacgagctgagaggatgggcgtgtcctggaaatcatcacacggacattctccgcgtggatagcgctctttgtccaatcattactgggacgttctccgcgtggatagcgctttctgtccaataatcactcggacgttctccacatggatagcgctttctgtccaatcatcactcggacgttctccacatggatagcatt

SEQ ID NO: 24677 - DNA, 30 bp, Homo sapiens
  chr10:131264297-131264327
  hypo
gcttatgccaaccacgttagagacaatggt

SEQ ID NO: 24678 - DNA, 190 bp, Homo sapiens
  chr10:131566933-131567123
  hypo
ggggcctggtggcccgggtgtgcgagccgcgagtgctttccaacagagggcaccagagccgtgcggtgtgctgtggagaccccagcaccacttcccctgctggaggatggatttgaaggagggtggctgggcggcaccccgatggctccctgtgctccctgagaccctacaggccgccctctgcagccac

SEQ ID NO: 24679 - DNA, 30 bp, Homo sapiens
  chr10:131577726-131577756
  hypo
gtcggcgctgaattcgagccatggttgaaa

SEQ ID NO: 24680 - DNA, 393 bp, Homo sapiens
  chr10:131638467-131638860
  hypo
agaggacccagcactggcccacggccccgcaccaccctcaccttgcagtccattcccgttggcgctggtgcaggaaggaggaggagaggcttggggccggaccacgggcgcgaaggcgctcttctgtttcactgcggagatgacattggcaggtgagaatgagaaaatgccgtgtgtgctgctacagtttgaagggagggtgaccgaagaggctgccatggtggggctggacggcactactgcaacaaagcaaacacggtcagcacgcgcggccgcggcacagcgccacggcgagagggcaccaaaggcctcgcctcggacgggggggcaggggcacgaaaacaaaacatgacatgcgtctggctcggccacgctctggataacaggcaagct

SEQ ID NO: 24681 - DNA, 231 bp, Homo sapiens
  chr10:131647713-131647944
  hypo
ttagtaatttgatgattaacacgccccacctcagcaggtgtgcaaggtgcgggggcggacacaaagactgcggcttccggagaggacggctagggggccgcctttgcaagtgctctccaaaataattggtcaccgttctcgagtgcttgggcgtcggcgcatcttgtaagcaacgcaggaagcctcgcacgtacactcaataatgcgcccgaaagttgaggaccacaatat

SEQ ID NO: 24682 - DNA, 30 bp, Homo sapiens
  chr10:131686724-131686754
  hypo
tgttcacaaggccgcggaggcccagtccca

SEQ ID NO: 24683 - DNA, 238 bp, Homo sapiens; identical to SEQ ID NO: 7800
  chr10:131757614-131757852
  hypo

SEQ ID NO: 24684 - DNA, 178 bp, Homo sapiens; identical to SEQ ID NO: 7802
  chr10:131763158-131763336
  hypo

SEQ ID NO: 24685 - DNA, 92 bp, Homo sapiens; identical to SEQ ID NO: 7803
  chr10:131763632-131763724
  hypo

SEQ ID NO: 24686 - DNA, 847 bp, Homo sapiens; identical to SEQ ID NO: 7804
  chr10:131769490-131770337
  hypo

SEQ ID NO: 24687 - DNA, 31 bp, Homo sapiens
  chr10:131821309-131821340
  hypo
cactggggggccctgccggtctggctctggc

SEQ ID NO: 24688 - DNA, 30 bp, Homo sapiens
  chr10:131825391-131825421
  hypo
acactgtccccagccggaggccaccgctgc

SEQ ID NO: 24689 - DNA, 254 bp, Homo sapiens
  chr10:131844309-131844563
  hypo
gggctcagggcagacggaacgtggaacagggagtggctcagggcatggggatggggcggggcgtgggacggggcgtggcgtggggcacaggaaggggcagggcacgaggagtggggcgagaggtgctaagtggggcctgagtggggcgcggggcgtggcgcggagtggggtggagcgggtggggcgaggctcggcgtgggacacgagggacgggacgcgggggcacggcaatgggtggcgcagggcgcactctc

SEQ ID NO: 24690 - DNA, 76 bp, Homo sapiens
  chr10:131936597-131936673
  hypo
caggcttgagcccccgtgacctgccctgttgatctaaattgagtgaaattttgccgactgaatttgaattagaggc

SEQ ID NO: 24691 - DNA, 30 bp, Homo sapiens
  chr10:132365760-132365790
  hypo
cacatgtgcggggccggggaagtggaggct

SEQ ID NO: 24692 - DNA, 193 bp, Homo sapiens
  chr10:132992256-132992449
  hypo
ttgagattctgataatgttgccgcattggccatctcacgcactgtgctgattaatagccacacctccaacccccagcggcgtgcctaggcttccggcactccggccacaccacacggcatggagctttgacccgtgccaaagcagtgggaatgcgtgtcttcataaaggttcgctttgctttttgttgctcca

SEQ ID NO: 24693 - DNA, 209 bp, Homo sapiens
  chr10:133058384-133058593
  hypo
cagccgaatgtttccctcaaccggagccgggcttcaggtcccacagcgcctgggcccaggccaggggcatctaaccaggaagcctccgcgcgctcgctaaggcagcaccaggcgtcgggacggcgctccgagcctacctgagacgggggacgtccggaggggtattttgatgggtgccaaggtcaggaagtggcgcggctgcacgctgg

SEQ ID NO: 24694 - DNA, 114 bp, Homo sapiens; identical to SEQ ID NO: 7808
  chr10:133110553-133110667
  hypo

SEQ ID NO: 24695 - DNA, 30 bp, Homo sapiens
  chr10:133448522-133448552
  hypo
ccctaatctacctccgtgtcccaccactgc

SEQ ID NO: 24696 - DNA, 90 bp, Homo sapiens
  chr10:133557717-133557807
  hypo
gccccagagctggactcggtccatgactggggagccagcctgtagcactgcacggggcatgatgccggagtgtcacgaagtgggaaatgg

SEQ ID NO: 24697 - DNA, 384 bp, Homo sapiens
  chr10:133783037-133783421
  hypo
acgcacacgggagggcgaggtggagacacgggcagcgctcaggtcccggcccaggaaactcagtggcttttatcccgtttccttcaaccccagatgtgagccctctggccaacctacctaacccacctgcccccagtggcattccggtctttccagtctgtccaacacacggcagccacagaacactgtctgcacgccaggactagagccctcctccccgctgagaggctgggaccagcccgaggaggagccgttttggcttcccgctctggctcttcaccaccgctgcggcgaacgctcttcagaacccacagcggcgcctgcctggtctctgtgttttctgcagggtgagtgagtataagcagccaggaaaggccaggcgcg

SEQ ID NO: 24698 - DNA, 35 bp, Homo sapiens
  chr10:133790490-133790525
  hypo
acacttattggcacagcggttcatgcctgtaatcc

SEQ ID NO: 24699 - DNA, 571 bp, Homo sapiens; identical to SEQ ID NO: 7811
  chr10:133795312-133795883
  hypo

SEQ ID NO: 24700 - DNA, 83 bp, Homo sapiens; identical to SEQ ID NO: 7812
  chr10:133795975-133796058
  hypo

SEQ ID NO: 24701 - DNA, 30 bp, Homo sapiens
  chr10:133797312-133797342
  hypo
atgagtttctacttcgtggaaagggtttat

SEQ ID NO: 24702 - DNA, 152 bp, Homo sapiens
  chr10:133806833-133806985
  hypo
acattcatgtgccagcgtttgtatcgacatgttctttcatttcttgcaggtaaatgccatggagtgcagcggctgggtcgtatggggagggtgtgcttagctttttaaggagctgccatcgtgttctccaaagtgctcgcacatgttacttt

SEQ ID NO: 24703 - DNA, 163 bp, Homo sapiens
  chr10:133920808-133920971
  hypo
ccaaaacacatccatctgtgacgccccgagggacacacgctccttgatggtcaacaggccaggcttgcgggctccccaggtgccggcaaggttccagggccggcgtctgagggctgcaacccagacccgctgggcaccctgcggggcatgtttagttgtacct

SEQ ID NO: 24704 - DNA, 30 bp, Homo sapiens
  chr10:133949194-133949224
  hypo
gggcaccgggcgagcgggttcacctgggca

SEQ ID NO: 24705 - DNA, 30 bp, Homo sapiens
  chr10:133949902-133949932
  hypo
aggctgcggagtcccggctgttggggagga

SEQ ID NO: 24706 - DNA, 241 bp, Homo sapiens
  chr10:133951603-133951844
  hypo
cttcaactggcttccgcaggagcgggacaagctgttaagattccggaagcaaagaaagaaaatggcaaaacttcccaaggtaaggaacagcacaccggcacgtgcggagagtacgccgggtgtgtgcggagaggaccacgcccgcgtgtgtggagagcgctggtgtgtgcggagaggggtgcgccggtgtacgtggagggcgctgggtgtgtgtgccgaggaccgcgcccacgtgtgtgga

SEQ ID NO: 24707 - DNA, 593 bp, Homo sapiens
  chr10:133953706-133954299
  hypo
accaagggcagggccaggacccgctcacccacgggactccaggccccttccccacccgccctgccagccttgccatagagcgcccctcacacccaggccacctcctcggcctgtgccagggacagagatgggagtgtgtcgcagggtggggctgcggcccccaccgttgggcagcgggaggaggcggcgggaggaggcggctgtgcctgggtctggtttgaactgacacgtcgcattttggtcacaagccggtggttgtggagaccttctttggatacgacgaagaggcttccctggaatccgacggctcctccgtctcttaccaaacagacaggacggaccagaccccgtgcaccccggacgatgacttggaggaggtaacgagggtctcctgccgggtcctgggcttggaggaggtaacgagggtctcctgccgggtcctgggcttggaggaggtaacgagggtctcctgccgggtcctgggcttggctgggcatgggctgccggcttttcacggggaagcccttcgcggccctcactggcactgacccgctgatagctgactcgggcacggtgagaagctcccatgacat

SEQ ID NO: 24708 - DNA, 30 bp, Homo sapiens
  chr10:133955555-133955585
  hypo
tacgtgacttccaccgcgcgttccggcccc

SEQ ID NO: 24709 - DNA, 31 bp, Homo sapiens
  chr10:133962081-133962112
  hypo
ctccgccgtcggcagacgtttgtttcttgcc

SEQ ID NO: 24710 - DNA, 30 bp, Homo sapiens
  chr10:133982846-133982876
  hypo
aggtgcaatgaggccgctctccgagtgcgc

SEQ ID NO: 24711 - DNA, 220 bp, Homo sapiens
  chr10:133983712-133983932
  hypo
agcataacatctctaactgtgcggcaaggacagcgcagccagaggtcgggagctccacagcctccagggtcccccgagggcggctggggacagggaacgccccacagcacaacaacacacacggcgtggacatacgcacctccccgccatacgaacctccccgcggaggcttcccggctgcctcactcccaccccctgcgggccaggcctcacagcaggg

SEQ ID NO: 24712 - DNA, 30 bp, Homo sapiens; identical to SEQ ID NO: 7813
  chr10:134000272-134000302
  hypo

SEQ ID NO: 24713 - DNA, 30 bp, Homo sapiens
  chr10:134016252-134016282
  hypo
ccccgggggcgggccgcttcgtccctcgga

SEQ ID NO: 24714 - DNA, 96 bp, Homo sapiens
  chr10:134044631-134044727
  hypo
tgctctccccgtcacacgcatcccatcacccacagccagggagcagggacagaagagccacctcgagacagggcctggcctcgcacacccacggct

SEQ ID NO: 24715 - DNA, 334 bp, Homo sapiens
  chr10:134053689-134054023
  hypo
actgagtttcatcccagaacccggacacctgcaagctcttctcagccagtgctgctcgccacctgcagcgagtccccccgatggatgaggaaccctcagaaccagctcctcccggcgtggactcagaggccacaggctcagccacggtgtcacagtcacacatggcagggtggtcctacagcagccgctggcgggttgccatagcgaccacaggcactgtcttctcgctgagacggcacagggggcccaggtaaggtggaatccagaggccacgtacacaggccctgcacgggggcatggagctggggagcccggccaggcagaccttcttcac

SEQ ID NO: 24716 - DNA, 30 bp, Homo sapiens
  chr10:134065999-134066029
  hypo
ctctcaaattaagacgcaggtaaaaggaga

SEQ ID NO: 24717 - DNA, 30 bp, Homo sapiens
  chr10:134117344-134117374
  hypo
gggttttcccttcccgccagctccgctggc

SEQ ID NO: 24718 - DNA, 769 bp, Homo sapiens; identical to SEQ ID NO: 7817
  chr10:134120668-134121437
  hypo

SEQ ID NO: 24719 - DNA, 515 bp, Homo sapiens; identical to SEQ ID NO: 7818
  chr10:134121687-134122202
  hypo

SEQ ID NO: 24720 - DNA, 52 bp, Homo sapiens
  chr10:134164683-134164735
  hypo
acctgaactccaggcacgtcacatcgtccagcccgggcgagctgctggccag

SEQ ID NO: 24721 - DNA, 167 bp, Homo sapiens; identical to SEQ ID NO: 7819
  chr10:134209483-134209650
  hypo

SEQ ID NO: 24722 - DNA, 68 bp, Homo sapiens; identical to SEQ ID NO: 7820
  chr10:134210585-134210653
  hypo

SEQ ID NO: 24723 - DNA, 212 bp, Homo sapiens
  chr10:134212780-134212992
  hypo
gggagccctatgacaggtgtccgcccacctcagggaacctgtgggtcccagcacaaccggcgctgttgagcgcaggcggcgggcagccaggcacctgttcagagcaatcccacgggaatggcggccccgctcacacaggcgccgggatgcagggctgaggtgggcccagcagccagcgtttgttgtcggccggtttgggagatggcattctc

SEQ ID NO: 24724 - DNA, 30 bp, Homo sapiens
  chr10:134218741-134218771
  hypo
ggtcccgcggagcccggtcatcaagatctc

SEQ ID NO: 24725 - DNA, 30 bp, Homo sapiens
  chr10:134246645-134246675
  hypo
atcgattctccggccgaaagacttctccag

SEQ ID NO: 24726 - DNA, 31 bp, Homo sapiens
  chr10:134252926-134252957
  hypo
acgtggtgggctcctgcgtcaacagcatggg

SEQ ID NO: 24727 - DNA, 31 bp, Homo sapiens
  chr10:134276624-134276655
  hypo
gatcgggtcaattccacgaggctccacatct

SEQ ID NO: 24728 - DNA, 30 bp, Homo sapiens
  chr10:134279121-134279151
  hypo
tccgtcagtcacaccgagcccagcctgggg

SEQ ID NO: 24729 - DNA, 31 bp, Homo sapiens
  chr10:134279572-134279603
  hypo
gtgagacgcccgggcccgcaggttgaggccg

SEQ ID NO: 24730 - DNA, 61 bp, Homo sapiens
  chr10:134280495-134280556
  hypo
cctttttccaacggggcgggaagaggtgccaggcagatggaagtctcggtttccccaaagg

SEQ ID NO: 24731 - DNA, 54 bp, Homo sapiens
  chr10:134302491-134302545
  hypo
cagtgtggagacccaacgcacacctcagccaggtgaccccgcctagggcagggt

SEQ ID NO: 24732 - DNA, 30 bp, Homo sapiens
  chr10:134400336-134400366
  hypo
gcgcggcgaggccacggttctctcctgcgc

SEQ ID NO: 24733 - DNA, 30 bp, Homo sapiens
  chr10:134421015-134421045
  hypo
ggctcaggcaggggcgggtgtggaaaggtg

SEQ ID NO: 24734 - DNA, 56 bp, Homo sapiens
  chr10:134421292-134421348
  hypo
atgcggggtgggcccgggctgcgcctctgctcctgccccacgttgtcttcacagga

SEQ ID NO: 24735 - DNA, 37 bp, Homo sapiens
  chr10:134457708-134457745
  hypo
gtgcccggggagcccacgcccacgcccaggagggagg

SEQ ID NO: 24736 - DNA, 139 bp, Homo sapiens
  chr10:134477317-134477456
  hypo
gagctgggcagggccgcgctcacatcattcctctccccctgtcgccgggtgggaaatccgtaacaggctctgtggcaaaggctgggccaaggtgcctcgtgggcagccgatccatcaggcggccgacaggcgtgatcga

SEQ ID NO: 24737 - DNA, 247 bp, Homo sapiens
  chr10:134481256-134481503
  hypo
attaaagggtcctcagggggccgtgtgcgctgcccggcgcgagccggaagagggatgatatttctcggtaatgaactggcggcatgcggggacatgaatcttgggctcttggaaaaggggaaataatggggtttgggaggcatttgcaggttattcattcgccgccatgcaccaattctccagtgattcatccgcctcaccaacatttatttatccagcaaattccggagctttgacctttttgcta

SEQ ID NO: 24738 - DNA, 344 bp, Homo sapiens
  chr10:134491021-134491365
  hypo
agtgctggtagcaggcgagaagccaggactgctggtcaccttgccgccctcagatgtaccccctttggagaagcctgccgcaggctgttttacaggccatctcgttccatttcagttgctcctcaccgtggtaatcggaaatgttaacgggcgcactcgtctggtggaatttatcgtggccagcgagggcgattaagcggctggtatgtggcgtgtttaccctcgtgtcagcatgactggtgttccaccctggcagatgaaggcccggtccttcctgggctcctaattggggacactacatccaagagccgtgacagggttcagcaacccgcgtgcagaatgcc

SEQ ID NO: 24739 - DNA, 30 bp, Homo sapiens
  chr10:134499719-134499749
  hypo
tggaggccgcttcccggctgtgccgtggcc

SEQ ID NO: 24740 - DNA, 31 bp, Homo sapiens
  chr10:134517986-134518017
  hypo
gcggcggctgctggtgcgcagagccacccct

SEQ ID NO: 24741 - DNA, 30 bp, Homo sapiens
  chr10:134527157-134527187
  hypo
gagggtggcaactgcgaggcctgggtgctg

SEQ ID NO: 24742 - DNA, 173 bp, Homo sapiens
  chr10:134559538-134559711
  hypo
gggtagggcctcggcgttgcctgcacgtgtgcccagatggcttcttcggagccctgagtgggcccccgaggctgtgtgtccacttggcccaggcagggcgctctggacacctggtgattccaggtagagagtggagcccaggcgcctgctggctgtgcgtgcggtgcctggag

SEQ ID NO: 24743 - DNA, 30 bp, Homo sapiens
  chr10:134562874-134562904
  hypo
cctgaccccaggtgcggaaatctgggtgtg

SEQ ID NO: 24744 - DNA, 30 bp, Homo sapiens
  chr10:134566207-134566237
  hypo
gcgtggaggcggtgcggcatggaggggtgt

SEQ ID NO: 24745 - DNA, 145 bp, Homo sapiens
  chr10:134577902-134578047
  hypo
gtgacactcaggaacacggtcgggtcagtcctgctgcggtgggagggtgtgcgtggtgacactcagaaacacggtcgggtcagtcctgcaggggtgggagggtgtgtgtggtgacactcaggaacacggtcgggccagtcctgca

SEQ ID NO: 24746 - DNA, 31 bp, Homo sapiens
  chr10:134580978-134581009
  hypo
ggtggcccaggcctctcgtcctcctcacgag

SEQ ID NO: 24747 - DNA, 30 bp, Homo sapiens
  chr10:134582063-134582093
  hypo
ctcacactcttccccgtgcagctctgcccc

SEQ ID NO: 24748 - DNA, 30 bp, Homo sapiens
  chr10:134589824-134589854
  hypo
gatgggagctcctgcgtcagggcagagcaa

SEQ ID NO: 24749 - DNA, 212 bp, Homo sapiens
  chr10:134593221-134593433
  hypo
gcaggacaagcagacgggcgccgggcgcgctccgcagcctcatccatcatgacacgcgccgtcacctcgtcaccaagctccgttctgcctccggagccctaaaacaccaaaaggggctcgggacgcgggcggtgctgcttggggagcctcggtgacaagtgttcagtgaggtgtgccgcacgctgcctgtgcccgccgtaatttgtttatct

SEQ ID NO: 24750 - DNA, 30 bp, Homo sapiens; identical to SEQ ID NO: 7826
  chr10:134602460-134602490
  hypo

SEQ ID NO: 24751 - DNA, 30 bp, Homo sapiens
  chr10:134606520-134606550
  hypo
tgacttcggccctgacgcccgcctgcgttg

SEQ ID NO: 24752 - DNA, 190 bp, Homo sapiens
  chr10:134610549-134610739
  hypo
tggatgtgcctggcctggtcccgggccctcagcctcccaacgcccctgcgcccgttctcactggcacggctcagtgtccacaccgggccagcagcgcaggaactggaggctctgcttcgtgatttccgcagtggcagatgacaggaatcaggttcctgcgggtggcagcggatgggggtgcagaactgcc

SEQ ID NO: 24753 - DNA, 30 bp, Homo sapiens
  chr10:134620261-134620291
  hypo
ccccgtgccaggcacgctaactgtgcagtg

SEQ ID NO: 24754 - DNA, 385 bp, Homo sapiens
  chr10:134664872-134665257
  hypo
acaacttggatgaggcataaccgacgtaagaaactcataacaaactgcgcagatctacagtggaaaactgacacactttgatcacgaatacacccgtgaaaccatcaccaccttcgagataatgcagtagcccttatccccaaatctcttcgcgtcccctcatgttccctcccggtcacctagctgcctgccggcaccctgcattccttggcattttccagaaccgtacctaagtggaggcgcacagagtgctgtctttccgtctggttcattttcctcggtaaagtcaccgtgagactcccccacgcggctgcacgcatgctccttccctctcacagccggcgtcggtgcaccgtgtgcacgcgccacaccctgcttatctatt

SEQ ID NO: 24755 - DNA, 30 bp, Homo sapiens
  chr10:134671610-134671640
  hypo
cacagtaacagacacggctcaggtcagacc

SEQ ID NO: 24756 - DNA, 221 bp, Homo sapiens
  chr10:134680971-134681192
  hypo
cttatttttctcttttttcaacgcgatctcttttctgcagctaatgcgaggaaaacagacaatacgcaagagccacatggccacgaaaatgtcccttcacgagtaaccaaagaaacgcaaacgaaaacagccacaattacattcttcacgcgcgtgtttacaaagatttttaaaaatcctcaggatctaacggcacatccgactcccaaatttgtgtccat

SEQ ID NO: 24757 - DNA, 30 bp, Homo sapiens
  chr10:134698646-134698676
  hypo
ccagacacgctcggcgagttcagggccagg

SEQ ID NO: 24758 - DNA, 30 bp, Homo sapiens
  chr10:134720519-134720549
  hypo
aaggcatcttggcacgttcctatgttggcc

SEQ ID NO: 24759 - DNA, 31 bp, Homo sapiens
  chr10:134722344-134722375
  hypo
ctggacacgggactggcgtgtgcagcccttg

SEQ ID NO: 24760 - DNA, 992 bp, Homo sapiens
  chr10:134732864-134733856
  hypo
gcagaagcggctcgccgtccgacagacgtcccacacgccttgtttccgggccactttggccagctctgcccaaatctgtatcctgctcaccgagaacccaaacgagtgaaaggtgagtagacaagtgtggttgctgaagttagaaaacacctgggctggctgcctgagaaaaggccactgtggctctgcagtttcaaggtggcaaggagcccggcactcgcgctgggtacggcctggcgggtgcatgtcccagggtcgggcgcagctctccgctctccctgccagccagctgtgcgcggcacctcccttccctgtggtgagaagaaaggccacacaatccactccccgggggagtgcacgggacaggcctcccggggatggtaccgaccgcagggtcggtaccaaaaatcagcctgctctggtcacaggcgctgcgtgtcctccgagtgacagcagtgacaggcgggacagggcagccgcacacctcataggccgtggctgtcatcacaggctggggggtcccgtctgtggcgggactcccaggcagggacctcgtcccaccatcctggagcaggtggcctggcgagtccccagacggccacatgcagggtcagctcagccgccacagacactggccctcgggctgagcgacccccgggctgagctgtgcgtggcgctctggccttttcctcactcacctctccttgtcgttttcgttgcccaggcgccgcaggtgcccggcagctttgtccacgctgacggtgtggtgccacgccttcgcacagaggtaggtgaaccggcccctgttcttcccggtggagactgagggcggaaatgcaaaggcaggtgttgcagctgctggccaagggccggggacgtgcccatcagtaaccaatgccctgcgccggcgccggggtggccacccacaggtagcggctccaggggccctagatccccggctcccagaagccgagctcctcacagagctgcag

SEQ ID NO: 24761 - DNA, 155 bp, Homo sapiens
  chr10:134736023-134736178
  hypo
ggggcctggtatagcgtggtgcacagacgcagccgggtggaggccatctggatcctgtcccggtagaggcccaggctgtccaggcgcgcggctttccggaggtgctccgtggcgggctccagccggtcctcgtcctcctcgatctgcgccatctc

SEQ ID NO: 24762 - DNA, 631 bp, Homo sapiens
  chr10:134738134-134738765
  hypo
cctcctctgtctcctcctatgcgccacgccctctgtggaggacacagcacaggtgagcgccccacctgtccagcttctccagcacgtccgcaacgccagccaggggcttccgcaggtggtgccgcaggttgtgctgcagcaggggcaggcaggtgttccactgcgtggcgcacaccacgtggatgacccgggggtcgcccaggcgcacggctcgctgcagcgcgacgtctagcctctgtatgatatccagctgggcctgcggagaagacgtgggggattctagggaggttgctggctcgagctgcggggctggggcggcacctgcgtgcagggcacactgagaacgcaggccctaaattcatcaccctgcgtggcgtcatgctcaaatctgtccgtgaaaatggccagagtgactctttctaggaggaagtggacgtctcacaagatattacatgcaggaggcttggcggtgcccacacatcgtggctgcgcccgcctcccccgtgtggactcagcgggcgctgctcccttcctgatcccgtctctttcctggggcctgtgctcgctacgcttcccacccccagaatgcctcctccggtctgtgctacacgggcccttcccaggacaaagg

SEQ ID NO: 24763 - DNA, 401 bp, Homo sapiens
  chr10:134739076-134739477
  hypo
aacaaagtgcaacagccaaagcgtctggaaatcattccttaaacgaacactcattaagcgcctaccacgtgtggcaccagcgcacagcagcagtcaaaaacctcccgcgagaagctcagccccacggaggcagacccaggagcaagtccacagcggcatcggcacccgccgggctgtgacacgtgtgccaggcagtgcgggctgaggatggatgcgttaggagtggggatggggaaggcctcccagctgccgtgctcatcccctgccacggcacctctggcactgacccgcacgcccctggctcctctgtacccagcggagcctcgcactgcctggctgacagggcctgagggttcccagccgaccctgtggcacttgccgtggtaccacatcagggctgc

SEQ ID NO: 24764 - DNA, 30 bp, Homo sapiens
  chr10:134740787-134740817
  hypo
ctatcagacacagacgtcccggggagcagg

SEQ ID NO: 24765 - DNA, 31 bp, Homo sapiens
  chr10:134747808-134747839
  hypo
gtgcttctgaaagcctcgggctcagcttcct

SEQ ID NO: 24766 - DNA, 194 bp, Homo sapiens
  chr10:134758117-134758311
  hypo
cccagaggcctgctgtatatgcgcccgctggcgttgccatcacggggcactctcatgggcggcttaaacagcgggaaaggaggcgggaaggccgagaacaaggtgcggccggagttggttccttggagggcaccccgcgtggccgtatgtggtcgtcttcttgtctgtgtctcggtgtccaaatgtgcccatct

SEQ ID NO: 24767 - DNA, 30 bp, Homo sapiens
  chr10:134758761-134758791
  hypo
ggtcctcgctctccccggctccgctcagaa

SEQ ID NO: 24768 - DNA, 594 bp, Homo sapiens
  chr10:134793861-134794455
  hypo
tgaggaggagcaagtacctggcgagtgcctggtgagagcccggtgagtgcccggtgagtgcctggtgagtgcccgcaagtgcccagcgagtgcccggcgaatgcccagtgagtgcccagcgagtgcccggtgaatgcccagcgagtgcccagtgagtgcccggtgaatgcccagtgagtgcccagagagtgcccagcgagtgcccggtgaatgcccagcgagtgcccggtgagtgcccgcaagtgcccaacgagtgcctggtgaatgcccagcgagtgcccagcgagtgcccggcgaatgcccagtgagtgcccagtgagtgcccagcaagtgcccggcgaatgcccagcgagtgcccagcgagtgcccggtgaatgcccagcgagtgcccagcgagtgcccggtgagtgcctgcaagtgcccagcgagtgcctggtgaatgcccagtgagtgcccagcgagtgcccggtgaatgcccagcgagtgcccagcgagtgcccggtgagtgcccagcgaatggaggctcctcgggtaacacgcgtggacccaggcacaatacaaagtcaaccgcccggggctctagagcaggagaaa

SEQ ID NO: 24769 - DNA, 586 bp, Homo sapiens
  chr10:134797187-134797773
  hypo
atcacccctgagctcagaacacggcgtcgcccgagctgaccaccgctccccttctcccgccctccagcccccaacaaccaggaatctcttgccgcctctggattgacctattctggacattccacgtaaatggaatcataaaacatacggcctttcgcgtctggcttatccacggagcgagatgccttccagcttcatcacgccgtagcctgcgtgggttctgggtccctgtcctcgtcactagtcgctccagtgcatggatgagcacgtcctgttcacgcgtcctcgccattggtggtgtctggggggctccccgctgctggctgatgcgaatgttcctgcacgtgtgtttgtgtgaacgccggctttcagctgagggtggggctgctgaatctcacggcagctccgagtttaattctcggacgaggctctctgtcagtcgcgcgtgaccgcgtgggctcaggcgtctgtgcgagttgctgcgcgcgtgtgggtgtgcggccgacgtaagctcgtctgcgtccctcccgtttagtgcccggggtcgggccgtctgttacaaaccgtcctgttggtgtgagaatcc

SEQ ID NO: 24770 - DNA, 30 bp, Homo sapiens
  chr10:134807193-134807223
  hypo
ggcatcgcacactgcggcatctgtcttcgg

SEQ ID NO: 24771 - DNA, 30 bp, Homo sapiens
  chr10:134829384-134829414
  hypo
ctccgccgcagagtccgcacccctggaagg

SEQ ID NO: 24772 - DNA, 217 bp, Homo sapiens
  chr10:134829640-134829857
  hypo
actcgaaatggcctccgttcgctgcagacactgcccgcctgcaccggggactcagcccaggcagctctgcacacacctcagcaccacccaccctcaggcctcagccgcgctacccagcaggcgcttttgcccagaacgcctgctcagaacaccgtgagccactgcccggcgctgagccggggcctccggaacgtgaaccaagcggctgcagcccagg

SEQ ID NO: 24773 - DNA, 30 bp, Homo sapiens
  chr10:134834802-134834832
  hypo
cctgtggtcacggccgacgcccggcgggcc

SEQ ID NO: 24774 - DNA, 92 bp, Homo sapiens
  chr10:134878527-134878619
  hypo
ggtggcgttccgctgggtgaacacacacacgcacttgagaaggtggcattccgctgtgtgcagggtccagcgtgtgtcaagtaggtcaagat

SEQ ID NO: 24775 - DNA, 30 bp, Homo sapiens
  chr10:134912213-134912243
  hypo
actgtgttcgccggcggcatcaatcgcacc

SEQ ID NO: 24776 - DNA, 30 bp, Homo sapiens
  chr10:134913907-134913937
  hypo
aagcctgctggatccgcgggtgaggccccc

SEQ ID NO: 24777 - DNA, 460 bp, Homo sapiens
  chr10:134940814-134941274
  hypo
agaggacgaggacacggcgtagtgagtaccgggcacccagaaccgggagctgggagcagcgggtgggctctgcctgaggtccctcccaggcacctgtggtggggaagcccaggacgaagcagcaaggcctgggcctggacctggggcttgccgagagctgcgcccctcccagctcgcacccccgaggagtgcgcagcgccccctcctctcccagggagtccaacctaatctttgcctttggacaaggcaggcctggtttgccttctatgggaggggcctggggacaaatagcgatttggcaacagcacagagctcagctgagaagggaaaccccatcgagtaggaacggcggtccagccatcagtgcccagagccagcctggaacctctcattcagggccctcagttccttctgcggccccaggatggcccgcccgtctgccctccgccttgccccgccc

SEQ ID NO: 24778 - DNA, 107 bp, Homo sapiens
  chr10:134941727-134941834
  hypo
agccactcgctaggccgggtgggtgcagggccctttgctctgcagggggcgtcctgagtcctggccgtgctggccccgctgacactgacgtgcgtctccccacagct

SEQ ID NO: 24779 - DNA, 870 bp, Homo sapiens
  chr10:134942183-134943053
  hypo
catggtcttcagctgcctgtacggcgccttctgcgtgaccctgggactcttcgtgctcatccaccactgcgccaagcgtgaggacgtgtggcagtgctggtgggcatgctgcccgccccgcaaggacgcccaccccgcacttgacgccaacggggccgcgctgggccgcgccgcctgcctgcactcgccgggactgggccagccacggggcttcgcgcacccaccgggcccctgcaagatgaccaacctgcaggccgcgcagggccacgccagttgcctgtcaccggccaccccgtgctgcgccaagatgcactgcgagccactgacggcggacgaggcgcacgtgcacctgcaggaggagggcgccttcgggcacgacccccacctgcacgggtgccttcagggcagaactaagccgccctactttagccggcacccagcagaggagcccgagtacgcctaccacatcccatccagcctggatggcagcccccgcagctcgcgcacagacagcccccccagctctctggatggcccggcggggacacacacgctggcctgctgcacccagggcgaccccttccccatggtcacccagcccgagggcagtgatgggagccctgccctctacagctgccccacgcagccgggcagggaggcagcgctcgggcccggccacttggagatgctgcggaggacacagtccctgccctttggtggccccagccagaacgggctgcccaagggtaaattgctagaaggcctgccgtttggcaccgacgggaccggcaacatccgaacgggaccctggaaaaacgaaactactgtgtagatgggggcagaggacacggtgttcctggaggagcttca

SEQ ID NO: 24780 - DNA, 30 bp, Homo sapiens
  chr10:134955621-134955651
  hypo
tctgccctggaccgcgcaccctgctcccgg

SEQ ID NO: 24781 - DNA, 30 bp, Homo sapiens
  chr10:134978033-134978063
  hypo
ttgctattcacagcacgtcacctccttccc

SEQ ID NO: 24782 - DNA, 240 bp, Homo sapiens
  chr10:134980288-134980528
  hypo
cacagctgagccctcgcggagtccaggagcccactcggatttggaggtgagcccacatgggggcggccgagccacatggagggaaccgccgtgactgtgtcctccgtgtgaattgcctggaacaaatgttggcagcgcgtgtggttgtaagtcatgtgagtgtcaggatcacgccccgttagctctgcacgagtccacagttggggatgtccactccgtcgcctcgctcatctgttggca

SEQ ID NO: 24783 - DNA, 30 bp, Homo sapiens
  chr10:134980909-134980939
  hypo
tctccctgcgggaccgcggcctcagcgagc

SEQ ID NO: 24784 - DNA, 30 bp, Homo sapiens
  chr10:134992325-134992355
  hypo
tgctccctgacagccgtcagcagccaccat

SEQ ID NO: 24785 - DNA, 124 bp, Homo sapiens
  chr10:134996396-134996520
  hypo
gggtggcgtgggtgcgagcaatgtgggcacggacggtgtgggcacaggcggtgtgggcacaggcggtgtgggcacaggcggtgtgggcacaggcggcgtgggcacaggcggcaagggcatgggt

SEQ ID NO: 24786 - DNA, 136 bp, Homo sapiens
  chr10:134996774-134996910
  hypo
ggagaagtgctggccgcggtcggggtggcgcacacgcagagactctggagctgacagcctgtcgtgcccacaggcgcacatctactctctgggggccacgctgaaggccgccctcgagtacgtggcagagcccaca

SEQ ID NO: 24787 - DNA, 28 bp, Homo sapiens
  chr10:134997772-134997800
  hypo
ccatgcacacacacgctgcacacacacc

SEQ ID NO: 24788 - DNA, 30 bp, Homo sapiens
  chr10:135002961-135002991
  hypo
tgcactggcaggtgcgtgcccgtgcaatgg

SEQ ID NO: 24789 - DNA, 216 bp, Homo sapiens
  chr10:135009187-135009403
  hypo
gccgttctgtggaccgcagccaagttcagcgtcccccgcaaccacaagctggccctgccacgcaggctcaagaccctcctcctggacatggccaggcgcagtgccccggagcggccgtccgcggctgaggccatcaaggtaaccacaccacagtcatggccccagcccagggtccaaggactgtgggcagtggccgccctcgctgagctgggggtg

SEQ ID NO: 24790 - DNA, 30 bp, Homo sapiens
  chr10:135012439-135012469
  hypo
ggcctcaggcccgacgccctggggcccacc

SEQ ID NO: 24791 - DNA, 601 bp, Homo sapiens
  chr10:135014788-135015389
  hypo
cctctctctgtcacccggccccgtgcggcagttcagggtcccagcatctcccctgcactgggaggcggcagccgtgcccggggggcgcccgtggtgggcgggtgcaagagagaagggcgtcgggtgtgcaagcaccaccggcctcccattaacagcctgcccgggctccgcccacaggagccactgtccacgtaacctgcgtctctttctttcaaggaaaagagaagccagccatggccaggaccagcagcagggccccctgctcacccacctcggtgtcggatgtggactcggacgcactgtcacggggaaacttcgaggtggggtttcggcctcagaggtccgtaaaagccgagagagcgcagcagcctgaggctggcgaggacagacggccagctggcggggcctcagacgtggaggcagtgacccgactggccaggtccaaaggggtcggcccagccttgtcccccggcccagccggattccagagctgcagccccggctggtgcagcgccttctacgaggccgactgcttcggggccgacgtccacaactacgtgaaggacctggggcggcagcaggcggacggggccctgcccga

SEQ ID NO: 24792 - DNA, 281 bp, Homo sapiens
  chr10:135017271-135017552
  hypo
tgtggtgtggattttagttaccgtggatttattaaaatcagtcaagaccgtcctcctcatggagtccgcctgtggttcccgcgtgaggagcgcccccgacggacatcgagtctgactgtgaacggaggccgtggaggtgccggccagagaggagtctgcgtgagctgcactccagccaggcgggcatcgggctcgcaggcacccgcctccaggttcctggatgcgtcagggtacacagacctttcccaggagattttctcgacatcagcacctctgcaaat

SEQ ID NO: 24793 - DNA, 102 bp, Homo sapiens
  chr10:135018211-135018313
  hypo
agcagagtcactggcggctgacaaggcgagggggtggctgtgtggatctgagccaaccgcacttcacaaaaggaagcctggtggaccggctcgcggatgagc

SEQ ID NO: 24794 - DNA, 30 bp, Homo sapiens
  chr10:135023526-135023556
  hypo
gcttcccgagctaacgggtcctgcgagtgg

SEQ ID NO: 24795 - DNA, 375 bp, Homo sapiens
  chr10:135025539-135025914
  hypo
tgcacatcacacacatccacacgtgcacatatgcatgcaccttcacacaatccacacgtgcacatgcgtgcacactcaatccacacgtgcacacgcacgtgcaccttcacacagccatacatgcactcgtgtgcaccctcacacatatccacacctacacgtgtgcaccctcacacatatccacacctacacgtgtgcaccctcacgcaatccacacatgcacacacgtgcacccgcacacgcatccacacacacacgcatgcaccctcacatccacacgtgcacactcacataccccctccatgttcccggtcccaggcagccctgctgcgctggcacctcctgcaccatcccgggtgctcaggggaggagggt

SEQ ID NO: 24796 - DNA, 302 bp, Homo sapiens
  chr10:135030352-135030654
  hypo
ttaacaggagggaaattctgacgcctgcggcagcacgatgaacctcgagggactcaggctcagggaaacgagccagtcgcgaagcacggacagtggacggctccacgtacacgaggcgcctggaggcgcaagattcacggagacaaagtagcagggtgggcgccgggggctgggagtggggcacggggagctcgtgttgaacggggaccgagtttccgtttgggaagatggagagtcgcagacatgctgcacagtgtggatgtagttaacacggctgaaccgtgcactcagaaaaggctaca

SEQ ID NO: 24797 - DNA, 18 bp, Homo sapiens
  chr10:135030920-135030938
  hypo
cctgcagacaagagttga

SEQ ID NO: 24798 - DNA, 564 bp, Homo sapiens; identical to SEQ ID NO: 7830
  chr10:135043826-135044390
  hypo

SEQ ID NO: 24799 - DNA, 31 bp, Homo sapiens
  chr10:135064837-135064868
  hypo
tgtctccctgcttccccgctgtctctgtctc

SEQ ID NO: 24800 - DNA, 30 bp, Homo sapiens
  chr10:135073734-135073764
  hypo
tacactgcagagccgcgtgtgcactgagag

SEQ ID NO: 24801 - DNA, 30 bp, Homo sapiens
  chr10:135073981-135074011
  hypo
tgtgcgctgcagagccgggtgtgcactgag

SEQ ID NO: 24802 - DNA, 31 bp, Homo sapiens
  chr10:135075452-135075483
  hypo
gacaagggcatggggccggaagaggcggggc

SEQ ID NO: 24803 - DNA, 30 bp, Homo sapiens
  chr10:135081993-135082023
  hypo
gccccaagcccaaccggccaccaaaaccat

SEQ ID NO: 24804 - DNA, 51 bp, Homo sapiens
  chr10:135087426-135087477
  hypo
ccgcccagctgctccgcccgacccatacctgcccgcgaggctgctccgtca

SEQ ID NO: 24805 - DNA, 78 bp, Homo sapiens
  chr10:135102836-135102914
  hypo
caggcattatgagaaccggatggctaatcgcttcccaaccctttcgtgacggccccgatgtgccgagtccaagtcccc

SEQ ID NO: 24806 - DNA, 31 bp, Homo sapiens
  chr10:135106411-135106442
  hypo
atgagctttggccacacgcccctgccctggg

SEQ ID NO: 24807 - DNA, 31 bp, Homo sapiens
  chr10:135117510-135117541
  hypo
ctgtcaccaagagttccgatacaaggccatt

SEQ ID NO: 24808 - DNA, 580 bp, Homo sapiens
  chr10:135120290-135120870
  hypo
caaaaaataataataaaaaaaataaaaactaccttcaggaaacttcgtatctcttctagaaatagaagcacagatgcccgcacgtcatgagtgttcatcccatgaggagcctgctgctctccctgaatgtggggaccgggcctccaagagggcagcccgtactcgcacagagtccctccccccagaagacctttggaaaagtcctagggcaactctggggtgtcacggtcatggaagggtgctctcgctacttagagggcaagggcgggggatgctaatcatcaacagagctgtcccgccagaaatgcacagcgtcccactgaaaacacagctctgaggaacatctagccgtggctgcttcttggaggaacgtctagccatggccgctgacttggccttcttgatgctcctgaattcttactattaatcacacaaactgacaggcccagcaactgtgactgggagggactgacgtcctcctcacagaggctgtgagctaccgcagggacgcgtgctgagggaagcaatgcacgcatgtcacactccaccacggacaagcggggcacacactcctagtgag

SEQ ID NO: 24809 - DNA, 30 bp, Homo sapiens; identical to SEQ ID NO: 7833
  chr10:135150352-135150382
  hypo

SEQ ID NO: 24810 - DNA, 322 bp, Homo sapiens
  chr10:135153716-135154038
  hypo
ctcccccgtcccctccgcctttgtgctgggtcagacccagctgggtttggctctcactcaccctgaggatggccctggcgcccgcatggtgcccagcacacagaaggcgctccataggcatttgcctgagtgcggctcccagctgtgggtggtcagcaatgacaggagcatgcgttggtgatgccttcgttttcattgctaaaccgtaacccattgttcccgctgttaactcatggacatgccgcgtttcatccacgctgaacggtaacccgttgttactactgtctttttgttttgttttgttttgtttttttgagacgga

SEQ ID NO: 24811 - DNA, 31 bp, Homo sapiens
  chr10:135180194-135180225
  hypo
ttctgtggggctcccacgagggagacaactg

SEQ ID NO: 24812 - DNA, 31 bp, Homo sapiens
  chr10:135198047-135198078
  hypo
acaccatctgcccatacgtggggagacaata

SEQ ID NO: 24813 - DNA, 31 bp, Homo sapiens
  chr10:135204298-135204329
  hypo
tcttcctctgcccacccgactcccagatccc

SEQ ID NO: 24814 - DNA, 202 bp, Homo sapiens
  chr10:135204810-135205012
  hypo
tgcagctccagatcctgtttgcgggggaagccacacatcgcacgttttactccacgacgcacggggctctgctgtcgggatggagggaggccgaccgcctcctcagtctgtgggccccgcaggtgcagcagcccaggcccaggctctagctgggcccagcctactctgttccacccgtgtcgggggtaggctgggaccctca

SEQ ID NO: 24815 - DNA, 30 bp, Homo sapiens
  chr11:197209-197239
  hypo
agcaagagcagggtcggggacatcaggggc

SEQ ID NO: 24816 - DNA, 30 bp, Homo sapiens
  chr11:223336-223366
  hypo
cagaccaagccagacgcctccttctcacgt

SEQ ID NO: 24817 - DNA, 400 bp, Homo sapiens
  chr11:232823-233223
  hypo
gtcccaaggaagaagcataagcgataggttttggccgtccccagaaacaggcacccgagcatcccctgtgagaaacaggcacccgagcctccctgggagaaacaggcacccgagcctccgtgggagaaaaagaatgtgtgcgactcacagagggctcacctctctcaagcccatcgatgttctgcgtgtagagccgcagaagcagccccttgtcatgaagcagccggagaaagtagtgagtgacgttgggcttgtagtttccagggtacagctccttggccaaagtgaaaaagggcttggggttgtgaaagaagaatgggagttcaaaaatggcctcggggtacgggagatcgtactgctggaggttgctgtacaggccactccccggcgatctgcaggg

SEQ ID NO: 24818 - DNA, 413 bp, Homo sapiens; identical to SEQ ID NO: 7839
  chr11:314082-314495
  hypo

SEQ ID NO: 24819 - DNA, 499 bp, Homo sapiens
  chr11:375765-376264
  hypo
tttcctcagtgagagggggcccgcgcgggggcgagggcgggggtgcctgccccagccaccctgtgaccgcacctcctgcagctccacgcatggaatcttcgagcctggagaacgtgctggagccctgcgcctacgcccccacctacgtggtcaaggacttcccgatcgccagataccagggcctgcaatttgtgagtgcggctggagaccccgtctcccgtccgggactccgcggagccttctccagccccttgggaggccgccccgggaggtccgcgccctgagccctgcgcccccccaccccccaggtgtacctgtccttcgtttatcccaacgactacactcgcctcacccacatggagacggacaacaagtgcttctaccgcgagtctccgctgtatctggagaggtgggcgcgcggccgggctaatgcggggcggggtgggcggggcgggactcggctctgatgccccgccgcgccccaggtttgggttctata

SEQ ID NO: 24820 - DNA, 833 bp, Homo sapiens
  chr11:376592-377425
  hypo
ctcccgggccctgagctgggccgccagggccgcccgccctttgccgctcttcttgggccgagctccgcccccgcgccctgcagtggagcagccgcccccaaaggtgtacgtgaccagggtgcggccgggacagcgggcatccccccgggccccagcgccgcgtgcgccctggccgcccttccctggcgtcttcctgcaccccaggcctctgcccagagtgcagctgcgggcgcccccacgcccaccccggccccacggccgcaggaccggcggcccccaggccacacagccgaggcccccagcccgggcgcaggccacccaagggggccgggagggccaggcgcgcacgctgggacctgcggcgcccacagtggactcaaacttgtcctccgaagcgcggcccgtgacctccttcctgagcttgtcccaggtgtccgggccgcagctgcccggggagggcgaagaggaggaggaaggggaggacgatggggccccgggcgacgaggccgcgtcggaggacagcgaggaggccgcgggcccggcgctcggacgctggcgtgaggacgccatcgactggcagcgcacgttcagcgtgggcgccgtggacttcgagctgctgcgctcggactggaacgacctgcgatgcaacgtttcggggaacctgcagctgccggaggcggaggccgtggacgtgaccgctcagtacatggagcggctgaacgcgcgccacggcgggtatgggggcggccgaacgcgcgccagggcggttttggaggcggggacagccggggagaggaggtcctggccttggcggactcctcagaccttcccca

SEQ ID NO: 24821 - DNA, 84 bp, Homo sapiens
  chr11:392493-392577
  hypo
aggatttttccacacgaaacctgtctcccagggaatcagccagtccgatgagctgggcgttcccaccccgccctccgaggcccc

SEQ ID NO: 24822 - DNA, 108 bp, Homo sapiens
  chr11:393555-393663
  hypo
cttcgggggagggccggtccatccacatgcttcctggtgcggagggggctcgctggattccaaggaccagggccagggcctccatggagtcccgttggaccctaaagc

SEQ ID NO: 24823 - DNA, 272 bp, Homo sapiens; identical to SEQ ID NO: 7841
  chr11:406792-407064
  hypo

SEQ ID NO: 24824 - DNA, 30 bp, Homo sapiens; identical to SEQ ID NO: 7842
  chr11:407427-407457
  hypo

SEQ ID NO: 24825 - DNA, 31 bp, Homo sapiens; identical to SEQ ID NO: 7843
  chr11:417443-417474
  hypo

SEQ ID NO: 24826 - DNA, 31 bp, Homo sapiens
  chr11:420901-420932
  hypo
aggggcctggggctcccggggctgggcgggg

SEQ ID NO: 24827 - DNA, 522 bp, Homo sapiens
  chr11:429288-429810
  hypo
tggggagacagacatgggacacgcaccccacacgtggggagacagacacagcgacacgcctcacgggtggacagacacgggacactcaccccacacgtggggagacagacacagggacacgcctcacaggtggacagaccaggacacacgccccacatgtggggagacagactcgggacacacacctcagacacggcaggcatatgtgggccgtgcagggcatcgggcgccaacagcccctgctcgggtcggcctcagctgcgctgccagctccacctcacctgttcctcgtcccacacgtacaggtcccagtgcaggaccacgcgggcgcgctgccgcttccagatctccaggaacaccgtggctgcggcgggggcaaggaggggcatcactgcactacgccaggtggacctcggagcttgggctggcacttcccctggccccgcagaggcgtcccgcagcaactcaccccagagagccatgaagatggcgaacaccaccgtgccatcattgtcaaagagg

SEQ ID NO: 24828 - DNA, 30 bp, Homo sapiens
  chr11:431759-431789
  hypo
ccctccccctggctcgggtgacagagagtg

SEQ ID NO: 24829 - DNA, 30 bp, Homo sapiens
  chr11:433687-433717
  hypo
cgtgccgccatgaccggccccacagccctg

SEQ ID NO: 24830 - DNA, 25 bp, Homo sapiens
  chr11:449359-449384
  hypo
gcccggcctgcctagcataatgttt

SEQ ID NO: 24831 - DNA, 37 bp, Homo sapiens; identical to SEQ ID NO: 7845
  chr11:450010-450047
  hypo

SEQ ID NO: 24832 - DNA, 33 bp, Homo sapiens; identical to SEQ ID NO: 7846
  chr11:450246-450279
  hypo

SEQ ID NO: 24833 - DNA, 30 bp, Homo sapiens
  chr11:453742-453772
  hypo
cttggccctttggacgacgacgccgcgttt

SEQ ID NO: 24834 - DNA, 204 bp, Homo sapiens
  chr11:455933-456137
  hypo
ggcccagtgtccaggaggctccgggccccaccccccgccttgctgcatgaccttcacagtgtcacttaccggccctgacttgcctgcgggcaccacgcacacggcatgaaggtgccctggcccggggcacggacacagccagagccaccgcgctcctggctgtcatcacgtcgttggctttgcgatctaaacctgcttgttgtt

SEQ ID NO: 24835 - DNA, 30 bp, Homo sapiens
  chr11:464467-464497
  hypo
aggcatctcccctgcgctcagagtgcctca

SEQ ID NO: 24836 - DNA, 35 bp, Homo sapiens
  chr11:471550-471585
  hypo
ggtgacgcacgcctgtcgggcggagggcggcctgg

SEQ ID NO: 24837 - DNA, 30 bp, Homo sapiens
  chr11:472767-472797
  hypo
taaaaaatagatagcgtgtctctgtggccc

SEQ ID NO: 24838 - DNA, 30 bp, Homo sapiens
  chr11:487596-487626
  hypo
gccacccagaggttcgagaagccgtggggc

SEQ ID NO: 24839 - DNA, 37 bp, Homo sapiens
  chr11:488069-488106
  hypo
cgtgggcagggccgggcgtggccggcgtcccatactc

SEQ ID NO: 24840 - DNA, 34 bp, Homo sapiens
  chr11:488634-488668
  hypo
ttccgacctacaagtacgtcgtgggggctgcgag

SEQ ID NO: 24841 - DNA, 730 bp, Homo sapiens
  chr11:492550-493280
  hypo
ggacacagcctggggggactccgggagccatttgcacccacacccccgggtctgcctcggggccccgggcgtcaaaaagctttacttttagtatttttccttgactacttttggggaaaatttcaagccctctaagtcaagggctgtaatgtggagcacacacaagagcagcctctggggctcagcaggaagacgtccggtgtggccaccgcgcctagcagtcctctttccagtcacggccactcacagctttggcctccgtggccctgcacggatgagttcttccagctgccctgccctgcgtgctgcaggacacatggggccttagcattctgctctttgcaggtggcagctttgatcgctcaggaggaactgccacctgatctccccactgcaggggcccccactccccccctcacgcgctgcgggtcctgtcactccacccacgctgtccatccccgctgatgctctgagccaggtggtagcaggtgggggtggcgccccgctcacggtctccatctgctcttcccgaggagggcgaggcagggcttgtgattaaagtcctgtgttccggcgcccgtgtcccaaaggcagcccctgggagcccttccggcagcaactcaaccccagacagcgcccaggggctctggttcctcacgcgctgagatgctccggactcaccttgggcatctctcgccccaggcctggcgtcacccatttccccaaggag

SEQ ID NO: 24842 - DNA, 30 bp, Homo sapiens; identical to SEQ ID NO: 7847
  chr11:518711-518741
  hypo

SEQ ID NO: 24843 - DNA, 30 bp, Homo sapiens
  chr11:533442-533472
  hypo
gctgcctcacctgccgggtcttggccgagg

SEQ ID NO: 24844 - DNA, 30 bp, Homo sapiens
  chr11:534217-534247
  hypo
agtggggtcgtattcgtccacaaaatggtt

SEQ ID NO: 24845 - DNA, 1130 bp, Homo sapiens
  chr11:562019-563149
  hypo
caagccaggtggacagagagtcggggggacataggctgaccttctcctcttcttcccaggccagactggccgctttgtgcttgtgcagcggcttcgggagaaggagcggcagttgctgccacaagagtgtccagtgggcgcccaggccacctgcggacagtttgccagcgatgtccagtttgtcctgaggcgcacagggcccagcctagctgggaggccctcctcagacagctgtccacccccggaacgctgcctaattcgtgccagcctccctgtaaagccacgggctgcgctgggctgtgagccccgcaaaacactgacccccgagccagcccccagcctctcacgccctgggcctgcggcccctgtgacacccacaccaggctgctgcacagacctgcggggcctggagctcagggtgcagaggaatgctgaggagctgggccatgaggccttctgggagcaagagctgcgccgggagcaggcccgggagcgagagggacaggcacgcctgcaggcactaagtgcggccactgctgagcatgccgcccggctgcaggccctggacgctcaggcccgtgccctggaggctgagctgcagctggcagcggaggcccctgggcccccctcacctatggcatctgccactgagcgcctgcaccaggacctggctgttcaggagcggcagagtgcggaggtgcagggcagcctggctctggtgagccgggccctggaggcagcagagcgagccttgcaggtgagcccggggacctgatcccctgtcactcccccacccctgatatgggcagatacggggatcacagggtcccactcgggaggcaggtgagcccggggacctgatcccctgtcactcccccacccctgacgtgggcagatatgggggtcacagggtctgactcgggaggcaggtgagcccgcggacctgatcccctgtcactcccccacccctgacgtgggcagatacgggggtcacagggtcccactcgggaggcaggtgagcccggggacctgatcccctgtcactccccaacccctgacgtgggcagatatgggggtcacagggcccgaccagggaaagtgctccctccggagcacaagggctgtggagc

SEQ ID NO: 24846 - DNA, 160 bp, Homo sapiens
  chr11:563845-564005
  hypo
ggccccaaaggccacgactgcctgttggggacaggagatgcatggacagtgtgctcaagctgtgggcatgtgcttgcctgcgggagaggtccttcactgtgtgtacacagcaagagcatgtgtgtgccacttcccctaccccaacgtgaaaacctcaata

SEQ ID NO: 24847 - DNA, 95 bp, Homo sapiens
  chr11:567174-567269
  hypo
ggatcccacctggtgtaagtacgggcagagggcagagccaggctgtatcgaggggcggcgctgggaccctcctcgcccagagttcctactcatcc

SEQ ID NO: 24848 - DNA, 82 bp, Homo sapiens; identical to SEQ ID NO: 7850
  chr11:575649-575731
  hypo

SEQ ID NO: 24849 - DNA, 330 bp, Homo sapiens
  chr11:590963-591293
  hypo
aagtgctgggattacaggtatgagcccctgctcccggcctatgaaaagaaattctaaaaatttactagtgaatgtccaacaatcttttggaaaagttagcagaagacttgaacaggctcgccgcagaggggcctgtgcacaatgccgcccccacgcctgtccttcctccctttattgttcttacttgtcactgagatgctacgcgttcatggagctgctctttcctccccgctagggctggcagctctgcagggaggcaaggctcgctgtgctccctccactgccgtgttgccagcagcttagtggagggcctggcgcatggaggcattt

SEQ ID NO: 24850 - DNA, 111 bp, Homo sapiens
  chr11:593650-593761
  hypo
gggggtcctgcaggcggccaccacgtttgtctcatcgtcagttcgccctcctcctcatggcctgtgggagtacaggggccttgcagtgcgctccgccggcccttccaggtc

SEQ ID NO: 24851 - DNA, 30 bp, Homo sapiens
  chr11:599075-599105
  hypo
ccccggcgctggtgcgcgtgcacatttggc

SEQ ID NO: 24852 - DNA, 30 bp, Homo sapiens
  chr11:601645-601675
  hypo
caagatctaagaaacgccaacatcgagtga

SEQ ID NO: 24853 - DNA, 61 bp, Homo sapiens
  chr11:609530-609591
  hypo
agttccccggatgtggcgcctgcggggaaggaagacagcccctctgcgagtgggagggtac

SEQ ID NO: 24854 - DNA, 30 bp, Homo sapiens
  chr11:618978-619008
  hypo
ctgttttctgcacccgggggccccccgggt

SEQ ID NO: 24855 - DNA, 89 bp, Homo sapiens
  chr11:688458-688547
  hypo
gactagaaggaaaaaccgctccgtcaggtcacgtccgagagtgacaccaggcgtgtcactgagcccagctgggccgtcctccagcaggg

SEQ ID NO: 24856 - DNA, 30 bp, Homo sapiens
  chr11:712378-712408
  hypo
tccaagcctgggtgcgagctgggctcccgg

SEQ ID NO: 24857 - DNA, 31 bp, Homo sapiens
  chr11:724960-724991
  hypo
ctttctccagggtccccgcccttggactctg

SEQ ID NO: 24858 - DNA, 31 bp, Homo sapiens
  chr11:733238-733269
  hypo
tttgccatggcagccccgtgaaacacagaag

SEQ ID NO: 24859 - DNA, 34 bp, Homo sapiens
  chr11:744541-744575
  hypo
ataagaaaatatttttgaggccgggcgcggtggc

SEQ ID NO: 24860 - DNA, 199 bp, Homo sapiens
  chr11:763301-763500
  hypo
ccgccctcacctgccccgccctcacctgtccccgccccgcagggagctcgaggagcagcacggcatccactgcaacatgacgttactcttctccttcgcccaggctgtggcctgtgccgaggcgggtgtgaccctcatctccccatttgttgggcgcatccttgattggcatgtggcaaacaccgacaagaaatcctat

SEQ ID NO: 24861 - DNA, 166 bp, Homo sapiens
  chr11:772955-773121
  hypo
tggggacatcctggctccatccgaaaggctgagtgtgttcccacggctgaggtggccacaaacaattgctgcctgtccaggccatgctggggacggcggccccactccaacacacaaagggtgctgtgtagagcgctggcttgtccaccccggccagtggacacac

SEQ ID NO: 24862 - DNA, 35 bp, Homo sapiens; identical to SEQ ID NO: 7854
  chr11:832780-832815
  hypo

SEQ ID NO: 24863 - DNA, 30 bp, Homo sapiens
  chr11:840392-840422
  hypo
attgagcagcttctcgatcaggtccacgtg

SEQ ID NO: 24864 - DNA, 170 bp, Homo sapiens
  chr11:850937-851107
  hypo
gggccatcagtgttcgcgggagacactggctttcccgcgcctccggcagcagaggcttccctaacttttgcggaggtggggtcaggtgtgctcagacctgcagtggtgtccgggggggccctgtgtgctggatggagcagagctgaggtagagggcggacagggttccac

SEQ ID NO: 24865 - DNA, 30 bp, Homo sapiens
  chr11:855956-855986
  hypo
tgagagctggccagcgtggcccccgtgggc

SEQ ID NO: 24866 - DNA, 30 bp, Homo sapiens
  chr11:862805-862835
  hypo
caggccttggctgccgcagtgaccccccag

SEQ ID NO: 24867 - DNA, 30 bp, Homo sapiens
  chr11:864804-864834
  hypo
ccccatccgggccgcgcaccgtggggttct

SEQ ID NO: 24868 - DNA, 31 bp, Homo sapiens
  chr11:880350-880381
  hypo
gctcagtgacccagagcgcacccagggccag

SEQ ID NO: 24869 - DNA, 30 bp, Homo sapiens
  chr11:891002-891032
  hypo
gacaagcacaattacgcgctgctgcaaaag

SEQ ID NO: 24870 - DNA, 34 bp, Homo sapiens
  chr11:907517-907551
  hypo
ctggggttgggggcagcggcggtgggagctgaac

SEQ ID NO: 24871 - DNA, 30 bp, Homo sapiens
  chr11:921977-922007
  hypo
acccagctgttgtccggggcctgtgtctca

SEQ ID NO: 24872 - DNA, 25 bp, Homo sapiens
  chr11:939450-939475
  hypo
ttgactttttttgagacggggtttc

SEQ ID NO: 24873 - DNA, 31 bp, Homo sapiens
  chr11:984630-984661
  hypo
gtgctgtcttacagatcgtgacgtctgcatc

SEQ ID NO: 24874 - DNA, 455 bp, Homo sapiens
  chr11:985374-985829
  hypo
gggcagggtgggctgcgggccactggagactggtgagcaccgttctgtcttgcccagaagaccctgcagtgcgaggccgcctgactgagtgcctggagaccatcctgaacaaagcccaagaaccgcccaagtcgaagaaggtccagcactccaacgcgaagaatgccgtgctcttcgaggccatcagcttaatcattcaccatgacaggtgtgtcggctgcctgtggagaggcttcgtctcgcgcacacacacacgttccttctcgttggcacgagactgggcggatcatgtctggtttgtccactccatgggcctccccttcgtcctgcctctgtgctccctgccggatgctttttttctttctgtgcagcccggcccctcctgctctgagctcaccgtggattgctttggtgactgtggtctcatcccacacgagggccttttcctccttccc

SEQ ID NO: 24875 - DNA, 31 bp, Homo sapiens
  chr11:991641-991672
  hypo
tgccctggaagtgtcacggagtcaggttggg

SEQ ID NO: 24876 - DNA, 42 bp, Homo sapiens
  chr11:991962-992004
  hypo
gctgggcaggtgcctccggggggcacccgtgagagtgagcca

SEQ ID NO: 24877 - DNA, 30 bp, Homo sapiens
  chr11:992637-992667
  hypo
atcaaccgggacgacgtgcagggctacgcg

SEQ ID NO: 24878 - DNA, 30 bp, Homo sapiens
  chr11:993357-993387
  hypo
gatagctggagacccgagatccaggtgaga

SEQ ID NO: 24879 - DNA, 302 bp, Homo sapiens
  chr11:996127-996429
  hypo
ggagatttgtctgtgagctgccggagcaggggccttcccgtgggtgctgggccggcagcggctccgccctgcagagaggaggacgcggccccagttgggtgaggaggcgagggcaggatgacgtgatccaggggaggctggtgtgcagggattcctggaggccggctttcagcaagggcactgtgaagtcttccacggaaacctgggattgcctgttggaagctgggaaggcaccaggtgctctcgctcccctccagctgctttgacgttaagaggaactcgctgagggagcatggaaaggg

SEQ ID NO: 24880 - DNA, 264 bp, Homo sapiens
  chr11:998036-998300
  hypo
ggccgatggcttcccacgcagctcacagctttgtcaggctgtggaggccacagtgttggcgggcgctgtccccggcgtagggagcaaagcgccgccttcagatggtctcatcgagacacgccttggatatttttgggactcttctctgccagctcctctgtgacctcccacccttggagcacatgagacccgtgtcgtcttctcttgcagaggtgctccgtcacaagagcagagcctgggagcctgccccgtttctgactgccc

SEQ ID NO: 24881 - DNA, 57 bp, Homo sapiens
  chr11:1000518-1000575
  hypo
gggctgctcgtggacgtgttctcagactcggcctctgtggtcgcgcctctcgctcct

SEQ ID NO: 24882 - DNA, 212 bp, Homo sapiens
  chr11:1006106-1006318
  hypo
ttgcagtcatggggcggggccggcagaggcctgtgtgattgtggcgtccctggaaaagatgcttggcaggcccctccagctgtagcccagcctgcagacggggcgttctgtgggtccttccccgtgcatatgcgtgtgatctcacccatcccgtgtgggtgcgcaggaggggccgagggaggagggtgctggagggcggaagttacctctga

SEQ ID NO: 24883 - DNA, 30 bp, Homo sapiens
  chr11:1007104-1007134
  hypo
ctaaaacagggagacgctaacgtctctacc

SEQ ID NO: 24884 - DNA, 31 bp, Homo sapiens
  chr11:1007687-1007718
  hypo
caccagtttctgctaacggtgacaaaaattg

SEQ ID NO: 24885 - DNA, 30 bp, Homo sapiens
  chr11:1010697-1010727
  hypo
ctgcagatgagcaccgtgtccagtgccaca

SEQ ID NO: 24886 - DNA, 31 bp, Homo sapiens
  chr11:1013851-1013882
  hypo
tgagcaccttggtggacgtggggcaggcctc

SEQ ID NO: 24887 - DNA, 30 bp, Homo sapiens
  chr11:1027545-1027575
  hypo
cgggagggggcggccgggagggcaatctcg

SEQ ID NO: 24888 - DNA, 30 bp, Homo sapiens
  chr11:1028276-1028306
  hypo
gacagttccccgcccgccaggagtccacaa

SEQ ID NO: 24889 - DNA, 30 bp, Homo sapiens
  chr11:1033142-1033172
  hypo
gctcagggctgctccgcccgtttccctgca

SEQ ID NO: 24890 - DNA, 30 bp, Homo sapiens
  chr11:1077628-1077658
  hypo
ctcattgagaagagcgatgcctacaccaaa

SEQ ID NO: 24891 - DNA, 380 bp, Homo sapiens
  chr11:1096251-1096631
  hypo
ccccagcccagcccttgcacccgaccccggccgaggggcacaggtggcacggctcactccggctcccttgcaggctactgcacgggctggggcgacccgcactatgtcaccttcgacggactctactacagctaccagggcaactgcacctacgtgctggtggaggagatcagcccctccgtggacaacttcggagtttacatcgacaactaccactgcgatcccaacgacaaggtgtcctgtccccgcaccctcatcgtgcgccacgagacccaggaggtgctgatcaagaccgtgcatatgatgcccatgcaggtgcaggtaggcacagcgtggccacaggaggctggcatggaggcgggtgctgacatgggccccaa

SEQ ID NO: 24892 - DNA, 189 bp, Homo sapiens
  chr11:1098637-1098826
  hypo
cagcctgtttgcccagtgccacgcactggtgcccccgcagcactactacgatgcctgcgtgttcgacagctgcttcatgccgggctcgagcctggagtgcgccagtctgcaggcctacgcagccctctgtgcccagcagaacatctgcctcgactggcggaaccacacgcatggggcctgctgtaagtg

SEQ ID NO: 24893 - DNA, 693 bp, Homo sapiens
  chr11:1103665-1104358
  hypo
gggtggctggaggctggacaacggcctctgggtgggcagtgagggctgggggctgaggccgagcctggggaggggacgcagcgagggagagcctcctcgaagatgtggaggccctgccctaagccgctgcccgctctccccaggcacccctcgcaatgagaccagggtgccctgctccaccgtccccgtcaccacggaggtttcgtacgccggctgcaccaagaccgtcctcatgaatcattgctccgggtcctgcgggacatttgtcatgtgagtcccaggctgggagtgtgcctggagggggtggtggagaccccagggaggcgagaggccagcgctggccccggaaggtcacccctcactccgccctccccccaggtactcggccaaggcccaggccctggaccacagctgctcctgctgcaaagaggagaaaaccagccagcgtgaggtggtcctgagctgccccaatggcggctcgctgacacacacctacacccacatcgagagctgccagtgccaggacaccgtctgcgggctccccaccggcacctcccgccgggcccggcgctcccctaggcatctggggagcgggtgagcggggtgggcacagcccccttcactgccctcgacagctttacctcccccggaccctctgagcctcctaagctcggcttcctctcttcagatatt

SEQ ID NO: 24894 - DNA, 346 bp, Homo sapiens
  chr11:1105011-1105357
  hypo
gtgtgtgtgagtgcatagccccgggggtcgggtggccctggggaggtggtgtgtgtgtgtgtgcgtgtgtgcgtgcatgcacgtgtgagaatttgctttgcacacgtgtctgcatgtgccatgtgtatgtgatgtgtgtgcacgtgtgtgcatgcatgtgcgtgtgagcatttgcttgtgtgcacacgtgtctgcatgtgccatgtatgtgatgtgtgtgtgcacgtgtgtgtgtgcatgagcgtgtgagcatttgcttgtgtgcacacgtgtctgcatgtgccgtgtgtatgtgatgtgtgtgcacgtgtgtgtgtgcatgagcgtgctagcatttgcttgtgtg

SEQ ID NO: 24895 - DNA, 30 bp, Homo sapiens
  chr11:1140343-1140373
  hypo
gcacagcacgctcacgccgtgcggtccggg

SEQ ID NO: 24896 - DNA, 132 bp, Homo sapiens
  chr11:1214721-1214853
  hypo
ctgggccacacccaactgctccgaggccacctgtgagggcaacaacgtcatctccctgcgcccgcgcacgtgcccgagggtggagaagcccacttgtgccaacggctacccggctgtgaaggtggctgacca

SEQ ID NO: 24897 - DNA, 728 bp, Homo sapiens
  chr11:1215278-1216006
  hypo
cagggccatggtgccaccacccgagccacccgtaaggctgcccctggggcctggcaggtgtgtgcagcggctggggtgacccccactacatcaccttcgacggcacctactacaccttcctggacaactgcacgtacgtgctggtgcagcagattgtgcccgtgtatggccacttccgcgtgctcgtcgacaactacttctgcggtgcggaggacgggctctcctgcccgaggtccatcatcctggagtaccaccaggaccgcgtggtgctgacccgcaagccagtccacggggtgatgacaaacgaggtgggggcgcgcccggtgtgccgcggagggggtgggggacgcggctttcccggcaagagcctgagcagcggctgaccgcccgcccgcctgccttctgacttcccgtcgaccacgccctgcgtccagatcatcttcaacaacaaggtggtcagccccggcttccggaaaaacggcatcgtggtctcgcgcatcggcgtcaagatgtacgcgaccatcccggagctgggagtccaggtcatgttctccggcctcatcttctccgtggaggtgcccttcagcaagtttgccaacaacaccgagggccagtgcggtgaggccacagggctcccgggcatcgtctggcattcgcgggggcgggggtgccgggcaggggcgaggccaccacgtgccgcgtgtgccggtgtctctgctttctggctg

SEQ ID NO: 24898 - DNA, 30 bp, Homo sapiens
  chr11:1250877-1250907
  hypo
ccccgtgcatgggccggccctgcctcacgc

SEQ ID NO: 24899 - DNA, 30 bp, Homo sapiens
  chr11:1257644-1257674
  hypo
ctttaaggcggtggcgagagggccgggtgg

SEQ ID NO: 24900 - DNA, 30 bp, Homo sapiens
  chr11:1262564-1262594
  hypo
gtccagctcaggccccgtgacggtcacccc

SEQ ID NO: 24901 - DNA, 1082 bp, Homo sapiens
  chr11:1262810-1263892
  hypo
ctgtgacgtccacttcggcctggtgtgcaggaactgggagcaggagggcgtcttcaagatgtgctacaactacaggatccgggtcctctgctgcagtgacgaccactgcaggggacgtgccacaaccccgccaccgaccacagagctggagacggccaccaccaccaccacccaggccctgttctcaacgccgcagcctacgagtagcccggggctgaccagggctcccccggccagcaccacagcagtccccaccctctcagaaggactgacatcccccagatacacaagcacccttggtacagccaccacgggaggccccacgacgcctgcaggctccacagaacccactgtcccaggggtggccacatccacccttccaacacgctcagcccttccagggacgacggggagcttgggcacatggcgcccctcacagccacccacgctggccccaacaacaatggcaacctccagagctcgcccgacaggcacagccagcaccgcttccaaagagccgctgaccacgagcctggcgccaacactcacgagcgagctgtccacctctcaggccgagaccagcacgcccaggacagagacgacaatgagccccttgactaacaccaccaccagccagggcacgacccgctgtcaaccgaagtgtgagtggacagagtggtttgacgtggacttcccaacctcaggggttgcaggcggggacatggaaacttttgaaaacatcagggctgctgggggcaagatgtgctgggcaccaaagagcatagagtgccgggcggagaactaccccgaggtaagcatcgaccaggtcgggcaggtgctgacctgcagcctggagacggggctgacctgcaagaacgaagaccagacaggcaggttcaacatgtgcttcaactacaacgtgcgtgtgctttgctgtgacgactacagccactgccccagtaccccagccaccagctccacggccacgccctcctcaactccggggacgacctggatcctcacaaagccgaccacaacagccactacgactgcgtccactggatccacggccaccccgacct

SEQ ID NO: 24902 - DNA, 150 bp, Homo sapiens
  chr11:1275369-1275519
  hypo
cctcttacaccttccggggcaactgcacctatgtcctcatgagagagatccatgcacgctttgggaatctcagcctctacctggacaaccactactgcacggcctctgccactgccgctgccgcccgctgcccccgcgccctcagcatcc

SEQ ID NO: 24903 - DNA, 61 bp, Homo sapiens
  chr11:1276019-1276080
  hypo
gccctgggcgtgagcgtcaccttcaatggccaagtcttccaggcccggctgccctacagcc

SEQ ID NO: 24904 - DNA, 30 bp, Homo sapiens
  chr11:1276646-1276676
  hypo
ggcccattcttcaacgcctgcatcagcgac

SEQ ID NO: 24905 - DNA, 30 bp, Homo sapiens
  chr11:1282940-1282970
  hypo
tgtgtggcaccccgcgctccgtgctcctgc

SEQ ID NO: 24906 - DNA, 30 bp, Homo sapiens
  chr11:1301050-1301080
  hypo
agcatggtaagtcccggccgccggtgggca

SEQ ID NO: 24907 - DNA, 30 bp, Homo sapiens
  chr11:1302878-1302908
  hypo
cactccggcagccccgtctcaccagagggc

SEQ ID NO: 24908 - DNA, 57 bp, Homo sapiens
  chr11:1307210-1307267
  hypo
ccagggagggagcacacgcacctgtgatgggcacatagccaacgccctgctggtaca

SEQ ID NO: 24909 - DNA, 46 bp, Homo sapiens
  chr11:1312470-1312516
  hypo
ttcagccctgcagctccggctgcctgtaaagcgtcctgcctggaat

SEQ ID NO: 24910 - DNA, 30 bp, Homo sapiens
  chr11:1359749-1359779
  hypo
cccccatgctgttcccgtgataacgagtga

SEQ ID NO: 24911 - DNA, 30 bp, Homo sapiens
  chr11:1360070-1360100
  hypo
ggggggcccgggccacggtggatggttctg

SEQ ID NO: 24912 - DNA, 31 bp, Homo sapiens
  chr11:1377226-1377257
  hypo
ataccaactttctacccggccccagcactgg

SEQ ID NO: 24913 - DNA, 312 bp, Homo sapiens; identical to SEQ ID NO: 7858
  chr11:1411221-1411533
  hypo

SEQ ID NO: 24914 - DNA, 235 bp, Homo sapiens; identical to SEQ ID NO: 7859
  chr11:1411549-1411784
  hypo

SEQ ID NO: 24915 - DNA, 335 bp, Homo sapiens; identical to SEQ ID NO: 7860
  chr11:1411841-1412176
  hypo

SEQ ID NO: 24916 - DNA, 31 bp, Homo sapiens
  chr11:1433607-1433638
  hypo
gcgccgccccgtcctgcggtgggtggagtct

SEQ ID NO: 24917 - DNA, 362 bp, Homo sapiens
  chr11:1446109-1446471
  hypo
tggggctcacacacagcacctcgtgggcccagagtgctggcgggaggggtgttctccccgcctccatgggcaaagaatctggggcccttgtcagagaccgcggggtcagtgggattggcgcccaggccctgctgtgacgccacgtgtttcccactcagcgaggctgttcctgccaggcgtggggactcggaccctggtcctgagtgctgccccgaggcccgtgatgggaagcctgacgtctgcatcgtcctgcgctgcgtggccggtcggtcccggcgctctcagcacttggagtctcagctccccgggtcatcagtccaagccactcagcaggtggcttcggcttaaggcctctcaggtgg

SEQ ID NO: 24918 - DNA, 90 bp, Homo sapiens
  chr11:1464470-1464560
  hypo
gcctgtccccgggccgactccctctgagcccaggccctccaaggcccccgccctgccctgcgccccccaacagcccgggcactgctgtcc

SEQ ID NO: 24919 - DNA, 30 bp, Homo sapiens
  chr11:1464777-1464807
  hypo
cgtgttccacatgccgcactttatcccgcc

SEQ ID NO: 24920 - DNA, 824 bp, Homo sapiens
  chr11:1466429-1467253
  hypo
atgaagggccccaggtgagggcgggcgtcccaccctcgcagccgcccaggcccggccggagctgatgagcgggtggcccgtcctgtgtccacagagggggcaagaatgagcccgaaccagagcagcccattcctcgcaaggtgcagatccgctcgctgcccagcctggaggacatcgaccccgacgtgctggacagcatgcactcactgggctgcttccgagaccgcaacaagctgctgcaggacctgctgtccgaggagtgcgtctggggctgctcccgggtggggcacggggcctgaggtgggagcgctgccccggaggagccggcggccccgtgtgccagcgcgtctcgcgcctctcgcccgctgtagggagaaccaggagaagatgatttacttcctcctcctggaccggaaagaaaggtacccgagccaggaggatgaggacctgcccccccggaacgagataggtatgggtccaggggtggcctccagcccggcctgcactgccccaccggggtccgggggctgtctggcctgaccttcgtctgtactcagaccctccccggaagcgtgtggactccccgatgctgaaccggcacggcaagcggcggccagaacgcaaatccatggaggtgctcagcgtgacggacggcggctccccggtgcctgcgcggcgggccattgagatggcccagcacggccagaggtgtgtgtgccccgaggctgctgggcctccctccctgggccctggctgcgcggcactgccgcctggctcatcgctacccattggcctggggtctcggctgaggccattgggtgggg

SEQ ID NO: 24921 - DNA, 30 bp, Homo sapiens
  chr11:1469355-1469385
  hypo
gctgcaggccgagccgctcctcctgccagc

SEQ ID NO: 24922 - DNA, 45 bp, Homo sapiens
  chr11:1471395-1471440
  hypo
gtgcatgtgccgcgcggctgcccccaccccgctcgctccctgcgc

SEQ ID NO: 24923 - DNA, 30 bp, Homo sapiens
  chr11:1471924-1471954
  hypo
tccagccccagcgtcggaggggtgccctgg

SEQ ID NO: 24924 - DNA, 30 bp, Homo sapiens
  chr11:1483818-1483848
  hypo
tccagcaggcgccacggaaatgggcaagcc

SEQ ID NO: 24925 - DNA, 30 bp, Homo sapiens
  chr11:1486326-1486356
  hypo
cggggagccacgttcgtgccagccagactg

SEQ ID NO: 24926 - DNA, 162 bp, Homo sapiens
  chr11:1494353-1494515
  hypo
tcatgtgtgccctgtgcggggctgactcagcccacccgaaggggaagtgcagccccaaaatggacaggccatgaggacggggatgcagtgcccacacctgcctctcaggtgctgtcctccccctgggacagctctgcatgaccttcacgcccaccttcccag

SEQ ID NO: 24927 - DNA, 230 bp, Homo sapiens
  chr11:1497230-1497460
  hypo
aagagcaacctgagcacgagcaccctggcactgcggcagtggatccacacgggggccgaggcacagctgggccgagggaggaggaggcacacctggagcaggacggtggagaccgcatcacactgctcagaacagcatgcagttgaaaacttattaactgtttatttcgggaattttccattaactattttcagaccatagttgactgtgggtaacggaaactgtagata

SEQ ID NO: 24928 - DNA, 376 bp, Homo sapiens
  chr11:1535887-1536263
  hypo
catcaccgcaggccacggcgcttgtccttcccagaggcccccaaccacagctgctgagcgacacccacaccgcttctctcttcacacagcggactgatgaggagtcccgccaagcaggagctctgagccacagcacagagtgtgctggcccaagtccacgcctgcatgcaagctcagccatgcgtctaatggcaataaccgtggaatgagctcgtgaggttcggagagtcccaccccgacggggagagccacagggagccccaatctcggcagtgaccggctccaggtccccacgtaccgtgagagtggggacagcggtggacagcagcccttgagcagggcacaaccttcagagagacctcgacaagtgaacact

SEQ ID NO: 24929 - DNA, 209 bp, Homo sapiens
  chr11:1552161-1552370
  hypo
caggtgagcaggaaccacccacggccaagccggaggctgctgagccatgcccaagatcagagacgcacgcgtctggagcagcgcctgacacctgaccctggtggctgaccatgcggcctgcctggcagtcctgggcatgggatgcacacccgcaccctggcccacccaggggcagaagaggggaccacgaagttgtgtgttttctgctg

SEQ ID NO: 24930 - DNA, 40 bp, Homo sapiens
  chr11:1584968-1585008
  hypo
tgtatggagatccccccgtgcccagcggacacctccctga

SEQ ID NO: 24931 - DNA, 39 bp, Homo sapiens
  chr11:1586816-1586855
  hypo
gctgggtacctggctgcgtgcagccggctggatgagctc

SEQ ID NO: 24932 - DNA, 298 bp, Homo sapiens; identical to SEQ ID NO: 7861
  chr11:1592947-1593245
  hypo

SEQ ID NO: 24933 - DNA, 118 bp, Homo sapiens; identical to SEQ ID NO: 7863
  chr11:1594038-1594156
  hypo

SEQ ID NO: 24934 - DNA, 30 bp, Homo sapiens
  chr11:1670294-1670324
  hypo
ggaggaatggcgccacgagaaagacgtctt

SEQ ID NO: 24935 - DNA, 38 bp, Homo sapiens
  chr11:1715582-1715620
  hypo
gacaaccgtgggtcagcggaggccggcaacttcatttc

SEQ ID NO: 24936 - DNA, 213 bp, Homo sapiens
  chr11:1749038-1749251
  hypo
agtttctttgtgattgcgatgactctttaggaaatttctttggaactaaagatcactgtggttgttcaactaccagtttattgatgtattaacatcagtgtattaaactcgggttcctattttatgcaataaactgtaatcttgactaacattattggctttgatgctcaagttgtctctggcgtggccggtgggaagcgactcctgcgtgtt

SEQ ID NO: 24937 - DNA, 30 bp, Homo sapiens
  chr11:1795195-1795225
  hypo
tggaataactgaatacgcagctcactgtcc

SEQ ID NO: 24938 - DNA, 224 bp, Homo sapiens
  chr11:1795686-1795910
  hypo
ggcttactggggagacaagcccggcgcccaggaagggatgcgaatgtacatggactacccgtgcaaatgcttatggtgaaatgttctgtgtcaacttggctgggccacagtatccagatatttgcaaacgctagtctagatgtttccgtgaaggtgtttttcagaggtgattctcattcccatttaaatccgtagactttgagtaaagccgatgatgtgccagt

SEQ ID NO: 24939 - DNA, 192 bp, Homo sapiens
  chr11:1800815-1801007
  hypo
ggctgctctctctgggtcccacgtgggacatgctatagcccctcactcgctcaccccactgagtttgcagggactgcgcccctctctgggcgacacctaacacgggagagtgcaagctgggcagacggaaagggggttctcggggtccgtggctccccctgctccttgtgcgcctaggctgggtcctcttgg

SEQ ID NO: 24940 - DNA, 70 bp, Homo sapiens
  chr11:1824187-1824257
  hypo
ctggaaggtggatggcgaggccgggatggagccgctgatccacgcagagtatttgcgctcgggaggagca

SEQ ID NO: 24941 - DNA, 442 bp, Homo sapiens
  chr11:1824637-1825079
  hypo
ggagctggtggtcgccgtggccacctcctgcttgaagtccagggcaacatagcacagcttctccttaatgtcacacgtgatcgcccgctcggccgtggtggtgaagccgtagccatgcgcagtgagatctttgtgaggtagtcagtctggtcccggccagccgggtccagacacaggatggcatgggggagggtgtagccctcatagatggacactgtgcaggtgaccccgtcgctggagttcatcatgatgccagtggtatggccaggagtgtacttggacagcacggcctggatggccacgtacatggccgaggtgttgaaggtctcaaacatgatctgggtcatcttctttctattggctttggggctcgggaggcctcggtcagcagcaccgggtgctcccgcagctcgttgtagaaggtgtggtgccagatcttctc

SEQ ID NO: 24942 - DNA, 142 bp, Homo sapiens
  chr11:1825138-1825280
  hypo
ctctctcgctctgggcctcgccacccacatagaagtccttctgacccatgcccaccgtcatgccctggtgtctggggcaccccacgatggaggggaagacggcccagggggcatcgtcgtcggtgaagctggccttgcacat

SEQ ID NO: 24943 - DNA, 30 bp, Homo sapiens
  chr11:1825539-1825569
  hypo
tggacgggcggcaggcgtggagggtggcgg

SEQ ID NO: 24944 - DNA, 31 bp, Homo sapiens
  chr11:1829205-1829236
  hypo
gctgttcctcatcccccgtgagacttgggga

SEQ ID NO: 24945 - DNA, 310 bp, Homo sapiens
  chr11:1847135-1847445
  hypo
ctgcatgcagtgacacctacacgcagtgggcctgcccgcagtgatgcctgtacgcagtggggcctgcacgcagtgggcctgcccacagtgacgtctgcacgcagtgacgtctgcccacagtggggcctgcacgcagtgacgcctacatgcagtgatgcctgtacgcagtgacgtctgcccacagtggggcctgcacgcagggcgtttgctcacggcaggtgcgtgcatggtggaggcggtgccgcggggctttggtccagcctggtcaaggtgtggaaaagcccccgtcgcacctgcaagtcccccacct

SEQ ID NO: 24946 - DNA, 43 bp, Homo sapiens
  chr11:1956447-1956490
  hypo
agtggactcagggttcattttcggaacccctttaagcttatag

SEQ ID NO: 24947 - DNA, 603 bp, Homo sapiens
  chr11:1957434-1958037
  hypo
tctttctagatcatgaatgtccgggccagagtgcagatgctggccaagttgtaagtagccgggtccgccctgggccaggcccgtgggtgtgcgttgcacggtgaggtgaacctctcgcatggcaaaaacctggatcgctcaggatgctggcggcagggggcctggagccttcctcctgcccccgctctcccctcgtgcctgcagccgggggcttcccagtggccgctgccctgttggcaagcgaggaagggcccccaccttcccaggagctccgcctcaagccagcagcggccacagagtgcccctgggcacaggcacgagggcgggagcggctggcccaggagcagcagggccgttcggagctctgagctcagcggctgaagggagctggagctgagaaggaggggtccgcaggcctcacctgcaacccctccccagccccatccgtgctccgtaccccccgccccacatcctgccgcaggctgaaggtaagtggccagctacgggctgctgtgtgtggcagtccaggccagtacaggctggcgagagtaagtccaggcatgagcccaggggccacgggacggtgtccccctgcacaaggag

SEQ ID NO: 24948 - DNA, 254 bp, Homo sapiens
  chr11:1958919-1959173
  hypo
tctccctcctcctgtcgccttggcttccctgcggcgcccagggcgggctcctccgtggtgcacgtgacctcacggcctccctgttgtgccgtcaggggtcattgcagacccctctgagggtgggcagtcggcgtggtgtgcatgtgcctgcgtgtgtgcatgtgtgcatgtgccgagagtgcccaggaacgtgtgtgagggcacggcctttgccagccaggtgtcctgctgagcagccgcgtctgaatggggcc

SEQ ID NO: 24949 - DNA, 30 bp, Homo sapiens
  chr11:1973530-1973560
  hypo
gggtcttggtctgacgtggctcatgggaaa

SEQ ID NO: 24950 - DNA, 30 bp, Homo sapiens
  chr11:1977366-1977396
  hypo
tgagcagttgaatccggcgccggcagaaag

SEQ ID NO: 24951 - DNA, 30 bp, Homo sapiens
  chr11:1977654-1977684
  hypo
gtggccagcagggacgcgccccaggtgggc

SEQ ID NO: 24952 - DNA, 30 bp, Homo sapiens
  chr11:1985747-1985777
  hypo
cccggcagccctcgcgcggcccagggcagg

SEQ ID NO: 24953 - DNA, 30 bp, Homo sapiens
  chr11:1988743-1988773
  hypo
cccccaagggttcccgggaacccagagtcc

SEQ ID NO: 24954 - DNA, 312 bp, Homo sapiens
  chr11:2209802-2210114
  hypo
gcatcagaggacatcatcaaccgtaaaaaggcaactcccagaacaggagaaaatgccgcaaatcacacacctgatcggggagtagtacccggaacccacagagaacccctaaaacacaaccgccaaacaccagattcaaaagtgggcgaaggacgtagacgggcgcctctccagggaaggtgtatccaggacagcagccgcagggaaaggtgctcaatgccacgaatcattagggcaatgccaatcaaaatcacggcgcgacaggattccacacccgttagggtggccaccgtcaacaaacccaaacaatgc

SEQ ID NO: 24955 - DNA, 31 bp, Homo sapiens
  chr11:2278537-2278568
  hypo
caacgaccgcccctgccggagacccccgccc

SEQ ID NO: 24956 - DNA, 171 bp, Homo sapiens; identical to SEQ ID NO: 7868
  chr11:2290846-2291017
  hypo

SEQ ID NO: 24957 - DNA, 421 bp, Homo sapiens; identical to SEQ ID NO: 7869
  chr11:2291072-2291493
  hypo

SEQ ID NO: 24958 - DNA, 124 bp, Homo sapiens; identical to SEQ ID NO: 7870
  chr11:2291800-2291924
  hypo

SEQ ID NO: 24959 - DNA, 113 bp, Homo sapiens; identical to SEQ ID NO: 7871
  chr11:2291944-2292057
  hypo

SEQ ID NO: 24960 - DNA, 254 bp, Homo sapiens; identical to SEQ ID NO: 7872
  chr11:2292105-2292359
  hypo

SEQ ID NO: 24961 - DNA, 324 bp, Homo sapiens; identical to SEQ ID NO: 7873
  chr11:2292391-2292715
  hypo

SEQ ID NO: 24962 - DNA, 80 bp, Homo sapiens
  chr11:2294684-2294764
  hypo
cgaagctggtgaacctcgagaacacgaggccgcgtgaacgaagccagacaccgaggaccacgtagcgtgagactctcagt

SEQ ID NO: 24963 - DNA, 90 bp, Homo sapiens
  chr11:2328965-2329055
  hypo
cgtttccaccagagaacgccccactccacgactaggggcacgggcatcagtgagagagaggggacagtggttggccgggccatggagacc

SEQ ID NO: 24964 - DNA, 30 bp, Homo sapiens
  chr11:2335442-2335472
  hypo
gccctgtgaacagggcggggaagctgcctg

SEQ ID NO: 24965 - DNA, 30 bp, Homo sapiens
  chr11:2335824-2335854
  hypo
gccaggcaagaccctcgggggctggacacc

SEQ ID NO: 24966 - DNA, 30 bp, Homo sapiens
  chr11:2395933-2395963
  hypo
ggcccagggagcggcgctcccatcccaggc

SEQ ID NO: 24967 - DNA, 22 bp, Homo sapiens
  chr11:2409425-2409447
  hypo
gctaccacgcccagccccctct

SEQ ID NO: 24968 - DNA, 31 bp, Homo sapiens
  chr11:2413142-2413173
  hypo
tgggcctcttgctccccgcttcccagatcat

SEQ ID NO: 24969 - DNA, 158 bp, Homo sapiens
  chr11:2414472-2414630
  hypo
gagagacactgacagctgtcccgcgggtacagggccctgtctgggtggccaggcccatgtctcgggcccacagtgcgccccccacccttggacggcgccttctccctccccaggtgcatgctgcccagccagggagcgtgggggagttcgggagggct

SEQ ID NO: 24970 - DNA, 31 bp, Homo sapiens
  chr11:2427869-2427900
  hypo
gatcaggacaggcccccgcacctgtgggcgg

SEQ ID NO: 24971 - DNA, 948 bp, Homo sapiens
  chr11:2435820-2436768
  hypo
ctgagggcacctggagccccacggcggtaacaggcagccctggcgaggcccaggacccttcgtccgacccctccgtcacatcctcccccgcgcgcgggcccggccccagccgccggtcactcaccaagggccagccgctcgtatttcgcctcgcgcgtggctcgggccgcctcggcctccgtctccaggtgcgacatctctttgaggattttgcaggcggccagtgcggctgccacaccttcctggccctacgagacctggtctcaggaggccgcccctcccctgcccccgcgctgggcccgcggcctgggctcaccatggcccagaagtaggtggccatctcgtggcggttctgcagcacggcccacaggaacaggtcccgccaggggttctcgctcttctggttcaggtccagcagccacttctggcccgtgggccgcttggccgggcccttctcctggaggacacgggcgtcggcctcctgctgcggccccagcctcgccctccatccccacggagcccccgctcaccgccctcctgcggtcccctggccggccgtcctggtagaagcctcggcaggcgtcctgcaggaagtccttgagtacgcgggagacctcgtgcagggagaaggccggtggccccgcgggtggctcccgggcctgctgggtgcccaggccggccagcgtcagccgggcctcctcctgcttccgctgcagcaggtcgaagagcaggctcttgcgtgacacggagcggtagagctcctgcagccgcccatacgtcaggaagtcggccacgtctgcgccgttgtccacaaagaggcgcacaaactcgggcttgttgctgaccagggcgtccaccatcacctcctccaggtcacaggacttggcggccatgggcacccgagggaagggggacaagagagtgagcgagagacaggaggagggggtc

SEQ ID NO: 24972 - DNA, 30 bp, Homo sapiens
  chr11:2481626-2481656
  hypo
cccaggtggccctgcgggtacaggtacttg

SEQ ID NO: 24973 - DNA, 30 bp, Homo sapiens; identical to SEQ ID NO: 7877
  chr11:2554395-2554425
  hypo

SEQ ID NO: 24974 - DNA, 39 bp, Homo sapiens
  chr11:2562213-2562252
  hypo
cacagacatatgtgcacggatgggcgtgtggacgtatgc

SEQ ID NO: 24975 - DNA, 30 bp, Homo sapiens
  chr11:2594825-2594855
  hypo
gggaagcagggacccggcctgtgggcccag

SEQ ID NO: 24976 - DNA, 82 bp, Homo sapiens
  chr11:2596401-2596483
  hypo
agcccgcagcagagcggcactcccactcccacacctgtgcaaacatccgcccgctggccgggaacacggcccctttgtgccc

SEQ ID NO: 24977 - DNA, 31 bp, Homo sapiens
  chr11:2597547-2597578
  hypo
tggatgtgagaactctcgaatcccctgagtg

SEQ ID NO: 24978 - DNA, 30 bp, Homo sapiens
  chr11:2602156-2602186
  hypo
gcggaggcagagcccggagtggaggggtga

SEQ ID NO: 24979 - DNA, 30 bp, Homo sapiens
  chr11:2610580-2610610
  hypo
gtgatggtgtggctcggatctgcgtccctc

SEQ ID NO: 24980 - DNA, 97 bp, Homo sapiens
  chr11:2753803-2753900
  hypo
cgagcgaaggggcccgaggcaccggtgcttccgacggggcccgagggccgtctgacctttccggccacggggcagcagttgcgtgagcaggaacaat

SEQ ID NO: 24981 - DNA, 386 bp, Homo sapiens
  chr11:2772655-2773041
  hypo
ccaaagtgagcatctgtcccacgttccacccccaggaaaccctctctcctgacgcggggacttgcgtctcagtgcagagggcagtggagggacagtgcagctccgaaatgagcatctgagttcactgctggtgggcaccatcccggccaacaggccactagtgtgttctccctctttcaaacggggcggcgaccctcgtctgacaggcggctgttctgagagcggtggctgtcccagggaagccctcggtgagcgtagcgttaccatggtttttaaattaaagcatctgcagatgcgctgtgtccctgcaagggcaggcagatcgggaccccagggactggtccccatagccaaggtgttcagccgccctgtcccctacacagagt

SEQ ID NO: 24982 - DNA, 83 bp, Homo sapiens
  chr11:2782399-2782482
  hypo
ttttcccctggcatcaggcggctcagcagcctgggctctcctgcgtccaccccagccaaacccttcatcgttcctccggtcaa

SEQ ID NO: 24983 - DNA, 30 bp, Homo sapiens
  chr11:2783762-2783792
  hypo
aatgtcctattccacgggtccccaggccac

SEQ ID NO: 24984 - DNA, 403 bp, Homo sapiens
  chr11:2818019-2818422
  hypo
ccacacaagcccccactgctgcgccgtccctcctgcgccacctgacagatgtggcggtgagaaaacgatggggcagggaaacgttcgccattcggtgccaataaaggccgcctttatcccgaccgtaaatggtttctgtgtggagtgagactgtgcctgtcccgggcctaaccccccaagggccagagaggcgaaattagatccgtggggagagattttacaacgtatgggctggtggcaagtggcggcaaaccgtccccacggggccacaacggggcattgttcacggcctcacctgggctgtctccagcaccccaggatttacgaggactcggcccagagcctcgatgccggccgctccgggcagacctgggggggtggcgggggggaggccctgtgaaga

SEQ ID NO: 24985 - DNA, 253 bp, Homo sapiens
  chr11:2868847-2869100
  hypo
tgcacacgtgcgtgccgcctgcatacagcatgcacttgcagagacggttggcaccttcccttctctggccccaaacctgggccctgaggctgtctgcacacctgggtgcttcccaccactgactctctcgtctgcctttgtccccgcaggtgacgcagctggaccagaggctggcactcatcaccgacatgcttcaccagctgctctccttgcacggtggcagcacccccggcagcggcggcccccccagaga

SEQ ID NO: 24986 - DNA, 30 bp, Homo sapiens
  chr11:2870193-2870223
  hypo
cttttcctaataaacgtggagaatcacagg

SEQ ID NO: 24987 - DNA, 31 bp, Homo sapiens
  chr11:2874226-2874257
  hypo
cctgagtgaggcagagcgtaaaggagatgga

SEQ ID NO: 24988 - DNA, 31 bp, Homo sapiens
  chr11:2896187-2896218
  hypo
aaggattggatcatgccgaaggtagccacag

SEQ ID NO: 24989 - DNA, 135 bp, Homo sapiens; identical to SEQ ID NO: 7879
  chr11:2905947-2906082
  hypo

SEQ ID NO: 24990 - DNA, 773 bp, Homo sapiens; identical to SEQ ID NO: 7880
  chr11:2906315-2907088
  hypo

SEQ ID NO: 24991 - DNA, 198 bp, Homo sapiens
  chr11:2939100-2939298
  hypo
ggaagctttaccctggcgggcgcaacagggccctccgaatggcgaggcctgcagccgggcgaggggtgggcattgggacaatggcctttgcaggcctgaatggcctctccgtgccaggcggcccccgggccagtgtgttcgacctgaaggccatcgcctccctgctgcggctgccagacgtcccgaggatcttcctgg

SEQ ID NO: 24992 - DNA, 288 bp, Homo sapiens
  chr11:2942533-2942821
  hypo
aaaccatttatggttccggttggaagcagtttctgttctgcctggcaggaatttgggagggtgactggtcccctgcagaggtgctgcaggctgggcctgccctgtgggcagatactgagcccaggggctcctccagccggggccacccctgcactcccaggcgcgttggcccagcacgccctgcttagtggaggagctgagatgaccagatagagagcctcgccctggcctgggagcagcctgcggccaagcctgtcccaccgagcccatccccgggagcagcctgcg

SEQ ID NO: 24993 - DNA, 30 bp, Homo sapiens
  chr11:2965890-2965920
  hypo
gaatggtggggccccgcaatggggctactg

SEQ ID NO: 24994 - DNA, 65 bp, Homo sapiens
  chr11:2987099-2987164
  hypo
tctgagatccaacttgcgggcaccatggaagagtgggcatcatggaagagcgtacaattcttatc

SEQ ID NO: 24995 - DNA, 30 bp, Homo sapiens
  chr11:2998183-2998213
  hypo
agtattctcccatcccgagtattctcccat

SEQ ID NO: 24996 - DNA, 30 bp, Homo sapiens
  chr11:2998580-2998610
  hypo
tgcctccggaaccaacgaccactgcatcat

SEQ ID NO: 24997 - DNA, 31 bp, Homo sapiens
  chr11:3060354-3060385
  hypo
gtagcctacaaaggaccgagaacagaaagca

SEQ ID NO: 24998 - DNA, 54 bp, Homo sapiens
  chr11:3109134-3109188
  hypo
cggacagggggtgacacggcaagatggccaggagtgcgtcgcacagcagaagct

SEQ ID NO: 24999 - DNA, 31 bp, Homo sapiens
  chr11:3111263-3111294
  hypo
agggtcatatccagctcgggcctccacccca

SEQ ID NO: 25000 - DNA, 182 bp, Homo sapiens
  chr11:3128517-3128699
  hypo
tccacataggtggtccctctccgcaccggggccccaggggtctctgactggtcgctgccactctccgtcttccggctatggtcctgggtctcggtatctgactcctcagggttctctctctccgacttgtctgagaatgcatcgttctccagggaagacccgttcagtctggaaggtggatg

SEQ ID NO: 25001 - DNA, 426 bp, Homo sapiens
  chr11:3141592-3142018
  hypo
ggaatgagccccttggccctacggggcctctgtcttcaaccccacccctccgcagcaccttcacggcccagacggactgatccagcgggtggaagagcttgaagcagaagccgtccttcttggagggccgctcgatgagctcgcagcagtgcagcagcaccgtgcccacccactggcccaccttgggcgtcttgtagatgagcagcacccccggcttcagcacgcaccacagcttggtccagctcttcagggtgccgcggatctgcagggaggatgctggcgtcgatgcccaccctctggggccgccatccctggggcatcttgatggcttggcggggagccaggcacagaccagggtgggctgccgaggggcccttcccctccctcactcccccacaccagttcggaactcaccccttcctcacc

SEQ ID NO: 25002 - DNA, 174 bp, Homo sapiens
  chr11:3145231-3145405
  hypo
gaggcagaccagccaccagcacgcagaggcgggaggagccaggggtcaggtgagcgctgcggttctgcgttctgtgcatggatgtaagcacgttagatcccacagctcaggtcatcgttgttattctcagcattgtacagaggaagagcctacgcacagagaggttcagaaacc

SEQ ID NO: 25003 - DNA, 358 bp, Homo sapiens
  chr11:3164462-3164820
  hypo
ggggggcagaggaggcaggtgcggagcggggcagaggaggcaggtacagcccagtgcgtggaccagcgaccggctccaggggcccatggggggctgcactgtgggcgaaaacgcacggacgcgacacacccaagagaaacaagcacacgcccccaggtggtccgcgcacgcacgctcccagcagcatggctcagggccatcagagagcggacacagccagacatccacatgggtgaacggataaacatggatcacatctgtgcaacggatggaagaacattcggccttcaggaggcaggaagcacggcactcacacatgcgacgacacggatgagccgcagagatgcaccaagtcaaa

SEQ ID NO: 25004 - DNA, 588 bp, Homo sapiens; identical to SEQ ID NO: 7884
  chr11:3186115-3186703
  hypo

SEQ ID NO: 25005 - DNA, 296 bp, Homo sapiens
  chr11:3187735-3188031
  hypo
atagcagcaccagccgcttgtgtgcggatcacaggaacccacggcttacggaggcgagtgggctgatcggacttgccctaagcttacccccagggctagcattgccattccatagtcaccttgtgaggccttgggatgcagaactgctcagtcaagatgctcagggccatggtgggaccctgctccgcgtggcctgtggcaggcggcctctgcctctgcaggagagggtctgtgcagctgggatccacatacaactgctgggtctgctctttgaagactccgcccaaagctgaggt

SEQ ID NO: 25006 - DNA, 758 bp, Homo sapiens
  chr11:3243292-3244050
  hypo
gtcaccaggggcccagagggacgcacagagggagaccggctgcctgggtccctcctggctgcctcaccatcaggggcgggatgaggagctcagcctcagccacagtgcgcaaggtgaagagttttgatccctcgtacatcctcgagccaggcagggcgcccggcttctatcccaggtagcagagtctcctatcccaggtctccgacggcgaccgcaaccctttgcccgtggaggacttcccctgtctaagggccattgggagtgggatggcctaatttctggggtcgctttctattgggcacttcaaacagtgctgggcaagggcagtcgtttgaggcagcttggagtgaagttcttagggaggaggtcctgcgcagctcggccagccccggtcaggcccaggcagccaccaaccctggtttctccatcacccctgacccctcccacagccccttctcgtgtttgcccaccgtctaggccatgcttccactttctcacctggctgggtatcccctatggggcacgggtgtcggccccgccgaggctgggctttggtctgtcttgttctctctgggaggggtctggtgcgggtggaatacgtggagggagcctccgtggggggagcaactgctcccggtgttgcaaggaggacagagccaatgcccgccccatcgtgtcatggccgacggtggcctcagaagatgtgtccacgtccccagtcgctggaagctgtgcacgagctcttcctggagaaaagg

SEQ ID NO: 25007 - DNA, 30 bp, Homo sapiens
  chr11:3251745-3251775
  hypo
ggtgccagccaccccgtgaggtgctggtca

SEQ ID NO: 25008 - DNA, 210 bp, Homo sapiens
  chr11:3254309-3254519
  hypo
gcaagtttcccgcacgtggcctttgacctgtcactacatcagcaggcatcccccagggcaccggcatcctccatccccaaaacggaggggccgcacacaggtcgtctggcgtctgtgcaatgctggtgtctgatgaatgtgtcgcgctggtgtctgacgtccatgcggggctggtatctgacaggcagcagtgccgcttgctgagttgtg

SEQ ID NO: 25009 - DNA, 30 bp, Homo sapiens
  chr11:3396222-3396252
  hypo
ctgtgtatcagttccggagaggcagcagga

SEQ ID NO: 25010 - DNA, 30 bp, Homo sapiens; identical to SEQ ID NO: 7885
  chr11:3427830-3427860
  hypo

SEQ ID NO: 25011 - DNA, 199 bp, Homo sapiens; identical to SEQ ID NO: 7886
  chr11:3444565-3444764
  hypo

SEQ ID NO: 25012 - DNA, 27 bp, Homo sapiens
  chr11:3602557-3602584
  hypo
ccgcggacacgccgggccctggcctgc

SEQ ID NO: 25013 - DNA, 30 bp, Homo sapiens
  chr11:3637412-3637442
  hypo
tgtgtggacatgtccgggcctgcctgtggg

SEQ ID NO: 25014 - DNA, 30 bp, Homo sapiens
  chr11:3688991-3689021
  hypo
gctctgggggcaggcggggcagggctcacc

SEQ ID NO: 25015 - DNA, 105 bp, Homo sapiens
  chr11:3697422-3697527
  hypo
gactgggtaaggctgcgcagttcgtccatggcatagtcctcaggcatgggaagccggccaatgtggggagccaagaggcgcaaagggactcgctgagggtctggt

SEQ ID NO: 25016 - DNA, 31 bp, Homo sapiens
  chr11:3704649-3704680
  hypo
tcgaacagccttctcacgtatgctacaggga

SEQ ID NO: 25017 - DNA, 40 bp, Homo sapiens
  chr11:3767211-3767251
  hypo
caacagggccgggcacggtgcctcacgcctgtaatcccag

SEQ ID NO: 25018 - DNA, 31 bp, Homo sapiens
  chr11:3846725-3846756
  hypo
ccagaaacaagaaacacgataccattctggc

SEQ ID NO: 25019 - DNA, 30 bp, Homo sapiens
  chr11:4600105-4600135
  hypo
ctagttcccctcaacgtaacttctgaggtt

SEQ ID NO: 25020 - DNA, 49 bp, Homo sapiens
  chr11:5177826-5177875
  hypo
gggatcacaggcgtgagccactgcacccggcctactgaatattttttaa

SEQ ID NO: 25021 - DNA, 31 bp, Homo sapiens
  chr11:6412882-6412913
  hypo
aggtgcccctgtcagccgcatcctcttcctc

SEQ ID NO: 25022 - DNA, 31 bp, Homo sapiens; identical to SEQ ID NO: 7892
  chr11:6502786-6502817
  hypo

SEQ ID NO: 25023 - DNA, 30 bp, Homo sapiens
  chr11:6630617-6630647
  hypo
atgaagagtgtccccggctcaggtagtgca

SEQ ID NO: 25024 - DNA, 30 bp, Homo sapiens
  chr11:6632057-6632087
  hypo
ggagggatcagccccgcctgtcacaataaa

SEQ ID NO: 25025 - DNA, 31 bp, Homo sapiens
  chr11:6651319-6651350
  hypo
ctaccacgtgcagggccgcgggcccaggcgg

SEQ ID NO: 25026 - DNA, 30 bp, Homo sapiens
  chr11:6662309-6662339
  hypo
cctgggttcccagacgcccagcatctgcat

SEQ ID NO: 25027 - DNA, 461 bp, Homo sapiens; identical to SEQ ID NO: 7893
  chr11:6947597-6948058
  hypo

SEQ ID NO: 25028 - DNA, 31 bp, Homo sapiens; identical to SEQ ID NO: 7899
  chr11:7534832-7534863
  hypo

SEQ ID NO: 25029 - DNA, 30 bp, Homo sapiens; identical to SEQ ID NO: 7900
  chr11:8040448-8040478
  hypo

SEQ ID NO: 25030 - DNA, 30 bp, Homo sapiens; identical to SEQ ID NO: 7901
  chr11:8103086-8103116
  hypo

SEQ ID NO: 25031 - DNA, 700 bp, Homo sapiens; identical to SEQ ID NO: 7902
  chr11:8190058-8190758
  hypo

SEQ ID NO: 25032 - DNA, 95 bp, Homo sapiens
  chr11:8254113-8254208
  hypo
gcagccagcagaggtacgcactcaaacaccgactgggaaaatcttgggccaggcccccgctacagcccctacaaggctcacgttccttttgctca

SEQ ID NO: 25033 - DNA, 30 bp, Homo sapiens
  chr11:8376473-8376503
  hypo
gagaagccagccaggcgcagcctgaatgct

SEQ ID NO: 25034 - DNA, 411 bp, Homo sapiens; identical to SEQ ID NO: 7907
  chr11:8615341-8615752
  hypo

SEQ ID NO: 25035 - DNA, 30 bp, Homo sapiens; identical to SEQ ID NO: 7908
  chr11:8616001-8616031
  hypo

SEQ ID NO: 25036 - DNA, 167 bp, Homo sapiens
  chr11:8656270-8656437
  hypo
ctttcacatctcattttcagccgcaacctgtttccaccatcggctcacatagcaccaactccaaggtacttgtacgcagatgttctgcttcaccaaaagtcctcttttggtgaaatacagtcagtgtggaactcgcagaaaggtgcgtggtgccacaggttcttctg

SEQ ID NO: 25037 - DNA, 30 bp, Homo sapiens
  chr11:8680502-8680532
  hypo
aagacacacatttacgatgcacaaaggtcc

SEQ ID NO: 25038 - DNA, 30 bp, Homo sapiens
  chr11:8721006-8721036
  hypo
ggacagcctttgatcgtaaacctcccagtg

SEQ ID NO: 25039 - DNA, 31 bp, Homo sapiens
  chr11:8752377-8752408
  hypo
ggtcagcaagacgccccgggggccagctgct

SEQ ID NO: 25040 - DNA, 172 bp, Homo sapiens
  chr11:8759789-8759961
  hypo
tccctatgctgctttacgcttcagttgatcactccctgtttcttgagcgtctcaggacatcactcttcatggttttcttcttttctcactaaatgctcttctcagtcggtttccttggctagttcttcttcctcgtccagacctcaaaacactggaacgtcccagcgcttgg

SEQ ID NO: 25041 - DNA, 31 bp, Homo sapiens
  chr11:8959627-8959658
  hypo
cctggtcagtggcaagcgggcagaatcaggg

SEQ ID NO: 25042 - DNA, 974 bp, Homo sapiens; identical to SEQ ID NO: 7911
  chr11:9025074-9026048
  hypo

SEQ ID NO: 25043 - DNA, 30 bp, Homo sapiens; identical to SEQ ID NO: 7912
  chr11:9112700-9112730
  hypo

SEQ ID NO: 25044 - DNA, 16 bp, Homo sapiens
  chr11:9206714-9206730
  hypo
gcgacagtgtgagact

SEQ ID NO: 25045 - DNA, 78 bp, Homo sapiens
  chr11:9328212-9328290
  hypo
atagagcgagactccgtctcaaaaaaaaaaagaaagccagaatcacgctcttggcctacaagacgttcaacatgtttt

SEQ ID NO: 25046 - DNA, 112 bp, Homo sapiens
  chr11:9405391-9405503
  hypo
ttggtaattactaatacgtaatgtgataaaaacctttcacacataaagttcatttaatcttccgtgttattgccttaggataaagtctcataagtggaattactgggtcaga

SEQ ID NO: 25047 - DNA, 37 bp, Homo sapiens
  chr11:9418900-9418937
  hypo
atatatatatattagtcgggcacggtggcaggtgcct

SEQ ID NO: 25048 - DNA, 37 bp, Homo sapiens
  chr11:9422431-9422468
  hypo
gaagatactaaaatagctgggcgcaggtggctccccc

SEQ ID NO: 25049 - DNA, 42 bp, Homo sapiens
  chr11:9531939-9531981
  hypo
ggattacaggcgtgagccaccgtacccagcccagaagttcct

SEQ ID NO: 25050 - DNA, 50 bp, Homo sapiens
  chr11:9552470-9552520
  hypo
ggcatgaaccactgcgcccgcccggctgcggtcttgatgtctatctttgt

SEQ ID NO: 25051 - DNA, 208 bp, Homo sapiens
  chr11:9554787-9554995
  hypo
tgtcttttgaccaagaggttgcgtattttcatttttgcacggagccgcacagattatgtagcctgtcctgctgaggcgtgcgcttctattagcccttctgtttttgctgcagatgtgtgacctgtgttttgggaatatattatctcttgttagattatgggctcctttaagacagctggggatttaaatttcccggtaactcctggag

SEQ ID NO: 25052 - DNA, 210 bp, Homo sapiens; identical to SEQ ID NO: 7916
  chr11:9596557-9596767
  hypo

SEQ ID NO: 25053 - DNA, 31 bp, Homo sapiens; identical to SEQ ID NO: 7917
  chr11:9685558-9685589
  hypo

SEQ ID NO: 25054 - DNA, 180 bp, Homo sapiens; identical to SEQ ID NO: 7918
  chr11:9685848-9686028
  hypo

SEQ ID NO: 25055 - DNA, 18 bp, Homo sapiens
  chr11:9751051-9751069
  hypo
ttttttttttctgagacg

SEQ ID NO: 25056 - DNA, 36 bp, Homo sapiens
  chr11:9771062-9771098
  hypo
aattacaggcgtgagccaccacgccctgcccatata

SEQ ID NO: 25057 - DNA, 142 bp, Homo sapiens
  chr11:10509672-10509814
  hypo
caaggggatggcagccttgtccggggctcctggcagtctccgcctgcaggggccgcaactgcggtaggagcgaaggttaaatgatcatggccctagcctttccattctcttttgctgaagcgctgtgcagtgaggcacaggg

SEQ ID NO: 25058 - DNA, 193 bp, Homo sapiens
  chr11:10519311-10519504
  hypo
caggaggggagcttgacccagcggaaatagctcacactcgtgcgtgcttctgcctggcctggtcagacgccacaacgtgatctcacctaagcctcacaattaccccgttactatcaccattttgttgttaacagtaagcggaattattatgtgcttggtgcgtgttggacacggtgttgagtgctctccctgg

SEQ ID NO: 25059 - DNA, 194 bp, Homo sapiens
  chr11:10712068-10712262
  hypo
ggctgccctggactgtcgcctgaactcagagtctagcctccaaggtccacaggactaacatgatatcccctttccctctattcgtgattttcctgtgatttggactgtgacactcagtaactgccccaggacctaagttactaactagcggcagggtgacatctaatgcaggaagcgcccgctttggaccaagg

SEQ ID NO: 25060 - DNA, 106 bp, Homo sapiens
  chr11:10865157-10865263
  hypo
aagtgctgggattacaggcgtgagccaccgcgcgcggctctagtggagtcttgaaatgactgcagctcttgctaacaccttcatcgcagccagtgagagactctga

SEQ ID NO: 25061 - DNA, 30 bp, Homo sapiens
  chr11:11102824-11102854
  hypo
ctgaccccatcttacgtggaatcaaagcct

SEQ ID NO: 25062 - DNA, 187 bp, Homo sapiens
  chr11:11534273-11534460
  hypo
acctgaggcctgggctcgttatgtgccttaacacagtggtattaccatgctctgctactctcctaacccatctatcacatggacaccaggacacacgggtgctgcctagaaaaaggatgcctctcgacaaagtcccataatgacactaactcctctcatcactcaggtggcccgtgtgtgtgatctg

SEQ ID NO: 25063 - DNA, 31 bp, Homo sapiens
  chr11:11614845-11614876
  hypo
ctagcatttcagtttgcggaccctggaatag

SEQ ID NO: 25064 - DNA, 1075 bp, Homo sapiens; identical to SEQ ID NO: 7922
  chr11:12029931-12031006
  hypo

SEQ ID NO: 25065 - DNA, 169 bp, Homo sapiens
  chr11:12073850-12074019
  hypo
atccaggtgggcctaacgtaatcacaagggttcttagaagagggaggcaggagagtcagagaaggaggtgcgaggatggacacggggttctaagtgatgtgattcctggcttcttccaagatggaggaagaggccacgacccaaggaaagcaagcggcctgtagaagct

SEQ ID NO: 25066 - DNA, 31 bp, Homo sapiens
  chr11:12083039-12083070
  hypo
aatcaaggtgatgccacgctggagtagaggg

SEQ ID NO: 25067 - DNA, 66 bp, Homo sapiens
  chr11:12115884-12115950
  hypo
atgagtgaagtcagagcgatcgactaggaatccactgaaagtggatttaaatgagaggtgatgaaa

SEQ ID NO: 25068 - DNA, 846 bp, Homo sapiens; identical to SEQ ID NO: 7923
  chr11:12131780-12132626
  hypo

SEQ ID NO: 25069 - DNA, 428 bp, Homo sapiens
  chr11:12209617-12210045
  hypo
tgggagtcacaagccacgtggctagggcacttgaaatgtggtaagtccgcattgagctgcgctgtacatataaaatactcacctcattttaaaggcttagtataaaaaatgattatcaaatattttatcgatactttttatattgattacgtgttgcaatgataatattttgcatataatagattagaatattgaaattaacttcctatttcttgtcacttttttagaaaaaatgtggctatcagaaaatttaaaattgcacgtgtggctcaccttatatttctattgcagtgattcttaactggtggctgttttgccttccagggacgtttgataatatttgaagacttttttttattgtcatgctgttgggagagtggcgtggttggcacgagcacctagttggaagaggccggggaagctgctga

SEQ ID NO: 25070 - DNA, 42 bp, Homo sapiens
  chr11:12214007-12214049
  hypo
tctgatttcacttaaacgatttctcctcagaagcaaggcacg

SEQ ID NO: 25071 - DNA, 31 bp, Homo sapiens
  chr11:12230961-12230992
  hypo
tctcatagccaccacacggggggtataatca

SEQ ID NO: 25072 - DNA, 163 bp, Homo sapiens
  chr11:12240126-12240289
  hypo
ccccatctcacctccacgccttcggagagagaagtgatcatgtgaccgcggaaacagggatcagaaaggaaatcaaataacaggaattccatcctggacactggggcctgacaaagagctcttggaccagtgctggatgcaatttgggcggtttggtttgaat

SEQ ID NO: 25073 - DNA, 178 bp, Homo sapiens
  chr11:12247749-12247927
  hypo
tggagaacaaccagctcgcatttgatgtggccgagcgagagtttgggatccctccagtgaccacgggcaaagagatggcatctgcccaggagcctgacaagctcagcatggtcatgtacctctccaagttctacgagctcttccggggcaccccactgaggcccgtgggtaagcacct

SEQ ID NO: 25074 - DNA, 345 bp, Homo sapiens
  chr11:12248493-12248838
  hypo
ccagccaacacctccttgttatagccatacttcccagagccaggttccaaatcacagttgcgctttatttcccaacagattcttggcgcaaaaactatggagaaaatgctgacctcagcttggccaaatcatccatttctaataactatctcaacctcacatttccaaggaagaggactccacgggtaagttttggcctggtttcggttttatttcccattgcacatggacggggtatgaggaacggagattgtcacattctcagcctgttgaggctagtaagttacatggatcaggcgctcccggaagatgctagtaaaactcggattagtgactgagtgtttt

SEQ ID NO: 25075 - DNA, 55 bp, Homo sapiens
  chr11:12253011-12253066
  hypo
ccacctgcacactttccgaagagccgggtggcattacgtgcgaaggtgcctcttc

SEQ ID NO: 25076 - DNA, 30 bp, Homo sapiens; identical to SEQ ID NO: 7924
  chr11:12260402-12260432
  hypo

SEQ ID NO: 25077 - DNA, 31 bp, Homo sapiens
  chr11:12260725-12260756
  hypo
gataagaaatgagagtcgggattcaaacccc

SEQ ID NO: 25078 - DNA, 174 bp, Homo sapiens
  chr11:12276906-12277080
  hypo
ctactgcctgtctctacgattttgactactctaggtaccacatataagtggaatcctagagtacttgtgtttttgcggccacagggttttatttattttcttttctccacctccagaatccccgcgttctgctcctggctggttttgcttctcctgggtcgtggggtgctattt

SEQ ID NO: 25079 - DNA, 320 bp, Homo sapiens
  chr11:12278212-12278532
  hypo
aggaagcagaagcccacgaggtccccagcattcagtgtggaatttctaaaagccttggcctggcatttgaaggctcgggataagccataatacacccactcttctctcccgatccccaggaatctatgcgaaagtcatttccccttaacctgggaggcagcgacacgtgttacttctgtaagaaacgtgtgtacgtgatggaacggctgagcgccgagggccacttcttccaccgggagtgtttccgctgcagcatctgtgccaccaccttgcgcctggccgcctacacctttgactgcgatgaaggtaaccccaggggc

SEQ ID NO: 25080 - DNA, 30 bp, Homo sapiens
  chr11:12279001-12279031
  hypo
tcatgctcatcggaacgaatgattattttc

SEQ ID NO: 25081 - DNA, 130 bp, Homo sapiens
  chr11:12279380-12279510
  hypo
aggcttgtctggaaggcgcacagtggtcctgggcagtggcagtttcccagtgcgtgccccgtctgggtcttttcctccccatcactgctgccatttgctctcagcatttcccacccgccaggtattccac

SEQ ID NO: 25082 - DNA, 321 bp, Homo sapiens
  chr11:12281097-12281418
  hypo
taggagtgagattgccgatcaaaaggcatgcatatttttgaaggctcgtgactcctatggtcagttggcccctagaaaagtgcccgtgttcagcaccggcttcagcatgagtcggggggctgagattattgtgggggctggttgcagggtctggcgagttcagtttgtattggctgttggctttgttgaagtagtcctctggaagacttacagacaaatgccctcatttccatctctttctcaggaggaggcaacatggcaagagcaggaagcccctcggagagacactcccaccgaaagttcttgcgcagtggccgccat

SEQ ID NO: 25083 - DNA, 470 bp, Homo sapiens
  chr11:12283306-12283776
  hypo
ctctgtgggaactggcgcctctgtccttgttggcactgttctcagtccgatgacttgcattgtgttttctccaatttttgctgggattttaatgttcagcatggtgggaggaacccttgattccttttgtttgagtatagaaagtaaatttttgaggtcatgatgtgaacggccatgttattgtgattatcttcagctcaggataggctgagatgctttgtggagtgttccatgaagcccgagtcggaatctctgactgtcgtgtacagccataaggagactggtttgaattactgtggcgagacagggcgtgcctgtcagaaatctgagatgtttgtacgctctgagatgttgaacctttctggtgggcagcaccgacacccaggggtggacccccgaggatgaatgcctctaggcctccgcaacatattcaagaatgaatgggagacgctagagtaaaatgggggcag

SEQ ID NO: 25084 - DNA, 370 bp, Homo sapiens
  chr11:12283995-12284365
  hypo
tctctttccaatcttacgccatggccatcagttcatttcagccttccagtgctacacccacttcttggctgacacacttctgctctaaggtgactggttttcttgccaattttcaaagagtggtactaacccccaacccgctttccgcaccccgtcctctccgccagcagtactggttgcactaactgtgagtgtcttgcatactgatggactcatttggtggcatggttggctaacagcatggcggggggtgttcagcttgagacccatgcctgtgttcatttcccatggagctggcagcctggtctaccccaagtgcatgccccgcctctcctctctcccttgggtctgcctgcgtgcatgcttctcc

SEQ ID NO: 25085 - DNA, 31 bp, Homo sapiens
  chr11:12294621-12294652
  hypo
cagcacaaaggtcatgcgcaacagtgtccat

SEQ ID NO: 25086 - DNA, 30 bp, Homo sapiens
  chr11:12301270-12301300
  hypo
ccacacatggaactcggctactgagggtct

SEQ ID NO: 25087 - DNA, 153 bp, Homo sapiens
  chr11:12315625-12315778
  hypo
gaatggtagaggaggccgtgtgctaaaaccagtccgccccctgctgctccctagggcagcaggagagcccctgccaacccagagaggggcccaggagaagatggggacccctgcggaacaagctcaaggggagcgaaacgtgcctccacccaa

SEQ ID NO: 25088 - DNA, 27 bp, Homo sapiens
  chr11:12501480-12501507
  hypo
tatattgaggctgggcgcggtggctca

SEQ ID NO: 25089 - DNA, 31 bp, Homo sapiens
  chr11:12554122-12554153
  hypo
aataactatgaatcgacgttagttacaaatt

SEQ ID NO: 25090 - DNA, 1422 bp, Homo sapiens; identical to SEQ ID NO: 7927
  chr11:12695572-12696994
  hypo

SEQ ID NO: 25091 - DNA, 216 bp, Homo sapiens
  chr11:12823850-12824066
  hypo
aatgtgtgtgggacttcgaaatatggaataatgatgggttttattatttctttttgagaaaaatccagtcactttttttttaacccgaggaagttgaatcctgaagaaggggagatttatctctgccctttgaacttaaagcccataaagtaaaatatatagtttaaaacaattacatgttccccccatctcaccgccgcccgacccttcacagat

SEQ ID NO: 25092 - DNA, 130 bp, Homo sapiens
  chr11:12944976-12945106
  hypo
ccctggtgcttagttccgtgtggtatgttcctcacttaattgtaagcctcacgagagcaggccctggctcagcttttgctttttttatccgcagctctgagcattgtgccggatgcggagcagggggttg

SEQ ID NO: 25093 - DNA, 58 bp, Homo sapiens
  chr11:13185782-13185840
  hypo
agccgttgactctatgcgcttcacctactcctccaactcactacgctgttctaaggat

SEQ ID NO: 25094 - DNA, 30 bp, Homo sapiens
  chr11:13237589-13237619
  hypo
caatgcatattccccggcctctgcctcagc

SEQ ID NO: 25095 - DNA, 31 bp, Homo sapiens; identical to SEQ ID NO: 7931
  chr11:13298792-13298823
  hypo

SEQ ID NO: 25096 - DNA, 30 bp, Homo sapiens; identical to SEQ ID NO: 7932
  chr11:13300577-13300607
  hypo

SEQ ID NO: 25097 - DNA, 30 bp, Homo sapiens
  chr11:13379014-13379044
  hypo
cccctattgcactgcgagttgcaactgaat

SEQ ID NO: 25098 - DNA, 779 bp, Homo sapiens; identical to SEQ ID NO: 7933
  chr11:13689626-13690405
  hypo

SEQ ID NO: 25099 - DNA, 30 bp, Homo sapiens
  chr11:13700083-13700113
  hypo
tacaggcatggccacgaaggtcatgctttc

SEQ ID NO: 25100 - DNA, 30 bp, Homo sapiens; identical to SEQ ID NO: 7935
  chr11:14086442-14086472
  hypo

SEQ ID NO: 25101 - DNA, 148 bp, Homo sapiens
  chr11:14498536-14498684
  hypo
gatccataatgctcctcggtaaatcctagcacaatacaagatctgaaacatgaacttggcagacaaatcttgaagcagagatctttctttgttaatttaagctcaaataaaaacaagggccaggcactcacgcctgtaatcccagcac

SEQ ID NO: 25102 - DNA, 13 bp, Homo sapiens
  chr11:14542908-14542921
  hypo
gggcctgtggtcc

SEQ ID NO: 25103 - DNA, 25 bp, Homo sapiens
  chr11:14561086-14561111
  hypo
ggagcttaagaacaggacccacggg

SEQ ID NO: 25104 - DNA, 252 bp, Homo sapiens; identical to SEQ ID NO: 7939
  chr11:15671675-15671927
  hypo

SEQ ID NO: 25105 - DNA, 64 bp, Homo sapiens
  chr11:15959966-15960030
  hypo
gattgtgcgggccccgagtggcattttccaacctcggccaggggcttccgctagaggcgcctgc

SEQ ID NO: 25106 - DNA, 38 bp, Homo sapiens
  chr11:15962974-15963012
  hypo
gcccgggagttggctgcgggcagcggcttggcagcctg

SEQ ID NO: 25107 - DNA, 31 bp, Homo sapiens
  chr11:16828576-16828607
  hypo
tgcgggaagcctggggcggtcaggagagcaa

SEQ ID NO: 25108 - DNA, 31 bp, Homo sapiens
  chr11:16877365-16877396
  hypo
gcctccagggtggaggcggtcccagccgtgg

SEQ ID NO: 25109 - DNA, 30 bp, Homo sapiens
  chr11:16945408-16945438
  hypo
tccttccacccttccgttaacaggactgaa

SEQ ID NO: 25110 - DNA, 35 bp, Homo sapiens; identical to SEQ ID NO: 7945
  chr11:17035837-17035872
  hypo

SEQ ID NO: 25111 - DNA, 96 bp, Homo sapiens
  chr11:17100665-17100761
  hypo
tcagtgaaatcaaactcctgtcgacaagcttaaagtaactggcaagacgctgggaaactagatactgaaacatccgctcttaacttttaacctgtc

SEQ ID NO: 25112 - DNA, 30 bp, Homo sapiens
  chr11:17278764-17278794
  hypo
tgctagcttattcccgtattcactcactca

SEQ ID NO: 25113 - DNA, 30 bp, Homo sapiens; identical to SEQ ID NO: 7952
  chr11:17498221-17498251
  hypo

SEQ ID NO: 25114 - DNA, 30 bp, Homo sapiens; identical to SEQ ID NO: 7955
  chr11:17742120-17742150
  hypo

SEQ ID NO: 25115 - DNA, 30 bp, Homo sapiens
  chr11:18033384-18033414
  hypo
agccagccagactaccgcaggtcacgccat

SEQ ID NO: 25116 - DNA, 31 bp, Homo sapiens
  chr11:18419901-18419932
  hypo
atctctgaaagatgggcggaaatcagacttt

SEQ ID NO: 25117 - DNA, 104 bp, Homo sapiens
  chr11:18512367-18512471
  hypo
cagagagcagatttctctcttcgttggagtattcatgcctcgttctgtgactgccttcgtgactacagccatatcatcatagcgctcagcctgctcagtgagtt

SEQ ID NO: 25118 - DNA, 20 bp, Homo sapiens
  chr11:18557638-18557658
  hypo
ccactgcactccagcctggt

SEQ ID NO: 25119 - DNA, 39 bp, Homo sapiens; identical to SEQ ID NO: 7959
  chr11:18610705-18610744
  hypo

SEQ ID NO: 25120 - DNA, 30 bp, Homo sapiens
  chr11:18617191-18617221
  hypo
tgatcctgatgacacgtggggaaaagcagg

SEQ ID NO: 25121 - DNA, 31 bp, Homo sapiens; identical to SEQ ID NO: 7960
  chr11:18720185-18720216
  hypo

SEQ ID NO: 25122 - DNA, 40 bp, Homo sapiens
  chr11:19238181-19238221
  hypo
ctaggattaccggcgtgagccacagcgcccggctgatgtt

SEQ ID NO: 25123 - DNA, 230 bp, Homo sapiens
  chr11:19256430-19256660
  hypo
atcatcataatctgctcggcgtacttattctcctccccgatgctcttcaaggtgccaagggttttgttgagattgtgtcgcccgtgccaagtgtacctgtttttggcgaggcggctcaccatatgtaaactctctaggacgttcacgatatcgtaaatgcgtcgacgttcaacatctacaaagaatgtgcaattgtgtgttacagatttttgtaacgtgtttagaattga

SEQ ID NO: 25124 - DNA, 162 bp, Homo sapiens; identical to SEQ ID NO: 7967
  chr11:19366972-19367134
  hypo

SEQ ID NO: 25125 - DNA, 99 bp, Homo sapiens; identical to SEQ ID NO: 7968
  chr11:19367267-19367366
  hypo

SEQ ID NO: 25126 - DNA, 1290 bp, Homo sapiens; identical to SEQ ID NO: 7970
  chr11:19734194-19735484
  hypo

SEQ ID NO: 25127 - DNA, 599 bp, Homo sapiens; identical to SEQ ID NO: 7974
  chr11:20178093-20178692
  hypo

SEQ ID NO: 25128 - DNA, 30 bp, Homo sapiens; identical to SEQ ID NO: 7976
  chr11:20182006-20182036
  hypo

SEQ ID NO: 25129 - DNA, 319 bp, Homo sapiens; identical to SEQ ID NO: 7983
  chr11:20690558-20690877
  hypo

SEQ ID NO: 25130 - DNA, 103 bp, Homo sapiens; identical to SEQ ID NO: 7984
  chr11:20690982-20691085
  hypo

SEQ ID NO: 25131 - DNA, 258 bp, Homo sapiens; identical to SEQ ID NO: 7985
  chr11:20691121-20691379
  hypo

SEQ ID NO: 25132 - DNA, 184 bp, Homo sapiens; identical to SEQ ID NO: 7986
  chr11:20691431-20691615
  hypo

SEQ ID NO: 25133 - DNA, 61 bp, Homo sapiens
  chr11:27495305-27495366
  hypo
ttgctctctgccatggcgttgagtcgttttactctataatggagacatttttaatgaatac

SEQ ID NO: 25134 - DNA, 30 bp, Homo sapiens; identical to SEQ ID NO: 8001
  chr11:30393948-30393978
  hypo

SEQ ID NO: 25135 - DNA, 218 bp, Homo sapiens
  chr11:30445847-30446065
  hypo
tattaagcaaaactcagaaaccgggagccaattttcacatacgctttcttttctaaatggtagcccttctgaattgcaaccttcttcacgcctggcactcccagccgccatcggcccctctccgactgcacatcacaccaggtccaagagaagctaatttaaccaccgctggttaaaatcatactgcacttcacagcgcctttcacatgccatgaagc

SEQ ID NO: 25136 - DNA, 863 bp, Homo sapiens; identical to SEQ ID NO: 8004
  chr11:30606795-30607658
  hypo

SEQ ID NO: 25137 - DNA, 122 bp, Homo sapiens; identical to SEQ ID NO: 8005
  chr11:30607872-30607994
  hypo

SEQ ID NO: 25138 - DNA, 213 bp, Homo sapiens
  chr11:31808821-31809034
  hypo
gaccttcagagcacacatatacgtgcccaagtgcacacatacagaccctccgctcccacgtcactccttttctcccattcccacctcttgcacctggcgtgcgacatccgggtctccaaagtctctgctgtctacacaacagaaccgtgggccggaactggctgcctgaccgtggtggaaattacagccagcgagaaggaagaagtaagccag

SEQ ID NO: 25139 - DNA, 1247 bp, Homo sapiens; identical to SEQ ID NO: 8009
  chr11:31820460-31821707
  hypo

SEQ ID NO: 25140 - DNA, 30 bp, Homo sapiens; identical to SEQ ID NO: 8034
  chr11:32456054-32456084
  hypo

SEQ ID NO: 25141 - DNA, 440 bp, Homo sapiens; identical to SEQ ID NO: 8035
  chr11:32456758-32457198
  hypo

SEQ ID NO: 25142 - DNA, 114 bp, Homo sapiens
  chr11:32851223-32851337
  hypo
ttaggatcattgagaacgccgagtgcagacacaaatcgaaaagcagccacccgcgccgccaaggcggggccagaactggcggcaggcggctggcccgcccggggatggggcaga

SEQ ID NO: 25143 - DNA, 94 bp, Homo sapiens; identical to SEQ ID NO: 8041
  chr11:32851552-32851646
  hypo

SEQ ID NO: 25144 - DNA, 30 bp, Homo sapiens; identical to SEQ ID NO: 8042
  chr11:32851935-32851965
  hypo

SEQ ID NO: 25145 - DNA, 804 bp, Homo sapiens; identical to SEQ ID NO: 8043
  chr11:32915114-32915918
  hypo

SEQ ID NO: 25146 - DNA, 43 bp, Homo sapiens
  chr11:33183721-33183764
  hypo
gattaaatgagattgactgggcgcggtggcccacgcctgtaat

SEQ ID NO: 25147 - DNA, 30 bp, Homo sapiens; identical to SEQ ID NO: 8045
  chr11:33398158-33398188
  hypo

SEQ ID NO: 25148 - DNA, 30 bp, Homo sapiens; identical to SEQ ID NO: 8046
  chr11:33890356-33890386
  hypo

SEQ ID NO: 25149 - DNA, 38 bp, Homo sapiens
  chr11:34109551-34109589
  hypo
tttgtttatttagagacgcagtctcgctctatcgccag

SEQ ID NO: 25150 - DNA, 31 bp, Homo sapiens
  chr11:34186712-34186743
  hypo
taaagagacccctgcacgtccagctacatgc

SEQ ID NO: 25151 - DNA, 39 bp, Homo sapiens
  chr11:34192313-34192352
  hypo
attcagggaggtagcccgccttttcgaagtacagagctg

SEQ ID NO: 25152 - DNA, 30 bp, Homo sapiens
  chr11:34265346-34265376
  hypo
agagcacggttcttcgcagacacaccccag

SEQ ID NO: 25153 - DNA, 31 bp, Homo sapiens
  chr11:34378939-34378970
  hypo
cggctgttcatggagccggagtagcaccacc

SEQ ID NO: 25154 - DNA, 201 bp, Homo sapiens
  chr11:34511229-34511430
  hypo
gcatctacactggtggcgcatgctgggctctttgtgtgcatcatttctcaaacttaccacgacccacaagggtcacactattttacagataggggaatggagtctcagacgataagcaatccatagacccaagctatggtcctacagacccacacccacgctctttctgtcacactctttccaccacgcttttccccactg

SEQ ID NO: 25155 - DNA, 43 bp, Homo sapiens
  chr11:34517109-34517152
  hypo
tccagagatctcttttaccaccgaagggtgggtggaggggcag

SEQ ID NO: 25156 - DNA, 30 bp, Homo sapiens
  chr11:34951009-34951039
  hypo
aaatctgcccacctcggcaaaagtggtgtt

SEQ ID NO: 25157 - DNA, 137 bp, Homo sapiens; identical to SEQ ID NO: 8051
  chr11:35440237-35440374
  hypo

SEQ ID NO: 25158 - DNA, 415 bp, Homo sapiens; identical to SEQ ID NO: 8052
  chr11:35440469-35440884
  hypo

SEQ ID NO: 25159 - DNA, 345 bp, Homo sapiens; identical to SEQ ID NO: 8053
  chr11:35440936-35441281
  hypo

SEQ ID NO: 25160 - DNA, 38 bp, Homo sapiens
  chr11:35516159-35516197
  hypo
cgtgagccaccgcacccggcccagggagtggtaagact

SEQ ID NO: 25161 - DNA, 760 bp, Homo sapiens; identical to SEQ ID NO: 8057
  chr11:35640493-35641253
  hypo

SEQ ID NO: 25162 - DNA, 235 bp, Homo sapiens; identical to SEQ ID NO: 8058
  chr11:35641291-35641526
  hypo

SEQ ID NO: 25163 - DNA, 30 bp, Homo sapiens
  chr11:35661155-35661185
  hypo
cccctgccagtgaggcgccaaaaagaaggt

SEQ ID NO: 25164 - DNA, 114 bp, Homo sapiens
  chr11:35685024-35685138
  hypo
tgaggagagtgaagaagacagcgaggaagaaatggaggatgagcaagaaagcgaggccgaagaagacaaccaagaagaaggggaatccgaggcggagggagaaactgaggcaga

SEQ ID NO: 25165 - DNA, 39 bp, Homo sapiens
  chr11:36060519-36060558
  hypo
tcttttttttttttttttagacggagtcttgcctctgtc

SEQ ID NO: 25166 - DNA, 38 bp, Homo sapiens
  chr11:36060797-36060835
  hypo
cgtgagccaccgcgcccggcctaaaatttcttatatat

SEQ ID NO: 25167 - DNA, 31 bp, Homo sapiens
  chr11:36248991-36249022
  hypo
atggaagagattgaggcgggagaggtcatcc

SEQ ID NO: 25168 - DNA, 31 bp, Homo sapiens
  chr11:36297993-36298024
  hypo
taattcacagtggcagcgtatccaggcttct

SEQ ID NO: 25169 - DNA, 174 bp, Homo sapiens
  chr11:36476160-36476334
  hypo
tgaccagggttttggcgcgtaactcattccatcctccaaggtactgttgtgctttcagtctccaggtcacccgcagggtaggtgaccagagccagagaagcggtttattcccggggctccgcactgcacccacgcgcccgcgcctgtgtttgactgcacgaggattctccggag

SEQ ID NO: 25170 - DNA, 26 bp, Homo sapiens
  chr11:38655870-38655896
  hypo
tttttttttgagatggagtctcgctg

SEQ ID NO: 25171 - DNA, 83 bp, Homo sapiens
  chr11:40039795-40039878
  hypo
gtctaggcccataagtctcaacgtgttttccttggaacagcagcatcggcatactttgggagcttgttaaaaatgcagattgt

SEQ ID NO: 25172 - DNA, 20 bp, Homo sapiens
  chr11:43402088-43402108
  hypo
gtcaccgtgcccggccaaaa

SEQ ID NO: 25173 - DNA, 1380 bp, Homo sapiens; identical to SEQ ID NO: 8066
  chr11:43600094-43601474
  hypo

SEQ ID NO: 25174 - DNA, 610 bp, Homo sapiens; identical to SEQ ID NO: 8067
  chr11:43602426-43603036
  hypo

SEQ ID NO: 25175 - DNA, 159 bp, Homo sapiens; identical to SEQ ID NO: 8068
  chr11:43603076-43603235
  hypo

SEQ ID NO: 25176 - DNA, 601 bp, Homo sapiens; identical to SEQ ID NO: 8070
  chr11:43964780-43965381
  hypo

SEQ ID NO: 25177 - DNA, 30 bp, Homo sapiens
  chr11:44105474-44105504
  hypo
tgtttcttgtctttcgctgtagcagtggga

SEQ ID NO: 25178 - DNA, 30 bp, Homo sapiens
  chr11:44257653-44257683
  hypo
cttgtgagttctgccgttggctgagccaga

SEQ ID NO: 25179 - DNA, 562 bp, Homo sapiens; identical to SEQ ID NO: 8072
  chr11:44330877-44331439
  hypo

SEQ ID NO: 25180 - DNA, 299 bp, Homo sapiens; identical to SEQ ID NO: 8073
  chr11:44331482-44331781
  hypo

SEQ ID NO: 25181 - DNA, 160 bp, Homo sapiens
  chr11:44608907-44609067
  hypo
ctggcggggccccgccggccacacggggagcctggatttaaagtgagtatgtcttcagccacattgcctttggagagtcacagacaggagtgacgagatctgggtcgtgtttttcagagtcctccctgctgctgtgtggacgacacgtgggcacaggcag

SEQ ID NO: 25182 - DNA, 230 bp, Homo sapiens
  chr11:44609385-44609615
  hypo
tgagaaccgtctcttcggactcaggggcagtggaactcagactgccttcaggtggccgagaacttgaaagccctggtgttctttgtggcagtccctccatctgtctgtccatccatccatccacctacctacccctccatccctgcatccacccagtctttcatgcagcaatatttgttgggagtctgccttgttctcgtaaataacagtcttcccgtcaaggtatcaca

SEQ ID NO: 25183 - DNA, 42 bp, Homo sapiens
  chr11:44611372-44611414
  hypo
ccttgctgcctcttcgttttgttttttttgagacggggtctc

SEQ ID NO: 25184 - DNA, 37 bp, Homo sapiens
  chr11:44611658-44611695
  hypo
aggtgtgagccaccgcgcctggcgacccttgctgcct

SEQ ID NO: 25185 - DNA, 31 bp, Homo sapiens
  chr11:44616400-44616431
  hypo
gacgaactatctccaacggaacctagttggg

SEQ ID NO: 25186 - DNA, 181 bp, Homo sapiens
  chr11:44621699-44621880
  hypo
ccttccagatcctgggcgcagtgatcctgggcttcggggtgtggatcctggccgacaagagcagtttcatctctgtcctgcgtaaggacccctcagcttccccagacccaggcccactgaagaggggagggccagggcgcagatacagctgctcccataagtgcttcggcttcaatgcctg

SEQ ID NO: 25187 - DNA, 69 bp, Homo sapiens
  chr11:44640083-44640152
  hypo
cctctgtaggggcttccgggctgggactggggggctctcggtggttctgcatggcggggtgggatggtg

SEQ ID NO: 25188 - DNA, 520 bp, Homo sapiens
  chr11:44640524-44641044
  hypo
acctggatggtgaggctggggcgtctgaggccgggacacccagcctccctctgactctccgcctctccccacagctcctggggatggtcctgtccatctgcttgtgccggcacgtccattccgaagactacagcaaggtccccaagtactgaggcagctgctatccccatctccctgcctggcccccaacctcagggctcccaggggtctccctggctccctcctccaggcctgcctcccacttcactgcgaagaccctcttgcccatcctgactgaaagtagggggctttctggggcctagcgatctctcctggcctatccgctgccagccttgagccctggctgttctgtggttcctctgctcaccgcccatcagggttctcttagcaactcagagaaaaatgctccccacagcgtccctggcgcaggtgggctggacttctacctgccctcaagggtgtgtatattgtataggggcaactgtatgaaaaattggggaggagggggccgggcgcggtg

SEQ ID NO: 25189 - DNA, 1005 bp, Homo sapiens; identical to SEQ ID NO: 8076
  chr11:44748189-44749194
  hypo

SEQ ID NO: 25190 - DNA, 87 bp, Homo sapiens
  chr11:44944308-44944395
  hypo
gactggcttctggtttggggacgatcttgcattcagtctggggcatgttgcgtctaagaaacctttggaggccaggcacgttggctc

SEQ ID NO: 25191 - DNA, 31 bp, Homo sapiens
  chr11:44968587-44968618
  hypo
actgtgctgaagagggcgagaggtcagggca

SEQ ID NO: 25192 - DNA, 30 bp, Homo sapiens
  chr11:45204451-45204481
  hypo
aaaccatggccccccggtgtttgtgtctga

SEQ ID NO: 25193 - DNA, 30 bp, Homo sapiens
  chr11:45234717-45234747
  hypo
acctcctcaccgagcgcaggtcgctgccct

SEQ ID NO: 25194 - DNA, 30 bp, Homo sapiens
  chr11:45256850-45256880
  hypo
cagcaagtaacctacgtgcctcgcccacca

SEQ ID NO: 25195 - DNA, 97 bp, Homo sapiens; identical to SEQ ID NO: 8079
  chr11:45684298-45684395
  hypo

SEQ ID NO: 25196 - DNA, 215 bp, Homo sapiens; identical to SEQ ID NO: 8080
  chr11:45825502-45825717
  hypo

SEQ ID NO: 25197 - DNA, 21 bp, Homo sapiens
  chr11:45838622-45838643
  hypo
caagtacagtagctcacgcct

SEQ ID NO: 25198 - DNA, 30 bp, Homo sapiens
  chr11:45924176-45924206
  hypo
cagaggcccccagacgctgcagagcccacc

SEQ ID NO: 25199 - DNA, 196 bp, Homo sapiens
  chr11:45951098-45951294
  hypo
tgacctctggcctgcccgtcccatcccgcctgactgcagctcaccctgggctgaggacccacggacaccggagagaggtgagggtccaaaggctgctggggaaggggtaggggggtggggtcctcagggaggaagggccttgtgggagggggcgccaagtggaactggagagccctgcttccgtttagaggaggta

SEQ ID NO: 25200 - DNA, 74 bp, Homo sapiens
  chr11:45953588-45953662
  hypo
ctccccaaaggcaagacagagcgaaggccacgctggggctctgtctcagagacgtaccctcaaaacatgtcact

SEQ ID NO: 25201 - DNA, 222 bp, Homo sapiens
  chr11:45953866-45954088
  hypo
tagcagaatctgagaagaccacgggtagggccctgataccatccacgcttccatttgggcttcacaacaggagacaagatccctgcaccaagaagagagcacggtcttttctgaggagagagaagggtggggagctccgcctctgtccttcaaggagactggcccaccagtctagagacacacacacggcaaaatgtcatcgtgatcagcagggtctgtgct

SEQ ID NO: 25202 - DNA, 158 bp, Homo sapiens
  chr11:45956741-45956899
  hypo
ggtgtggaagaaagagcgagggagggccgtacggatgggcccactcgctcaggtgactaggaagaatcacacgaggggacctggtctgtgtctgctcagtgtcaggtgaggcgctacactccccccacacactgtcaggaatacgcagggccatggct

SEQ ID NO: 25203 - DNA, 30 bp, Homo sapiens
  chr11:46152535-46152565
  hypo
ggattttatttcctcgtaagcggcaatgtt

SEQ ID NO: 25204 - DNA, 63 bp, Homo sapiens; identical to SEQ ID NO: 8082
  chr11:46264957-46265020
  hypo

SEQ ID NO: 25205 - DNA, 31 bp, Homo sapiens
  chr11:46298482-46298513
  hypo
gttacaagctgaaaatcggctgggcatggtg

SEQ ID NO: 25206 - DNA, 31 bp, Homo sapiens; identical to SEQ ID NO: 8083
  chr11:46299560-46299591
  hypo

SEQ ID NO: 25207 - DNA, 31 bp, Homo sapiens
  chr11:46338009-46338040
  hypo
gcagagctttaaggatcggtaacatcgtggg

SEQ ID NO: 25208 - DNA, 30 bp, Homo sapiens
  chr11:46391654-46391684
  hypo
tggtgtgcagagtccggggctgaccctcag

SEQ ID NO: 25209 - DNA, 49 bp, Homo sapiens; identical to SEQ ID NO: 8088
  chr11:46413560-46413609
  hypo

SEQ ID NO: 25210 - DNA, 30 bp, Homo sapiens
  chr11:46426274-46426304
  hypo
aggggatagtggggcgaggaaccaggtctt

SEQ ID NO: 25211 - DNA, 35 bp, Homo sapiens
  chr11:46589408-46589443
  hypo
ctagctggggctgggcgcggtggctcacacctgta

SEQ ID NO: 25212 - DNA, 181 bp, Homo sapiens
  chr11:46617387-46617568
  hypo
agccaagcgtggtggcaggagcctgtagtcccagctactcgggactacaaaaaaaaaaaaaaagaaagaaagaaaactctccttcttggagaggcttgtggagcatagctatagccctcattcaaattttactcagataactacattgtttttgtttctttgttttttgagacggactctc

SEQ ID NO: 25213 - DNA, 181 bp, Homo sapiens
  chr11:46783058-46783239
  hypo
atgaggtaactgaagacggaggtccagactcactcaaacgaaataagaggtcagaggcagaacctaatgtgagtgaaaaactggctcacggctgtagcgcaagatgtgatctgacagatactagcatccacactatacacaaataagcactttttaaccaaaaactcgatgcagtaaaaat

SEQ ID NO: 25214 - DNA, 33 bp, Homo sapiens
  chr11:46844004-46844037
  hypo
gaaaataatcaatatgggggtcgggtgtggtgg

SEQ ID NO: 25215 - DNA, 31 bp, Homo sapiens
  chr11:46907965-46907996
  hypo
aagggccacagcactgcgcacgtcagccagt

SEQ ID NO: 25216 - DNA, 31 bp, Homo sapiens
  chr11:46911489-46911520
  hypo
tttacctgcaggttggcgctgggggtgcaag

SEQ ID NO: 25217 - DNA, 30 bp, Homo sapiens
  chr11:46957743-46957773
  hypo
cactccagcctgggcgactgagtgagaatt

SEQ ID NO: 25218 - DNA, 81 bp, Homo sapiens
  chr11:46959054-46959135
  hypo
gaatgaaaaaaggcacacacacgcatagatatgtacacacacacacatatgcacacaatacacattttattttattttatt

SEQ ID NO: 25219 - DNA, 39 bp, Homo sapiens
  chr11:47169725-47169764
  hypo
gaaggtaaccagacatcgtgtcatcgctgcttctctcat

SEQ ID NO: 25220 - DNA, 423 bp, Homo sapiens
  chr11:47358925-47359348
  hypo
ggccaggcaggctcaccgataggcatgaagggctgggaggcagggctgggcctggacatgccgatggcgttgaccgcgtagacgcgcatctcgtacaccacgccctcgatcatgcgccgcgcttcatgactcagctcctgaatcaggtcgaagttcagccgcatccaccggtagctcttcttcttcttgcgctccaggatgtagcctggctcaggggaggtggcagctctggtctggaacccaggcatccccacaccaccttccctcggatctgtttggcgccctcacacctccatccggtgcccttgcactcacccaggatgggctgcccgccatcgtaggcaggcggctcccactgtactgtgcaggagtcctctcccacgttgctgatcttgggggccgcaggtgcgtctggcacgtctg

SEQ ID NO: 25221 - DNA, 31 bp, Homo sapiens
  chr11:47440865-47440896
  hypo
agtcccttactcaatgcgccttgttttcttc

SEQ ID NO: 25222 - DNA, 38 bp, Homo sapiens
  chr11:47506516-47506554
  hypo
accacgcccggcttcacgtctctttttataaccaatgt

SEQ ID NO: 25223 - DNA, 130 bp, Homo sapiens
  chr11:47599111-47599241
  hypo
cagtttcccacttgcactgtgcgggccaaaaaccgagagcattcctcaaagagagatgtcagctgatacatgtctgacacctcataaatttcctgcaactcctcagctcgaagtttcacagtcccatggt

SEQ ID NO: 25224 - DNA, 30 bp, Homo sapiens
  chr11:47608032-47608062
  hypo
ttaactaagcataccgcccagctgggcagg

SEQ ID NO: 25225 - DNA, 31 bp, Homo sapiens
  chr11:48001803-48001834
  hypo
gtgaggctggggagcccgtcctgaggggtgc

SEQ ID NO: 25226 - DNA, 21 bp, Homo sapiens
  chr11:48015394-48015415
  hypo
ttttgagaggcagtctcgctc

SEQ ID NO: 25227 - DNA, 30 bp, Homo sapiens; identical to SEQ ID NO: 8097
  chr11:48294280-48294310
  hypo

SEQ ID NO: 25228 - DNA, 30 bp, Homo sapiens; identical to SEQ ID NO: 8098
  chr11:48561464-48561494
  hypo

SEQ ID NO: 25229 - DNA, 30 bp, Homo sapiens
  chr11:57105324-57105354
  hypo
caaaacaaaaaagacgtgctaactgctatg

SEQ ID NO: 25230 - DNA, 31 bp, Homo sapiens
  chr11:57116315-57116346
  hypo
attcccaatctcccagcgggccttggccact

SEQ ID NO: 25231 - DNA, 43 bp, Homo sapiens
  chr11:57152966-57153009
  hypo
acagacatgagccaccgtgcccggccaagaaaaatttttcaat

SEQ ID NO: 25232 - DNA, 391 bp, Homo sapiens
  chr11:57182503-57182894
  hypo
tgccaggcaaagcgccgagagaaagcgtagctccagaaggagcggagttcctgcttctgccctgcccctggggtctctaatggggagaggaggatctgggcgtgaattacgaggaaagtggacaggtaggatggggagtgtggaggcttcaatggaacatttcagatccgggcccaccttctacccttggctcccagaactcacccggcgtgctctgcacctgcctcggactcacacatccccacctccctgctttgtcatgctggccctaccaccttggatgaccctctgtgttcttctctattgaaatccgatctgtctctcacagcctggtcaatgacacttcttgcagtaataccttcctgatctttctcagcgagaaaggtgaaag

SEQ ID NO: 25233 - DNA, 201 bp, Homo sapiens
  chr11:57235324-57235525
  hypo
acaacctctccaccatctacccgggcactttccgccacttgcaagccctggaggagctggacctcggtgacaaccggcacctgcgctcgctggagcccgacaccttccagggcctggagcggctgcagtcgctgcatttgtaccgctgccagctcagcagcctgcccggcaacatcttccgaggcctggtcagcctgcagt

SEQ ID NO: 25234 - DNA, 541 bp, Homo sapiens; identical to SEQ ID NO: 8100
  chr11:57243624-57244165
  hypo

SEQ ID NO: 25235 - DNA, 30 bp, Homo sapiens
  chr11:57308127-57308157
  hypo
aacttcacacctcccggcatctctgctgat

SEQ ID NO: 25236 - DNA, 30 bp, Homo sapiens
  chr11:57423908-57423938
  hypo
actattattataaccggactcagaaactct

SEQ ID NO: 25237 - DNA, 31 bp, Homo sapiens; identical to SEQ ID NO: 8106
  chr11:57434948-57434979
  hypo

SEQ ID NO: 25238 - DNA, 40 bp, Homo sapiens
  chr11:57500992-57501032
  hypo
tgctgcgattacaggcgtgagtcaccgcgcccagcctata

SEQ ID NO: 25239 - DNA, 122 bp, Homo sapiens
  chr11:57580246-57580368
  hypo
tgttaggattacatccggcgctcagccacactagccactttgtttaatggaacactgtttttacttggaaaaaaatgtgtggtagacaaagggattattcagatgtgcgcatttggcagaca

SEQ ID NO: 25240 - DNA, 19 bp, Homo sapiens
  chr11:57775182-57775201
  hypo
ctcaaaaaaaaaaaaaaaa

SEQ ID NO: 25241 - DNA, 30 bp, Homo sapiens
  chr11:58275195-58275225
  hypo
agaggcctacataccgctgcatggcgatca

SEQ ID NO: 25242 - DNA, 30 bp, Homo sapiens
  chr11:58390073-58390103
  hypo
tgagtcaggcagggcgtgggggtggggtgc

SEQ ID NO: 25243 - DNA, 31 bp, Homo sapiens
  chr11:58949215-58949246
  hypo
tctccgcccagttcgccgcaactactacgac

SEQ ID NO: 25244 - DNA, 31 bp, Homo sapiens
  chr11:59329209-59329240
  hypo
caaaaagaaaggacctcgggtctccagggac

SEQ ID NO: 25245 - DNA, 177 bp, Homo sapiens
  chr11:59423037-59423214
  hypo
tgtggaggtggtgtagcggagggtggagcactaaagaaggcacggaagcctggtgctgggggaagcatctgcccaactcgcccttgtagcaacttgggattcatggcagcaagtggactaccaacaaatccagggacccgtgcaaactggctgggagacatccgtccaggctgtagc

SEQ ID NO: 25246 - DNA, 131 bp, Homo sapiens; identical to SEQ ID NO: 8116
  chr11:59523185-59523316
  hypo

SEQ ID NO: 25247 - DNA, 80 bp, Homo sapiens
  chr11:59665633-59665713
  hypo
gcgcggaacgcgggcgcctaagccatggcttcctcagggagagctgagctctgggcgctgaacccgctgcgcttgctgtg

SEQ ID NO: 25248 - DNA, 38 bp, Homo sapiens
  chr11:59809608-59809646
  hypo
aaacccccccaaaactcgactttctaatgttactgtga

SEQ ID NO: 25249 - DNA, 30 bp, Homo sapiens
  chr11:60260922-60260952
  hypo
tgggcccaaaaggacgaggccatgccccac

SEQ ID NO: 25250 - DNA, 368 bp, Homo sapiens
  chr11:60282697-60283065
  hypo
aggtttgcagaaaccgttcctagaggcaccaaaacgtagttaaccgggtgtctgaccacatggctgccaggagcctagtgagtctgcgcacacgcactacctccgccccggcagttcctgagtgggtgcgcaggcgcaagaggagcacaccgttgccattgcagaccgtcactccctgaggagcctgagagccggccgggtgctgggctcctggctatccctgtgatggtagctcagcgagatctggggacctggcgctgagcgcgttgccagccgggatcttcctcttcatctaggcctgggcgctggcgtgagaactcggactgggtcctggacgagcgccccccgaaactccttggaaccttgaa

SEQ ID NO: 25251 - DNA, 322 bp, Homo sapiens
  chr11:60514865-60515187
  hypo
ccatgtgcacactcacactaacgtgtgcacacacacgtgtgcacacattcacacacgtatgcacacacactcatttgtacacacacatgcatacgtatgcacacatgcacatggatgcacacagacttacacgcacgtgtgcacactcacccataggtgttctcacacacgtgtgtgcactggcacgtctgtgcacaatcactcacgtgtgcacacaccttactctcacatgcatgcgcatgcacccacatgcgcatgtgcacacacacgtgtgcacacactaacacactcacacctacacgtgcacacacattcacactca

SEQ ID NO: 25252 - DNA, 30 bp, Homo sapiens
  chr11:60608619-60608649
  hypo
ccaaccccacatcccgagagtcttctctag

SEQ ID NO: 25253 - DNA, 231 bp, Homo sapiens
  chr11:60689400-60689631
  hypo
gtcatcttcctggccggcttcgtggccctgatgaggtcggtgcctgacccttccacccgggccctgctactcctggccttgctgatcctctacgccctgctgagccggctcactggctcccgagcctctggggcccaactcgaggccaaggtgcgagggctggaacgccaggtggaggagctgcgctggcgccagaggcgagcggccaagggggcccgcagtgtggaggag

SEQ ID NO: 25254 - DNA, 50 bp, Homo sapiens; identical to SEQ ID NO: 8117
  chr11:60692120-60692170
  hypo

SEQ ID NO: 25255 - DNA, 142 bp, Homo sapiens
  chr11:60703910-60704052
  hypo
tgtggtcttcgtcctgcgctatcagcgcaaagaacctcccgacagtgccactgaccccacctccccccagccccacaactgggtctggctgggcactgaccaggaggaactgagccgccagctggaccggcagtcccctggc

SEQ ID NO: 25256 - DNA, 174 bp, Homo sapiens
  chr11:60880737-60880911
  hypo
taagctttgaagccacgtgagcttgctacttcacctcgtccccacccaaattaaacctcttccccagccacagatgagctgctctgctgagagccccgcaatgggcaactttgcccccactccacagtgagaccaggctacaaggaggcagagcttccacgtggtccacatggg

SEQ ID NO: 25257 - DNA, 190 bp, Homo sapiens
  chr11:60897021-60897211
  hypo
agcctgcagccatagcgacttcagggcatctctaggcatcctccacaggtggccgcccggtcaccttgcggggaaggagaggcggagggctgacatgagggactgttagaagcctggtcttcagactccctccaagctgcccttcctgctgagctgaagacgccctccctggcctcgggataggcagctc

SEQ ID NO: 25258 - DNA, 31 bp, Homo sapiens
  chr11:60897878-60897909
  hypo
ggcagcgctgacctagcgtcacgcggatggc

SEQ ID NO: 25259 - DNA, 126 bp, Homo sapiens
  chr11:60927367-60927493
  hypo
cgtctcaaaaaaaaaaaaaaaaaaaaaaaaaaatccaaacttggccacttactggctgtgtgacactagccaggttatctaacatctccgcaactcacttcatctgtaaaacgggatcatcaccta

SEQ ID NO: 25260 - DNA, 108 bp, Homo sapiens
  chr11:61049496-61049604
  hypo
gggtccatgcctgccccgaggtgcgggatgtgactcagacagctgggagcggggctgaaatctagtgcttgtcttgttaataggttcacacatcgagcaggtatttaa

SEQ ID NO: 25261 - DNA, 334 bp, Homo sapiens; identical to SEQ ID NO: 8120
  chr11:61062689-61063023
  hypo

SEQ ID NO: 25262 - DNA, 22 bp, Homo sapiens
  chr11:61063061-61063083
  hypo
cgctgagcagttctaggcctgc

SEQ ID NO: 25263 - DNA, 352 bp, Homo sapiens
  chr11:61076170-61076522
  hypo
cttttggcatggaacatcctacgtgcagggaccataggtctcactcgtttctcaagtcccacagcactcaggatctgaaacacatgggggttcacgtaacctagtctaatgcgtggttcaacctcagtttccgagattctcaactcagagctctatcctccacacccgctactttgttctccttcagatctgacacacacgtggccccagacaacctaagagagacacattctgcagacaatgatgggcagcctaaagtaagtaccaagtggtccaggcctcaccgtgctattgatgctggctaacagcttcccgttaaattccaccatagagtacacggcccctttcactt

SEQ ID NO: 25264 - DNA, 30 bp, Homo sapiens
  chr11:61106829-61106859
  hypo
attggggacgacagcgccttcactgtcctg

SEQ ID NO: 25265 - DNA, 152 bp, Homo sapiens
  chr11:61108935-61109087
  hypo
tggggctggaggagatcgcaaagcaggtgaacgtggtcgccaaggccatgggtgagtgctggcctgggagctggggaagagagtggggaaggttggacagccctggggcgaggagcaggttcctgttggctgcctagcggtgctccccaggt

SEQ ID NO: 25266 - DNA, 44 bp, Homo sapiens
  chr11:61122608-61122652
  hypo
ggattacaggcgtgagccaccacgcctggcctggcctctcctgt

SEQ ID NO: 25267 - DNA, 31 bp, Homo sapiens; identical to SEQ ID NO: 8124
  chr11:61160872-61160903
  hypo

SEQ ID NO: 25268 - DNA, 118 bp, Homo sapiens
  chr11:61263505-61263623
  hypo
cacaggtgggtgcggcgctgacggctttggtgtgggggtgtggagcctagagggctgacgggacagcaggtggggtggctgctgggcgccgtgagatcagacacggcttgtgacgcgt

SEQ ID NO: 25269 - DNA, 295 bp, Homo sapiens; identical to SEQ ID NO: 8126
  chr11:61276208-61276503
  hypo

SEQ ID NO: 25270 - DNA, 584 bp, Homo sapiens; identical to SEQ ID NO: 8127
  chr11:61276535-61277119
  hypo

SEQ ID NO: 25271 - DNA, 261 bp, Homo sapiens
  chr11:61305392-61305653
  hypo
ccagaatggtcccaggatggccgcaagtggcctcagaccccagggacaccaccgaggtggcagtgcgtgagggcaccggctggggagggggcttgtccttccgctccagcatccgctgaaggcaccaccacctcgtccagcagccggggccggtcgaggcaggcggcctctccgcgcctccttctctgccgccgccgccgcaggccctcgcctgtgctcgtacctcttgtccccctgagcgttctggttctgctgggttcc

SEQ ID NO: 25272 - DNA, 31 bp, Homo sapiens
  chr11:61458298-61458329
  hypo
tgcgaaggccaggccccgctcccaggaagcc

SEQ ID NO: 25273 - DNA, 30 bp, Homo sapiens
  chr11:61467271-61467301
  hypo
accccatagggcagcgggcccacagcatgg

SEQ ID NO: 25274 - DNA, 51 bp, Homo sapiens
  chr11:61474396-61474447
  hypo
gctggtctctctcagacgttgccgtcagctccttcacggaaaggttcatcc

SEQ ID NO: 25275 - DNA, 31 bp, Homo sapiens
  chr11:61476224-61476255
  hypo
catcctattttatagacgaggagagggctgc

SEQ ID NO: 25276 - DNA, 57 bp, Homo sapiens
  chr11:61478511-61478568
  hypo
gccaccccctccaagtcgatgcctttgagagagtcgcgttcccgggagagtggggta

SEQ ID NO: 25277 - DNA, 190 bp, Homo sapiens
  chr11:61479891-61480081
  hypo
agcctaagaccctgggcggcgggtaggaggggacaaatgtcagtggcctcccactcctgcccctggctgcacaaggcacactgttttcatccctaggcctgggcgtgtgaggacctatctcatgctgaaatctggccccagtcctgggcaggctccgctctgccttctgctctagcgcagctgatgtgtg

SEQ ID NO: 25278 - DNA, 31 bp, Homo sapiens
  chr11:61488283-61488314
  hypo
atctggctgagcatgcgcgggggcatcctct

SEQ ID NO: 25279 - DNA, 31 bp, Homo sapiens
  chr11:61490854-61490885
  hypo
agagaggtgtccccagcgcccctacctaatg

SEQ ID NO: 25280 - DNA, 31 bp, Homo sapiens
  chr11:61508799-61508830
  hypo
accaccgcaacagcagcgtcaggtgagcctt

SEQ ID NO: 25281 - DNA, 594 bp, Homo sapiens
  chr11:61511529-61512123
  hypo
gggcgcctgggggactcgcccagtcctcaggtgctggaattcgccgagttcatcgacagcctcttcaacctggacagcaagagcagctccttccaagacctctactgcatggtggtgcccgagagccccaccagtgactacgctgagggccccaagtcccccagccagcaagagatcctgctccgtgcccagttcgagcccaacctggtgcccaagcccccacggctctttgccggctcagccgacccctcctcgggcatctcactctcgccctccttcccgctcagctcctcgggtgagctcatggacctgacgcccacgggcctcagtagccaggaatgcctggcggctgacaagatccggacttctacccccactggccacggagccagccccgccaagcaagatgagctggtcatctcagcacgctagcaccccagttgcgtggccagccgggcccaggcaggagcaggtggccctgtgggcacctggtgcctgccccctgccgggcagctttaaggacagacccccaggggcagtttagcctcaggcacaggcatcgctgctgagctgggggtccgcatccctacctca

SEQ ID NO: 25282 - DNA, 34 bp, Homo sapiens; identical to SEQ ID NO: 8129
  chr11:61520127-61520161
  hypo

SEQ ID NO: 25283 - DNA, 459 bp, Homo sapiens
  chr11:61522482-61522941
  hypo
gagtgctgtcacactcggggctggggctggggacacctgagctctcatcctggtccccacttggccttggtcatccctctggacagtgggtagcagtccctgtgctctcggctctgggctgggagactgggaaagggttttaccgaaggggctgcagcacagcgcgccccctcacctgacgtggtccccctccctgggcacacaccaagcataggtgctgggtcctgccctgtgccggtggtgggctgggggctaaggcgctttggacctcaggtgggaggccgggacagagcggccccctcgaggctggtacagccgggcccccgtgaccgcccggctaatcccctagagagaggcaaggcagcccagatcggcgggcacagggcctgcagagaggggacccaccgggcaggatgcactggcttccagcaggtaaccgggccatggtataagggggct

SEQ ID NO: 25284 - DNA, 31 bp, Homo sapiens
  chr11:61525630-61525661
  hypo
gtatggagggggctcccggacattctgtcct

SEQ ID NO: 25285 - DNA, 30 bp, Homo sapiens
  chr11:61525907-61525937
  hypo
ggcctggctccagccggagctgcttaggga

SEQ ID NO: 25286 - DNA, 211 bp, Homo sapiens; identical to SEQ ID NO: 8130
  chr11:61595256-61595467
  hypo

SEQ ID NO: 25287 - DNA, 509 bp, Homo sapiens; identical to SEQ ID NO: 8131
  chr11:61595682-61596191
  hypo

SEQ ID NO: 25288 - DNA, 251 bp, Homo sapiens; identical to SEQ ID NO: 8132
  chr11:61596390-61596641
  hypo

SEQ ID NO: 25289 - DNA, 394 bp, Homo sapiens
  chr11:61632412-61632806
  hypo
aacgccctcctgctcacggagggctgcaccctcccctccacacacgtggcaccccactgggcacacacgaggagccacactttgagactggtcctggctgtggacagggtctctgagggccccagccagcctctgcccaggtggtgggaggaagcgggagcagcatggccctctgagtcctcacgctctgcccaccctacacactcctcagcctcttccccaccatgccccggcacaacttacacaagatcgccccgctggtgaagtctctatgtgccaagcatggcattgaataccaggagaagccgctactgagggccctgctggacatcatcaggtgaggggtggaggtccacaggcgctgggccctgggatcacccgtggtgcagacagt

SEQ ID NO: 25290 - DNA, 177 bp, Homo sapiens
  chr11:61634596-61634773
  hypo
tcagaatgggggctttcggggagggcgcctagtccccccagctctaagcagccaggagggacctgcatctaagcatctgggttgccatggcaatggcatgccccccagctactgtatgcccccgacccccgcagaggcagaatgaacccatagggagctgatcgtaatgtttatcat

SEQ ID NO: 25291 - DNA, 177 bp, Homo sapiens
  chr11:61644901-61645078
  hypo
tcatgggcaggtactgtcccccgaggcaccacctcctgccacggcagccgtatgcccggggtcctgggcaaccccactcaccgcccactgcatgcacaccagcatgtacgccagattttccacttcaaagttcaccagggtgagcagcggcgggccgactgcaagaaggggcatgag

SEQ ID NO: 25292 - DNA, 31 bp, Homo sapiens
  chr11:61647048-61647079
  hypo
cagccgctcctcccatcgccaggcccaaggg

SEQ ID NO: 25293 - DNA, 30 bp, Homo sapiens; identical to SEQ ID NO: 8133
  chr11:61659450-61659480
  hypo

SEQ ID NO: 25294 - DNA, 30 bp, Homo sapiens
  chr11:61663016-61663046
  hypo
tgcaggagtgaagcacgccagtgcgcagct

SEQ ID NO: 25295 - DNA, 112 bp, Homo sapiens
  chr11:61664784-61664896
  hypo
ctgcctttattaaatagagatcgcgttacattccatccaaagaaggaaatccggacgtggtgagggatgcgtccaggtgggagctccgaacgctggtcctgagtgggctctg

SEQ ID NO: 25296 - DNA, 31 bp, Homo sapiens
  chr11:61667862-61667893
  hypo
aagtgagaggggcacccgcaggctggggagt

SEQ ID NO: 25297 - DNA, 30 bp, Homo sapiens
  chr11:61668543-61668573
  hypo
gggaggactcacgctcggatgccttgtgga

SEQ ID NO: 25298 - DNA, 130 bp, Homo sapiens
  chr11:61668848-61668978
  hypo
ctagaggccccttggcactcacggccgacttaaggctggtgcaccagacgcaccgctgaaccttttccaaagcttcggccagcacctgagtctgggcgtcaggagccccgcactctaactggaactctag

SEQ ID NO: 25299 - DNA, 30 bp, Homo sapiens
  chr11:61669446-61669476
  hypo
ccgagtcagtctctgcgcctctctgagcct

SEQ ID NO: 25300 - DNA, 249 bp, Homo sapiens
  chr11:61672903-61673152
  hypo
tgggggctccccaggtgggagcggccaggccggctcgtaggtgaggtgaaccgccttgctggggaccacgcagaggagcagggagagcagcggggccagcccgggctgggccggatggacagacagacagacagacagacaggtagacaggtgcacagagacagaacaggaggaaggggagaagttaatgtacattcagaagctcagagctcaggaggtggatgagggcctgctcgtcttccctggagg

SEQ ID NO: 25301 - DNA, 126 bp, Homo sapiens
  chr11:61674006-61674132
  hypo
gctggtgctcttgtggcgagagtggccctttcggggcccggccttggtggggctcagcagctgggggtgaagctcgcggttgggagaggctggtgtggacgtgatgaccagcgtcttcaaggctgt

SEQ ID NO: 25302 - DNA, 460 bp, Homo sapiens
  chr11:61674739-61675199
  hypo
acccattcctgctggccccaccgggccaggtgagcgtccactcgggcagcaaagctcagtgctcgctgagccgggaggcagggggggtgcctgggctggcctgggcaggcggggatgggcctcaccttgccccgagcctccttcagctgcttttctgatgccgcctgcttcatgttggcttctcgaaccatcttgtgagcttcctaggaagaaggcagtccctgcgtgagtggtgaggagccaacggacgcccagatgacccattccccaagttgttcccgcgcccagccggtgtacctcaaacaggctggccgtcagctcttccagctcctgttctagctgctcccgcaccttggacagccgctcacattcctcgtcctttagcttcagctcctggaggaaaagaggcaggcacttgagcacctcagcatccccaggcctggcacgggagggaccaggc

SEQ ID NO: 25303 - DNA, 30 bp, Homo sapiens
  chr11:61675593-61675623
  hypo
tgcgcaggcgcaacacgtccagctgggcgg

SEQ ID NO: 25304 - DNA, 155 bp, Homo sapiens
  chr11:61679897-61680052
  hypo
tggctcccctagagagcggccaagtcttcagccccaaacccacaagcatgtcaggttcccaagcgctaggccacatccacgccagcccaccactccacaggtgtcatggcctggaagctcgggacaattgcagggagatgcgctcctccacctgg

SEQ ID NO: 25305 - DNA, 67 bp, Homo sapiens
  chr11:61688730-61688797
  hypo
ctgggaacacaggcccggggtcagacgggctggattcaaccccactttcagacggtgtgcctttgag

SEQ ID NO: 25306 - DNA, 30 bp, Homo sapiens
  chr11:61689492-61689522
  hypo
atttaaaaaaaaacccgtctctactaaaaa

SEQ ID NO: 25307 - DNA, 126 bp, Homo sapiens
  chr11:61717669-61717795
  hypo
caggctgtgctagccgttgcttctgagcagattacaagaagggactaagacaaggactcctttgtggaggtcctggcttagggagtcaagtgacggcggctcagcactcacgtgggcagtgccagc

SEQ ID NO: 25308 - DNA, 137 bp, Homo sapiens
  chr11:61736212-61736349
  hypo
cgtcttttgacgcatcggtggaagaactgaatttcaggatgctcacaaacctgcagctggaagctagacttccaaaccttagtttaaaaaagcaactctactgaaatactaaaataaattgccgacggaattagggt

SEQ ID NO: 25309 - DNA, 38 bp, Homo sapiens
  chr11:61736664-61736702
  hypo
aatatgttgcctggggctgggcgcggtggctcatgcct

SEQ ID NO: 25310 - DNA, 31 bp, Homo sapiens
  chr11:61765125-61765156
  hypo
atgagagcagaagctccgtgggtctacaaga

SEQ ID NO: 25311 - DNA, 77 bp, Homo sapiens
  chr11:61770025-61770102
  hypo
catgtaaatgtgtatacactttatgcagacaggaaagatttcctgcttccatgagcatccccgcgagtaaccagatg

SEQ ID NO: 25312 - DNA, 149 bp, Homo sapiens
  chr11:61770720-61770869
  hypo
gctgatattctccctacgctgggccaggcagatggagtctccttcagccgagatgtttctggggcagaagatgcacctctgccaccatcctttacttaaaccggaagactcccagcccctgtgaacaagtccgtcggaagttctctgtc

SEQ ID NO: 25313 - DNA, 45 bp, Homo sapiens
  chr11:61825692-61825737
  hypo
agcatttgtcttagcacggtgtgggcgacacgtgctccagagtct

SEQ ID NO: 25314 - DNA, 2 bp, Homo sapiens
  chr11:61880309-61880311
  hypo
cg

SEQ ID NO: 25315 - DNA, 305 bp, Homo sapiens; identical to SEQ ID NO: 8135
  chr11:62313702-62314007
  hypo

SEQ ID NO: 25316 - DNA, 209 bp, Homo sapiens; identical to SEQ ID NO: 8138
  chr11:62369473-62369682
  hypo

SEQ ID NO: 25317 - DNA, 30 bp, Homo sapiens
  chr11:62381716-62381746
  hypo
cctccctttgcagccggatccagagcaatg

SEQ ID NO: 25318 - DNA, 52 bp, Homo sapiens
  chr11:62387276-62387328
  hypo
aagtgctgggattacaggcgtgagccactgcgcccagacaagccctttcaac

SEQ ID NO: 25319 - DNA, 25 bp, Homo sapiens
  chr11:62423253-62423278
  hypo
aaaagctatatcctcgggctgggcg

SEQ ID NO: 25320 - DNA, 198 bp, Homo sapiens
  chr11:62474895-62475093
  hypo
tgagcagggtcccccgcagccagtacagactccactgcaggggccgtcataggcccagaccacgccatttgagagggggagtcggccttggcctcagctctgttggggaggtctctagcccagagtcaggatgcctgcaatgggggaggggcaggcagtgaactagcgacagtgggggtgtgcgcagggatgcaggca

SEQ ID NO: 25321 - DNA, 67 bp, Homo sapiens
  chr11:62532993-62533060
  hypo
tgattttatgactttacgatggtgtgaaagtgatgtgcattcaatatgcccccgggcttacagtgaa

SEQ ID NO: 25322 - DNA, 30 bp, Homo sapiens
  chr11:62562459-62562489
  hypo
atcccgggactttccgtccactgcaataag

SEQ ID NO: 25323 - DNA, 30 bp, Homo sapiens
  chr11:62652970-62653000
  hypo
cggctcaacttctccgactctaccagctga

SEQ ID NO: 25324 - DNA, 31 bp, Homo sapiens
  chr11:62700323-62700354
  hypo
tgcttcactcactctacgctagtcttggccc

SEQ ID NO: 25325 - DNA, 44 bp, Homo sapiens; identical to SEQ ID NO: 8145
  chr11:63258494-63258538
  hypo

SEQ ID NO: 25326 - DNA, 54 bp, Homo sapiens; identical to SEQ ID NO: 8146
  chr11:63258764-63258818
  hypo

SEQ ID NO: 25327 - DNA, 30 bp, Homo sapiens
  chr11:63320384-63320414
  hypo
aaataatattcctccgtaagaattggtggt

SEQ ID NO: 25328 - DNA, 30 bp, Homo sapiens
  chr11:63398535-63398565
  hypo
aaaatcaatagctccgcccagctcacgata

SEQ ID NO: 25329 - DNA, 113 bp, Homo sapiens
  chr11:63399449-63399562
  hypo
tctctaaaaaacaaaagcaaacggtcgacttctgcagggcccaggtgagaaaggcccacctgtgtcctggttgagggtcctcagggttctttgggacccgaggattcctgaaa

SEQ ID NO: 25330 - DNA, 121 bp, Homo sapiens
  chr11:63431995-63432116
  hypo
agcgaaactctgtcttttaaaaaaaagcgtactgagcaatgtgaatgtaatgagcaatatcaatgtaatgacacacagcacatacaataagctattgtttttttgttttttttttttgaga

SEQ ID NO: 25331 - DNA, 46 bp, Homo sapiens
  chr11:63434152-63434198
  hypo
attacaggcatgagccaccgtgcccggtccacttgtcaggaatctt

SEQ ID NO: 25332 - DNA, 22 bp, Homo sapiens
  chr11:63437114-63437136
  hypo
gtagctaatacaataatgggcc

SEQ ID NO: 25333 - DNA, 41 bp, Homo sapiens
  chr11:63609979-63610020
  hypo
attcctgtattctttaaaacgggaaaaaagacaagcagcag

SEQ ID NO: 25334 - DNA, 32 bp, Homo sapiens
  chr11:63641118-63641150
  hypo
ttattttatttttttctgagacggagtcttgc

SEQ ID NO: 25335 - DNA, 31 bp, Homo sapiens
  chr11:63675217-63675248
  hypo
tcctgacaggcccttgcgtagccacggcccc

SEQ ID NO: 25336 - DNA, 111 bp, Homo sapiens
  chr11:63675663-63675774
  hypo
ctgggtctgtggcggcggaaggagcgagagatcccagcactaaactctccctcgctctgttttttgaggaacctgaatgaacctgaaagcaaagaccgagtggagacgctc

SEQ ID NO: 25337 - DNA, 488 bp, Homo sapiens
  chr11:63676298-63676786
  hypo
ggtggggtgcctcagcccccccgtgacgcccgcctctgccctctccacagacctcacgtggtgggcagtggcggcaacgacaaagaaaaggaagaatttcgggaggccaagccccgctccctccgcttcacgtggagtatgaagaccacgagctccatggagcccaacgagatgatgcgggagatccgcaaggtgctggacgcgaacagctgccagagcgagctgcatgagaagtacatgctgctgtgcatgcacggcacgccgggccacgaggacttcgtgcagtgggagatggaggtgtgcaaactgccgcggctctctctcaacggggttcgatttaagcggatatcgggcacctccatggccttcaaaaacattgcctccaaaatagccaacgagctgaagctttaacaggctgccaggagcgggggcggcgggggcgggccagctggacgggctgccggccgctgcgccgccccacctgggcg

SEQ ID NO: 25338 - DNA, 30 bp, Homo sapiens
  chr11:63743822-63743852
  hypo
ctgaccagccccaccggcccatcctggtca

SEQ ID NO: 25339 - DNA, 30 bp, Homo sapiens
  chr11:63764202-63764232
  hypo
gtctccctccttcccgggcgatgggctgga

SEQ ID NO: 25340 - DNA, 30 bp, Homo sapiens
  chr11:63776404-63776434
  hypo
cagccagaggaaggcggccctgaattaatc

SEQ ID NO: 25341 - DNA, 140 bp, Homo sapiens
  chr11:63779116-63779256
  hypo
atcagggctgcgggacgaagacatggagcagggcagtgcatcagggttctgggcagagtggccagggcaggcaggatggcccttgtgcgtgttcgaacaatgggtggctggtcatgggaggggcgcgggtagaggcctga

SEQ ID NO: 25342 - DNA, 82 bp, Homo sapiens
  chr11:63783734-63783816
  hypo
cctgggctccagccccgatccgcagcctgcgtccgtggtaactgccagagctcatcagggaaagcagcgggtgaggccaggc

SEQ ID NO: 25343 - DNA, 169 bp, Homo sapiens
  chr11:63784053-63784222
  hypo
ggtgtcgggcggctccgagtggctggtctcccagagctgacagctcttcgcttggggaataattaattccaccgcccaaaaacccagggctgcaagttgccatgttacttgcgagattaatacaagcagctaattaagatggagaggcgaggagcggctgggcgctccc

SEQ ID NO: 25344 - DNA, 30 bp, Homo sapiens
  chr11:63808025-63808055
  hypo
gggcttcctaggcccgggatgccaggtccc

SEQ ID NO: 25345 - DNA, 332 bp, Homo sapiens
  chr11:63832548-63832880
  hypo
ctgagccagactcggcggcctcggagagacttcccagaggagaacgggctacacgtgggcctggaggtgaggtagaagtggcccagggaacgggtgcaggacagagtttcaggaagcaggcctggggtcagagaggcccagagatgaagagcgggtagagtgttgagcgatcggagcagtgaggcggtgggtgggcaggatcgggcaggtggcgggcaagcgtcagctgcctcaacatgcaggaggccaggctttgttctgagggcggctggggccttggagggttttaagccaggtcctcacagatttgccatgtacgaagagttcaccca

SEQ ID NO: 25346 - DNA, 30 bp, Homo sapiens
  chr11:63849397-63849427
  hypo
gctctcgagtgccgcgttctacctgctgtg

SEQ ID NO: 25347 - DNA, 30 bp, Homo sapiens
  chr11:63856697-63856727
  hypo
ggaggtgagggccccgggctctgggtgggg

SEQ ID NO: 25348 - DNA, 30 bp, Homo sapiens
  chr11:63870604-63870634
  hypo
atgttgtcccagtacggtccctcatgtctc

SEQ ID NO: 25349 - DNA, 31 bp, Homo sapiens
  chr11:63871582-63871613
  hypo
ctttggcaggggcctccggaccagtgacccc

SEQ ID NO: 25350 - DNA, 204 bp, Homo sapiens
  chr11:63885696-63885900
  hypo
ttggctacggcaccacgcggggctaccgggacggcggcatccccgacatagactactcctacacatgatgcccgcccacccgggctgccccgcctcagccccagctgccctggcgtggccatgtggctttgcccagcctgctgcaatccaagagagcaaggaagagaaattccatgggtgactttcctccgcagaaagcaaagt

SEQ ID NO: 25351 - DNA, 166 bp, Homo sapiens
  chr11:63906016-63906182
  hypo
tgaaatacagccaggcggcaataataaaacagccgcgggccctgctggcagaggaatggctgacagccgggcctctctccccaactgcgatgccgctcggctctggtttttaccgcaattacaatgtccgaagacagggaggaggcagcagcggggaggaggagag

SEQ ID NO: 25352 - DNA, 30 bp, Homo sapiens
  chr11:63912683-63912713
  hypo
cgaggtcggcttgtcgctgtgaaacatggc

SEQ ID NO: 25353 - DNA, 5 bp, Homo sapiens
  chr11:63934614-63934619
  hypo
ttttt

SEQ ID NO: 25354 - DNA, 272 bp, Homo sapiens
  chr11:63963858-63964130
  hypo
ctccatctcaaaaaaaaaaaaaaaaaaagcttcacaagagcattcctaggagtaatgtgtagcaaagagtgagctgcgggagttgcccttcccgtggtcaccacagcggcttcattgctgccagtgtgaatgttggtcctagcaagactggaaagttgagagtaattcacgtccttgtcgtgatccgaagaatgttgtccacatcaatccctaggcctttgcttcctggctggacatggtgtgtggttgggagtgtccgctaagcagcactc

SEQ ID NO: 25355 - DNA, 30 bp, Homo sapiens
  chr11:63971751-63971781
  hypo
tgcgctgtttgtgccgccgctgcctctggg

SEQ ID NO: 25356 - DNA, 127 bp, Homo sapiens
  chr11:63988353-63988480
  hypo
caccttggcggccccacgtgggcactgccccttcccaggctcacatgctgtcaccctgatggggaggtgggggctcggtgactctggaggaggggaatagtgcctggcagcccgtcaccagtatggt

SEQ ID NO: 25357 - DNA, 30 bp, Homo sapiens
  chr11:63990123-63990153
  hypo
tctgggcctgggttcgccggtccgcaagac

SEQ ID NO: 25358 - DNA, 31 bp, Homo sapiens
  chr11:63996887-63996918
  hypo
ggctccacaggtaccccgcaggggctggtca

SEQ ID NO: 25359 - DNA, 31 bp, Homo sapiens
  chr11:64019237-64019268
  hypo
tgctccgcccaaatcccgggactctttcagt

SEQ ID NO: 25360 - DNA, 59 bp, Homo sapiens
  chr11:64032944-64033003
  hypo
gggcaggtgccggctgcggccaggtgccctgtgagtgtctgggccgcctgtgtgctatg

SEQ ID NO: 25361 - DNA, 43 bp, Homo sapiens
  chr11:64044483-64044526
  hypo
agattcccaagaaggagaatacgaagttctccctgttttatag

SEQ ID NO: 25362 - DNA, 30 bp, Homo sapiens; identical to SEQ ID NO: 8157
  chr11:64059922-64059952
  hypo

SEQ ID NO: 25363 - DNA, 30 bp, Homo sapiens
  chr11:64081530-64081560
  hypo
tcaaggagggtgagcgctgggcaggggctg

SEQ ID NO: 25364 - DNA, 330 bp, Homo sapiens
  chr11:64088214-64088544
  hypo
atgcctttgtgactggcgagtggggccgagcccacaaggcggaaggcaaggtgaggtgaggggcctgcagggagtcaggaccaggtaggatattcttcttgtgacctttactttctctgcaggttcggctcctggctgatcccactggggcctttgggaaggtgagtgttcccctgaccgccacagggacatggcagtgcggggagcagtgggggcccttagcctcttcaaggatttctgacacttttctctgtctcttcttaggagacagacttattactagatgattcgctggtgtccatctttgggaatcgacgtctcaagaggtaa

SEQ ID NO: 25365 - DNA, 30 bp, Homo sapiens
  chr11:64112372-64112402
  hypo
cctgggagcaagcccggctgcgggaggcag

SEQ ID NO: 25366 - DNA, 159 bp, Homo sapiens
  chr11:64118935-64119094
  hypo
acttctgggcagaatgcgatgctggtggcagagaaggcagctttgcaggggcagctgcagcacctggaggggcagctggggagcctgcagggccgtgcccaggagctgctgctgcagagccagcgggcgcaggagcacagcagccgcctgcaggtgggt

SEQ ID NO: 25367 - DNA, 63 bp, Homo sapiens
  chr11:64120608-64120671
  hypo
ggctggagctggagcgggcacagctggagatgcagagccagcagctgcgcgagtccaaccagc

SEQ ID NO: 25368 - DNA, 177 bp, Homo sapiens
  chr11:64120942-64121119
  hypo
ctgcaccgcgaacagcgggagtacctgtgagtgggccgcctgggagcggggtggggcctgcatcccctttgggcgttcctggggagagcccttagtgagggcctagggacagggttggagctgaccttccaggtcagtccaatctgcggcacgggaccagtgcgtcctcgctgcagc

SEQ ID NO: 25369 - DNA, 30 bp, Homo sapiens
  chr11:64124763-64124793
  hypo
atggctggcccccacgagcagctccaggct

SEQ ID NO: 25370 - DNA, 179 bp, Homo sapiens
  chr11:64135860-64136039
  hypo
gggcgtggcggggccgcggggctaccaggtgggacctctgacgcgccgccttcgccttcgccttcgccttcgcctccaggactcgcccttcttccagcagtacgagctggacctgcgggagcctgcgctgggccagggcagcttttctgtgtgtcgccgctgccgccagcgccagagcg

SEQ ID NO: 25371 - DNA, 31 bp, Homo sapiens
  chr11:64143232-64143263
  hypo
aaatattccatatgaacgtagagattgcaaa

SEQ ID NO: 25372 - DNA, 243 bp, Homo sapiens
  chr11:64323673-64323916
  hypo
cccttctgaccatctccatcccgccaggccccaaccaggggccccaccagtgccgccgcttccgccagccacagtggcagctcttggaccccaatgccacggccaccagctggagcgaagctgacacggagccgtgtgtggacggctgggtctatgaccgcagcgtcttcacctccaccatcgtggccaaggtagggcctcccccagagccactcgagtcccgtcaccttggaggtcagagtc

SEQ ID NO: 25373 - DNA, 43 bp, Homo sapiens
  chr11:64335473-64335516
  hypo
ggggaaagggacagggcggcacgtcgtgcggtggcggcagagc

SEQ ID NO: 25374 - DNA, 88 bp, Homo sapiens
  chr11:64347187-64347275
  hypo
gatgaacatctcaccccgggttttcagcagcctcatgatactgtgtacagtttggtgccttgtctttttttttctttttctttttctt

SEQ ID NO: 25375 - DNA, 30 bp, Homo sapiens; identical to SEQ ID NO: 8159
  chr11:64410377-64410407
  hypo

SEQ ID NO: 25376 - DNA, 43 bp, Homo sapiens
  chr11:64418870-64418913
  hypo
cgactcttgaaggtgacgggatcggccacgatggcacgcaggc

SEQ ID NO: 25377 - DNA, 31 bp, Homo sapiens
  chr11:64434773-64434804
  hypo
cttgcggctggatgcccgcagcttgatgccc

SEQ ID NO: 25378 - DNA, 33 bp, Homo sapiens; identical to SEQ ID NO: 8160
  chr11:64480297-64480330
  hypo

SEQ ID NO: 25379 - DNA, 893 bp, Homo sapiens; identical to SEQ ID NO: 8161
  chr11:64480379-64481272
  hypo

SEQ ID NO: 25380 - DNA, 1300 bp, Homo sapiens; identical to SEQ ID NO: 8165
  chr11:64512373-64513673
  hypo

SEQ ID NO: 25381 - DNA, 84 bp, Homo sapiens
  chr11:64607056-64607140
  hypo
ggcagggagagtgaggcgtttgacctgtgtgtaagtggccatttaggcacacgcccaggtgcacatgcacggtgtgtgccagca

SEQ ID NO: 25382 - DNA, 339 bp, Homo sapiens
  chr11:64621848-64622187
  hypo
ggtcggcaggcagctcgtggccctccagcttgaccttgatgaggtggttggccagcgcgaactcctcgtcgtccagcagcccgtccttgtccacgtcggccagcttccagatcttccctagcacggtgttggggagcttggacttcaccatctccttcttggcgttggcgcccgtgatcttgccgttgacaggggacagcgtgtagaagatctcgtcgtaggtgggcttgtccttgcccaccacccactccacgtcgtcgatgccctcgccggccccctcgccgtagccgtgcccgaacggcccgttcatggtgccgtcaaaggcgccgcccttgacca

SEQ ID NO: 25383 - DNA, 87 bp, Homo sapiens
  chr11:64624926-64625013
  hypo
aaaaataagaaaaacacgcagccctctgtcctccagagccggcatctgacccacgcccgtgcacacagctcacggaggttcaggcca

SEQ ID NO: 25384 - DNA, 282 bp, Homo sapiens
  chr11:64635185-64635467
  hypo
ctccatctccgtacccccacctccaaaaaaaagattaaaatggtaaatattatatgttaggtgtattttatcacaatttttaaaaagtgaaaacgaaaagtcctggggctgtgggatgaaagaacagagtggctccgggcaaccaggctgagccaggcatggcacctcagggtagcgtgcacgcaggtgcctctcatggcgacccgcgtcccacccagcctcctccaggccactgcggctctggggcgcccctctccaggcgctggccttacagggtctgcc

SEQ ID NO: 25385 - DNA, 30 bp, Homo sapiens
  chr11:64659114-64659144
  hypo
tcggcctcataaagccgggagcggctcgga

SEQ ID NO: 25386 - DNA, 73 bp, Homo sapiens
  chr11:64672164-64672237
  hypo
tttctctgcagctgcacgccgagacatataaacaccccttcataaactgattttaaaacgtacgcagtcctgt

SEQ ID NO: 25387 - DNA, 30 bp, Homo sapiens
  chr11:64707138-64707168
  hypo
aaacccaaagaagccggtggctgctcgctc

SEQ ID NO: 25388 - DNA, 440 bp, Homo sapiens; identical to SEQ ID NO: 8167
  chr11:64739288-64739728
  hypo

SEQ ID NO: 25389 - DNA, 31 bp, Homo sapiens; identical to SEQ ID NO: 8168
  chr11:64759021-64759052
  hypo

SEQ ID NO: 25390 - DNA, 30 bp, Homo sapiens
  chr11:64804461-64804491
  hypo
gttctgcctcctcccgttcctgctcctgcc

SEQ ID NO: 25391 - DNA, 31 bp, Homo sapiens
  chr11:64809968-64809999
  hypo
agatactttctatgggcgatgcattccaata

SEQ ID NO: 25392 - DNA, 689 bp, Homo sapiens
  chr11:64875604-64876293
  hypo
tcctgctcctgccccatccaccggcagccccggccctgcccttcactacctctccctcgtgcagggagggcggctcaggcgccccggagcaggcagagtgcgtggagctgctgctggccctgggcgagcctgcggaggagctgtgcgaggagttcctggcgcacgcccgcggccggctggagaaggagctgagaaacctggaggccgagctggggccctcacctccggctcccgacgtgttagagttcaccgaccatggaggcagtggcttcgtgggcggcctctgccaggtggcggcggcctaccaggagctgtttgcggcccagggcccagcaggtgccgagaagctggcggccttcgcccggcagctgggcagccgctattttgcgctggtggagcggcggctggcgcaggagcagggtggtggtgacaactcactgctggtgcgggcgctggaccgcttccaccggcgcttgcgggctcccggggccctgctggccgctgccgggctcgcagacgctgccacggagatcgtggaacgagtggcccgcgagcgcctgggccaccacctgcagggtctccgggcggccttcctgggctgcctgacagacgtccgccaggcgctggcagcacctcgcgtggctgggaaggagggccctggcctggccgagttgctggccaatgtggcc

SEQ ID NO: 25393 - DNA, 30 bp, Homo sapiens
  chr11:64877296-64877326
  hypo
agcgtggagactcgcgactggctcagcact

SEQ ID NO: 25394 - DNA, 30 bp, Homo sapiens
  chr11:64883896-64883926
  hypo
tgaccagggtaacccgttcagctagggagc

SEQ ID NO: 25395 - DNA, 31 bp, Homo sapiens
  chr11:64898550-64898581
  hypo
cagagggacccaggaccgagcttgggacagc

SEQ ID NO: 25396 - DNA, 112 bp, Homo sapiens
  chr11:64950947-64951059
  hypo
actgctggctcttggcggccatcgcctccctcactctcaacgacaccctcctgcaccgagtggttccgcacggccagagcttccagaatggctatgccggcatcttccattt

SEQ ID NO: 25397 - DNA, 644 bp, Homo sapiens
  chr11:64951331-64951975
  hypo
aaattccactcctcccggaggtcggtctcagttgccccatctgagaaaggagtgttcgctggggaaaacagatcagcacgtgtggccttctccacgtgtcaagcctcctatcccccaactcctcctgcgctttggcaaggtctgactgagcccagcagaaaagaaagactcgggattaagtctacgtaaaccagcttttcctgacggtgtgcccagggcccatttttcaagtcacaccaatcaattctcaatgagctgcctttgggagggacatgcccagcaaccctggatgagactctccagccttggaggccccagccctgcccgaaggactcttgggtgttccctccttctgcctggttagagagccccttaccctactctgtccttgcccgccttgcgcgggtggaggtggccctcggaacccagggtgcggaacccacagtgcggatccactttggcccagcgccacacccacctgctccagtctgcaggggcgcagtctcgcccccttccctcgctcctccaatccgctcctccctggcctccgattggccagttcagtacccgccacccacactctccgcaacctgggctcctagggccgcctccaccccgccccgccccccgttgtcctggccccg

SEQ ID NO: 25398 - DNA, 30 bp, Homo sapiens
  chr11:64956177-64956207
  hypo
cggcgggggagcaccgcggggggctgccga

SEQ ID NO: 25399 - DNA, 31 bp, Homo sapiens
  chr11:64975823-64975854
  hypo
cttggtctgcatgagtcggggaatcctccag

SEQ ID NO: 25400 - DNA, 463 bp, Homo sapiens
  chr11:64977144-64977607
  hypo
gctcagagaataaggcaagcccggctgtgggctgactgtacatggcttttgctgcttctcctcacccagccccaagtcgacttgccggctcggcggccatctccccttctgcacagttgcccactctcccatgactggtctaagtgatggaatttccttcttaacggccacccagcgtgatggcaatgggaagctgggcctggtggagttcaacatcctgtggaaccgcatccggaattacctggtaggttgtccccactcacctcagtcatgcaggtgcgggccgggcaggtgggaagggccgggtgactcagcctggccctcaccctctgccgccacctcagtccatcttccggaagtttgacctggacaagtcgggcagcatgagtgcctacgagatgcggatggccattgagtcggcaggtgagactccaaggctgacggcacctgtggggcccaggac

SEQ ID NO: 25401 - DNA, 26 bp, Homo sapiens
  chr11:65036097-65036123
  hypo
ctaccgtgcccagccattattgtttt

SEQ ID NO: 25402 - DNA, 30 bp, Homo sapiens
  chr11:65127662-65127692
  hypo
cacacctggcagctcgaactaacaactccc

SEQ ID NO: 25403 - DNA, 99 bp, Homo sapiens; identical to SEQ ID NO: 8174
  chr11:65189905-65190004
  hypo

SEQ ID NO: 25404 - DNA, 26 bp, Homo sapiens
  chr11:65258596-65258622
  hypo
gtgagccaccacgcccagcctggctt

SEQ ID NO: 25405 - DNA, 29 bp, Homo sapiens
  chr11:65276909-65276938
  hypo
caggtgtgagccaccgatcccggcccaca

SEQ ID NO: 25406 - DNA, 30 bp, Homo sapiens
  chr11:65296779-65296809
  hypo
gagttctcctcgtacggctggctctgccaa

SEQ ID NO: 25407 - DNA, 30 bp, Homo sapiens
  chr11:65305560-65305590
  hypo
acacggctggccagcgagtataactggggt

SEQ ID NO: 25408 - DNA, 698 bp, Homo sapiens
  chr11:65306329-65307027
  hypo
ctctgggaggaaggcaggcagcgcccgccggagaccttacaaccgcccgctaaccggggaggggggccggtaggggcgcctcgggtctcaaggcgccgggagggtctgcgggccctgaaggtccctgggtccgagccacaagtcggggcagaagtgaggccgagctcgcggaaatccctcagtgatcaccgaggtctgggccgagggcggcgtcggcggcgtcagcggcggcgctggggaacgcaggccccgtgcgggcggctgcgcgcgaagccggctttgcagacgcagcggaaggagccgctggtgttcacgcagcgctcgctcttgcacagcagcccgcgctggttcagctctcggcactcgtcgatatctgaaggtgagggcgacaggtgcggcttcgctgagcctccaggcggctcctcaccaccggccccgcccctgcccccacccccgaagcccggctcacccacgcagcgggcgcgggaggcgtcgagctggaagccgccgggacactcgcacacggcgccgcccggccgcggcacgcagcggccactcacgcagcgacactcgtctgaatcctcctctgaactgtcctcatctgcgtggcccggaacaatatggacttcaacactgagccccggccaaaggctaccaaccccgccaccgcccgacccggcagcactcacctcttgggg

SEQ ID NO: 25409 - DNA, 30 bp, Homo sapiens
  chr11:65348379-65348409
  hypo
ggcctgtctcttctcgcaggccggggcggt

SEQ ID NO: 25410 - DNA, 225 bp, Homo sapiens
  chr11:65353077-65353302
  hypo
cttctttcttcccccgccgcagcgcggggtcccgggaagatgggcagagaacgggcgagcccccaaggggccccaaggacagagctggcgcgagggtgacggtttcagagtggcggggctcggctggacccaggaggggctatctgatcagagggaccctggtgctgtggaagagtcctctggtgtggtagtgagctcctcattaggggacgcatttgagccaag

SEQ ID NO: 25411 - DNA, 133 bp, Homo sapiens
  chr11:65367042-65367175
  hypo
tgtcggggactccccgcgctcgcgtcctgggcctcccggcggctgcaggtcgcggccaaggcccagcgaggcgagcagggcggtgccgcgcagcagcgcccgctggatcagcttgggcgtcccagagctgcta

SEQ ID NO: 25412 - DNA, 31 bp, Homo sapiens
  chr11:65385209-65385240
  hypo
gctagaccagctgtttcgttgttgaatcccc

SEQ ID NO: 25413 - DNA, 154 bp, Homo sapiens
  chr11:65387058-65387212
  hypo
aggccattcggagacgccacaatgcaggcagcaaccccacccctccagcctctgtcatgggctcgccgcccaggtgagcaccttgccagctgtgccgaggggcaccgggggccggggagggcccgcaagctctagctggcgctgacctggggct

SEQ ID NO: 25414 - DNA, 35 bp, Homo sapiens
  chr11:65387465-65387500
  hypo
tcctagcagtggtgctcgctcggccctgtggcagg

SEQ ID NO: 25415 - DNA, 224 bp, Homo sapiens
  chr11:65388103-65388327
  hypo
gcccagggcacagcctcgacactcgtgccagggtctgggagggaggcacttctgccacctgaccccagcacttgtcccttgagccctggttggtctcggcacagacagccctacctgcctggccttggcctcggcctcgaccccacccagccccagggctcgcccgtggggggatcctgatggctgctgttctcacagggaccgacactcgcattcctccagct

SEQ ID NO: 25416 - DNA, 904 bp, Homo sapiens
  chr11:65397156-65398060
  hypo
ggttggcaatggcctcgtcaccttccagctgcgtggccttgagttccggggtgagccgcaggaccaggctcgggtgggcaggcacagctcgggcctgatgtgggagctgtgttcaatagcacgtgcgaaggaggtccagtccagctctgtccaggctggcgggtggccttgggcaaggcactcctcctccctgggcctgcgtttcccagtctgagcaatgaggtggcagggtctcttggccaagccctgtgcctgccccaactttaggtcccagtgactctacaggtcactgcagtgagggcctgggcctggaggtctgagttctcacacccagcctgctctgtggtctcaggcttggcccatgggttgggcgccatgagtgagccagctccttcctctcaggaagacgtgtgtgttggatgcccgagagtgcagaggggccagaccgtgtccctgctccctcccgccctgcccttggatgctgggagttgggaggagaaaggcaggcgctctttcgtgaatcttggcatccaataaggttgactcccctggcgtccaagggggtgaatggcagcaggcctctgatgccatgttggtcactctcccaggacagggcaggtagggattgttctagcagcccctgactgcacacccctcctccacaggcacttactgccagcagcgcgaggtggaggctatcaccgagggtgtggaggaggacgagggctgttgctgctgtgaacctggccacctgccacgggtcctgtccttcaatgctgcctttgggcagcgctggctggcttgggaggtaacagccagcaagtacgtgctggagggctatagcattagtgacaataatgctgcctccatgctgcaggttttcgacctccgcaagatcctcatc

SEQ ID NO: 25417 - DNA, 30 bp, Homo sapiens
  chr11:65412564-65412594
  hypo
gctttgagagttaccgggcccagctagaca

SEQ ID NO: 25418 - DNA, 50 bp, Homo sapiens; identical to SEQ ID NO: 8186
  chr11:65419933-65419983
  hypo

SEQ ID NO: 25419 - DNA, 30 bp, Homo sapiens
  chr11:65425913-65425943
  hypo
gcgaaaaggagcctcgggcctcccagcctg

SEQ ID NO: 25420 - DNA, 38 bp, Homo sapiens
  chr11:65524509-65524547
  hypo
cgtgagccaccgcgcccggctagatgtcaactgtattc

SEQ ID NO: 25421 - DNA, 916 bp, Homo sapiens; identical to SEQ ID NO: 8189
  chr11:65554042-65554958
  hypo

SEQ ID NO: 25422 - DNA, 30 bp, Homo sapiens
  chr11:65557170-65557200
  hypo
tgtgaccagctaagcgttgaccccatttcc

SEQ ID NO: 25423 - DNA, 162 bp, Homo sapiens
  chr11:65582777-65582939
  hypo
cagtccaggtccaaaaagtctcgagaagcgcccgggagccaggagaaaagccgagagatgaaaggagatgcctgaggtgccgcagcccaggtctgagccgggctagaaaccgcgtgacaaaacaaagatgcgttcttagccgtgatggaactcccagattag

SEQ ID NO: 25424 - DNA, 66 bp, Homo sapiens; identical to SEQ ID NO: 8190
  chr11:65600795-65600861
  hypo

SEQ ID NO: 25425 - DNA, 476 bp, Homo sapiens; identical to SEQ ID NO: 8191
  chr11:65601095-65601571
  hypo

SEQ ID NO: 25426 - DNA, 30 bp, Homo sapiens
  chr11:65629223-65629253
  hypo
cccacccactgccccgaaactgcctgctgt

SEQ ID NO: 25427 - DNA, 31 bp, Homo sapiens
  chr11:65634005-65634036
  hypo
acccagggcctcctggcgctgtccagagtgg

SEQ ID NO: 25428 - DNA, 30 bp, Homo sapiens
  chr11:65635934-65635964
  hypo
ccagctcctgacaccgtcctgcccatccca

SEQ ID NO: 25429 - DNA, 100 bp, Homo sapiens
  chr11:65665114-65665214
  hypo
atcttcattttcagacgggagaacagttgtccgcagacacagagccaatgagcccagcagctgggctcttacccactcctgcacccgtttgcacgaagag

SEQ ID NO: 25430 - DNA, 361 bp, Homo sapiens
  chr11:65684984-65685345
  hypo
cccccaagctggaaacggctctcatagagagtggggcagaggtgccagcgattggcccggtagatgcccaggtaggtgtagacatcaggcttgtaggtgagcaggcacttaatgcccgctgcacggatggctgaatccgcctccagtacacccaagcggtccgtgaagtcgtccgtgtaaacacagatgacctggcgcccaccctccttggcacgtgggctcaccttggccacctgaagctggccttcaaccacggcccgggcaatgccagcccaggcgtggtccagcttgaagcccggtgccagatgcataagccacttgcccgagagcacgtggtgggtgatggcgagctggcgcaggg

SEQ ID NO: 25431 - DNA, 31 bp, Homo sapiens
  chr11:65698361-65698392
  hypo
tgttctcatttgggctcgccttgacctctca

SEQ ID NO: 25432 - DNA, 26 bp, Homo sapiens
  chr11:65722788-65722814
  hypo
gtactcggctgtacgccgtggctcac

SEQ ID NO: 25433 - DNA, 30 bp, Homo sapiens
  chr11:65733612-65733642
  hypo
aaaatgtggagctgcggaagaagaagcctg

SEQ ID NO: 25434 - DNA, 66 bp, Homo sapiens
  chr11:65733941-65734007
  hypo
tccgggccaagctgcggctgcaggctcagtccctgagcacagtggggccccggctggcctccgaat

SEQ ID NO: 25435 - DNA, 30 bp, Homo sapiens
  chr11:65744001-65744031
  hypo
ggctggctggcaatcgcgaggagcaggagg

SEQ ID NO: 25436 - DNA, 30 bp, Homo sapiens
  chr11:65746739-65746769
  hypo
cacctctgcagggccggctctctgatagaa

SEQ ID NO: 25437 - DNA, 40 bp, Homo sapiens
  chr11:65754936-65754976
  hypo
ccctctccctgagccccggacacatcgatgctgtcattgc

SEQ ID NO: 25438 - DNA, 39 bp, Homo sapiens
  chr11:65761271-65761310
  hypo
atttataagaaagtcccgcatacgccaggatggtggctc

SEQ ID NO: 25439 - DNA, 42 bp, Homo sapiens
  chr11:65810129-65810171
  hypo
ggcaggcctcggtggccgggccggcgccgccgccgggcaggt

SEQ ID NO: 25440 - DNA, 30 bp, Homo sapiens
  chr11:65810501-65810531
  hypo
cccaggccagtaggcgccgcagcagcacta

SEQ ID NO: 25441 - DNA, 79 bp, Homo sapiens
  chr11:65817721-65817800
  hypo
ctgcccatcaatcttccgctgtgtacaatatcgtgggggaggaggatcttgagaccttgcctccttcccagggctgtta

SEQ ID NO: 25442 - DNA, 71 bp, Homo sapiens
  chr11:66047172-66047243
  hypo
tccatggttccccctgcgctccctttgccatcccctgccaccttgctctttgacatcgggaatccatagac

SEQ ID NO: 25443 - DNA, 91 bp, Homo sapiens
  chr11:66052173-66052264
  hypo
caggtagagctggagacgctgccgggggacggggccccccatgctgtcggggcccagggctgctgtccgcaaagagcgcacctggaagaaa

SEQ ID NO: 25444 - DNA, 475 bp, Homo sapiens; identical to SEQ ID NO: 8197
  chr11:66079556-66080031
  hypo

SEQ ID NO: 25445 - DNA, 143 bp, Homo sapiens
  chr11:66100034-66100177
  hypo
ggccccagggggcaggcggtggtagccctgctccttgtacaggaagaggccaaaagtgttgggctgggtcactcggaacttggtggcacagagctggttcagggtggcaatcgaggcttctgggggcacggccagggtcttgg

SEQ ID NO: 25446 - DNA, 31 bp, Homo sapiens; identical to SEQ ID NO: 8198
  chr11:66107464-66107495
  hypo

SEQ ID NO: 25447 - DNA, 30 bp, Homo sapiens
  chr11:66114056-66114086
  hypo
aggtaccacgtaggcgggccgcagcaagct

SEQ ID NO: 25448 - DNA, 31 bp, Homo sapiens
  chr11:66128652-66128683
  hypo
gattatgtgagccaccgcgcctggcttctag

SEQ ID NO: 25449 - DNA, 30 bp, Homo sapiens; identical to SEQ ID NO: 8199
  chr11:66176593-66176623
  hypo

SEQ ID NO: 25450 - DNA, 31 bp, Homo sapiens
  chr11:66266000-66266031
  hypo
ggacatcttttaagaacgaaggacatttttg

SEQ ID NO: 25451 - DNA, 30 bp, Homo sapiens
  chr11:66331594-66331624
  hypo
ggcccaaaagggaacgtcagagcctggggt

SEQ ID NO: 25452 - DNA, 715 bp, Homo sapiens
  chr11:66410883-66411598
  hypo
gagtgatagcaacccttcttgcgtctgtttcttcaaggcaaacgaatgcacgtgcagttgtccaccagccggcttaggactgcgcccgggatgggagaccagagcggctgctatcggtgcgggaaagaggggcactggtccaaagagtgtccgatagatcgttcaggccgcgtggcagacttgaccgagcaatataatgagcaatacggagcagtgcgtacgccttacaccatgagctatggggattcattgtattacaacaacgcgtacggagcgctcgatgcctactacaagcgctgccgtgctgcccggtcctatgaggcagtggcagctgcagctgcctccgtgtataattacgcagagcagaccctgtcccagctgccacaagtccagaatacagccatggccagtcacctcacctccacctctctcgatccctacgatagacacctgttgccgacctcaggagctgctgccacagctgctgctgcagcagcagccgctgctgctgttactgcagcttccacttcatattacgggcgggatcggagccccctgcgtcgcgctacagccccagtccccactgttggagagggctacggttacgggcatgagagtgagttgtcccaagcttcagcagccgcgcggaattctctgtacgacatggcccggtatgagcgggagcagtatgccgatcgggcgcggtactcagcct

SEQ ID NO: 25453 - DNA, 30 bp, Homo sapiens
  chr11:66452952-66452982
  hypo
cagaaggcagaaggcgagtgccctcgcatg

SEQ ID NO: 25454 - DNA, 30 bp, Homo sapiens
  chr11:66453725-66453755
  hypo
gcctggtgcggccgtcgcacacatccagtc

SEQ ID NO: 25455 - DNA, 238 bp, Homo sapiens
  chr11:66454464-66454702
  hypo
cccagcttgaagacatgtttgcgctttcggtaatcaaaggcgacgctgccctgggccctggccaggctgacaggcacttctccgtggtatggcactcccgcgctggctgccttggcatccttgtaaaagccgaggctcccacgccgcaggacacagtacacgttctgccaggacctgcgagggacgcggtgctgactggccggcctcagtggcgcccgcaacctggagccctcttggg

SEQ ID NO: 25456 - DNA, 30 bp, Homo sapiens
  chr11:66510766-66510796
  hypo
cgctgagcatagactcgagaagggtatgat

SEQ ID NO: 25457 - DNA, 117 bp, Homo sapiens
  chr11:66511217-66511334
  hypo
ggggcctggatagggaggggtcgactcccaggtcccacctttgcgggggaagctggtccccctggattaggctgggagatgcttggggctggttgtaaggtaaaagacggggggtcg

SEQ ID NO: 25458 - DNA, 8 bp, Homo sapiens
  chr11:66511633-66511641
  hypo
gggcgtcg

SEQ ID NO: 25459 - DNA, 54 bp, Homo sapiens
  chr11:66513216-66513270
  hypo
gttcttttcccaactgcgctgtcataccgacatgagaatatctttagggtttgt

SEQ ID NO: 25460 - DNA, 84 bp, Homo sapiens
  chr11:66513569-66513653
  hypo
tgcccggcccgatatgggaatatcgtaacagaggacgtgtgaaggaatagttagactctacacgtacctggaaaccattcttgt

SEQ ID NO: 25461 - DNA, 84 bp, Homo sapiens
  chr11:66557366-66557450
  hypo
tacttattcatccagacgtgtgtttgttcaagtcagtgtcagtgagctagatactatctgtaggtacagtgtcttaagatatgt

SEQ ID NO: 25462 - DNA, 30 bp, Homo sapiens
  chr11:66620003-66620033
  hypo
cagtgactggtgggcgtccctgaaggtcgt

SEQ ID NO: 25463 - DNA, 99 bp, Homo sapiens
  chr11:66625239-66625338
  hypo
ctgctggccagtggagcggccgcctgcccgctgccctgcgtctgccagaacctgtccgagtcgctcagcaccctctgtgcccaccgaggcctgctgttt

SEQ ID NO: 25464 - DNA, 480 bp, Homo sapiens
  chr11:66625609-66626089
  hypo
tgggccgcatcgcgccgggagccttcgacgacttcctagagagcctggaggacctggacctgtcctacaacaacctccggcaggtgccctgggccggcatcggcgccatgcctgccctgcacaccctcaacctggaccataaccttattgacgcactgcccccaggcgccttcgcccagctcggtcagctctcccgcctggacctcacctccaaccgcctggccacgctggctccggacccgcttttctctcgtgggcgtgatgcagaggcctctcccgcccccctggtgctgagctttagcgggaaccccctgcactgcaactgtgagctgctgtggctgcggcggctggcgcggccggacgacctggaaacgtgcgcctccccgcccggcctggccggccgctacttctgggcagtgcccgagggcgagttctcctgtgagccgcccctcattgcccgccacacgcagcgcctctggg

SEQ ID NO: 25465 - DNA, 35 bp, Homo sapiens
  chr11:66628275-66628310
  hypo
cacttcagggtctgcggggcggacacaggactgga

SEQ ID NO: 25466 - DNA, 127 bp, Homo sapiens
  chr11:66631244-66631371
  hypo
cttcacacctcggacgcggaactccgcaagggccctgctcatcttggtggcggccgtggggtggtctttgccgtgggcaatgactttgaccagcagggagtcgtagtggggcgagatgacggctcct

SEQ ID NO: 25467 - DNA, 31 bp, Homo sapiens
  chr11:66631858-66631889
  hypo
gtgggctcccagacagcgaggggacggcagg

SEQ ID NO: 25468 - DNA, 30 bp, Homo sapiens
  chr11:66644008-66644038
  hypo
tgccgggagcaccagcgaggagctcaggtg

SEQ ID NO: 25469 - DNA, 30 bp, Homo sapiens
  chr11:66644471-66644501
  hypo
aaggccttcaggaggcggcccgcaggcact

SEQ ID NO: 25470 - DNA, 30 bp, Homo sapiens
  chr11:66647155-66647185
  hypo
gggaggttgggtcacgcagagagtagctga

SEQ ID NO: 25471 - DNA, 56 bp, Homo sapiens
  chr11:66652535-66652591
  hypo
gaggccttggggacttcgggacctgtcaagctcaggacaagcgggtgtcacccggt

SEQ ID NO: 25472 - DNA, 51 bp, Homo sapiens
  chr11:66655509-66655560
  hypo
cacttgtgatggcattcggggcccacctggatgatccgggatcacctttcc

SEQ ID NO: 25473 - DNA, 31 bp, Homo sapiens
  chr11:66658266-66658297
  hypo
cccccgccgcggttgtttccaatttttagca

SEQ ID NO: 25474 - DNA, 93 bp, Homo sapiens
  chr11:66665003-66665096
  hypo
ctgcactccagcctgggcgacagagagagacctgcctacaaaaaataaataaacaaaaagcgaataaaatacaacatgcgaaaagctatcctc

SEQ ID NO: 25475 - DNA, 93 bp, Homo sapiens
  chr11:66676149-66676242
  hypo
gaggtcttgcatggttcggcgcgctcactgtgtgacagaagctggcatctgaagagagcgggtaggctgagcctgctacgggaacgtaagtgc

SEQ ID NO: 25476 - DNA, 37 bp, Homo sapiens
  chr11:66683836-66683873
  hypo
gtgagccactgtgaccgacctgccaagcagttttgta

SEQ ID NO: 25477 - DNA, 26 bp, Homo sapiens
  chr11:66695177-66695203
  hypo
gagcgaaagtccgtctcaaaaaaaaa

SEQ ID NO: 25478 - DNA, 148 bp, Homo sapiens
  chr11:66695455-66695603
  hypo
atctgcttgttggtttcggccacagacatgaagccacaaagggacgtgtggatttcagatgcctatgttgtgccactgcttggctccagggtctaccaccttcagaagcccacctgtggcaggccgggtatggtgtctcacacctgta

SEQ ID NO: 25479 - DNA, 77 bp, Homo sapiens
  chr11:66701353-66701430
  hypo
gtctcaaatcccaacacgcagctggggttcacagaatgaacttccagccctaatgctcactacgccccaccagcaca

SEQ ID NO: 25480 - DNA, 31 bp, Homo sapiens
  chr11:66701669-66701700
  hypo
tcatcttgcagggcctcggattcacatattc

SEQ ID NO: 25481 - DNA, 31 bp, Homo sapiens
  chr11:66749830-66749861
  hypo
cttatcttctctgcctcggtttcctcatttg

SEQ ID NO: 25482 - DNA, 10 bp, Homo sapiens
  chr11:66752027-66752037
  hypo
gccacagcgc

SEQ ID NO: 25483 - DNA, 30 bp, Homo sapiens
  chr11:66834370-66834400
  hypo
ctgccacccaccctcgacccagctgactgt

SEQ ID NO: 25484 - DNA, 121 bp, Homo sapiens; identical to SEQ ID NO: 8214
  chr11:66897391-66897512
  hypo

SEQ ID NO: 25485 - DNA, 32 bp, Homo sapiens; identical to SEQ ID NO: 8215
  chr11:66897571-66897603
  hypo

SEQ ID NO: 25486 - DNA, 32 bp, Homo sapiens
  chr11:67002079-67002111
  hypo
ctcttgtcctagtgctttaggcggcagacgca

SEQ ID NO: 25487 - DNA, 78 bp, Homo sapiens
  chr11:67051192-67051270
  hypo
agagagcccctttttccgctccctggactggcagatggtcttcttgcagaaggtaacagtctgcggcagggactgggg

SEQ ID NO: 25488 - DNA, 50 bp, Homo sapiens
  chr11:67059785-67059835
  hypo
gtgggttgctgcagcccgtgtctcactcagactgccggggtggttgggct

SEQ ID NO: 25489 - DNA, 169 bp, Homo sapiens
  chr11:67072100-67072269
  hypo
tccactctagacctatcgaccgcgtgggggcccatgaatccgtgtagacaagggctgcaggtgaatgtgatgcatgctagactttgagagcccctaccctaaggggaatgaggagccatgacagttgcccactgccctgccaggcagagctttgcggtgctccgtgggg

SEQ ID NO: 25490 - DNA, 31 bp, Homo sapiens
  chr11:67074565-67074596
  hypo
tgtacttagatggagacgggtaagcaatggc

SEQ ID NO: 25491 - DNA, 239 bp, Homo sapiens
  chr11:67077919-67078158
  hypo
gggctaagtctggcccgcccatgcagggtgtcctgggaggacccagggggcctggtcccagcctccttcacagtcagcccagtatctcttagcacccggcgtctccagcctgtcccatgaatacccctgaagatggggaccagccacgtcctgggcccctgagagcagctgagatccagtgagggcaggcggaggcactgtaggcacaggctggagaggggtcacgggggcagggcagg

SEQ ID NO: 25492 - DNA, 33 bp, Homo sapiens
  chr11:67078397-67078430
  hypo
gagtctgcgcactcacgccgcccaagtcctgcc

SEQ ID NO: 25493 - DNA, 358 bp, Homo sapiens
  chr11:67078648-67079006
  hypo
gtcctcacccagcaccggacgcacgcatccacccagcccagctcaggggctggtgccggcacgggtttcacctgccggctgcctacgcaaaggcagagaaagcataggaggggaggagggcagggaggcctgggtctccagggagctgaggagggcttctgggggccagaaggaagctacaagcaggtagggttcaaggagcggggcagcagggctggggtgttgtcctccctcccgaggaagcgtggctgtggacagcttggcttttggcgtgcgtgccacaaacattccggccctcgcctcctcctggctctgtgcttggcacccctgccccagatcttcccggctctgtgcttgg

SEQ ID NO: 25494 - DNA, 42 bp, Homo sapiens
  chr11:67091661-67091703
  hypo
tctcggcttactgcaggctctgccccccggggttcacgccat

SEQ ID NO: 25495 - DNA, 31 bp, Homo sapiens; identical to SEQ ID NO: 8217
  chr11:67141092-67141123
  hypo

SEQ ID NO: 25496 - DNA, 42 bp, Homo sapiens
  chr11:67150725-67150767
  hypo
tttaaaaaaattcatcctggccgggcgcggtggctcacgcct

SEQ ID NO: 25497 - DNA, 30 bp, Homo sapiens
  chr11:67165692-67165722
  hypo
gttgccccaggatccggctgccagccctga

SEQ ID NO: 25498 - DNA, 184 bp, Homo sapiens
  chr11:67166352-67166536
  hypo
cccgagcgcaggcacggccctccccttcccctgccgcaggccggagccaccagcccacctggtgtgctcggcagatgaggtccaagtcgtgcttgtggaggaacttggccaccacctcggctccaaaggtaaaagagacgccacggtcgttctcgccccagccctgcacgtccttgtcagggtc

SEQ ID NO: 25499 - DNA, 64 bp, Homo sapiens
  chr11:67203569-67203633
  hypo
gctggcccagagcaggcgccgcgtgcggccccacagcgcggcacctaggcgggccgggtggtag

SEQ ID NO: 25500 - DNA, 35 bp, Homo sapiens
  chr11:67208821-67208856
  hypo
acgggggtcgatgatgcgcacgctcttgtccttgc

SEQ ID NO: 25501 - DNA, 220 bp, Homo sapiens
  chr11:67209931-67210151
  hypo
tccactggcctccacaatcaccgccaggaacttggggttgacggcgcagaaggtgctgtcccaggtaacacgggacacgcgaatgtcctcatagcactggtcgttcttgaccggctgcccgaacacatgccggaatttgctctgccggaccactttgcggaaggacatgtctgcgggacagagaggcctgggtcagtccggcccatcccaacaactccag

SEQ ID NO: 25502 - DNA, 154 bp, Homo sapiens; identical to SEQ ID NO: 8220
  chr11:67210850-67211004
  hypo

SEQ ID NO: 25503 - DNA, 202 bp, Homo sapiens
  chr11:67230824-67231026
  hypo
agaccagctcagtgccggtttccttctccctccccgacagtgtcatgggaagagccctgggctacgttcctaattctacctaccacctgctggctgtccttgggtgagtcagtccttatctgtaaaatgggacggaggtagtgaagattacaagatataacccgtgttcagtgcttagcgcagggcctagtatattttcttt

SEQ ID NO: 25504 - DNA, 21 bp, Homo sapiens
  chr11:67231145-67231166
  hypo
agccaccgtgcccggccatcc

SEQ ID NO: 25505 - DNA, 178 bp, Homo sapiens
  chr11:67259490-67259668
  hypo
gctggtgtgggcctcactcctcgctgtccagcttcaggctgatgctccgtgctttgccccgtgccagggtggtgggtggtgttcccgggccctcacgctccgcctggctggggcccctcgagcgaagcagctggctctgtttgcgcaggaagtccacgggggcagccacaccatagct

SEQ ID NO: 25506 - DNA, 30 bp, Homo sapiens
  chr11:67291011-67291041
  hypo
tctttgagcgtctccgctgctgaggggagc

SEQ ID NO: 25507 - DNA, 30 bp, Homo sapiens
  chr11:67394579-67394609
  hypo
taggttagactggccgggaaggagcggccg

SEQ ID NO: 25508 - DNA, 30 bp, Homo sapiens
  chr11:67402398-67402428
  hypo
gaggtgctcagcagccggatgcggctccaa

SEQ ID NO: 25509 - DNA, 67 bp, Homo sapiens
  chr11:67432865-67432932
  hypo
ggggagctctgggggtcgtcgccatagaaacgggtgatggtgctctgcagggcgggcagcagcctct

SEQ ID NO: 25510 - DNA, 653 bp, Homo sapiens
  chr11:67462526-67463179
  hypo
aggctttttacactcttcactcgctttgtcctacctggccactttcctcacgggaatttaggcccctcttagcattggcgtgccggtataaaccccaaggcaagatccgccttaagccgtatgaggtagccacggaaccgcaggcaagactcactcgctcggtccagcagtaggacttatcatgatttacacaagcaacaccagctgcagtgaggcttgtgactattcacacacacttttaacctccagaatatcccgaccaccaagcaagtactttgtcgcacccttgcgacgtttctttactttgctctgtgaacagagtttatctggtccccgaggcagtgcaatgcaagcctattcgccgttttccacgttgctgagggtccgggtttattcatcacaacaggtaagtccggattcccagtccctgaggccaccgcagtaaggcagtggggcgcctccccttggtgggggggcgggaatcagagaccccgacccgaaggagactgggtgatcccagacgagcccccaagactgttagaaataaatccttattccccgatgtcacaaagaagaatcagcagacgaaaagcttcctcagcaaggtgatttttaccttctgcagaaagagtgctgcccgtccgcaatcctgc

SEQ ID NO: 25511 - DNA, 35 bp, Homo sapiens
  chr11:67764138-67764173
  hypo
gcgcaggcggtagtcacgcacgtgcttgaagggca

SEQ ID NO: 25512 - DNA, 96 bp, Homo sapiens; identical to SEQ ID NO: 8227
  chr11:67777601-67777697
  hypo

SEQ ID NO: 25513 - DNA, 484 bp, Homo sapiens
  chr11:67781132-67781616
  hypo
ccatttcacagatgaggaaaccgaggcagagaaggtgagtgatttgcccaaggtcccacaaccagtaagaggcagagcccggagacaggcctgatggtggctcgagaggctcgttcttggctcctgggtctcagtcctgctcccgtgacgagccatcccctatggggaccatggtgcctgtcctgtgtgcgggccactgcccagcttctcccaatcagagcaggaagatggtgggttcagcctggccccacaatcactccagctgagggctggcctggggctcctgaccaggctctcagtagcacactggtccagcagggccatcctgcagaccggagcaggtcccgccctcaaggtggccacttaacaatcacccacagccttgcgctcaccgatgctgggccctgggctcagaaccgactgtgtggtctcatcattagctggcaggtgccatcattacaccggtaacatgagaggcttcaag

SEQ ID NO: 25514 - DNA, 591 bp, Homo sapiens
  chr11:67808653-67809244
  hypo
gagtgaaggtgcacaggtgcccgtggttgggaactgtctgtggtctgcccctgactggcccccatccgtgtccacccacaggaccatgggctccatgttccggagcgaggaggtggccctggtccagctctttctgcccacagcggctgcctacacctgcgtgagtcggctgggcgagctgggcctcgtggagttcagagacgtgagttgggtgggcaggcgtgggaagggggctactgccaaggttagcccggaggccggtccaggatggggactgccccccctccgccatagggccctggccccatttgaaccccagcggcccctgccatgggcactgctcatgggaagcccgcagctgaggcccctgagctggctcctccccataccctcctggggcatggggtctggtctgtgctctgatctgcgtcttgtggctcccagggcactccacacctttctggaggaggcagctaaggcctggggagagtcaggcctgggctctagggtgaggagctccctgacccccttcccgggacactcacccctccgtgtggcacccacagctcaacgcctcggtgagcgccttcc

SEQ ID NO: 25515 - DNA, 65 bp, Homo sapiens
  chr11:67810253-67810318
  hypo
accagcaggccctgcgggcccagctgcaccagctgcagctccacgccgccgtgctacgccagggc

SEQ ID NO: 25516 - DNA, 30 bp, Homo sapiens
  chr11:67811626-67811656
  hypo
gccaggtgctaggccgggtgctgcagctgc

SEQ ID NO: 25517 - DNA, 30 bp, Homo sapiens
  chr11:67813259-67813289
  hypo
tccacccacacaggccgttgggggcccaag

SEQ ID NO: 25518 - DNA, 30 bp, Homo sapiens
  chr11:67815194-67815224
  hypo
gagtgcttcagtcgcgccaccagcatcttc

SEQ ID NO: 25519 - DNA, 30 bp, Homo sapiens
  chr11:67817294-67817324
  hypo
gagaggccactgtccggtgtgtccctgact

SEQ ID NO: 25520 - DNA, 151 bp, Homo sapiens
  chr11:67850479-67850630
  hypo
aaacactctcgtggccgcatcgttccttagactctgctttgcgggtcgcctcttccaagcagtctgtaaattcctaatgaatagggactgcgtcttttattgatgttagtcttctcccagagcaccaagcaaatctcgatgcccactacac

SEQ ID NO: 25521 - DNA, 41 bp, Homo sapiens
  chr11:67864813-67864854
  hypo
cgtgtgggccgggcacggtggctcacgcctgtaatcccagc

SEQ ID NO: 25522 - DNA, 30 bp, Homo sapiens; identical to SEQ ID NO: 8229
  chr11:67895827-67895857
  hypo

SEQ ID NO: 25523 - DNA, 180 bp, Homo sapiens
  chr11:67931371-67931551
  hypo
agatcaacttctccctctggccgattcttctggggcttgtcctgacttgtggcacctgcagagacccgtgtccgcatcttcacagaccgctcgcgagcctctctctggtctcaccttccctatcacagcactaacttcagagggggcagcccagtcagcgaggcataagaggcctgaaaa

SEQ ID NO: 25524 - DNA, 30 bp, Homo sapiens
  chr11:67984230-67984260
  hypo
ttggctttcgtgctccgcacatgcgtctgc

SEQ ID NO: 25525 - DNA, 90 bp, Homo sapiens; identical to SEQ ID NO: 8230
  chr11:68080740-68080830
  hypo

SEQ ID NO: 25526 - DNA, 31 bp, Homo sapiens
  chr11:68131492-68131523
  hypo
gggggcgtgggggtgcgcgggcgtgggtggg

SEQ ID NO: 25527 - DNA, 30 bp, Homo sapiens
  chr11:68133220-68133250
  hypo
gaatgggttgcggccgccgggggtgcccca

SEQ ID NO: 25528 - DNA, 30 bp, Homo sapiens
  chr11:68142590-68142620
  hypo
acagaacccttgtgcggctgcgggcactcc

SEQ ID NO: 25529 - DNA, 95 bp, Homo sapiens
  chr11:68158723-68158818
  hypo
accgcgcccagcctctgttgagcatattttgaggttctcttggtgccagtgatatgttacatgtgtccccatcgcaccatcgtcacccattgagg

SEQ ID NO: 25530 - DNA, 146 bp, Homo sapiens
  chr11:68162350-68162496
  hypo
tcaggaggtagaagggcggagagagggaacaggcggaggtcacatccttggctttcaaaatgggccagggagagacaccctctgagcatggtaggacaggaaagcaagattggaacacattgagagcaaccgaggtggctgggcgt

SEQ ID NO: 25531 - DNA, 100 bp, Homo sapiens
  chr11:68172055-68172155
  hypo
ccttcatggccttcatcgcaccctgcagtcctcatgtaggggatgcaatccatgaatttagttttcccagcctcctttaaaaacgcgttcatgctggggc

SEQ ID NO: 25532 - DNA, 30 bp, Homo sapiens
  chr11:68176205-68176235
  hypo
gttcttttattttgcgtgtgctggttacag

SEQ ID NO: 25533 - DNA, 108 bp, Homo sapiens
  chr11:68177538-68177646
  hypo
agttccggcaagtcctcgtgtggagggacttggacaacccgaggtcgctggccctggatcccaccaaggggtaagtgtttgcctgtcccgtgcgtccttgtgttcacc

SEQ ID NO: 25534 - DNA, 58 bp, Homo sapiens
  chr11:68190546-68190604
  hypo
gtcttggatcccttctcgactgtcaatggggccttcatgggagcgccagtctagtgat

SEQ ID NO: 25535 - DNA, 31 bp, Homo sapiens
  chr11:68190882-68190913
  hypo
cagtgccaggggtctccgccagtgcccaggg

SEQ ID NO: 25536 - DNA, 31 bp, Homo sapiens
  chr11:68191211-68191242
  hypo
ccgccgtgtcttctgccgaatgccagcctct

SEQ ID NO: 25537 - DNA, 34 bp, Homo sapiens
  chr11:68191536-68191570
  hypo
tcctcccagaggcccccgacgctcccacctgttg

SEQ ID NO: 25538 - DNA, 224 bp, Homo sapiens
  chr11:68192526-68192750
  hypo
acgccatccccacacccgtccttcacccgccaccctcccgcaggtacctgtacttcaccaacatgcaggaccgggcagccaagatcgaacgcgcagccctggacggcaccgagcgcgaggtcctcttcaccaccggcctcatccgccctgtggccctggtggtggacaacacactgggcaagctgttctgggtggacgcggacctgaagcgcattgagagctgt

SEQ ID NO: 25539 - DNA, 31 bp, Homo sapiens
  chr11:68193463-68193494
  hypo
tggaggacgccaacatcgtgcagcctctggg

SEQ ID NO: 25540 - DNA, 31 bp, Homo sapiens
  chr11:68196104-68196135
  hypo
gcccacccaaatcatccgagatgacctcgtc

SEQ ID NO: 25541 - DNA, 54 bp, Homo sapiens
  chr11:68199373-68199427
  hypo
ccaggccccttcctcacggctcgagagacgtgtatttaccgcacaggtgcttgt

SEQ ID NO: 25542 - DNA, 30 bp, Homo sapiens
  chr11:68200720-68200750
  hypo
ctgaatttcccacccggagcatttctgctg

SEQ ID NO: 25543 - DNA, 48 bp, Homo sapiens
  chr11:68201229-68201277
  hypo
tcagtgtgtggacctgcgcctgcgctgcgacggcgaggcagactgtca

SEQ ID NO: 25544 - DNA, 123 bp, Homo sapiens
  chr11:68203448-68203571
  hypo
ctcccaaagtgccatgattacagatgtgagtcactgcgcccagtgagggtcacatttccgttgagatttggaggggcagacgttggagccatctgagccccctcgtcccgctctagcttctcc

SEQ ID NO: 25545 - DNA, 41 bp, Homo sapiens
  chr11:68204471-68204512
  hypo
gccagcttctggcacggggaaggggcgtccgggctgggttc

SEQ ID NO: 25546 - DNA, 56 bp, Homo sapiens
  chr11:68206032-68206088
  hypo
gtgtgccagcgctatgcgggggccaacgggcccttcccgcacgagtatgtcagcgg

SEQ ID NO: 25547 - DNA, 30 bp, Homo sapiens
  chr11:68207312-68207342
  hypo
tacgaccggaaccacgtcacaggggcctcg

SEQ ID NO: 25548 - DNA, 195 bp, Homo sapiens
  chr11:68207879-68208074
  hypo
gggctggctccagctgagccacgccttgagtgaaatgactgtgaggagaataaactgccgctgccctccaggatcactggggctggctggggagaacccccgtttctgggagcacagtcccaggatgccaaggcgagcttggtgccgagatgtgaactcctgagtgtaaacagcgggggctgacttgacatgctt

SEQ ID NO: 25549 - DNA, 112 bp, Homo sapiens
  chr11:68216739-68216851
  hypo
agaactgccattctttcgtgccctgtgtgcatttgagttgtgtgtccccgtggagggaatgccgacccccggaccaccatgagagtcctcctgcacccgggcgtccctctgt

SEQ ID NO: 25550 - DNA, 31 bp, Homo sapiens
  chr11:68223648-68223679
  hypo
ccagcccgtggatcagcgccagcctgggatg

SEQ ID NO: 25551 - DNA, 243 bp, Homo sapiens
  chr11:68226725-68226968
  hypo
tgaccgcgccgtgacctcctgtggattttcatgggactctgagaggcgcctcaaatccattttggaataaggcaggttattagcatggggtctaaccgtgggctgtctcggtgtcctgggctggctcttggggcgggggtcctgatgtccgggacctcggtcctacctgggaggcacagatatggcggggaacgggaagcccgggggagcatttagaagctcgtgtgcacagggaaaccctgt

SEQ ID NO: 25552 - DNA, 29 bp, Homo sapiens
  chr11:68328642-68328671
  hypo
ccacgcccggccacttataccttatacaa

SEQ ID NO: 25553 - DNA, 31 bp, Homo sapiens
  chr11:68356341-68356372
  hypo
taattctagctcttaacgttaaatagtatta

SEQ ID NO: 25554 - DNA, 144 bp, Homo sapiens
  chr11:68385589-68385733
  hypo
ccagcctggatttgcccgcccatggagaggacacgttccggatcgtcctcttccacacagtagactctgtcctgccgaagggagaagtctgcatccctgggttagacacgtctcatggagtcctctgcccgtgaccaggggggg

SEQ ID NO: 25555 - DNA, 30 bp, Homo sapiens
  chr11:68433120-68433150
  hypo
cctgccaaggccatcgtggatgacggtcgc

SEQ ID NO: 25556 - DNA, 37 bp, Homo sapiens
  chr11:68505094-68505131
  hypo
actcctgcaggcaggccgggcacgcctgtaatcccag

SEQ ID NO: 25557 - DNA, 31 bp, Homo sapiens
  chr11:68549944-68549975
  hypo
tattttgaggcagagtcggaacccaggccat

SEQ ID NO: 25558 - DNA, 30 bp, Homo sapiens
  chr11:68550519-68550549
  hypo
gatgcatctcctgccgccgctctttccagc

SEQ ID NO: 25559 - DNA, 30 bp, Homo sapiens
  chr11:68565729-68565759
  hypo
ccatgcaagggcctcgtgtgcggagagctg

SEQ ID NO: 25560 - DNA, 786 bp, Homo sapiens; identical to SEQ ID NO: 8232
  chr11:68606632-68607418
  hypo

SEQ ID NO: 25561 - DNA, 30 bp, Homo sapiens
  chr11:68682418-68682448
  hypo
ggatgcggttttagcgcggagcgacagtgc

SEQ ID NO: 25562 - DNA, 54 bp, Homo sapiens
  chr11:68727155-68727209
  hypo
ggcgagggtgacctgacggaccactgggtgtgcaagtgcgcggagagccgtcgg

SEQ ID NO: 25563 - DNA, 31 bp, Homo sapiens
  chr11:68728005-68728036
  hypo
tgctctcatccacctccgtgcctgacccaca

SEQ ID NO: 25564 - DNA, 31 bp, Homo sapiens
  chr11:68747918-68747949
  hypo
gtccaccctgaagcaccgatcttcattgaat

SEQ ID NO: 25565 - DNA, 177 bp, Homo sapiens
  chr11:68838711-68838888
  hypo
tccatttgataggggacgcccccggcgctgtgctatcctgtgccggccacccttgcgttggttttgctgctgtactggtggcgcccctgaccgtggctgtctcctcttgaaggaagcctgtttctgatgaacctgctgacagccatcatctacagtcagttccggggctacctgatg

SEQ ID NO: 25566 - DNA, 30 bp, Homo sapiens
  chr11:68853942-68853972
  hypo
cttgctttgctcatcgtggttcacagggtg

SEQ ID NO: 25567 - DNA, 176 bp, Homo sapiens
  chr11:69192608-69192784
  hypo
tagagacagttgggcgaaggagacacattgggatcagtctcccatggccttcaagtgtcagggcaggggctggggacctcccatataacgagcagcctcaggagactccaggcaggcaggagcgtcgggggctgcgactccagaatggccaaggcttctaccgtccagcccctttg

SEQ ID NO: 25568 - DNA, 224 bp, Homo sapiens
  chr11:69193142-69193366
  hypo
cgtgctggacacacacgaaggacatgagcagccacgggtccacgaaagagccatttctaccacaagccggactgggcttcgcggaggtgccccggggaaacccatggggaggcacagcctggactggacagggaggcagcccccattcatcagctccttccctggcacgcattagttggtacctactgagtgcagagccctgggccaggcggttctggaggctg

SEQ ID NO: 25569 - DNA, 437 bp, Homo sapiens
  chr11:69206297-69206734
  hypo
gggccctggggagatgcctggcgggcccgtctcctagcgactgacgtcccgccaccccacgggccccttgtgctgggcactgcccacccctgacactggctgcgagcacttttcactgctgttctgcatgaataagcgccaggcctcttgccaattgtccccctcttaaaaggcagccccggcgaaaggccttttcaagtgggatcgcacagtgccacccaggccgggcgggcattgttttggggagccagggtcctgcttggccgccggggtcggggggcccacaaagcatggtgatggcggctccacgcactcagcgcagcagccctgcttattaatctgcaaaactcacaccgatgcctttggaggggagattgagtgaaaacgatgtccttaggggagtggcctttgcaggcgcctcctgggttcctcactac

SEQ ID NO: 25570 - DNA, 30 bp, Homo sapiens
  chr11:69279629-69279659
  hypo
ggtgatgggtggggccggagcagcgccgta

SEQ ID NO: 25571 - DNA, 168 bp, Homo sapiens
  chr11:69357155-69357323
  hypo
ttggatgattcaatgactctccggactagaagccttttgattttgattaaccacgaaaaaaactccaccggcaacagtgagatcattgcgtgagtggggctgcttcgtattgtcatgagagttccatgaaggccccgagggcactccgaaatatcacagtggcttcca

SEQ ID NO: 25572 - DNA, 30 bp, Homo sapiens
  chr11:69367279-69367309
  hypo
taggatttggggcatcgtgggtttcaggcc

SEQ ID NO: 25573 - DNA, 30 bp, Homo sapiens
  chr11:69384772-69384802
  hypo
cctgcaaatctgcttcgcccacaccctcct

SEQ ID NO: 25574 - DNA, 30 bp, Homo sapiens
  chr11:69407848-69407878
  hypo
ggccacgtctgctccgagggcccacggggg

SEQ ID NO: 25575 - DNA, 71 bp, Homo sapiens
  chr11:69468322-69468393
  hypo
ggcagacacgcgggcgcgatcccacacaggctggcgggggccggccccgaggccgcgtgcgtgagaaccgc

SEQ ID NO: 25576 - DNA, 192 bp, Homo sapiens
  chr11:69468748-69468940
  hypo
agctcacagtgctgtgtgccccggtcacctagcaagctgccgaaccaaaagaatttgcaccccgctgcgggcccacgtggttggggccctgccctggcagggtcatcctgtgctcggaggccatctcgggcacaggcccaccccgccccacccctccagaacacggctcacgcttacctcaaccatcctggc

SEQ ID NO: 25577 - DNA, 32 bp, Homo sapiens; identical to SEQ ID NO: 8239
  chr11:69477504-69477536
  hypo

SEQ ID NO: 25578 - DNA, 309 bp, Homo sapiens
  chr11:69931074-69931383
  hypo
ggtcagcttgtggggactcagcgagatgacatacctgggccgagaaacagcgtcacccttagtcgcggctcctactaaggggggccgcaccttgggcgtgcagatgggacttgaggctgagctcagcctcccgcctgcgctgtaacccgggctctcctgccctgctgggcctcagtttcctccttggcgaattgagaagaatagctctttcgtgcttctcctgcagaaggaatgcaggccccccgtgctggctacagacttgcgatactggggtcttccgtgaaccccgtccttcatggggctgggcat

SEQ ID NO: 25579 - DNA, 35 bp, Homo sapiens
  chr11:69946371-69946406
  hypo
atgctcctggagcctgcgaacgtggccttgtttgg

SEQ ID NO: 25580 - DNA, 264 bp, Homo sapiens
  chr11:69946944-69947208
  hypo
tattactgtattattgcccttcgttcgttcattccataaatatgtgcaaagcggctgctctgagccttccgtgggcagcagggcagcacagaggaggcctgagcggtggtgctggggagaggatggcgtagggcaggcctcgtggacgcagccgggggcctcaccatcagcataagcgaccacggtgggcttcagaaggagcgatgagacaggattcaccccattgccatttgcttttctatcggatcaggaagaagcatggga

SEQ ID NO: 25581 - DNA, 313 bp, Homo sapiens
  chr11:69962487-69962800
  hypo
ttgaaacataatggatgtgagcgcctccaaagctccattggatgataagaacgtccctttcctctttttttaacagggagactacaacggtgaaaacgtcgagttcaacgacagaaaagtaagttgatggagcggagcaggaggtggctctgtcagagcctggaggcgttctggggcggggtgggcctgcagctggaccgaggacttaccggcctccagggcctccccagggcgctcgctgcagggggctgagaagcgggtgtcccctctcaccttttcaggagaaaagtccgtgagctttgtgtggctggtt

SEQ ID NO: 25582 - DNA, 203 bp, Homo sapiens
  chr11:69970442-69970645
  hypo
tcctccccctcagctcctgtacgaagagtgggcacgctatggagttttctataagtaccagcccatcgacctggtcaggtaagaacgcgccacagcctgcgggaatcaagtccctactccgatggcagtcggataacatccctgtgggtttcaaccgctctgaatgttcagtacccgggaacgtgtttgaactcaaagagctt

SEQ ID NO: 25583 - DNA, 31 bp, Homo sapiens
  chr11:69995207-69995238
  hypo
tccgaaccggggcccccgagagcaatggggg

SEQ ID NO: 25584 - DNA, 31 bp, Homo sapiens; identical to SEQ ID NO: 8244
  chr11:70016124-70016155
  hypo

SEQ ID NO: 25585 - DNA, 219 bp, Homo sapiens
  chr11:70016987-70017206
  hypo
tgcagtcatccagtttggcttcgtcaccctgtttgtcgcctccttccccctggccccactgtttgcgctgctgaacaacatcatcgagatccgcctggacgccaaaaagtttgtcactgagctccgaaggccggtagctgtcagagccaaagacatcggtgagtgaccccacgggccggcagaaccggttccgagtgcgtgctgggtttggggaggggg

SEQ ID NO: 25586 - DNA, 31 bp, Homo sapiens
  chr11:70020594-70020625
  hypo
gctctcaagagcaaggcgagattgcacccca

SEQ ID NO: 25587 - DNA, 488 bp, Homo sapiens
  chr11:70022940-70023428
  hypo
tgagtgtcaccctggaatgtgcgtcagaataactcggggctcccagccccaccccaggagaggcggatcccgtgggctggggctggggtgccggttcagcatttctctaacacaccccgcggatgtgcagggccacacggagagccatccgcctggacgtagatatcctgcagacctgtcaggacaggctccatcggggcccggaagcgaggaagaccccgctcccggctccatctcatccccgcctcatccctcccatttcctgttgtctctctgggccggttgggcgatcacctgggcggacccccttgcctgcctgagtcctgcacttcgacggccctgaactcaggagccacgtccctcgggagccccaaagacttcaacctccaccccaggcccaccgcacctcagcaccccacttcggaggtctcaaactcagcgccccaagggccaggtgggccacacgcgcaagtgagactaagtcctgg

SEQ ID NO: 25588 - DNA, 31 bp, Homo sapiens
  chr11:70269021-70269052
  hypo
gtgttgtgttttgccacgtttcagactactc

SEQ ID NO: 25589 - DNA, 8 bp, Homo sapiens
  chr11:70270219-70270227
  hypo
ggccgggt

SEQ ID NO: 25590 - DNA, 30 bp, Homo sapiens
  chr11:70281214-70281244
  hypo
tgcaagggccggtacgggctcttcccagcc

SEQ ID NO: 25591 - DNA, 59 bp, Homo sapiens
  chr11:70282730-70282789
  hypo
tgcgtcgacactctcggtgtcctgcgccccggacctgggctggcggaggctctcctgcc

SEQ ID NO: 25592 - DNA, 34 bp, Homo sapiens
  chr11:71184881-71184915
  hypo
ctgccctccagggcttcgccggcacagcccatct

SEQ ID NO: 25593 - DNA, 75 bp, Homo sapiens
  chr11:71185776-71185851
  hypo
gctctcccctgtaagccgggtgcttagtgagggcccctgtggagaagcccccaggggtcccgcctgctctgatgg

SEQ ID NO: 25594 - DNA, 141 bp, Homo sapiens
  chr11:71192241-71192382
  hypo
atgtgtcccttctcacgaggtgcctaaagcagagacgggcgtcctgagagcccagcgttgactctggcactgcagcctcctggggcctgcttgggtgggttgttgggtgctgtgggcaggggccaccgcctccgggctcca

SEQ ID NO: 25595 - DNA, 382 bp, Homo sapiens
  chr11:71192648-71193030
  hypo
cctttggaggctcagcggaacccagcccatcagcattcagggtcacgctcaccatcttgccagcattgtaatcatgcgtatctgcagttcgtcggtggagtcagcctctgacacgccccgcagtgaagtgtcttttttccctctgaaaaatccattcatcctgccacgtgcgggtatttgtcctgaccccatggaaagtgctaacacccacgtgcatttctgtggacgcctccttgaggtctatgggtggagcttggctgatccatgggcatgctgcttctccgaggctctgctcacgctgtctgattggtccattccaggcagggtttttgctgcccttgagtggcggggtggacagcgcagccaccgcctgcctcatcta

SEQ ID NO: 25596 - DNA, 53 bp, Homo sapiens
  chr11:71229627-71229680
  hypo
ctttacctgcttggcggcgcctcctgcggccagttcctcggagcatccacctg

SEQ ID NO: 25597 - DNA, 392 bp, Homo sapiens
  chr11:71229890-71230282
  hypo
ggtccggcttgtcagcgccactcctgggggcttcccgtgggggtggcacagggcagggcccccccatctcagggctgcttcctgtggggagggtccccgagaagcggagcgtgggctggtttttagggggtaacccacgaaggttccgccagcccccggtcggttctgggaacccccgggcttgaggaacctgcccggcaccgccctggaacccgggcctgcagcctcctcggggcctcgtctccttcctcccagggaagctgtggggcagggacctggtggacggcgggtgggacccgactccctcccatcccctcacggtggggtcgcggctctgggggctcctggggccgctgccggaccctcagctctgtcgccggggggccgcagtc

SEQ ID NO: 25598 - DNA, 31 bp, Homo sapiens
  chr11:71282210-71282241
  hypo
ggtcctccatgaagagcggcagcctgaagcc

SEQ ID NO: 25599 - DNA, 30 bp, Homo sapiens
  chr11:71288499-71288529
  hypo
ggggttccagctaccggggctggtgatggg

SEQ ID NO: 25600 - DNA, 83 bp, Homo sapiens
  chr11:71321042-71321125
  hypo
caggtgaggcccccgcgatgcgggcagtcatatcacccccctctggatatgatgattcacgtcgcaggggggcgggcgcccct

SEQ ID NO: 25601 - DNA, 29 bp, Homo sapiens
  chr11:71647183-71647212
  hypo
ggcgtaaactgctgcgcctggcctataat

SEQ ID NO: 25602 - DNA, 31 bp, Homo sapiens
  chr11:71647449-71647480
  hypo
tttttagacagagtctcgctctgtcacccag

SEQ ID NO: 25603 - DNA, 32 bp, Homo sapiens
  chr11:71673294-71673326
  hypo
ccaccgcgcccggcagatttttacaacctatt

SEQ ID NO: 25604 - DNA, 30 bp, Homo sapiens
  chr11:71708567-71708597
  hypo
aagggcagcaagaacgaagcaggatgttgt

SEQ ID NO: 25605 - DNA, 762 bp, Homo sapiens
  chr11:71724331-71725093
  hypo
agctcccgctgggcccgcagcagctctgcccgcagtcccccagcggcctgcttgctctgctccagctcctcacggtggcgtttctcggcagcggcctgctcggcctgcagctgctggcagaggtgcttagctggcagcagctcactcaccagggcctgtgtgctggtgtgctcgagctgcagggtggagagggcctgctctttctggaagaacttctcctgccacgccttcaattcttggcccagctcctccgcacgctcagcctgtgaggtcagctcctgccgcaggttctctgaagccacccgctgtttctcagcctcctcccggaggctctgcacctcctcccgcagagcagagctgcgttctgcagctctggcactgttgctggctgtctctgcctgcagcaggcgcagcctctcctccagcttctggctcttctctgactcggccatcaccagccgcttcaactccttgctctccccctccttctccaggacctggcgattcaggatggacacctcctcctccaagctgctgatgaggctatttttcctctcagcctcttgccggccccgggccacctgggccttccactcatcttcagccttgctgtggtcttgtaccttggtgcggaaggcagccaactcccgttgggccgaggctaaggcactctgactgtgccctagctcctgggccttctcctctaactggccctgcagagtctccagagcactgtcccgctcagcccgggaggcccgctca

SEQ ID NO: 25606 - DNA, 30 bp, Homo sapiens
  chr11:71725579-71725609
  hypo
tccatcagcgcggcccgcagccgttccagc

SEQ ID NO: 25607 - DNA, 31 bp, Homo sapiens
  chr11:71888415-71888446
  hypo
gtctgagggtggtggacgccctgccccctcc

SEQ ID NO: 25608 - DNA, 55 bp, Homo sapiens
  chr11:71948503-71948558
  hypo
accagggccagtggtccggggccgtggtggggctgaggcccgtggcccaccacct

SEQ ID NO: 25609 - DNA, 147 bp, Homo sapiens; identical to SEQ ID NO: 8251
  chr11:71955307-71955454
  hypo

SEQ ID NO: 25610 - DNA, 50 bp, Homo sapiens
  chr11:72006578-72006628
  hypo
ctgcctcagctgcagcgcgtgctgtgcgatctcgtcgctggccacattgg

SEQ ID NO: 25611 - DNA, 30 bp, Homo sapiens
  chr11:72084018-72084048
  hypo
tggtttgtgatgtgccggcttgcaccgtcc

SEQ ID NO: 25612 - DNA, 180 bp, Homo sapiens
  chr11:72109412-72109592
  hypo
gggttcgaatcaagtcgcccgagagcggatactcagccattgtgtccagttttaatcctgtgttttcccaagtaattaagccttcttgcttatgaacttgtgactaagtaaagcatcaccgagaggttgtaacatcaaagtgccttccaccgtctgtccgtgtttggtaaaattggattt

SEQ ID NO: 25613 - DNA, 30 bp, Homo sapiens
  chr11:72396361-72396391
  hypo
gccccagggcctcacgcctctgaaagggtg

SEQ ID NO: 25614 - DNA, 238 bp, Homo sapiens
  chr11:72408171-72408409
  hypo
ggctctccagcagccgctgtgtcttcgatgtctgcccacacttgcggtagatgccctcggaggtcaggcctagggaggggcggggccaagcgttcggggcctgaggcatagagtcatggggcggggccgcgcagctctggggcgggaggcggctctccgggaggggcggggctggcaccctaggggcagggctcaccgcactgcgtgatgtagtccacacagcggtacacgatcaccg

SEQ ID NO: 25615 - DNA, 108 bp, Homo sapiens
  chr11:72437782-72437890
  hypo
tggtgaagcaggtgggcggaaggcagctcctccggggcgggatgggtggggcagcggggagcccctcatcctctgtagtggtgggcagcggctcgggtggagtggcag

SEQ ID NO: 25616 - DNA, 30 bp, Homo sapiens
  chr11:72466098-72466128
  hypo
tccgggtgcagccacggcttgaagtgaggc

SEQ ID NO: 25617 - DNA, 221 bp, Homo sapiens
  chr11:72475596-72475817
  hypo
cctccctagcctggcctggctcgtgccctttccatagcccccagcaggcagcactgctgcgctaagcagaagaaattacacccatctttgttcctgcgggcggcggtggccacgccccaaaggtgtaattctaagaggcttggggagggacaggtggcggggtagggctgagtctctggagagcaccaggtgggcgggccggtaccaggaacccccagcta

SEQ ID NO: 25618 - DNA, 20 bp, Homo sapiens
  chr11:72844826-72844846
  hypo
aactccgtctcaaaaaaaaa

SEQ ID NO: 25619 - DNA, 175 bp, Homo sapiens
  chr11:73072993-73073168
  hypo
tccctccattctgccggggtttcccaggagtggggaatgctggcagcagttcctccattcaccttctcctgtccattggcgcctcctgcagttctcctgtgcggctcccaccctgaacagctgcccggagccctcgcctgaggtatgggtctgcaacagcgacggctacgtgggc

SEQ ID NO: 25620 - DNA, 30 bp, Homo sapiens
  chr11:73075680-73075710
  hypo
ggatgagctaggtccgtgtgacagggagat

SEQ ID NO: 25621 - DNA, 218 bp, Homo sapiens; identical to SEQ ID NO: 8257
  chr11:73087924-73088142
  hypo

SEQ ID NO: 25622 - DNA, 93 bp, Homo sapiens
  chr11:73093211-73093304
  hypo
tgaccccagtcctcagcgtagctccactgggtaggacctgacctgggatggccctgggggcgcctctttccccagcaccgcaagtctggggag

SEQ ID NO: 25623 - DNA, 43 bp, Homo sapiens
  chr11:73464044-73464087
  hypo
tccagagtcaggagcttgaggcgggaatcacttgaggccagga

SEQ ID NO: 25624 - DNA, 39 bp, Homo sapiens
  chr11:73643143-73643182
  hypo
gctgggatgacaggcgtgagccaccgtgcccagcccagt

SEQ ID NO: 25625 - DNA, 349 bp, Homo sapiens
  chr11:73685760-73686109
  hypo
ctgtcgggggcaggacgaagattctggctgaactttccaagggacgggacgcttgggatcctggctggtacgaggcctcccacactgtcaaatgtcaactccaccagcactgagacaatgagtagatgagaatgtagaaagagggaaggtggtaggtaaaggagcggaaggaagaggtggggaaagagggaaggagagaagggaaggagggaagagaaagaaggaagaaaaggaaagcatggcccggctagagacaaagccagaggtgatcaggtcagcagcaggagaggctcagaagggagcctctcgggaagtgcaggcagccatgagggctcgtttcagctgctca

SEQ ID NO: 25626 - DNA, 21 bp, Homo sapiens
  chr11:73779853-73779874
  hypo
atttattttttgagacggagt

SEQ ID NO: 25627 - DNA, 30 bp, Homo sapiens; identical to SEQ ID NO: 8260
  chr11:74022627-74022657
  hypo

SEQ ID NO: 25628 - DNA, 45 bp, Homo sapiens
  chr11:74168143-74168188
  hypo
tctcccaccccagtgacgacctcccttaaccgtgtttcttgttga

SEQ ID NO: 25629 - DNA, 94 bp, Homo sapiens
  chr11:74168434-74168528
  hypo
gtaggagttgtcatcacggccaggtaggctggcccgcctctcttcagtctggttgtctggccccagccctggccctggccggcagagcaaattg

SEQ ID NO: 25630 - DNA, 19 bp, Homo sapiens
  chr11:74246624-74246643
  hypo
attacgggtatgagccacg

SEQ ID NO: 25631 - DNA, 30 bp, Homo sapiens
  chr11:74560679-74560709
  hypo
tttctctatcccaccgctactttccccgcc

SEQ ID NO: 25632 - DNA, 13 bp, Homo sapiens
  chr11:74664273-74664286
  hypo
ttttgagacagag

SEQ ID NO: 25633 - DNA, 193 bp, Homo sapiens; identical to SEQ ID NO: 8265
  chr11:74952948-74953141
  hypo

SEQ ID NO: 25634 - DNA, 31 bp, Homo sapiens
  chr11:74988583-74988614
  hypo
ggttccccagaccttgcgcagaccttcagaa

SEQ ID NO: 25635 - DNA, 248 bp, Homo sapiens
  chr11:74994375-74994623
  hypo
gcgttcctgcagccgcgtcaggggcttcttgtcctcgggggccggtgggaacgactgtacgttggccacaaacaggtccttgcgaaaggtcaggcccaggacatccaggtcctcccggccatagcggaaggcgcaggtcagcgtcacatagactgtggggagcgaggagcactgaggaggggcctgggagagcagcaagcgagccccccagagtgccggcagcagccctgggacgggccccactggag

SEQ ID NO: 25636 - DNA, 31 bp, Homo sapiens
  chr11:75026126-75026157
  hypo
gatgggggagatcacccgctgtagtgaattt

SEQ ID NO: 25637 - DNA, 580 bp, Homo sapiens; identical to SEQ ID NO: 8266
  chr11:75062338-75062918
  hypo

SEQ ID NO: 25638 - DNA, 15 bp, Homo sapiens
  chr11:75095705-75095720
  hypo
cgccccctagcggcg

SEQ ID NO: 25639 - DNA, 30 bp, Homo sapiens
  chr11:75115361-75115391
  hypo
attccttggtgtatcgattgccacgttgat

SEQ ID NO: 25640 - DNA, 199 bp, Homo sapiens; identical to SEQ ID NO: 8268
  chr11:75140939-75141138
  hypo

SEQ ID NO: 25641 - DNA, 43 bp, Homo sapiens; identical to SEQ ID NO: 8269
  chr11:75141707-75141750
  hypo

SEQ ID NO: 25642 - DNA, 30 bp, Homo sapiens
  chr11:75162090-75162120
  hypo
cccagaggcagcagcggccagggccctctg

SEQ ID NO: 25643 - DNA, 30 bp, Homo sapiens
  chr11:75167012-75167042
  hypo
gtcagggagccagacgaatactgaaaacac

SEQ ID NO: 25644 - DNA, 31 bp, Homo sapiens; identical to SEQ ID NO: 8270
  chr11:75237128-75237159
  hypo

SEQ ID NO: 25645 - DNA, 128 bp, Homo sapiens
  chr11:75242018-75242146
  hypo
ggtgacaaggagaggcgcgggtctgagcctgggccccggctgtggcccaagtgggtgggaggcatcccagaacatctacagggaaagaggctcgagctactgatttgtgtccacgtagggcaagagtg

SEQ ID NO: 25646 - DNA, 194 bp, Homo sapiens
  chr11:75303122-75303316
  hypo
ttgcacactgccagcccgggctgtctgtttctgcttcacccacttttctttgtcaaggccctgcctgtccttgaaggctccgctcagctcccacctcctccctggtcttcctgcctgtgtctctccagattagtttcgtttgcatccctgctgcagcaccgtctcacagtctctctctccgctttctcacatat

SEQ ID NO: 25647 - DNA, 31 bp, Homo sapiens
  chr11:75338638-75338669
  hypo
tggtaatggtgatgatcgtgaaggtagatga

SEQ ID NO: 25648 - DNA, 835 bp, Homo sapiens; identical to SEQ ID NO: 8272
  chr11:75379282-75380117
  hypo

SEQ ID NO: 25649 - DNA, 30 bp, Homo sapiens
  chr11:75529839-75529869
  hypo
caaataaacaagcccggttggtttaggatt

SEQ ID NO: 25650 - DNA, 59 bp, Homo sapiens
  chr11:75536156-75536215
  hypo
ttttttttttttttgagacagcgttaccctgttgtcgcccagaatggagtgcaatggca

SEQ ID NO: 25651 - DNA, 31 bp, Homo sapiens
  chr11:75681481-75681512
  hypo
attaggcagaaagggccgggcatgatggctc

SEQ ID NO: 25652 - DNA, 50 bp, Homo sapiens
  chr11:75852054-75852104
  hypo
ggatctagttggcagcttaaacggaggccacgcgaatgtgcaccctagcc

SEQ ID NO: 25653 - DNA, 169 bp, Homo sapiens
  chr11:75858210-75858379
  hypo
gcaggactaatggaccgcctgaagctaaggagaggacaggagcacttgggaaggaagcggtctggggggcctaactgagcagcaccctgcctcacaggagagcaagtcacagacgtttcagccccaacgctgccgctcactggctatgtgaccccggcgaggcgcttga

SEQ ID NO: 25654 - DNA, 18 bp, Homo sapiens
  chr11:75859222-75859240
  hypo
aaaaaaaaaaaatttttt

SEQ ID NO: 25655 - DNA, 30 bp, Homo sapiens
  chr11:75878112-75878142
  hypo
catacacagagtcacgggcaacccatggaa

SEQ ID NO: 25656 - DNA, 168 bp, Homo sapiens
  chr11:75882507-75882675
  hypo
ggtgtgtgggctaccccgactcctcccagtgcccagggagggcccctcctcaggcgtcccaccctggcagtggggatggcaggcgggaggttctgcagggggtggttgtcagggcctgcacacttgggctggacccactgacactgcgctgaccgccagtggtgccag

SEQ ID NO: 25657 - DNA, 30 bp, Homo sapiens
  chr11:75904169-75904199
  hypo
cactggtgagccatcgagggcaggtgaact

SEQ ID NO: 25658 - DNA, 30 bp, Homo sapiens
  chr11:75907190-75907220
  hypo
gacatgtggcctcacgtacagcaggccaca

SEQ ID NO: 25659 - DNA, 31 bp, Homo sapiens
  chr11:76010247-76010278
  hypo
catacccggaagcccccgagttttgatctgg

SEQ ID NO: 25660 - DNA, 36 bp, Homo sapiens
  chr11:76077427-76077463
  hypo
gtagaaaatcagcaattaggccgggcgtgttgtcac

SEQ ID NO: 25661 - DNA, 31 bp, Homo sapiens
  chr11:76101585-76101616
  hypo
gataaattagtaggctgggcacggtggctca

SEQ ID NO: 25662 - DNA, 56 bp, Homo sapiens
  chr11:76164361-76164417
  hypo
tcaacagaacgccaccgtgctgaagttcggagagcagtaaacgatgaacggttaac

SEQ ID NO: 25663 - DNA, 184 bp, Homo sapiens
  chr11:76339358-76339542
  hypo
cacatgtatatatcaccaccacgcatcatagccatctgcatcagcacatgcaaactcgtgtgcacacacctgcatgcacacactcttacctgcatgcctgcagctcgcccatgctgcacacggtgtgtacaccttgccttttctggctcctttgttgctgagcgatcctgcaaaggtgcagaaa

SEQ ID NO: 25664 - DNA, 399 bp, Homo sapiens
  chr11:76371910-76372309
  hypo
ctcagcctggggctgggaggccgtctgaaaggcctcgatgctgttgcagctcaggtctagcacccgcagctgctggaggctgaagtcggagatgcaggtgagggaattcctggagaggttgagatgggtcaggcggggcagaccctcgaaggcgccatcctcgatgtccatcagcacgttgctatgcaggtcaagctgctccagcgcaggcatgtcccggaaggtgtggcgggtgaggcgagtcagactgttctccgccagtgagagggtatgcaggctgggtgcctcccccagcagccgctccagcaggccgctgtacaggctgttcccagacaggtccagggaggtcacgcgtggcagggggcccaggccaccagcactcagcgcagtggccatcgc

SEQ ID NO: 25665 - DNA, 30 bp, Homo sapiens; identical to SEQ ID NO: 8275
  chr11:76381597-76381627
  hypo

SEQ ID NO: 25666 - DNA, 463 bp, Homo sapiens; identical to SEQ ID NO: 8276
  chr11:76381852-76382315
  hypo

SEQ ID NO: 25667 - DNA, 48 bp, Homo sapiens
  chr11:76408272-76408320
  hypo
ttaatttggagaggaccgtatatatttagaggacgcctccaattttcc

SEQ ID NO: 25668 - DNA, 31 bp, Homo sapiens
  chr11:76450420-76450451
  hypo
tgcttaagcagccggacgcggtggtgcacgc

SEQ ID NO: 25669 - DNA, 31 bp, Homo sapiens
  chr11:76463184-76463215
  hypo
ctctgccttgccctctcgtgcctgggttctc

SEQ ID NO: 25670 - DNA, 37 bp, Homo sapiens
  chr11:76674901-76674938
  hypo
acagctccagtctacaactctcggcgttagcgacaca

SEQ ID NO: 25671 - DNA, 30 bp, Homo sapiens
  chr11:76901147-76901177
  hypo
gacacggacacagccgcccagctggctgga

SEQ ID NO: 25672 - DNA, 136 bp, Homo sapiens; identical to SEQ ID NO: 8279
  chr11:77184521-77184657
  hypo

SEQ ID NO: 25673 - DNA, 31 bp, Homo sapiens; identical to SEQ ID NO: 8280
  chr11:77185064-77185095
  hypo

SEQ ID NO: 25674 - DNA, 30 bp, Homo sapiens
  chr11:77589957-77589987
  hypo
ggccctctaggccacggttgggaagactgt

SEQ ID NO: 25675 - DNA, 30 bp, Homo sapiens
  chr11:77595018-77595048
  hypo
gaaaaaggcagaagcgagaggagcatttaa

SEQ ID NO: 25676 - DNA, 30 bp, Homo sapiens
  chr11:77920641-77920671
  hypo
ctctgctgcctcaacgtctcctcccgggag

SEQ ID NO: 25677 - DNA, 20 bp, Homo sapiens
  chr11:78255540-78255560
  hypo
atcaagaatgagttaccggc

SEQ ID NO: 25678 - DNA, 162 bp, Homo sapiens
  chr11:78380770-78380932
  hypo
tggagactgtctgcagctggccgtcagcatcatactcataggagtagcgagtggtattggcgtagggtcctaccttcagctccttcttcactactcgccccatgttatcatactggacggtcatccagtacatgagcgagcggaagatctcatactgcactt

SEQ ID NO: 25679 - DNA, 408 bp, Homo sapiens
  chr11:78534088-78534496
  hypo
ctctgggctcttgttctgctgcgtctcccagcggtgccccgtgagcacgtgccagagagatcactgagacacacaccaagtactggggagacagccaagtgccgcgctcttcaagagcactaggcccttctgaggagaggcgagcgctcccgggaaatgcctcgtcttccctccacccttaacccacagcagctccagtgcaatgccccggcctcagcgcctgcccagcggtggcccaggtgcaagagacaacacctcgccccgttcccactgcccacagctgattggacccggctgagcacctgacccaagccaagctcaggcacaggctgaacggtgctctgtgacacagcccactgggcagaggttccgggccaataagagcccgttctctagtatttgaactaa

SEQ ID NO: 25680 - DNA, 31 bp, Homo sapiens
  chr11:78984744-78984775
  hypo
taaaggcctgagatctcgaggttggctggct

SEQ ID NO: 25681 - DNA, 30 bp, Homo sapiens; identical to SEQ ID NO: 8284
  chr11:79150891-79150921
  hypo

SEQ ID NO: 25682 - DNA, 195 bp, Homo sapiens; identical to SEQ ID NO: 8285
  chr11:82443373-82443568
  hypo

SEQ ID NO: 25683 - DNA, 285 bp, Homo sapiens; identical to SEQ ID NO: 8286
  chr11:82443651-82443936
  hypo

SEQ ID NO: 25684 - DNA, 182 bp, Homo sapiens; identical to SEQ ID NO: 8287
  chr11:82443948-82444130
  hypo

SEQ ID NO: 25685 - DNA, 604 bp, Homo sapiens; identical to SEQ ID NO: 8288
  chr11:82444392-82444996
  hypo

SEQ ID NO: 25686 - DNA, 20 bp, Homo sapiens
  chr11:85359988-85360008
  hypo
tttttttttgtagaccgagt

SEQ ID NO: 25687 - DNA, 31 bp, Homo sapiens
  chr11:85379742-85379773
  hypo
tttattagattaagaaacatgcggccgggcg

SEQ ID NO: 25688 - DNA, 170 bp, Homo sapiens
  chr11:85692739-85692909
  hypo
aacactaaataacacacggagaaaacaatgtgtatattaaacactcacttcttagtggttccatttccgatgccaagatctaggaaaggagaaaaacaaaaaagcattttataacacgagacgcagtttaataaaacaacataaaagaagattaacgtatccaaagacta

SEQ ID NO: 25689 - DNA, 30 bp, Homo sapiens
  chr11:85719839-85719869
  hypo
gtaagggactctggccgggcgcggtggctc

SEQ ID NO: 25690 - DNA, 232 bp, Homo sapiens
  chr11:85906158-85906390
  hypo
ataaggaccatcttgagatggcggccaccgagggggtcggggaggctgcgcaaggcggtgagccccggcagctggagcagcccccgccccagccgcacccaccgctgccccaggagcagcacgaggaagagatggcagcagaggctggggaagccgtggcgtcccccatggacgacgggtttctgagcctggattcgccctcctatgtcccgtacagggacagaacagaatg

SEQ ID NO: 25691 - DNA, 30 bp, Homo sapiens
  chr11:86208307-86208337
  hypo
tgagtgactgtgcccggcctcaataatatg

SEQ ID NO: 25692 - DNA, 31 bp, Homo sapiens
  chr11:86218735-86218766
  hypo
ttaacatcactaggcacggtggctcacgcct

SEQ ID NO: 25693 - DNA, 659 bp, Homo sapiens; identical to SEQ ID NO: 8296
  chr11:86511288-86511947
  hypo

SEQ ID NO: 25694 - DNA, 30 bp, Homo sapiens; identical to SEQ ID NO: 8297
  chr11:86512316-86512346
  hypo

SEQ ID NO: 25695 - DNA, 95 bp, Homo sapiens; identical to SEQ ID NO: 8298
  chr11:86513413-86513508
  hypo

SEQ ID NO: 25696 - DNA, 30 bp, Homo sapiens; identical to SEQ ID NO: 8299
  chr11:86514121-86514151
  hypo

SEQ ID NO: 25697 - DNA, 282 bp, Homo sapiens; identical to SEQ ID NO: 8300
  chr11:86666231-86666513
  hypo

SEQ ID NO: 25698 - DNA, 186 bp, Homo sapiens
  chr11:91435728-91435914
  hypo
tgtagcactaaatagacggtaaaaaggacactcatgtataatacgagagctgaaatagacagagctctgctgtgttccatttcagctggaaatatgcactccagaaactcaaattttttgccagtctgtgcgtgtctgtgaatgactcgtaagtgccattagtattgattacggtattacaataaa

SEQ ID NO: 25699 - DNA, 30 bp, Homo sapiens; identical to SEQ ID NO: 8314
  chr11:93063919-93063949
  hypo

SEQ ID NO: 25700 - DNA, 77 bp, Homo sapiens
  chr11:93425625-93425702
  hypo
ggaaaaacttttaatatacagcgccctttttttgctccgtcgcccaggctggagtacagtgacacgatcatcgctca

SEQ ID NO: 25701 - DNA, 300 bp, Homo sapiens
  chr11:93476541-93476841
  hypo
aggatattcctctgaccccttcgtgggtcttgcggctgcggtgcctcacttacttagcccacggctctcaactcctcgcgggagggggggcgcgagtgaatgaggcgggaactggagtgctggaagccacgaactccagtcacccaggcctgctgcgctccaccctttatgggagggtgcgtgggggtgagcagatgctggagccggagcgagcgcttttggtcgccggtaggagcgaactccatgcaggccctgcggctgtgtctaggggatgcccgcgacccctgaagacccacagcc

SEQ ID NO: 25702 - DNA, 30 bp, Homo sapiens
  chr11:93822725-93822755
  hypo
agcagctctcaggccgccagcagccttgta

SEQ ID NO: 25703 - DNA, 21 bp, Homo sapiens
  chr11:94165674-94165695
  hypo
tttcaaaccccttatctggga

SEQ ID NO: 25704 - DNA, 20 bp, Homo sapiens
  chr11:94165994-94166014
  hypo
aaacaaaacaaaacaaaaac

SEQ ID NO: 25705 - DNA, 17 bp, Homo sapiens
  chr11:94272584-94272601
  hypo
cagcagttttatttttc

SEQ ID NO: 25706 - DNA, 35 bp, Homo sapiens
  chr11:94952097-94952132
  hypo
gagccgccgcacccggccatatttacccttatttt

SEQ ID NO: 25707 - DNA, 34 bp, Homo sapiens; identical to SEQ ID NO: 8325
  chr11:95523018-95523052
  hypo

SEQ ID NO: 25708 - DNA, 65 bp, Homo sapiens
  chr11:95631069-95631134
  hypo
cttactctaactttgtgacctcggcacactagagctggttattcgcttcagtggcctgcctgact

SEQ ID NO: 25709 - DNA, 30 bp, Homo sapiens; identical to SEQ ID NO: 8326
  chr11:95831955-95831985
  hypo

SEQ ID NO: 25710 - DNA, 31 bp, Homo sapiens
  chr11:95999750-95999781
  hypo
aaacaacatattggtgcgattctgagcttca

SEQ ID NO: 25711 - DNA, 31 bp, Homo sapiens
  chr11:96109568-96109599
  hypo
ttttaacctatcaagccgtgcttttcttttt

SEQ ID NO: 25712 - DNA, 1331 bp, Homo sapiens; identical to SEQ ID NO: 8327
  chr11:96122354-96123685
  hypo

SEQ ID NO: 25713 - DNA, 181 bp, Homo sapiens
  chr11:97588955-97589136
  hypo
gccaacgaccccatgaagagggaacggtggtccatgcgcgggacccagcctgtaatcaagcccagcaggctccggcctgccgcaccaaggagcccgcccccaccggaacccgcgccggcccaccatcgcggcactcagcctgggctcccgcccacacctctccctccacacctccctgcga

SEQ ID NO: 25714 - DNA, 31 bp, Homo sapiens
  chr11:98233109-98233140
  hypo
gagccactgcgcctagcccctttttttttct

SEQ ID NO: 25715 - DNA, 506 bp, Homo sapiens; identical to SEQ ID NO: 8329
  chr11:100997784-100998290
  hypo

SEQ ID NO: 25716 - DNA, 389 bp, Homo sapiens; identical to SEQ ID NO: 8330
  chr11:100998355-100998744
  hypo

SEQ ID NO: 25717 - DNA, 31 bp, Homo sapiens
  chr11:101977377-101977408
  hypo
aacagtataacagattcggttcattaaaatc

SEQ ID NO: 25718 - DNA, 44 bp, Homo sapiens
  chr11:102245880-102245924
  hypo
gtacaccggagctgttcctattcggccatcttggctcctcccct

SEQ ID NO: 25719 - DNA, 22 bp, Homo sapiens
  chr11:102367138-102367160
  hypo
atcccacgccgggcgcggtggc

SEQ ID NO: 25720 - DNA, 706 bp, Homo sapiens
  chr11:103907384-103908090
  hypo
gcccccagacagatgagtgtccgcgcctctctgagaggtgaatgagcccggacggtccctacctaccaagtcctgaggagcagcggcaccaacgacgcaggcccgccccagcccgccagtgagccgcccatgccctctgctagcccggcccgcccgggcccccgccatgctgatcaccgtgtactgcgtgcggagggacctctccgaggtcaccttctctctccaggtcagccccgactttgagctccgaaacttcaaggtcctctgcgaagcggagtccagagtccccgtcgaagagatccagatcatccacatggagcgactcctcatcgaggaccactgttccctgggctcctacggcctcaaagatggcgatatcgtggttttactgcagaaggacaatgtgggacctcgggctccagggcgtgccccgaaccagcctcgtgtagacttcagtggcattgcggtgcctgggacgtccagctcccgtccacagcaccctggacagcagcagcagcgcacacccgctgcccagcggtcacagggcttggcgtcaggagagaaggtggccggcctgcaaggtctgggcagccccgccctgatccgcagcatgctgctctccaacccccacgatctgtccctgctcaaggaacgcaaccctcccttggcggaagccctgctcagcggaagccttgagaccttttct

SEQ ID NO: 25721 - DNA, 850 bp, Homo sapiens; identical to SEQ ID NO: 8342
  chr11:104034316-104035166
  hypo

SEQ ID NO: 25722 - DNA, 202 bp, Homo sapiens
  chr11:105850437-105850639
  hypo
tggctgtcattgcatcggacctaccataaaaaccaaaaaaataattgagtgccttaattaaactgttggtgactggtggaaacgcagccctgagggacacgccacgcgcgggtctttgctaaaccaatcctttggctgagagcgggaagtccgtcctaacgcgctggccggacatcagcagcagcaacgtgtgcatgagctc

SEQ ID NO: 25723 - DNA, 159 bp, Homo sapiens; identical to SEQ ID NO: 8347
  chr11:106888277-106888436
  hypo

SEQ ID NO: 25724 - DNA, 170 bp, Homo sapiens; identical to SEQ ID NO: 8348
  chr11:106888641-106888811
  hypo

SEQ ID NO: 25725 - DNA, 778 bp, Homo sapiens; identical to SEQ ID NO: 8351
  chr11:107799215-107799993
  hypo

SEQ ID NO: 25726 - DNA, 88 bp, Homo sapiens
  chr11:107931200-107931288
  hypo
agaaatgcttttttttttaaacgaaatttgagcgaggtagaaataattatgcaaattgaataccactaaaagaagaatctggctggat

SEQ ID NO: 25727 - DNA, 28 bp, Homo sapiens
  chr11:108031056-108031084
  hypo
atggaaaaacatacgtaaatttgatttt

SEQ ID NO: 25728 - DNA, 26 bp, Homo sapiens
  chr11:108674035-108674061
  hypo
tcaggccagccacggcggctcacgcc

SEQ ID NO: 25729 - DNA, 30 bp, Homo sapiens
  chr11:108680108-108680138
  hypo
actttttgagcatacgtatccttacagtga

SEQ ID NO: 25730 - DNA, 40 bp, Homo sapiens
  chr11:109963224-109963264
  hypo
acctgccctaagaaggcggcccgtcgatctccttgactgc

SEQ ID NO: 25731 - DNA, 32 bp, Homo sapiens
  chr11:109963348-109963380
  hypo
cgcggggaggtcgggaccgctgggttgggccg

SEQ ID NO: 25732 - DNA, 201 bp, Homo sapiens
  chr11:110144180-110144381
  hypo
gcactggccattcatgcgtgcaatcatggcacactgcaaccttgatctcctggacgcaaacctatactcccacctcaatctaccaagtagctaggagcacaggcgtgtgccgccaggcctagctccaaactctattttaaataataattttattgtgtaaatacctaatatctcaaaaacttaacacgccttaccaaaata

SEQ ID NO: 25733 - DNA, 1204 bp, Homo sapiens; identical to SEQ ID NO: 8360
  chr11:110581824-110583028
  hypo

SEQ ID NO: 25734 - DNA, 1005 bp, Homo sapiens; identical to SEQ ID NO: 8361
  chr11:110583043-110584048
  hypo

SEQ ID NO: 25735 - DNA, 380 bp, Homo sapiens; identical to SEQ ID NO: 8365
  chr11:111411201-111411581
  hypo

SEQ ID NO: 25736 - DNA, 361 bp, Homo sapiens; identical to SEQ ID NO: 8366
  chr11:111411821-111412182
  hypo

SEQ ID NO: 25737 - DNA, 31 bp, Homo sapiens
  chr11:111484752-111484783
  hypo
gggaactgacccccctcgggggtcagttgaa

SEQ ID NO: 25738 - DNA, 31 bp, Homo sapiens; identical to SEQ ID NO: 8367
  chr11:111945412-111945443
  hypo

SEQ ID NO: 25739 - DNA, 94 bp, Homo sapiens
  chr11:113560951-113561045
  hypo
cctggcatgcatcagcccttccgtccaggtagccagcgcaaagcatgcggggggtgagggctccgctgtacacgcaagagctgttgcagagctg

SEQ ID NO: 25740 - DNA, 31 bp, Homo sapiens
  chr11:113712909-113712940
  hypo
aaaagtgaaactcacacgtgatacaaaatac

SEQ ID NO: 25741 - DNA, 35 bp, Homo sapiens
  chr11:113747596-113747631
  hypo
ctccctagtctgcatgcgggcgcagtttttgacaa

SEQ ID NO: 25742 - DNA, 200 bp, Homo sapiens
  chr11:113921421-113921621
  hypo
aaacatgtcatgctacgaggtgaaaattaccaccaccccctgcacaccctgcctcgctctccatttgcctgctcacctcactcccaacagaatgaacgagacgagcctgggagaacaggaccacaaacagctgcgctcagctgcaattagaagccaagaaacacaggtcatgcttcattcttttaaagagatttaaaatt

SEQ ID NO: 25743 - DNA, 30 bp, Homo sapiens
  chr11:114070195-114070225
  hypo
accttgcccttccccggcctcccaccctag

SEQ ID NO: 25744 - DNA, 30 bp, Homo sapiens
  chr11:114112625-114112655
  hypo
ctacccttgctgctgcgatgtatttgatca

SEQ ID NO: 25745 - DNA, 382 bp, Homo sapiens
  chr11:114112880-114113262
  hypo
tcccacaggcactgacatggccgtcttctgtctgctgtgtgggaagcgcttccaggcgcagagcgcactgcagcagcacatggaggtccacgcgggcgtgcgcagctacatctgcagtgagtgcaaccgcaccttccccagccacacggctctcaaacgccacctgcgctcacatacaggtaggtcagtccagctgatgggtggatctgggtctctgggagccagcgtctatatttacctccaaggacgtaaagtggaggtggtgggctgagtcagccttcagtccttctgctcaaggcttggacgtgcagaggctgcccgtcgtgcaggtaaatgtggacagttctcccagtcccctcctgtggaccgtcggttcaaagtc

SEQ ID NO: 25746 - DNA, 66 bp, Homo sapiens
  chr11:114127909-114127975
  hypo
ctggggccaagacccgggtctgtctgaccctggggttgctgagcagaaaccgcctggagctacccc

SEQ ID NO: 25747 - DNA, 2468 bp, Homo sapiens; identical to SEQ ID NO: 8378
  chr11:115373433-115375901
  hypo

SEQ ID NO: 25748 - DNA, 471 bp, Homo sapiens; identical to SEQ ID NO: 8382
  chr11:115630614-115631085
  hypo

SEQ ID NO: 25749 - DNA, 30 bp, Homo sapiens; identical to SEQ ID NO: 8383
  chr11:115791602-115791632
  hypo

SEQ ID NO: 25750 - DNA, 171 bp, Homo sapiens
  chr11:116591712-116591883
  hypo
gctctgccacttaaatcgcctcaacacccctgtcccttcccccgactgtggtcctcagcacaggacatggccttactgctccaccacgtgcttagtattcaagccatgcgctgccaccatgcttcccaccatgtctcctccaaagcagagccttccgcggtgtgccctgca

SEQ ID NO: 25751 - DNA, 30 bp, Homo sapiens
  chr11:116693400-116693430
  hypo
ctggagatgttccacggcctccttggcatt

SEQ ID NO: 25752 - DNA, 178 bp, Homo sapiens; identical to SEQ ID NO: 8385
  chr11:116706357-116706535
  hypo

SEQ ID NO: 25753 - DNA, 20 bp, Homo sapiens
  chr11:116862121-116862141
  hypo
cactgcgctccagtatgggc

SEQ ID NO: 25754 - DNA, 34 bp, Homo sapiens
  chr11:116959821-116959855
  hypo
ttataagagtaagaagctggccgggcgcggtggc

SEQ ID NO: 25755 - DNA, 37 bp, Homo sapiens
  chr11:117047302-117047339
  hypo
tctaatttggccgggcgcagtggctcacgcctgtaat

SEQ ID NO: 25756 - DNA, 2 bp, Homo sapiens
  chr11:117056078-117056080
  hypo
ca

SEQ ID NO: 25757 - DNA, 336 bp, Homo sapiens
  chr11:117073747-117074083
  hypo
tcctatggcatgagccgcgaagtgcagtccaaaatcgagaagaagtatgacgaggagctggaggagcggctggtggagtggatcatagtgcagtgtggccctgatgtgggccgcccagaccgtgggcgcttgggcttccaggtctggctgaagaatggcgtggtgagtggcaccctgggctagggcgctggggggctggggtgtgccaccctgtgagtcctgggccaatccctgagctgactgctaagctgcgtcctatgccctatgcctggtagattctgagcaagctggtgaacagcctgtaccctgatggctccaagccggtgaaggtgcccg

SEQ ID NO: 25758 - DNA, 71 bp, Homo sapiens
  chr11:117074287-117074358
  hypo
aggggtgtgcttgcccgcacacagcagggatgggatatgccgagaataacacgccacgctcacagggccca

SEQ ID NO: 25759 - DNA, 30 bp, Homo sapiens
  chr11:117075063-117075093
  hypo
atcatcagttagagcggagagggctagccc

SEQ ID NO: 25760 - DNA, 189 bp, Homo sapiens
  chr11:117076077-117076266
  hypo
gctctgcagtcctgccgcaggattccctagtgaagcagctcaggcctgggggagccgtgtgtatcccagctgtgccggcagcatcataccaatcgtgggggtggtgaaggagccaggggttcattcatggttggtttctgatcaggcatcttgggaatggataatggaggcagccgctttcaggacagg

SEQ ID NO: 25761 - DNA, 116 bp, Homo sapiens
  chr11:117097880-117097996
  hypo
cggctcccgtaggccacgcccacggcacagaagctgttgttgggcacagccgcgatctctcctgcacatcgcgtgccatggtggttgccattctccacatccgggtggggcatggg

SEQ ID NO: 25762 - DNA, 21 bp, Homo sapiens
  chr11:117129695-117129716
  hypo
tgagtttcactctgtcgtcca

SEQ ID NO: 25763 - DNA, 21 bp, Homo sapiens
  chr11:117129955-117129976
  hypo
agctaccgtgcccggctttat

SEQ ID NO: 25764 - DNA, 489 bp, Homo sapiens; identical to SEQ ID NO: 8386
  chr11:117186648-117187137
  hypo

SEQ ID NO: 25765 - DNA, 121 bp, Homo sapiens
  chr11:117188181-117188302
  hypo
aacaagataacgacaacaacaacaaatgtagtaataacaggctacgttactcccattaaaggcaggctttggaaaggaaagatcattatctctactctttttttttttttttttgagaagg

SEQ ID NO: 25766 - DNA, 49 bp, Homo sapiens
  chr11:117188541-117188590
  hypo
gctgggattacaggcgtgagccaccgcgcccggccgatcattatctcta

SEQ ID NO: 25767 - DNA, 151 bp, Homo sapiens
  chr11:117267875-117268026
  hypo
ccttgtgcagcagacacgctccatgcggaggcggcagacagctctgaaagctgcccagcagcattggcgccatgagctggccagtgcgcaggaggtggccaaagacccaccaggcatcaaggccctggaagatatgcgcaagaacctggag

SEQ ID NO: 25768 - DNA, 232 bp, Homo sapiens
  chr11:117335663-117335895
  hypo
ccagagtggtggcattgatctcgctggaagagggccccgtgccagcccgattgaaggcttggaccaccaccccatactgggcgaacttcttgaggttgtccagggtgtagacctcgctgtcccccgtggccttcatctccacgatgctgtactgcccgttgctgccggggctgttctctctgtagccaatctggtagccccggatgacaccgttctgcagctccttcttggg

SEQ ID NO: 25769 - DNA, 199 bp, Homo sapiens
  chr11:117380435-117380634
  hypo
ctgacctgtgagtcagcggcgccctctccagtgctcagggctagtagctgcatgtgtgcctggccatttccatttctgggaaagccatcctcccggaggtggggtctgaccccctgcaccctggtgatgacctgggccctctttactgtggagtccagcctacagatctgcccccgagtcccagcgtgtccctagcagg

SEQ ID NO: 25770 - DNA, 382 bp, Homo sapiens
  chr11:117389165-117389547
  hypo
aatgtagacaggcacctcttacgtttattcgcgcctgatattcagcactgcccaccaagttccgcgctgtgcaccggtacacgcccccgtcgcggatctgggggcctgtgacgttcatgtggctgatggtggtgccgtccgacatggtgtactggttggtgcggtggctgccatcccgcacgatgggctcatcgtcgagggcccaggtgaccgtggggggcggggcgcccttggccgcacacatcagtgagaactgctccccggggttgaccaccttctcgctgaaggacgagacgatgcggggcgtgccatctgcagggagcgagaagcccccttcagggtcaccaagccatggagagacggtccccccagccaccccacc

SEQ ID NO: 25771 - DNA, 30 bp, Homo sapiens
  chr11:117459974-117460004
  hypo
gatggctgctagacccggttggattcgatg

SEQ ID NO: 25772 - DNA, 30 bp, Homo sapiens; identical to SEQ ID NO: 8387
  chr11:117789330-117789360
  hypo

SEQ ID NO: 25773 - DNA, 31 bp, Homo sapiens
  chr11:117860108-117860139
  hypo
ggattgagcacaagctcgtttccagtgccta

SEQ ID NO: 25774 - DNA, 126 bp, Homo sapiens
  chr11:117957554-117957680
  hypo
acacagctgcttgccgttggttttggggagggatgcaggttctggggtcagagagcagagtgaggctccctcagaggagcactgtggccgggccccactctgcaagctgacggcaagcacctctgg

SEQ ID NO: 25775 - DNA, 33 bp, Homo sapiens
  chr11:117977481-117977514
  hypo
agccactgcacccagccccgtgcatctttttat

SEQ ID NO: 25776 - DNA, 40 bp, Homo sapiens
  chr11:117994508-117994548
  hypo
gattacaggggtgagccaccgtgcccggccaattactgtt

SEQ ID NO: 25777 - DNA, 41 bp, Homo sapiens
  chr11:119019635-119019676
  hypo
acctcctccggcccccgcgccgcaagcgctgctctctcctt

SEQ ID NO: 25778 - DNA, 31 bp, Homo sapiens
  chr11:119032604-119032635
  hypo
cccaaccctcctttctcgctgcccctaacgc

SEQ ID NO: 25779 - DNA, 262 bp, Homo sapiens
  chr11:119044182-119044444
  hypo
ctcagaagctatacagcggcaccgccggaacctggctgagtggttcagccggctgcccagggaggagcgccagtttggcccaacctttgccctagacacggtccacgttgaccctgtgatccgcgagagtacccctgatgagctacttcgcccacccgcggagctggccctggagcatcagccaccccaggccgggctccccccactggccttgtctcagctctttaacccggatgcctgtgggcgccgggtgcagacagtg

SEQ ID NO: 25780 - DNA, 30 bp, Homo sapiens; identical to SEQ ID NO: 8392
  chr11:119077264-119077294
  hypo

SEQ ID NO: 25781 - DNA, 237 bp, Homo sapiens; identical to SEQ ID NO: 8393
  chr11:119103175-119103412
  hypo

SEQ ID NO: 25782 - DNA, 84 bp, Homo sapiens; identical to SEQ ID NO: 8394
  chr11:119142430-119142514
  hypo

SEQ ID NO: 25783 - DNA, 107 bp, Homo sapiens; identical to SEQ ID NO: 8395
  chr11:119144574-119144681
  hypo

SEQ ID NO: 25784 - DNA, 131 bp, Homo sapiens; identical to SEQ ID NO: 8396
  chr11:119145546-119145677
  hypo

SEQ ID NO: 25785 - DNA, 143 bp, Homo sapiens; identical to SEQ ID NO: 8397
  chr11:119146701-119146844
  hypo

SEQ ID NO: 25786 - DNA, 103 bp, Homo sapiens; identical to SEQ ID NO: 8398
  chr11:119148461-119148564
  hypo

SEQ ID NO: 25787 - DNA, 563 bp, Homo sapiens; identical to SEQ ID NO: 8399
  chr11:119148860-119149423
  hypo

SEQ ID NO: 25788 - DNA, 493 bp, Homo sapiens; identical to SEQ ID NO: 8400
  chr11:119155747-119156240
  hypo

SEQ ID NO: 25789 - DNA, 127 bp, Homo sapiens; identical to SEQ ID NO: 8401
  chr11:119167630-119167757
  hypo

SEQ ID NO: 25790 - DNA, 87 bp, Homo sapiens; identical to SEQ ID NO: 8402
  chr11:119168097-119168184
  hypo

SEQ ID NO: 25791 - DNA, 176 bp, Homo sapiens; identical to SEQ ID NO: 8403
  chr11:119169060-119169236
  hypo

SEQ ID NO: 25792 - DNA, 101 bp, Homo sapiens; identical to SEQ ID NO: 8404
  chr11:119170360-119170461
  hypo

SEQ ID NO: 25793 - DNA, 31 bp, Homo sapiens; identical to SEQ ID NO: 8405
  chr11:119187862-119187893
  hypo

SEQ ID NO: 25794 - DNA, 31 bp, Homo sapiens
  chr11:119243325-119243356
  hypo
cagtcaggttgggagtcgagccctcagcctg

SEQ ID NO: 25795 - DNA, 299 bp, Homo sapiens
  chr11:119290803-119291102
  hypo
gccagagtggtggagtgcacacgtgtaggtgccctcgtccttgctagtgaaggcggataagtagaggaccttcatgttgtatttgctggtgaagttggttcgggagcggtatgtgtgctcaggcacccccacagtgccaaagagcacgtgcttctttgtctcacgggtcaggctgaactcgtactggatgggtgaactgctggtattctcatggcggcagtccagacgaaggctctggtccactaggcaggccgttaggctggtcaccttctgccctcgggagacctgcaagactggca

SEQ ID NO: 25796 - DNA, 84 bp, Homo sapiens
  chr11:119405811-119405895
  hypo
acaggcgtgagccaccgcgcctggcccagactgggtatattaataggctgctaatgtctctggcatccccgagcagtggtcctg

SEQ ID NO: 25797 - DNA, 31 bp, Homo sapiens
  chr11:119493274-119493305
  hypo
gctgtcctgagggtgccggctcctgtcccca

SEQ ID NO: 25798 - DNA, 31 bp, Homo sapiens
  chr11:119493729-119493760
  hypo
tgcccagaagaggttacgttctggtctgagt

SEQ ID NO: 25799 - DNA, 183 bp, Homo sapiens
  chr11:119505166-119505349
  hypo
gcagatctcagcacgcggcagaccgtggcagtgtggacccggacagctgcggagcgtggctggctgcagccccagctgccaccccgctggatccacccagcatttgtgctgagaccgcaattcccctagaccgctctcagccaacaactagacaggctgggaatccagcgcaggccctttcct

SEQ ID NO: 25800 - DNA, 111 bp, Homo sapiens
  chr11:119524139-119524250
  hypo
ggagggtggcccggcgcggggatcccaacccagccctgccctgagggacacatccccgttcctccagacccgcgcccctccaacaggctggtgggtcgtggtgcgagacga

SEQ ID NO: 25801 - DNA, 31 bp, Homo sapiens
  chr11:119532443-119532474
  hypo
cgggcactgggaaattcgtttctccttaatg

SEQ ID NO: 25802 - DNA, 612 bp, Homo sapiens
  chr11:119535446-119536058
  hypo
ggaaggggggctacacgtaccactccttcttggaaatgaaagacccgtcgttctgagaaaccatgttctcagccaagtccagctgctcagggtcgtactggtagcccagagtccggtccccgtagccgtcctgacgggcctcggcctcatccacggtgaagtagggccgcttggcgtcctcgtcatatttggggtgggggccgcccaccttgcgctcgccccctccaccgccctcctcctcctcctcctcctcctcatagctgcttccacccagtgggccggccttcttctcgtcgtctgagtcgtcggggtactgcaggttctgtgccattggtgggtggtgctgggggatgcctgccttgctgtagccgttgccatacacgtgcttcttggtgctgtagtcacccttgaaggtgtgccggcgccgacgcagggcgaccacgatcccgccgaccacaatcaacaccagcaggatgctccccgccacgcccccaatgatggccgtgggcaccggcccggcgcgccgcccatgttcgggaggagacggggtgtaggggaattctgggtgaggaaaagagatggaggggacagcatcagcgtgtgctcctgggg

SEQ ID NO: 25803 - DNA, 100 bp, Homo sapiens
  chr11:119541629-119541729
  hypo
tgagccaccacgcctagccaacttttttccttaagtcttaaggaggtttactctttcctggggatcttttgggaccaaagaaccccggttattttgttta

SEQ ID NO: 25804 - DNA, 31 bp, Homo sapiens
  chr11:119547317-119547348
  hypo
ggtgggccgcagggcacgtgctccatgagca

SEQ ID NO: 25805 - DNA, 77 bp, Homo sapiens
  chr11:119548508-119548585
  hypo
ctgccccttcttggctcgaagcactgcctgggtaccctctatccaattggtgggtttggctgcgaggaagcagagag

SEQ ID NO: 25806 - DNA, 384 bp, Homo sapiens
  chr11:119549110-119549494
  hypo
ccagggcagcttacccatcaccgtgagattgagctggctttctcgattgcccgtagggaaggtagcaaactcgcagatgtagacaccctcatcctccagctccaggcgggagaggcggatagtgccatcggtgaaggagggccgcaggaattccacacgctcgcggtagggagccagcacggacacgcccatggatgggttgtagatggccacgttctgcttggagccattggtggacttctgccatgtgacctgggtgatcttcacgctgggaagcgggttggcaaagctgcagtgcagaaccacgtctgtgccgatgaagccatacatggagtcgttcacctggaccacctgggagtggacgcctggccaggaggatggcag

SEQ ID NO: 25807 - DNA, 31 bp, Homo sapiens
  chr11:119574824-119574855
  hypo
ctgggtgcacccctcacgccccaccatcatt

SEQ ID NO: 25808 - DNA, 31 bp, Homo sapiens
  chr11:119576249-119576280
  hypo
gcaggtgcaaaggccccgtggcgggagagcg

SEQ ID NO: 25809 - DNA, 347 bp, Homo sapiens
  chr11:119579458-119579805
  hypo
gaattttgtggtttgcgaattatatctcaacaaagacaaaagaagaaaagaggcacatgaagaaggatggatgatggcagggctaggctggagacaagcaggctaccagaagacctctgcaagcctgcagcacccccaagcgtgggggccctggggtcccacggctcagcgcagctgctaagagcaccggtcttctgaagtccaagactcagcttccctcctcaggactgcccaggactgattctgcccaggactgattttgctgggggagggggcaccggagagatcctgagacactctaccccccacgcccgcccacatagccaacatatcgcacatatcctgca

SEQ ID NO: 25810 - DNA, 172 bp, Homo sapiens; identical to SEQ ID NO: 8412
  chr11:119587895-119588067
  hypo

SEQ ID NO: 25811 - DNA, 159 bp, Homo sapiens
  chr11:119588397-119588556
  hypo
aaccctcaaaggggcccggtcccagagggcagaggagagggacataaaagtggctaagcttgggagcccggcaggcacctgcaggcccgggggtaggggggctctgggcaatgctggtcccttcgtgctggctgggcaatgctccggcttggatgggag

SEQ ID NO: 25812 - DNA, 31 bp, Homo sapiens
  chr11:119590697-119590728
  hypo
cacggaggcaggaaagcgctgggcatggaaa

SEQ ID NO: 25813 - DNA, 73 bp, Homo sapiens; identical to SEQ ID NO: 8413
  chr11:119598372-119598445
  hypo

SEQ ID NO: 25814 - DNA, 314 bp, Homo sapiens; identical to SEQ ID NO: 8414
  chr11:119599011-119599325
  hypo

SEQ ID NO: 25815 - DNA, 58 bp, Homo sapiens; identical to SEQ ID NO: 8415
  chr11:119600031-119600089
  hypo

SEQ ID NO: 25816 - DNA, 103 bp, Homo sapiens
  chr11:119606538-119606641
  hypo
ggttgtgagtagaggcggcactcctgattagggatgggagcacttaaaactcaacggtgatactgagaagagggtttcatccaggatccgcatagaccggaga

SEQ ID NO: 25817 - DNA, 30 bp, Homo sapiens
  chr11:119607029-119607059
  hypo
tcgggatctgatgagcgctgtgtccctgaa

SEQ ID NO: 25818 - DNA, 31 bp, Homo sapiens
  chr11:119617498-119617529
  hypo
aggcgcggtggctcacgcctgtaatcccagc

SEQ ID NO: 25819 - DNA, 192 bp, Homo sapiens
  chr11:119970360-119970552
  hypo
ttcttcatctgtggaatgggacgtagtaagtaatgctgcttaactacccacagttgaagtgacgacgaaggccggctgagatgaattctggcccccatctgaatgctcaccgtgtgctttcgacacagcttccactttcacgccgcgtaacacggtgagggagaaaccgccgccttcataccattgatatgg

SEQ ID NO: 25820 - DNA, 136 bp, Homo sapiens
  chr11:119994995-119995131
  hypo
aggccatcccccaggcctggccggacctcaccggaggggctgccctgccgagtttgtaccccagggacgatgattatcacactcctcaaccccacttctgcagccaccgccagccgcagcttctcagatgagaggg

SEQ ID NO: 25821 - DNA, 576 bp, Homo sapiens
  chr11:120008003-120008579
  hypo
ggtagcagatgcaggtctggtcggtctggcagaagagctccatcgtcttgccatgcacgggacacttgcgggcctcaaagtcccggatgggctcgagcagctggtggtctcggaaggcggcgccctccaggtggggcttgagatgcagctcgcagaaggaggcctggcacaccaggcaggacttgaccgccttctgcttgttgccgatgcaggagtcgcacagcacctcctcggagccggacttggaccgtgaaaaaaggcccgtgtcggcccgggggtagctgttccgccgggtctccccgggctccatgatggacaccgtgggcttccgggactccgagaaaatggacttgcgcagctcgcccttttcggcaaaggtaacgggtggcttcttggcagcccccagctggagccctgcgtacggcgacctcttgccttccatagagtccatgctgaagtagttggagttcttgtcgtccccggactcgacaaactggatgatgggtcgccgccactcattgcccgcgaacagggcgctcctaccttcccctggcttcagggcgctgcccaggctct

SEQ ID NO: 25822 - DNA, 164 bp, Homo sapiens; identical to SEQ ID NO: 8418
  chr11:120196356-120196520
  hypo

SEQ ID NO: 25823 - DNA, 31 bp, Homo sapiens; identical to SEQ ID NO: 8419
  chr11:120206517-120206548
  hypo

SEQ ID NO: 25824 - DNA, 30 bp, Homo sapiens; identical to SEQ ID NO: 8420
  chr11:120207924-120207954
  hypo

SEQ ID NO: 25825 - DNA, 31 bp, Homo sapiens
  chr11:120298674-120298705
  hypo
gatcttttagaactatcgaagattaagtagt

SEQ ID NO: 25826 - DNA, 226 bp, Homo sapiens
  chr11:120367535-120367761
  hypo
tggttactactgtatcgattaaactccgctttgtttcagagatgatcataatttggccagcttcatttccctctactgtccatcgtgagccctcttccccagtaaggcttaggctcctccaagtctccccacctcacattctaggccgggactccacctttgcttttcccttagtctgaaatgtactttggaaacttccaagatgagtattaaaagtaatagctgg

SEQ ID NO: 25827 - DNA, 30 bp, Homo sapiens
  chr11:120911589-120911619
  hypo
ctggagtcaactgtcgatactacttttatt

SEQ ID NO: 25828 - DNA, 36 bp, Homo sapiens
  chr11:120950503-120950539
  hypo
ccttgggaaacaaactcgataaatgttttgtttttt

SEQ ID NO: 25829 - DNA, 30 bp, Homo sapiens
  chr11:120973182-120973212
  hypo
gaagtgttgaacttcggaggacctgccagc

SEQ ID NO: 25830 - DNA, 474 bp, Homo sapiens
  chr11:120998503-120998977
  hypo
cacaagcagctgccccgacacatgctccgacctgacggcctcgcggaactgcgccacgccgtgcacagagggctgcgagtgcaaccagggcttcgtcctcagcaccagccagtgcgtccctctgcacaagtgcggctgcgacttcgacggccactactacaccatgggggagttcttctgggccacggccaactgcactgtgcaatgcctgtgcgaggagggcggggacgtctactgcttcaacaagacctgcggcagcggggaggtgtgcgccgtggaggacggctaccagggctgcttccccaagcgggagaccgtgtgcctgctcagccagaaccaggtgctgcacacctttgacggcgcctcctacgccttcccctccgagttctcctacaccctcctgaagacctgccctgagcgcccagagtacttggaaatcgacatcaacaagaagaagcccgatgcaggacctgc

SEQ ID NO: 25831 - DNA, 30 bp, Homo sapiens
  chr11:121000712-121000742
  hypo
tgcggcatcatcaacgacccctccaacagc

SEQ ID NO: 25832 - DNA, 306 bp, Homo sapiens
  chr11:121023521-121023827
  hypo
tggccatgagaaaaccctcctcggtgccttgtgatcgtgcgagtcttgacttgtctctcttgttccagctgtcacctgccctccaaacagccattacgagagctgcgtgagtgtctgccagccccgctgcgccgccatccgcctgaagagtgactgcagccactactgcgtggagggctgtcactgcgacgctggctacgtcctcaacggcaagagctgcatcctgccccacagctgcggctgctactccgatggcaaatattacgaggtatgggaggccagcccggccttttcctccttgccaat

SEQ ID NO: 25833 - DNA, 241 bp, Homo sapiens
  chr11:121665533-121665774
  hypo
aagcaatccacatcttcactccgaggtcccagggcagcccccggcgaggcgggtcgtccgagttgcccctcgagctctccgaagaggcagcccttagcctcggagctcggggtagtccgagcagtcctcgcctacactgcgcagcagacactccttcctccatgactgttcaagggcgggggtggggagggaggaacgagcaggccatgaatatttaatcggggaaaagtaggagcacatt

SEQ ID NO: 25834 - DNA, 77 bp, Homo sapiens
  chr11:122628719-122628796
  hypo
accttctttaaacactcaaccactccttttgagtcgaagcttcctgggggcccttcgtctggcaagggcttaggtgt

SEQ ID NO: 25835 - DNA, 105 bp, Homo sapiens
  chr11:122632801-122632906
  hypo
ttttcgccattaccgtcaatggcaaaaaccacagttacttttgcaccgacctaataacatctgtgacctcattctggaatcaccgtgcccctggcttgctgttgt

SEQ ID NO: 25836 - DNA, 30 bp, Homo sapiens
  chr11:122643974-122644004
  hypo
cacatgttctgccgcgcccatgttcagtct

SEQ ID NO: 25837 - DNA, 31 bp, Homo sapiens
  chr11:122933146-122933177
  hypo
cctcagttaccccgggcgggggaggggagcg

SEQ ID NO: 25838 - DNA, 31 bp, Homo sapiens; identical to SEQ ID NO: 8436
  chr11:123084067-123084098
  hypo

SEQ ID NO: 25839 - DNA, 364 bp, Homo sapiens; identical to SEQ ID NO: 8439
  chr11:123228999-123229363
  hypo

SEQ ID NO: 25840 - DNA, 205 bp, Homo sapiens; identical to SEQ ID NO: 8440
  chr11:123300823-123301028
  hypo

SEQ ID NO: 25841 - DNA, 979 bp, Homo sapiens; identical to SEQ ID NO: 8441
  chr11:123301082-123302061
  hypo

SEQ ID NO: 25842 - DNA, 31 bp, Homo sapiens; identical to SEQ ID NO: 8442
  chr11:123326582-123326613
  hypo

SEQ ID NO: 25843 - DNA, 181 bp, Homo sapiens
  chr11:124071494-124071675
  hypo
agtgaaactccgtctagaaaaaaaaaaaaaatcactaagaccgtaccaggcagacacacaggcggctggacgtcgagaggcgcacaccgacaggcaccagcatgccagcaggccaccgaccggcagaagcagaacgacacagtttggcgggggcagttggaggaaagcccaggccactgag

SEQ ID NO: 25844 - DNA, 90 bp, Homo sapiens
  chr11:124387387-124387477
  hypo
ccctccaaccctcgccgtggccctccccgctgtgtacttcattccctctacagcccttgatcaagtcggtaaaaccggcggcccttctct

SEQ ID NO: 25845 - DNA, 185 bp, Homo sapiens
  chr11:124638959-124639144
  hypo
acaggcaagaaagggggtgtgcgtgctaacagcttcttgaaaacgggctctggaaggagcttgatccttgagacttttcctgctacgttctcataccttctaggggaggagctttgggaacattctggcgaggcttcacgtggccattctcagtctgtcctctcgctctccttgactttctttgc

SEQ ID NO: 25846 - DNA, 593 bp, Homo sapiens; identical to SEQ ID NO: 8447
  chr11:124709384-124709977
  hypo

SEQ ID NO: 25847 - DNA, 135 bp, Homo sapiens; identical to SEQ ID NO: 8448
  chr11:124736200-124736335
  hypo

SEQ ID NO: 25848 - DNA, 30 bp, Homo sapiens
  chr11:124743268-124743298
  hypo
ggctggcttaagatgcggggtgagtttttt

SEQ ID NO: 25849 - DNA, 30 bp, Homo sapiens
  chr11:124744053-124744083
  hypo
tacctgtttctggttcgagcagtgggagcc

SEQ ID NO: 25850 - DNA, 310 bp, Homo sapiens
  chr11:124794644-124794954
  hypo
tcttctccccagtgaaggtgtcgtcggtgatggagatctcgacctcataggtgccctcatcggccagctgcaggtcgctgagaagcagggagccattttcaaagagtcggatacggtctcgatagtcaggccgcagggtgccgatgacctctgtgccaatggactgcaccacggtcactggcttgtcccgcttcagctgccacttcactacaggcctgtcgctgctggtactgctgtactgcacagaaagcagagccgacttccccacggtgccatggatcaggcgcacggggctggtgatgttcacccc

SEQ ID NO: 25851 - DNA, 30 bp, Homo sapiens
  chr11:125763707-125763737
  hypo
acacagaccctcttcgttggtgtctccaaa

SEQ ID NO: 25852 - DNA, 30 bp, Homo sapiens; identical to SEQ ID NO: 8454
  chr11:125774349-125774379
  hypo

SEQ ID NO: 25853 - DNA, 14 bp, Homo sapiens
  chr11:125804572-125804586
  hypo
ggccgcatttctac

SEQ ID NO: 25854 - DNA, 31 bp, Homo sapiens
  chr11:125817778-125817809
  hypo
cctcggctctgggagtcgtgagtctgaggaa

SEQ ID NO: 25855 - DNA, 23 bp, Homo sapiens
  chr11:125840354-125840377
  hypo
accgcacccggccagtagtttat

SEQ ID NO: 25856 - DNA, 179 bp, Homo sapiens
  chr11:125902448-125902627
  hypo
cgtacctttgaaaaatcgctgacactgcaatgtggaaaacagttgaggataagagaagttagaaggctatggtgagagatacggggacctgtactggagaaatatcacgggataaatttgaaaggtttttcaaaaatttttaagacacggtcatatttaaaagacgtaagaggccagga

SEQ ID NO: 25857 - DNA, 56 bp, Homo sapiens; identical to SEQ ID NO: 8455
  chr11:125932493-125932549
  hypo

SEQ ID NO: 25858 - DNA, 436 bp, Homo sapiens; identical to SEQ ID NO: 8456
  chr11:125932556-125932992
  hypo

SEQ ID NO: 25859 - DNA, 31 bp, Homo sapiens; identical to SEQ ID NO: 8457
  chr11:125933297-125933328
  hypo

SEQ ID NO: 25860 - DNA, 32 bp, Homo sapiens
  chr11:125945784-125945816
  hypo
acccacccgccaggtgcggtggctcacgcctg

SEQ ID NO: 25861 - DNA, 152 bp, Homo sapiens
  chr11:125971174-125971326
  hypo
acagcttggggatgtgcggctcccccaaggcggggctgggatatcaaagttggaagcgcgggggcatgtcagcctggctttgtgagtggggctcccatcagtgcatgaaagccttgctctacaaactgcattcgctgcgctcccaacctgca

SEQ ID NO: 25862 - DNA, 31 bp, Homo sapiens
  chr11:125988782-125988813
  hypo
ctctggctgtctggcccgagctgccgtccat

SEQ ID NO: 25863 - DNA, 30 bp, Homo sapiens
  chr11:126055288-126055318
  hypo
ccgtcggagcacagcggctgctcataaagc

SEQ ID NO: 25864 - DNA, 79 bp, Homo sapiens
  chr11:126083886-126083965
  hypo
ccttaatgtttctccggtgagtctaggcacttggtgatttaaagtagagttgttctcagtataaagaatttatgtggcc

SEQ ID NO: 25865 - DNA, 30 bp, Homo sapiens
  chr11:126136098-126136128
  hypo
ttgagcagccccttcgtcatcagagctgct

SEQ ID NO: 25866 - DNA, 102 bp, Homo sapiens; identical to SEQ ID NO: 8459
  chr11:126225981-126226083
  hypo

SEQ ID NO: 25867 - DNA, 207 bp, Homo sapiens
  chr11:126619094-126619301
  hypo
catttcgactgttttcgtggaggtatttatagaccgtgattgtgttcccgctgagccggatcctttctcaactatataaatttgactctctcgctttctcccgatacgacttatctgctaatccctagaacatttgttggtatttatgtcttgcttggattttctacaccttttctaaattgctccgacttgcgtggttcaagttac

SEQ ID NO: 25868 - DNA, 30 bp, Homo sapiens; identical to SEQ ID NO: 8461
  chr11:127423281-127423311
  hypo

SEQ ID NO: 25869 - DNA, 761 bp, Homo sapiens; identical to SEQ ID NO: 8462
  chr11:128391961-128392722
  hypo

SEQ ID NO: 25870 - DNA, 449 bp, Homo sapiens; identical to SEQ ID NO: 8463
  chr11:128562736-128563185
  hypo

SEQ ID NO: 25871 - DNA, 392 bp, Homo sapiens; identical to SEQ ID NO: 8464
  chr11:128563336-128563728
  hypo

SEQ ID NO: 25872 - DNA, 609 bp, Homo sapiens; identical to SEQ ID NO: 8465
  chr11:128563934-128564543
  hypo

SEQ ID NO: 25873 - DNA, 274 bp, Homo sapiens; identical to SEQ ID NO: 8466
  chr11:128564602-128564876
  hypo

SEQ ID NO: 25874 - DNA, 296 bp, Homo sapiens; identical to SEQ ID NO: 8467
  chr11:128564991-128565287
  hypo

SEQ ID NO: 25875 - DNA, 44 bp, Homo sapiens
  chr11:128737400-128737444
  hypo
tggaaccagaaggccggtatgctcatgtcgatgtgtctaagtca

SEQ ID NO: 25876 - DNA, 541 bp, Homo sapiens; identical to SEQ ID NO: 8470
  chr11:129148498-129149039
  hypo

SEQ ID NO: 25877 - DNA, 634 bp, Homo sapiens; identical to SEQ ID NO: 8471
  chr11:129149096-129149730
  hypo

SEQ ID NO: 25878 - DNA, 80 bp, Homo sapiens
  chr11:129207797-129207877
  hypo
ccatggagttggagtgcgccaccctcctggcagcacatggatgcattcactaatccagaaggtctctgaatactatcatt

SEQ ID NO: 25879 - DNA, 19 bp, Homo sapiens
  chr11:129207936-129207955
  hypo
tggcgcgatcttggctctt

SEQ ID NO: 25880 - DNA, 140 bp, Homo sapiens; identical to SEQ ID NO: 8477
  chr11:129765636-129765776
  hypo

SEQ ID NO: 25881 - DNA, 289 bp, Homo sapiens
  chr11:129775500-129775789
  hypo
caggaaaaacccgaccgagtagcgtagcttaccgaagtaaccgccttcacctggccagtagtaactggagttgccacaccactgtctgtaatcacaaactgacccggaggaagcgtcatcatttgaatctcagatgctaaaaaacaggaaatattcatagttcagtggtctcagattttaacacaagtcttagaaacaaaaacataaccagtagccacagtccgcactgatttgcttgccatgagagtctcacaatgatgtgatttcttggtgccgtgaaagcatctct

SEQ ID NO: 25882 - DNA, 31 bp, Homo sapiens
  chr11:129785576-129785607
  hypo
cagtggggacagcagacgggaggggtggcga

SEQ ID NO: 25883 - DNA, 53 bp, Homo sapiens
  chr11:129802031-129802084
  hypo
tggtgatttccaggcggataaattttggaggacgccccggccgtcgacctgga

SEQ ID NO: 25884 - DNA, 148 bp, Homo sapiens
  chr11:129803838-129803986
  hypo
aacccttcagccacgcgagcatctccagttcaatccttccggtgctttcgtgcagctctgcatcactgccttgatgttctctccccttcttccacagcatacgctccaaggtcatccactggaaccactccctcgtgcgtgctctcag

SEQ ID NO: 25885 - DNA, 99 bp, Homo sapiens
  chr11:129859712-129859811
  hypo
aaacagtgtaactactcgttcactctacgactcctgaaacatacagtctttagttcaaacagactgaaccaagcctcagacacaagattaagaagaaaa

SEQ ID NO: 25886 - DNA, 30 bp, Homo sapiens
  chr11:129902830-129902860
  hypo
gctggagaacggctcgatgcacagggcctc

SEQ ID NO: 25887 - DNA, 170 bp, Homo sapiens
  chr11:129993647-129993817
  hypo
attgtatggctgtgtgtaaagcgatgagtaagtcctgcctcgcgctggtcccgtgcggcagcaccgtcctgtctggcgtccgtctccctgccgtcttcgtggctgcatctgtgtggtgtccctgcccactcgggtgtttgctgtcggtcgtcttcccctcatctttgtgc

SEQ ID NO: 25888 - DNA, 121 bp, Homo sapiens
  chr11:130017430-130017551
  hypo
gtgagccaccgcgcctggctgggggcatgacattcttgaggaatctgtcagagatctgtggccaagatacaagataacccagatctgattgattttttttttttttttttgagacggaacc

SEQ ID NO: 25889 - DNA, 52 bp, Homo sapiens
  chr11:130059663-130059715
  hypo
tgagttcagcatcccgcagcacctggtggaggaggccgagcgcgtcatggcc

SEQ ID NO: 25890 - DNA, 118 bp, Homo sapiens
  chr11:130060356-130060474
  hypo
agctttggcctgcacgcccgcggtgtggagctgatgcgcttcaccacgcccggcttccctgacagcccctaccccgctcatgcccgctgccagtgggccctgcggggggacgccgact

SEQ ID NO: 25891 - DNA, 30 bp, Homo sapiens
  chr11:130068160-130068190
  hypo
tgatgagggcctcacggccgacctcccctt

SEQ ID NO: 25892 - DNA, 661 bp, Homo sapiens
  chr11:130079178-130079839
  hypo
tgccagagcccactgagtagacgcggattacccgtttgtcagccccgggcatctgggctgttccagagttttctagtccaatgacccgtggggagcgtctcgaatgacgctgccctcgaagcagcccggctctcagccccgtcctgccctctccccaggcactggcgcgctgatcctgcaaaagggtgagatccgcgtcatcaaccagaccacctgcgagaacctcctgccgcagcagatcacgccgcgcatgatgtgcgtgggcttcctcagcggcggcgtggactcctgccaggtggcccccggggcaggagggcggcaggtgggccccgggagaggcgggactggggactcacggcagggcttgtctccgcccagggtgattccgggggacccctgtccagcgtggaggcggatgggcggatcttccaggccggtgtggtgagctggggagacggctgcgctcagaggaacaagccaggcgtgtacacaaggctccctctgtttcgggactggatcaaagagaacactggggtataggggccggggccacccaaatgtgtacacctgcggggccacccatcgtccaccccagtgtgcacgcctgcaggctggagactggaccgctgactgcaccagcgcccccagaacatacactgtg

SEQ ID NO: 25893 - DNA, 21 bp, Homo sapiens
  chr11:130109950-130109971
  hypo
ttttgagactgagtctcgctc

SEQ ID NO: 25894 - DNA, 45 bp, Homo sapiens
  chr11:130264260-130264305
  hypo
atgcgcatttacggagcgtccactatgggccgtgctgacccatta

SEQ ID NO: 25895 - DNA, 138 bp, Homo sapiens; identical to SEQ ID NO: 8484
  chr11:130319511-130319649
  hypo

SEQ ID NO: 25896 - DNA, 82 bp, Homo sapiens
  chr11:130356097-130356179
  hypo
acctgctggcggctcgcacctcagagcctgcgtgggccgcggctgcacccgagtcctctgcttcatcgaaagagactgactt

SEQ ID NO: 25897 - DNA, 375 bp, Homo sapiens
  chr11:130781406-130781781
  hypo
agggagcagagaaccttgaaacggcattctcctccccgatccctcccataaaccaacaggccaatcagcgtggctcgacgtgggaagcaagcgggcagtaggggttggggaaactcctgacttttgatgaactttcgtagatctggtttctcctccagacgggtctgcagattcaagaactcccgatagcgacgattcacagtgtggtaggccagctgctgcaggccgctgctgttttcaccgtcaagggctgtctcgtactgttcaacgaacaaattgattgactcaatcagccgggtttcagcaatcttctattctggctttactgactacttggtcaatggccacatagcaagagtacgaaactaagaacaa

SEQ ID NO: 25898 - DNA, 30 bp, Homo sapiens
  chr11:131085431-131085461
  hypo
cctggccaagggctgcgctcagctcttccc

SEQ ID NO: 25899 - DNA, 201 bp, Homo sapiens
  chr11:131648917-131649118
  hypo
cctggaaggaagcaaacggcaccattgtggactgccgatgggggctacgtggccaacaaccacatcacagtaagcatctaggaactgggagtggccccagctgacagctcataagatcacaaggacctcagttccaacgccacagaaaatgaattctgcccacacaaatgagcctggaagaggattcgaaacctcaggtga

SEQ ID NO: 25900 - DNA, 31 bp, Homo sapiens
  chr11:131794182-131794213
  hypo
cctggctctgtcccaacgcatcatgtggggc

SEQ ID NO: 25901 - DNA, 310 bp, Homo sapiens; identical to SEQ ID NO: 8490
  chr11:132952690-132953000
  hypo

SEQ ID NO: 25902 - DNA, 95 bp, Homo sapiens; identical to SEQ ID NO: 8491
  chr11:132953232-132953327
  hypo

SEQ ID NO: 25903 - DNA, 71 bp, Homo sapiens
  chr11:133703492-133703563
  hypo
ccccactccgcggccgcgcggcgccctgatcgcgcgtctcaggccccgctggaacccggggcctccctgcc

SEQ ID NO: 25904 - DNA, 486 bp, Homo sapiens
  chr11:133734937-133735423
  hypo
acccatctggaggctgatggtcgagcggtccatggggggcaatacgtggttcttggggtcatagagatgcctcctcgtgctgtacgcggtcatgcgggactggctggtgcatttgtgggtgcccatctgcagcccgatgacgcactggcgggcattcatggtggcgtcctcaaagtcccactcctgcttctccgagtgcgtgtcaccgatgtccgcccctctctgcggccccttagtcttggccttccctgccagggcgagaagagacacctgcacctgcatcgtgttcccactctcagacaggtcgttggcctcaaacaggtccacggggttcatgccgtaggttttctagctggtgccagttctgcacggagcggttgatcttggggtctgagcccggctgcagcttgttcatgagtgtgcgtaagataatccaatccttcaggccctaatggaagtcgggacgatggagaggccagtgagtcc

SEQ ID NO: 25905 - DNA, 406 bp, Homo sapiens
  chr11:133777733-133778139
  hypo
ccccctgcagctcaggtccaccggaggacgaaggccccggggcagagaagagtcggcaggcagcacgtggtgagtgcgggaaagccacaggcggctccgcacaagtggtaattaatcaatctggagaattagctcccacaaaagcaaaggaggatccaatcagccgctgtggaacagcactgcacagagtgctgagccggggacggtataaatagagccggcagcttggcgctagcacaggtggctccgcagtggggagactttggccacagagctcacggcctggctgggcggaagggcgccgacggatgcgctggacatgtgcaccagaggcttgctttagccccgcggctgagttagcctctactcctgcagcgtgagccacgctggaaggaagaaagatgca

SEQ ID NO: 25906 - DNA, 1045 bp, Homo sapiens
  chr11:133790243-133791288
  hypo
taggtctgtcctgccacttggcggcggggggcgctgggacagggcccctgccgggcgacttgcctgcccaacccttcggtgcctccagagacaggatgcccgggtaggccgcgggcacctgcagggaggtggggggcagtcctcgggggaggccggccttgggctgcagactctcgggcacatcacagggtggcagctggtgggggaacatcatcgctggggtctccagccccccgaaggggaattctggccggccccagggctcaggggagcgccctcctgtaggtgtctgagtcaagggcagcgtgctgttggatgcattctctccattctcctcggggatggtggggtggccaaagggcccctcggtgggcaggggcggggacgacatgacggagctcagggggctgcccacttctggcacgtagaacgggggcggctccacctccccagggctgctgctgctgaggtacccataatactggccatggtggaagggccggggggcagggggccgggcctggcctgtggcctgaagccgaccttccaggccaccggggccctccagcccgcggggctggaaccgagggctgtatgctggtggtggcaggtaggactcctggctggatgacagaggggtgagctgggacttcagggcggccacagatgtgggcaccagtgggtcctcgttctcctcgtccgactggcggaactcggggtacatgtccgtctcctcggcgaaggggaagccctcgatgcgcctgctcttcagcgagggctccatctcggcagggtccatcacgaagcggccgtcagggcctctgctgatgagctcgatgggcgtggtggcctctgcctcggcctctgccttggccacgctgtacttcttgctgctgatggcccgcttggtcttcttgtacagcgacagctccttctcacgggtggggctcagcatcctcttggccgcgggctggccctggtcgtcggaggattctgacggcgctcggagcgtgcggatgctctcggggctcaccttgccagagga

SEQ ID NO: 25907 - DNA, 184 bp, Homo sapiens
  chr11:133799602-133799786
  hypo
ctggttcccaggacacgttggcagttgtcatggagacctggacccggacactgcccggggcatgggggctggtgcctggagatcaagtggagacctctcagactgaaaagaactcagccacgtggctgggtgcccaccgtctggctgtggggaacctgagaggctgaagcgcatggcagcggag

SEQ ID NO: 25908 - DNA, 31 bp, Homo sapiens
  chr11:133800384-133800415
  hypo
aaggtcctgggacacgcgcttcgggcaatcg

SEQ ID NO: 25909 - DNA, 101 bp, Homo sapiens
  chr11:133804994-133805095
  hypo
cagccacccaaggggagaggccgcggacgccagagggagcaggcgcaggagctggagcacatcgcccccgacacagacgcggtgtggaaaggcagggagta

SEQ ID NO: 25910 - DNA, 44 bp, Homo sapiens
  chr11:133805839-133805883
  hypo
ccagctccaagagccacgggcagcctgcccgtgcaatttctgct

SEQ ID NO: 25911 - DNA, 1320 bp, Homo sapiens; identical to SEQ ID NO: 8493
  chr11:133825338-133826658
  hypo

SEQ ID NO: 25912 - DNA, 651 bp, Homo sapiens; identical to SEQ ID NO: 8494
  chr11:133826702-133827353
  hypo

SEQ ID NO: 25913 - DNA, 768 bp, Homo sapiens; identical to SEQ ID NO: 8496
  chr11:133938773-133939541
  hypo

SEQ ID NO: 25914 - DNA, 30 bp, Homo sapiens
  chr11:134015795-134015825
  hypo
gccccatgatgggtccgattatttacttgt

SEQ ID NO: 25915 - DNA, 30 bp, Homo sapiens
  chr11:134022769-134022799
  hypo
tcacacggaggacacgagactgcttcctca

SEQ ID NO: 25916 - DNA, 30 bp, Homo sapiens
  chr11:134023319-134023349
  hypo
agttgtccgtgggacgtaggcagggtgtcc

SEQ ID NO: 25917 - DNA, 24 bp, Homo sapiens
  chr11:134071201-134071225
  hypo
gagccaccacgcctggcccagaat

SEQ ID NO: 25918 - DNA, 36 bp, Homo sapiens
  chr11:134071992-134072028
  hypo
tctccaatgcctggaacgcatcgggaaggaccagat

SEQ ID NO: 25919 - DNA, 98 bp, Homo sapiens
  chr11:134083474-134083572
  hypo
gtgctgggactacaggtgtgagccaccgtgtgtggcctcgtctctcttaaaaaaaaaaaaaagaaaaagaaaagccatgaccacgtgacaggcagtct

SEQ ID NO: 25920 - DNA, 31 bp, Homo sapiens
  chr11:134085636-134085667
  hypo
caatccctgtcaaaaccgcagctggcttttt

SEQ ID NO: 25921 - DNA, 179 bp, Homo sapiens
  chr11:134088870-134089049
  hypo
gttaatacatgcaggacgcttagaacaaaacctcatacacactctaccaaacatgttcaaactccactgctgaacctcacgtaaagctacccgtgacctacccttactctaccttaccatcccgttccaccacactttttctgtatgcctcttgacacttcctgcgtgttcccattggg

SEQ ID NO: 25922 - DNA, 25 bp, Homo sapiens
  chr11:134089976-134090001
  hypo
catgcctggtcgcagattttcttaa

SEQ ID NO: 25923 - DNA, 958 bp, Homo sapiens; identical to SEQ ID NO: 8498
  chr11:134145468-134146426
  hypo

SEQ ID NO: 25924 - DNA, 155 bp, Homo sapiens; identical to SEQ ID NO: 8499
  chr11:134146444-134146599
  hypo

SEQ ID NO: 25925 - DNA, 81 bp, Homo sapiens; identical to SEQ ID NO: 8500
  chr11:134146621-134146702
  hypo

SEQ ID NO: 25926 - DNA, 54 bp, Homo sapiens
  chr11:134212828-134212882
  hypo
ttgaacaccctcaccacgtaggtgctgcccctgtccccccggagcctggttcct

SEQ ID NO: 25927 - DNA, 238 bp, Homo sapiens
  chr11:134228153-134228391
  hypo
ttggctctgggttcaggcccacgttgccatgggccctgtaacctgcgatgcttgacttcacgcctccgaggcgcgtctctactgtgaagacagcaactgcaaggctcgcgtaggacagtctgtgtatgagcggagggcctggcgtggcagtgactgctctgcggatgtcaggggacgctctgagtggtgattgtcgtcactgcccctcaagcacagcgtttcttccacttcactctct

SEQ ID NO: 25928 - DNA, 421 bp, Homo sapiens
  chr11:134252614-134253035
  hypo
tggctgccttgggctccaggtcgttgagggtgacaagttctcgaaggaggctgctttcctggtagcctcccttcacacctcgcagcttgaagtaggcctggcttcgctgcagaatgagccgcaggttgacggcaaatccagccatgtctattgcaaatggccggtgggggtcaaacaccgtcttccagccgaccaccttccctgccccgttcacccgtggggcctcgtaccgcaggccacccacgaaggcgacgggccacacggacaccctcctggtgctgcgcatctacaaggggggggtccagagtcagggcgccggcactgcagatgaggacggccgcgcgtgcccaagggaggcgacatccttcagccacctctatctatgcccatggccagccgcggccacctagggggtgtccag

SEQ ID NO: 25929 - DNA, 30 bp, Homo sapiens; identical to SEQ ID NO: 8503
  chr11:134281376-134281406
  hypo

SEQ ID NO: 25930 - DNA, 215 bp, Homo sapiens
  chr11:134458378-134458593
  hypo
ctggattccctgccacgtgctgcacctgcgatgtgaacctctgctggattccctgccgagtgctgcacctgcgatgtgaacctgtgctggattccctgccgagtgctgcacctgcgatgtgaacctgtgctggattccctgccgagagctgcacctgcgatgtgaacctgtgctggattccctgccacgtgctgcacctgcgatgtgaacctgtg

SEQ ID NO: 25931 - DNA, 403 bp, Homo sapiens
  chr11:134608534-134608937
  hypo
gagcattccttgagctcacagcgatggcgtgtgtgtctgtgtgagtctgtgtgtctctctgtgcgtgtctgtgtgagtccgtgtgtctctccatgagtgtctgtgcgagtctgtgtgtctctccgtgcgtgtctgtgcgagtccacgtgtctctccgtgcgtgtctgtgcgagcctgtgtgtctctccgtgcgtgtctgtgtgagtctgtgtgtctctctgtgcgtgtctgtgtgagtccgtgtgtctctccgtgagtgtctgtgcgagcctgtgtgtctctccgtgcatgtctgtgtgagtctgtgtgtctctccgtgcgtgtctgtgtgagtctgtgtgtctctccctgcgtgtctgtgtgaatctatgtctttctgtgcgtgtctgtgtgagtctgtgtg

SEQ ID NO: 25932 - DNA, 140 bp, Homo sapiens
  chr12:287239-287379
  hypo
tgaagcaagctctaccagcagcgtgtcctggaagcctgcctgcctgcctgcccgtctgcacaggtgtcttgatccagccctgcgtcttcgagcccctgtgccaccggtccccacggcccgccaggagtctctttgtaccc

SEQ ID NO: 25933 - DNA, 30 bp, Homo sapiens
  chr12:316441-316471
  hypo
acagggacctttaccgacacggtgccctga

SEQ ID NO: 25934 - DNA, 30 bp, Homo sapiens
  chr12:328212-328242
  hypo
tggaagcacacctccgggttcttacaccaa

SEQ ID NO: 25935 - DNA, 77 bp, Homo sapiens
  chr12:417487-417564
  hypo
aagtttcagaacgtccgttttctgaaaaatgagaatactaccaaccgtattttgctgttttacggattaaataagat

SEQ ID NO: 25936 - DNA, 30 bp, Homo sapiens
  chr12:551031-551061
  hypo
gaagaatcttaagtcgaaagtgtttggtct

SEQ ID NO: 25937 - DNA, 188 bp, Homo sapiens
  chr12:646783-646971
  hypo
gattaccttgagtaaataaatcgttatgtcaagatttccgagtagcacggtgctttggggatgaaaattttaaatttgagtttcctattttacaacttgtttagaacccagcgtctttagtctcgaggccctgcggacacagattacttttcttggctgggtggtacgggctagctcattgtcttcat

SEQ ID NO: 25938 - DNA, 46 bp, Homo sapiens
  chr12:658732-658778
  hypo
ggctggcagagggggccgaaggcagatgaatcgtgaagccaccgct

SEQ ID NO: 25939 - DNA, 31 bp, Homo sapiens
  chr12:667261-667292
  hypo
gcctggatggggcctgcgagatggaattcaa

SEQ ID NO: 25940 - DNA, 30 bp, Homo sapiens
  chr12:670595-670625
  hypo
tcgccagatgaagacgctgtagccggaggg

SEQ ID NO: 25941 - DNA, 210 bp, Homo sapiens; identical to SEQ ID NO: 8506
  chr12:694939-695149
  hypo

SEQ ID NO: 25942 - DNA, 26 bp, Homo sapiens
  chr12:747868-747894
  hypo
ccgcgcccggccgacacttagtttta

SEQ ID NO: 25943 - DNA, 29 bp, Homo sapiens
  chr12:750716-750745
  hypo
caggctagggccgggcgcggtggctcaca

SEQ ID NO: 25944 - DNA, 207 bp, Homo sapiens
  chr12:934132-934339
  hypo
ttcaatatgcttcacccgtaaacccttcagtatgcatttcgttagagttccagtatttgtgtactttatttttcttttacctccaaacagcatcaggatagaataaattattattgtacgattgaatgagttttgacaaggcattcattcgtgtaaccaaaactctcaagatagagaacatttccatcatatcggaaaatgccctta

SEQ ID NO: 25945 - DNA, 238 bp, Homo sapiens
  chr12:939092-939330
  hypo
cctctgcttctcaccccggtgagtaacgtctgaagcttctgctcgcattgagtctgaatcgttcttttaatttaaggtaccccagagttcatggcccctgagatgtatgaggagaaatatgatgaatccgttgacgtttatgcttttgggatgtgcatgcttgagatggctacatctgaatatccttactcggagtgccaaaatgctgcacagatctaccgtcgcgtgaccagtgtaa

SEQ ID NO: 25946 - DNA, 21 bp, Homo sapiens
  chr12:1007361-1007382
  hypo
agtcattggttaggcacggtg

SEQ ID NO: 25947 - DNA, 30 bp, Homo sapiens
  chr12:1026273-1026303
  hypo
ttgtcctttttccacggaaatgagcacaca

SEQ ID NO: 25948 - DNA, 30 bp, Homo sapiens
  chr12:1041932-1041962
  hypo
ctaggtactgcccccgcacgcaccgcgtca

SEQ ID NO: 25949 - DNA, 30 bp, Homo sapiens
  chr12:1104437-1104467
  hypo
aataaataaaagtacgggcagtagtcagga

SEQ ID NO: 25950 - DNA, 100 bp, Homo sapiens
  chr12:1411785-1411885
  hypo
gcatattgtaataaggcgagtcacgcaaatttattggtttcccagtgcttataaaagttatatgtaagcagggtggaatgggtcacgcctgtaatcccag

SEQ ID NO: 25951 - DNA, 29 bp, Homo sapiens
  chr12:1463860-1463889
  hypo
ggctggagtgccgaagcgcagtgtcggct

SEQ ID NO: 25952 - DNA, 84 bp, Homo sapiens
  chr12:1607424-1607508
  hypo
tgctgtggccacctcccggggaggacagtctgctggggacagctaagcccagtgaagtgcagtggggcacgagagcaggcagtg

SEQ ID NO: 25953 - DNA, 31 bp, Homo sapiens
  chr12:1608813-1608844
  hypo
ggtgacctgggacatccgtgccttcggctgg

SEQ ID NO: 25954 - DNA, 31 bp, Homo sapiens
  chr12:1609724-1609755
  hypo
caggacgcttgtcctgcggaatggcaaggaa

SEQ ID NO: 25955 - DNA, 373 bp, Homo sapiens; identical to SEQ ID NO: 8509
  chr12:1640390-1640763
  hypo

SEQ ID NO: 25956 - DNA, 141 bp, Homo sapiens
  chr12:1716711-1716852
  hypo
gaagtcactttctcagggtcacgggaacaattcaggttgaacgcatctctcctccgacatgccgagcgtctttgagtctcctcacccaggcgcacactcaggattgcagtcatctgctattgttgcctttatttattttga

SEQ ID NO: 25957 - DNA, 55 bp, Homo sapiens
  chr12:1738020-1738075
  hypo
ctcaagaattggctcgcatctgtctgccaggacagagagcgtcctgagggggctg

SEQ ID NO: 25958 - DNA, 17 bp, Homo sapiens
  chr12:1840272-1840289
  hypo
ctggagtgcagtgatgc

SEQ ID NO: 25959 - DNA, 121 bp, Homo sapiens
  chr12:1840408-1840529
  hypo
atcttattatgttgtctaggctggtctcgaactttctcccgcttcagcctcccaaagttctgggagccactgtgctgggccagattcctttttttaaattgtgggaaaatacacgtaacat

SEQ ID NO: 25960 - DNA, 181 bp, Homo sapiens
  chr12:1840588-1840769
  hypo
aatgttgtacaatcatcacactacctagttccagaactactttatgatcccaatcagaaactatgcgcattatacaataactcctcattgttctcttctcccagttcctggtaagttctattacactttctgacgctatcagtttgcctgttctaagtatcatataaatggaatcatatag

SEQ ID NO: 25961 - DNA, 30 bp, Homo sapiens
  chr12:1908288-1908318
  hypo
agggcccaggcgcccgggcagtgagtgctt

SEQ ID NO: 25962 - DNA, 496 bp, Homo sapiens
  chr12:1943595-1944091
  hypo
agagcctgctaagcccaagcccggggctgagccggagccggagcccagcacagcctgcccacagaagcagaggcaccggccggcgagcgtgaggcgagccatgggcacggtgatcattgcaggggtcgtgtgcggcgtcgtctgcatcatgatggtggtggccgctgcctatggctgcatctacgcctccctcatggccaagtaccaccgggagctcaaaaagcgccagcccctgatgggggaccccgagggcgagcacgaggaccagaagcagatctcttctgtggcctgagcgcccatccccacccggccaggtaggaagggcggggagagcacacggcattgctcagccacagctcccaccttgacccggcgctggccactgcctccccgagtccaccctcctccccgccctccagcagacaagccacaccgggttctctccctgcactttcgaggctccctgaaagccaccgtgctgggggctcctgctgat

SEQ ID NO: 25963 - DNA, 30 bp, Homo sapiens
  chr12:1946942-1946972
  hypo
aagacaagtcttcccgagccccactgcaga

SEQ ID NO: 25964 - DNA, 30 bp, Homo sapiens
  chr12:1974799-1974829
  hypo
ggctgcaccacgcacgaggcccagcagcag

SEQ ID NO: 25965 - DNA, 31 bp, Homo sapiens
  chr12:1980942-1980973
  hypo
tgtgtgcatattcatgcgtggactccagtca

SEQ ID NO: 25966 - DNA, 197 bp, Homo sapiens
  chr12:1992046-1992243
  hypo
aggcctctgtccagatgatgtcgtggtcgtggttgatgaccatggggcggctgagcacgtgcaggtattccatcacgttctcctgggtgtccgccagcgttgagatctgcgtgtagtagcctgcggtggggaaggccgcgtgggtgtggaaggcagggcttccctgggaacccctcgccagggcctgcaccctcccc

SEQ ID NO: 25967 - DNA, 369 bp, Homo sapiens
  chr12:2017761-2018130
  hypo
caccccccaggactgcgtcacggacatccccacgccaactcccacgccggactgcctcacggacatccccacgccaactcccacgccggactgcgtcacggacatccccacgccaactcccacgccggactgcgtcacggacatccccacgccaactcccacgccggactgcctcacggacatccccacgccaactcccacgccggacagcgttatggacatccccacgccaactcccacgccggactgcgtcacggacatccccacgccaactcccacgccggactgcgtcacggacatccccacgccaactcccacgccaggttcctgcaccccacacccggctcctcctcacgacactgtggcccg

SEQ ID NO: 25968 - DNA, 30 bp, Homo sapiens
  chr12:2018849-2018879
  hypo
gatgtgctttataccggagttatttgcact

SEQ ID NO: 25969 - DNA, 183 bp, Homo sapiens
  chr12:2023974-2024157
  hypo
ctgccctctgccacccggtgggctctctggaagggggtgactgaccttctgcagcaagagagagcctgagtatttggtcacagtgttatacaggtccccgccgaaggtgtcagcccatagcttcactctgccaggcaatgaaaggacacgcgtatacacacacgtacacgcacaaatacagaa

SEQ ID NO: 25970 - DNA, 30 bp, Homo sapiens
  chr12:2024395-2024425
  hypo
cctgggcaggagacgcggagaaccctcagg

SEQ ID NO: 25971 - DNA, 30 bp, Homo sapiens
  chr12:2046030-2046060
  hypo
agcctgcgcggccacgcacctttacaccac

SEQ ID NO: 25972 - DNA, 241 bp, Homo sapiens; identical to SEQ ID NO: 8513
  chr12:2144134-2144375
  hypo

SEQ ID NO: 25973 - DNA, 30 bp, Homo sapiens; identical to SEQ ID NO: 8514
  chr12:2161625-2161655
  hypo

SEQ ID NO: 25974 - DNA, 97 bp, Homo sapiens; identical to SEQ ID NO: 8515
  chr12:2161956-2162053
  hypo

SEQ ID NO: 25975 - DNA, 1199 bp, Homo sapiens; identical to SEQ ID NO: 8516
  chr12:2162067-2163266
  hypo

SEQ ID NO: 25976 - DNA, 204 bp, Homo sapiens; identical to SEQ ID NO: 8517
  chr12:2163279-2163483
  hypo

SEQ ID NO: 25977 - DNA, 30 bp, Homo sapiens
  chr12:2483079-2483109
  hypo
ttcaagggatattccgaattcctttttctt

SEQ ID NO: 25978 - DNA, 30 bp, Homo sapiens
  chr12:2493552-2493582
  hypo
tcatctactttggtcgtggattcggaactg

SEQ ID NO: 25979 - DNA, 91 bp, Homo sapiens
  chr12:2595421-2595512
  hypo
atagcaggtaagaggggcaggcggctgcgctcccaaggccctgccctctatcgctcccagcacctttcccgctgctggctacaccaacatg

SEQ ID NO: 25980 - DNA, 251 bp, Homo sapiens
  chr12:2602367-2602618
  hypo
aagatgacccttccccttgtgcgctggaaacgggccacgggcggcagtgccagaacggcacggtgtgcaagcccggctgggatggtcccaagcacggcatcaccaactttgacaactttgccttcgccatgctcacggtgttccagtgcatcaccatggagggctggacggacgtgctgtactgggtacgtagcatgagtgggcagtcagagggtgggggaacagcggccgtgaacccttccctgacacct

SEQ ID NO: 25981 - DNA, 30 bp, Homo sapiens
  chr12:2603318-2603348
  hypo
agaaataccacttctcgagagccacccaat

SEQ ID NO: 25982 - DNA, 158 bp, Homo sapiens
  chr12:2613882-2614040
  hypo
gatttgcacctagagggtccccggatcctggcgctgcgtgggtcagtgtctcgggagccggggaccggcactggccgtgctcggttgctgagtgtgcctcactaactatcattccgttcttccaggtcaatgatgccgtaggaagggactggccctgg

SEQ ID NO: 25983 - DNA, 149 bp, Homo sapiens
  chr12:2778006-2778155
  hypo
cagagccaaaccatatcactctgccacggtgttctgcggtcccctaagcaccgcctgccatcatcaccagctttgcttctcttcgcctgcagcgcctggtctccatgaacatgcctctgaacagcgacgggacagtcatgttcaatgcc

SEQ ID NO: 25984 - DNA, 369 bp, Homo sapiens
  chr12:2788593-2788962
  hypo
tccttcttgcctacagagggccggtggcctgttcggcaaccacgtcagctactaccaaagcgacggccggagcgccttcccccagaccttcaccactcagcgcccgctgcacatcaacaaggcgggcagcagccagggcgacactgagtcgccatcccacgagaagctggtggactccaccttcaccccgagcagctactcgtccaccggctccaacgccaacatcaacaacgccaacaacaccgccctgggtcgcctccctcgccccgccggctaccccagcacggtcagcactgtggagggccacgggccccccttgtcccctgccatccgggtgcaggaggtggcgtggaagctcagctccaacag

SEQ ID NO: 25985 - DNA, 57 bp, Homo sapiens
  chr12:2964737-2964794
  hypo
gaagtcctggcagggccgcatctccatccctctccttcccggcggaagttatggctg

SEQ ID NO: 25986 - DNA, 30 bp, Homo sapiens
  chr12:2977818-2977848
  hypo
agtgctgttgatggcgaattgtatcatggc

SEQ ID NO: 25987 - DNA, 90 bp, Homo sapiens
  chr12:2995015-2995105
  hypo
taggcgtgaaccaccgcgcccggcctactttgacttttactctgttaggttttccagaatgctgactcttctgcccggcctactttgact

SEQ ID NO: 25988 - DNA, 3 bp, Homo sapiens
  chr12:3014650-3014653
  hypo
tat

SEQ ID NO: 25989 - DNA, 30 bp, Homo sapiens
  chr12:3030587-3030617
  hypo
tgagccaccatgcccggcaagaactgttgt

SEQ ID NO: 25990 - DNA, 23 bp, Homo sapiens
  chr12:3073922-3073945
  hypo
ccaccgtgcgcctggccatgggg

SEQ ID NO: 25991 - DNA, 524 bp, Homo sapiens
  chr12:3103768-3104292
  hypo
tctcacagatctttcacttcacgctttgcttcctgagcaactgattcgggctctggcactccccggagtgccttcatcccgtggcccacgcagttcttccactgctcaccggggctgtggttcctgtccccacaggtccaacgagcgctcctccaagcggagccttggagggcacggccggcaccattacctccaacgagtggagctctcccacctcccctgaggggagcaccgcctctgggggcagtcaggcactggacaagcccatcgacaatgacgcagagggcgtgtggagcccggatattgagcagagtttccaggaggccctcgccatctacccgccctgtggcaggcgcaaaatcatcctgtcggacgagggcaagatgtatggtaaggagcccgtcgggttcagccctgtacctgaggctgaggcaaggggccgacaccagaaccttggggttcctgccgggccacagaaggggatgaccacttggggctttgtcgggtggacactgctttcttcc

SEQ ID NO: 25992 - DNA, 185 bp, Homo sapiens
  chr12:3118650-3118835
  hypo
aagggaagagacttaccgtgctcccaaagctcattggtggagctgccaggctctagcctggctcaccagctcccaggtctgtggccctacttcattcacccaccggtgatgacttagacccgagatgctgcatgggtggctttagttagacctggggtagaactgtcgaccgttcactggaccgc

SEQ ID NO: 25993 - DNA, 45 bp, Homo sapiens; identical to SEQ ID NO: 8524
  chr12:3129560-3129605
  hypo

SEQ ID NO: 25994 - DNA, 31 bp, Homo sapiens
  chr12:3147035-3147066
  hypo
gccctagagccgggaccgggaccctgaggtc

SEQ ID NO: 25995 - DNA, 240 bp, Homo sapiens; identical to SEQ ID NO: 8525
  chr12:3186500-3186740
  hypo

SEQ ID NO: 25996 - DNA, 42 bp, Homo sapiens
  chr12:3215226-3215268
  hypo
acatagcatgcacactcgctcttgtgcgcgcacgcacacaca

SEQ ID NO: 25997 - DNA, 179 bp, Homo sapiens
  chr12:3302734-3302913
  hypo
tctgacaagggctgaccgtagccggggggcagctttgctcttgggctttgagaggtgacacgcaacactagggaatgtgtaagggttcaccagagacttggagctggggcagcagtgctcctggctgtgctccgtggagcccctccaagaggcccagcccactccgaatgggcagaggt

SEQ ID NO: 25998 - DNA, 27 bp, Homo sapiens
  chr12:3344031-3344058
  hypo
tataggtaagtgaggccgggcgtggtg

SEQ ID NO: 25999 - DNA, 31 bp, Homo sapiens
  chr12:3389766-3389797
  hypo
agtggagtggtacccacgggggcatttgcct

SEQ ID NO: 26000 - DNA, 83 bp, Homo sapiens
  chr12:3390445-3390528
  hypo
agaactcccagggctgcgggcgcaacgccaccacgcctttgtggagaacggtgaggctggggatggaccgcttgggtccaaga

SEQ ID NO: 26001 - DNA, 178 bp, Homo sapiens
  chr12:3392516-3392694
  hypo
gcgtatttgccaaagacgacagggtgggctggggtgcgctccggaggaacccccggcactgatgggcttctgcccctgcccttcctcacactgacactttgtccccacatggggtggggagcagagtgcccgccccgtggagataccgccccagcgggggctgcgacatccatggcca

SEQ ID NO: 26002 - DNA, 136 bp, Homo sapiens
  chr12:3409752-3409888
  hypo
gtctgcctgctggcgacgatgactgcgagccctttctcaagacttcggcccacctgggtcttgggcaatgtagtgcccagcatcggccgcgagagggagctctaacctgagacttggcggccgcagggctggctca

SEQ ID NO: 26003 - DNA, 60 bp, Homo sapiens
  chr12:3414163-3414223
  hypo
tggggccaacaaaaggacctgcgccctgggccatcgtgcggactgaaagaggtgattcat

SEQ ID NO: 26004 - DNA, 31 bp, Homo sapiens; identical to SEQ ID NO: 8527
  chr12:3474950-3474981
  hypo

SEQ ID NO: 26005 - DNA, 74 bp, Homo sapiens; identical to SEQ ID NO: 8529
  chr12:3600258-3600332
  hypo

SEQ ID NO: 26006 - DNA, 30 bp, Homo sapiens; identical to SEQ ID NO: 8530
  chr12:3600651-3600681
  hypo

SEQ ID NO: 26007 - DNA, 30 bp, Homo sapiens; identical to SEQ ID NO: 8531
  chr12:3601291-3601321
  hypo

SEQ ID NO: 26008 - DNA, 30 bp, Homo sapiens; identical to SEQ ID NO: 8532
  chr12:3601895-3601925
  hypo

SEQ ID NO: 26009 - DNA, 535 bp, Homo sapiens; identical to SEQ ID NO: 8533
  chr12:3602181-3602716
  hypo

SEQ ID NO: 26010 - DNA, 88 bp, Homo sapiens; identical to SEQ ID NO: 8534
  chr12:3602864-3602952
  hypo

SEQ ID NO: 26011 - DNA, 31 bp, Homo sapiens
  chr12:3747307-3747338
  hypo
tccaacaggctgccctcggggggatgtgggg

SEQ ID NO: 26012 - DNA, 30 bp, Homo sapiens
  chr12:3833981-3834011
  hypo
agtgttcagacatccgacctcacccttcac

SEQ ID NO: 26013 - DNA, 30 bp, Homo sapiens
  chr12:3841524-3841554
  hypo
ccagccctcacccacgaccagcagatgcca

SEQ ID NO: 26014 - DNA, 116 bp, Homo sapiens
  chr12:3901111-3901227
  hypo
ctctgatacaacatctaaggacgctttggtctttgattcttatctttgaaagacgatggcaaggataaaggagttgtgtgtgtgcgcgtgcgcgcgtgcttgccattaatacagac

SEQ ID NO: 26015 - DNA, 30 bp, Homo sapiens
  chr12:3919423-3919453
  hypo
aaaggcttggtatacgtgctgtcttttaaa

SEQ ID NO: 26016 - DNA, 1954 bp, Homo sapiens; identical to SEQ ID NO: 8538
  chr12:4377788-4379742
  hypo

SEQ ID NO: 26017 - DNA, 136 bp, Homo sapiens; identical to SEQ ID NO: 8539
  chr12:4380094-4380230
  hypo

SEQ ID NO: 26018 - DNA, 967 bp, Homo sapiens; identical to SEQ ID NO: 8541
  chr12:4381420-4382387
  hypo

SEQ ID NO: 26019 - DNA, 30 bp, Homo sapiens
  chr12:4433844-4433874
  hypo
tgcggccgctggcacgcactgtacagctgc

SEQ ID NO: 26020 - DNA, 380 bp, Homo sapiens
  chr12:4554340-4554720
  hypo
gcatgagcccaaacccccaagcgtcccgactggctgcagctggcactcactgtaggggttctcctcgtgggtcccgctgatccggccgtcggggagcacctggaggtgaaagccgatgcccacgttgcagtagagcctccgctgccgcttgatccccaccaaatagccactttcccagttcaccccggcaatctctccagctagcccggcgcgagacctggacagcagggtgccccagcccctcgagtccagcagcgtgttgttggcacgggtgcctgcaggcgagggcaccaccatgcccactaggatgcctaggaagacgagagcccacagcgtgccctgcagacgtcctgctccccgggacatagtgatgaacagtt

SEQ ID NO: 26021 - DNA, 168 bp, Homo sapiens
  chr12:4672216-4672384
  hypo
gtccaggcttaagtggagactcggcaaaagcaggaggccatttagtggaaaagttcaaaccgtggaaacaacaaatgaaaatgtcctttgtcttgcttgagcgatttgatcacctacatgtggtcggtatgtaaaacctaggagttcgaagaaattcttcaaacatgc

SEQ ID NO: 26022 - DNA, 125 bp, Homo sapiens; identical to SEQ ID NO: 8545
  chr12:4918557-4918682
  hypo

SEQ ID NO: 26023 - DNA, 175 bp, Homo sapiens; identical to SEQ ID NO: 8546
  chr12:4918713-4918888
  hypo

SEQ ID NO: 26024 - DNA, 468 bp, Homo sapiens; identical to SEQ ID NO: 8547
  chr12:4920340-4920808
  hypo

SEQ ID NO: 26025 - DNA, 1017 bp, Homo sapiens; identical to SEQ ID NO: 8548
  chr12:5018017-5019034
  hypo

SEQ ID NO: 26026 - DNA, 658 bp, Homo sapiens; identical to SEQ ID NO: 8549
  chr12:5019084-5019742
  hypo

SEQ ID NO: 26027 - DNA, 438 bp, Homo sapiens; identical to SEQ ID NO: 8550
  chr12:5019793-5020231
  hypo

SEQ ID NO: 26028 - DNA, 48 bp, Homo sapiens; identical to SEQ ID NO: 8554
  chr12:5540931-5540979
  hypo

SEQ ID NO: 26029 - DNA, 658 bp, Homo sapiens; identical to SEQ ID NO: 8555
  chr12:5541082-5541740
  hypo

SEQ ID NO: 26030 - DNA, 1091 bp, Homo sapiens; identical to SEQ ID NO: 8556
  chr12:5541940-5543031
  hypo

SEQ ID NO: 26031 - DNA, 444 bp, Homo sapiens
  chr12:5603566-5604010
  hypo
ctgcccaaagctgaggctccccgagagccggagcggggagggcccgccaagtcagcattccagccggtgattgcaatggacaccgaactgctgcgacaacagagacgctacaactcaccgcgggtcctgctgagcgacagcacccccttggagcccccgcccttgtatctcatggaggattacgtgggcagccccgtggtggcgaacagaacatcacggcggaaacggtacgcggagcataagagtcaccgaggggagtactcggtatgtgacagtgagagtctgtgggtgaccgacaagtcatcggccatcgacattcggggacaccaggtcacggtgctgggggagatcaaaacgggcaactctcccgtcaaacaatatttttatgaaacgcgatgtaaggaagccaggccggtcaaaaacggttgcaggggtattgatgat

SEQ ID NO: 26032 - DNA, 129 bp, Homo sapiens
  chr12:5726938-5727067
  hypo
gccacgctctctttccggaagcgttactacatgccttcagcaggtagttatttttttgttttcttccgttatgctttatatgtccctgtgttaactacccacacccacgccctttgaaaattgacaata

SEQ ID NO: 26033 - DNA, 162 bp, Homo sapiens
  chr12:6030342-6030504
  hypo
tgcctgtctccccattggagacgatagccagcgagtggccagggaagccttgggccaggtgcaccccgcgtttccggtagtggtaggcaagtacatagtcgaccttcctctgactgtcatggaagtgcatgcggctaagacgggcctccaaggacacaggct

SEQ ID NO: 26034 - DNA, 41 bp, Homo sapiens
  chr12:6159829-6159870
  hypo
aaaacaatcctccaggctgggcgtggtggctcatgcctata

SEQ ID NO: 26035 - DNA, 638 bp, Homo sapiens; identical to SEQ ID NO: 8558
  chr12:6309447-6310085
  hypo

SEQ ID NO: 26036 - DNA, 258 bp, Homo sapiens
  chr12:6344346-6344604
  hypo
aagatgtgaaaatgccgtctctgcccctctctcgtctgcccattgtaggtgattaaggaagtccaggagttttacaaggacacctacaacaagctgaaaaccaaggatgagccccagcgggaaacgctgaaagccatccactatgcggtatgtcgccttggcaaagacaccctcctgcgctttctccggattgtgtctgcacacagggtgctgactgcaccagaccagtgcaaacattctaatcgtcttcttacaatt

SEQ ID NO: 26037 - DNA, 10 bp, Homo sapiens
  chr12:6372627-6372637
  hypo
tgggcgcagt

SEQ ID NO: 26038 - DNA, 185 bp, Homo sapiens; identical to SEQ ID NO: 8559
  chr12:6387949-6388134
  hypo

SEQ ID NO: 26039 - DNA, 18 bp, Homo sapiens
  chr12:6388450-6388468
  hypo
tctcggctcccaaagcgc

SEQ ID NO: 26040 - DNA, 30 bp, Homo sapiens
  chr12:6388726-6388756
  hypo
ctgacttgtaagccccgtttgcccgcatag

SEQ ID NO: 26041 - DNA, 276 bp, Homo sapiens
  chr12:6391152-6391428
  hypo
ctcaaaacaaaacaaaacaaacaaaaaacatgcatttggtaacacgggcatcttaaaaagccaaaacgatcacccaaagctccctcctttccacctccccctcactcacgactgcgccccgtttctctgctgtctttcagagcccagcttctccggagctgcctgctcacgaggctgcactccctctggcctctgccactccctcccggctgggctgaaactgctcttgtccaagtcaccaacagcctctgcgctgcctgccgagcacagtgggtg

SEQ ID NO: 26042 - DNA, 106 bp, Homo sapiens
  chr12:6421422-6421528
  hypo
cccctccaaggactcgtggcctcccgcattgagacttatgggggccggcatcgagcctctgctcagagcactgctggcagactctatccccgaggataccctgtgc

SEQ ID NO: 26043 - DNA, 51 bp, Homo sapiens
  chr12:6422990-6423041
  hypo
ccaattgtgatggctccgcagatgaccagcaagctccgggagctgagaaca

SEQ ID NO: 26044 - DNA, 31 bp, Homo sapiens
  chr12:6425446-6425477
  hypo
tgtccccagcctgattcgaacccaccggagc

SEQ ID NO: 26045 - DNA, 215 bp, Homo sapiens
  chr12:6438302-6438517
  hypo
gactgtcggcggcgcgcaggcagctgagaaaagctatgtacatcgaggggttagcaccaagtaggcggctgctagctcctgcttgcccctgcaggacccctcctttccagaaaaaagtggggttggaaggcgatctcgcaggacggtccttagagctgcccgcaggggcgcagcctcatctgagaagactgggcgcgggcgggagggcggcgggg

SEQ ID NO: 26046 - DNA, 159 bp, Homo sapiens
  chr12:6464387-6464546
  hypo
cctctgcaatctgaggcgctccttccaggcctcccagtcagcatccttgccttcctcatgctgatggaggtctccacgccaggccgcaagttaaagccaccatcatccataaaggcaggttcatcctgcccgtgcaccattacccgggccccagtcact

SEQ ID NO: 26047 - DNA, 419 bp, Homo sapiens
  chr12:6483475-6483894
  hypo
accctggaccacccttccaggcgcaggcaccagggaaggggcagagggactaaccgacctgtagggattgagggtgcagatggtcactgcggggaagacgagcttgtccgagttgaggttgatgttgaggctgacggggtagctgaagtactctccgaaaagcaggccgaattgccagtacatcatgccaaaggtgcagagccacagcactgcccagaaggccgtcttcatgcggttgtgctgggagcacaccaggcggatggcgccgtggatggtggtgttgttgcagaagaactcgaagagctctcggtaggagcggtggaactcgatcagggcctcctcctccgccgtgggctgctggggcgccgcaggttcggggcccagcccctgctcctcacgcttgttccccttcatgagcc

SEQ ID NO: 26048 - DNA, 44 bp, Homo sapiens; identical to SEQ ID NO: 8565
  chr12:6493249-6493293
  hypo

SEQ ID NO: 26049 - DNA, 31 bp, Homo sapiens; identical to SEQ ID NO: 8566
  chr12:6493330-6493361
  hypo

SEQ ID NO: 26050 - DNA, 30 bp, Homo sapiens
  chr12:6500388-6500418
  hypo
tgcccactacggcacgccgcaccggagcac

SEQ ID NO: 26051 - DNA, 31 bp, Homo sapiens
  chr12:6623436-6623467
  hypo
tactggctgttgctaccgccttctggagaat

SEQ ID NO: 26052 - DNA, 6 bp, Homo sapiens
  chr12:6632862-6632868
  hypo
acaagt

SEQ ID NO: 26053 - DNA, 368 bp, Homo sapiens
  chr12:6679019-6679387
  hypo
caaggtcacagagccattaagcggcggtgcccgcagttttgcagcctctcattttccacaggtggaagtcaacgttggcaaggcacatactgcacccacacacagaacccagttactcagtggggtatcaggacaccacgtagcccttaattttcaactatacaggtgccaggctcctgccgcacacactcatccacctgcacctacacccacactgaaccagagcactaaaatacaaggaaacttttattttcaattttcatcaagaaatttgctgtggttttttatgcttttggttttttcctttttttttttttccactttatttcatttagccgctcagtggctagagccgctgggttcctggt

SEQ ID NO: 26054 - DNA, 30 bp, Homo sapiens
  chr12:6691562-6691592
  hypo
agcccaccactgcacgggaaggctgatctc

SEQ ID NO: 26055 - DNA, 30 bp, Homo sapiens
  chr12:6692186-6692216
  hypo
cctcaccttctgaacgttcatcaaagtctt

SEQ ID NO: 26056 - DNA, 31 bp, Homo sapiens
  chr12:6757458-6757489
  hypo
gtttccaagggagaatcgagtaagacagtcc

SEQ ID NO: 26057 - DNA, 45 bp, Homo sapiens
  chr12:6831876-6831921
  hypo
taaaaaaaaaaaaaaaagataagcttggggcggggaggggtggat

SEQ ID NO: 26058 - DNA, 30 bp, Homo sapiens
  chr12:6857749-6857779
  hypo
gaagaaaaaacttacgttaagagccaggag

SEQ ID NO: 26059 - DNA, 31 bp, Homo sapiens
  chr12:6876862-6876893
  hypo
ggagaggggctgtgtgcgatctgccaaggtg

SEQ ID NO: 26060 - DNA, 30 bp, Homo sapiens
  chr12:7850947-7850977
  hypo
ggtgggaagatccctcgagctcaggagtgc

SEQ ID NO: 26061 - DNA, 26 bp, Homo sapiens
  chr12:7851215-7851241
  hypo
atcgtaggctgggcgcggtggctcac

SEQ ID NO: 26062 - DNA, 143 bp, Homo sapiens
  chr12:7858705-7858848
  hypo
acgaatgcaaagagaggctagcgttggggtggggctgccggggcaaagggacaggcccgggggaggcccgggccgccacggttagaaagcatggaaagagcttaagtaaaatagctgcgtgtcggcagggcgcggtggctcac

SEQ ID NO: 26063 - DNA, 39 bp, Homo sapiens
  chr12:7963844-7963883
  hypo
gatagtgatatacagtccgacttctgtatctgcagatgc

SEQ ID NO: 26064 - DNA, 33 bp, Homo sapiens
  chr12:8009569-8009602
  hypo
aggcacggtggctcacgcctgtaatcccagcac

SEQ ID NO: 26065 - DNA, 33 bp, Homo sapiens
  chr12:8017217-8017250
  hypo
gccaccgtgcccggctgagcttttactgttaag

SEQ ID NO: 26066 - DNA, 32 bp, Homo sapiens
  chr12:8146996-8147028
  hypo
ttaaaaacatgtggaaggaatcgcttgaactc

SEQ ID NO: 26067 - DNA, 32 bp, Homo sapiens
  chr12:8147087-8147119
  hypo
agcgagatttcgtcccaccaccccaaaaaaaa

SEQ ID NO: 26068 - DNA, 522 bp, Homo sapiens; identical to SEQ ID NO: 8575
  chr12:8171288-8171810
  hypo

SEQ ID NO: 26069 - DNA, 1 bp, Homo sapiens
  chr12:8180935-8180936
  hypo
g

SEQ ID NO: 26070 - DNA, 30 bp, Homo sapiens
  chr12:8398733-8398763
  hypo
aagtgaagattacgacggatgcttaaaaac

SEQ ID NO: 26071 - DNA, 37 bp, Homo sapiens
  chr12:8423885-8423922
  hypo
gtctcaaaaacaaaacaaaaaacggatgctatgtccc

SEQ ID NO: 26072 - DNA, 490 bp, Homo sapiens
  chr12:8757659-8758149
  hypo
tctgcttctaatctttaatttcggctccagaggtgaaccagaatccccgcccacttcttcccctcgagcttccccactaactcattcattccgcatcgcaatcccgaatgcgggctgctgcactgcgcctgcgcggaaggccctttcgcacctttgaaggtcatgatggctatttgcaccccggcgcggtgcagccgccgcagcccctcgggctcagccttgcggtcctcacagaagtagaggcgcgcggtgaagatcctcagactgaggttggggttccctcgcagaaagtcggccacatgtcgggcacagtcgtagcaggggctccaggaggtgaaccaggtgacgcggtagcagcggccagggtctaggtcccagtccgagatgtagcggaggaagagcaattccacgtggcagccgttctggagagacagagaggaccacgctaaaattcactgacttttattgcggctctggtagccttagtcat

SEQ ID NO: 26073 - DNA, 275 bp, Homo sapiens
  chr12:8808408-8808683
  hypo
tcgcttgagtcacatcgtctgaaaagaaaattagaaaacaatttctgagattctctgtctccctgccacccttgcacttccagtaagttaaattgcgaagcatagtgcccagcggagttgagtatcccacaaatgtttttccttgactgcttacaataatgacaaacgattgatgacttctttgcaatacttatttaaaatgaaatcggatataccaaaggcattgtgattttgacattcataattctttttttttttttttttttgagacggag

SEQ ID NO: 26074 - DNA, 33 bp, Homo sapiens
  chr12:8890589-8890622
  hypo
gtgagccactgcgcctggcccatgaattttctc

SEQ ID NO: 26075 - DNA, 5 bp, Homo sapiens
  chr12:8894124-8894129
  hypo
ccagc

SEQ ID NO: 26076 - DNA, 32 bp, Homo sapiens
  chr12:8975181-8975213
  hypo
agtatataaagctacgcggagcgatctctgcc

SEQ ID NO: 26077 - DNA, 13 bp, Homo sapiens
  chr12:9084007-9084020
  hypo
atggagaggcggg

SEQ ID NO: 26078 - DNA, 137 bp, Homo sapiens
  chr12:9108799-9108936
  hypo
ctgccctctcctggcaccaggcggccaccccacgttatgggaagtggtggtggcgccaggccagcccaggagccgtgggctggtgggactgaacaagttgggacatgcccccgttcggcaaagcttgtggacagcag

SEQ ID NO: 26079 - DNA, 30 bp, Homo sapiens
  chr12:9395289-9395319
  hypo
ctgaggttcttcttcgatcattgggtacat

SEQ ID NO: 26080 - DNA, 31 bp, Homo sapiens
  chr12:9574344-9574375
  hypo
tattacccacagaaaacgggggccagaacct

SEQ ID NO: 26081 - DNA, 200 bp, Homo sapiens
  chr12:9585207-9585407
  hypo
ggacagcaactgtccacgggcccgagagggggttgtgtaatgttgagacccacttccacagggtggggtctataagaccctcccaagtactgcctactgtgtctcatcggaacactgtaacgttttacttttgttctccagaaagagcccgtaaaatcatctccaagccaacgattcggaccagacgctcacccagagag

SEQ ID NO: 26082 - DNA, 30 bp, Homo sapiens; identical to SEQ ID NO: 8579
  chr12:9620959-9620989
  hypo

SEQ ID NO: 26083 - DNA, 48 bp, Homo sapiens
  chr12:10264177-10264225
  hypo
ccagacctcagcagcgcgagctggagcacagccgagcccaaggcgctt

SEQ ID NO: 26084 - DNA, 48 bp, Homo sapiens
  chr12:10267998-10268046
  hypo
ccagcctaggccacagagcgagactccgtctcaaaaaaataaaaggat

SEQ ID NO: 26085 - DNA, 31 bp, Homo sapiens
  chr12:10317434-10317465
  hypo
tctgagtccctttagacggctaaaattaact

SEQ ID NO: 26086 - DNA, 30 bp, Homo sapiens; identical to SEQ ID NO: 8581
  chr12:11053581-11053611
  hypo

SEQ ID NO: 26087 - DNA, 31 bp, Homo sapiens
  chr12:11720902-11720933
  hypo
cacatttagtatactacggggtagcatttct

SEQ ID NO: 26088 - DNA, 45 bp, Homo sapiens; identical to SEQ ID NO: 8583
  chr12:11801642-11801687
  hypo

SEQ ID NO: 26089 - DNA, 308 bp, Homo sapiens; identical to SEQ ID NO: 8584
  chr12:11802786-11803094
  hypo

SEQ ID NO: 26090 - DNA, 131 bp, Homo sapiens; identical to SEQ ID NO: 8585
  chr12:11905382-11905513
  hypo

SEQ ID NO: 26091 - DNA, 30 bp, Homo sapiens
  chr12:11909578-11909608
  hypo
gggacttgtagtctcgcaagggagggatgt

SEQ ID NO: 26092 - DNA, 166 bp, Homo sapiens; identical to SEQ ID NO: 8586
  chr12:11992072-11992238
  hypo

SEQ ID NO: 26093 - DNA, 383 bp, Homo sapiens; identical to SEQ ID NO: 8587
  chr12:12006112-12006495
  hypo

SEQ ID NO: 26094 - DNA, 547 bp, Homo sapiens; identical to SEQ ID NO: 8588
  chr12:12022356-12022903
  hypo

SEQ ID NO: 26095 - DNA, 148 bp, Homo sapiens; identical to SEQ ID NO: 8589
  chr12:12037377-12037525
  hypo

SEQ ID NO: 26096 - DNA, 102 bp, Homo sapiens; identical to SEQ ID NO: 8590
  chr12:12038858-12038960
  hypo

SEQ ID NO: 26097 - DNA, 2802 bp, Homo sapiens; identical to SEQ ID NO: 8591
  chr12:12043873-12046675
  hypo

SEQ ID NO: 26098 - DNA, 1482 bp, Homo sapiens; identical to SEQ ID NO: 8592
  chr12:12046854-12048336
  hypo

SEQ ID NO: 26099 - DNA, 189 bp, Homo sapiens
  chr12:12184632-12184821
  hypo
ccttcatacatacagtcggtttttgactgaaacatcattacattcagcacgtgaatgtaattgcgatgaagtgaaagataaaggttatagttctagtgtatccacagtgctttaggagatgaactgttagggaaagccagaaaaatctccaccacggaaaaaatatttggcctgcgtcttgaaggataa

SEQ ID NO: 26100 - DNA, 30 bp, Homo sapiens
  chr12:12240348-12240378
  hypo
ttgccaggcaggggcgcaggagcatttgtg

SEQ ID NO: 26101 - DNA, 30 bp, Homo sapiens
  chr12:12514213-12514243
  hypo
cggaacgtcagcaacgatcccgatgtcatc

SEQ ID NO: 26102 - DNA, 31 bp, Homo sapiens
  chr12:12618402-12618433
  hypo
tcacaggctggacacccggccctgcggagag

SEQ ID NO: 26103 - DNA, 79 bp, Homo sapiens; identical to SEQ ID NO: 8596
  chr12:12877457-12877536
  hypo

SEQ ID NO: 26104 - DNA, 128 bp, Homo sapiens
  chr12:12989490-12989618
  hypo
catacagggcccatacgcagtaaatgttcaatatctgtcattttctgaaacctaagatgtgtcaggcggcttgacctgtattatttctagttctttgaacaatcccgaacagtcgatattattgttcc

SEQ ID NO: 26105 - DNA, 62 bp, Homo sapiens
  chr12:13035977-13036039
  hypo
gagtgaggctgtattaaacaacgtgtttaaggccgggcgcggtggctcatgcctgtaatccc

SEQ ID NO: 26106 - DNA, 31 bp, Homo sapiens
  chr12:13057640-13057671
  hypo
acactatacataatatcgtgataatatatat

SEQ ID NO: 26107 - DNA, 57 bp, Homo sapiens; identical to SEQ ID NO: 8598
  chr12:13153040-13153097
  hypo

SEQ ID NO: 26108 - DNA, 38 bp, Homo sapiens; identical to SEQ ID NO: 8599
  chr12:13153354-13153392
  hypo

SEQ ID NO: 26109 - DNA, 30 bp, Homo sapiens
  chr12:13155147-13155177
  hypo
acgatttactccaccgcagtggcatcctaa

SEQ ID NO: 26110 - DNA, 11 bp, Homo sapiens
  chr12:13199075-13199086
  hypo
gttcacttgcg

SEQ ID NO: 26111 - DNA, 17 bp, Homo sapiens
  chr12:13199145-13199162
  hypo
gtcgggcctggttagta

SEQ ID NO: 26112 - DNA, 107 bp, Homo sapiens
  chr12:13215210-13215317
  hypo
ataggcttagtactgctgggccgtgtgctcacgtggagcggaataaataacatccttcccaggtttagaggttggagtttggtcgcggggtgcttctgagtgaaaaa

SEQ ID NO: 26113 - DNA, 30 bp, Homo sapiens
  chr12:13215624-13215654
  hypo
tcagtaagacaaaaacgaaaggcaataagt

SEQ ID NO: 26114 - DNA, 175 bp, Homo sapiens
  chr12:13222375-13222550
  hypo
atcatcacctctaatgcgtgccaacttctatgctgaatgctggagacacaaaattaatgaagacagagtcactacatagctctaccatgcggtggaaagtgctgttgtggaggttcgcacaggggtccaccgggaacacagggagcagatggagtgcaggcgagctggagggcca

SEQ ID NO: 26115 - DNA, 647 bp, Homo sapiens
  chr12:13716428-13717075
  hypo
gctttcttgcaagcctcacaccggatgcacgcctgcctgcccgagttctgacccgtcaccgtcgtggagtagttgtgcagcttggagggacagctgcggcagaagttgcccccggaccggtcctcccactccacgttggtcaggttcttctcccaaggtgcaggtaccccgctgaccacgccgtgtttgtcgcccgtcccgtgcttgatgtgagacctgttggtacagggccctcctccgctgacggagtcgcgcttaaagtcatcactccgctccttgtagatgtcggtcaggtctacgtgctcccagtggggtgagttctcctttgttcggaactggtccaggtagaagtcccgtagcccttccttgtccctgaagtagcgcttgtggtcaggggagcggggcggtcggcgacggtaggccagctcgatctcgtcaaactccctgcgggacttggccgaggcaggccgcttcttcaggctgtccttatattgctgcttacgcctcttggcggcattgccctcgatgttcccataggtgacggtgtgggttgagatgtcagagacatcggagcggatcaagtcgtcgtggccactgtagcggtcgctcttgaaggagaatttgccgtacaggtcactgagctggct

SEQ ID NO: 26116 - DNA, 1569 bp, Homo sapiens; identical to SEQ ID NO: 8601
  chr12:14133388-14134957
  hypo

SEQ ID NO: 26117 - DNA, 37 bp, Homo sapiens
  chr12:14721512-14721549
  hypo
gacaaaaagaactaagccagccgggcgccgtggctca

SEQ ID NO: 26118 - DNA, 37 bp, Homo sapiens
  chr12:14721788-14721825
  hypo
cgacagagcgagattcgtctcaaaaaaaaataataat

SEQ ID NO: 26119 - DNA, 88 bp, Homo sapiens
  chr12:14818118-14818206
  hypo
caggccgggcaacactgcgaggctccgtctcaggaaaaaaaaaaaaaaaaaaagctaaggaaagttgagattccggttaaatcttgag

SEQ ID NO: 26120 - DNA, 211 bp, Homo sapiens
  chr12:14818748-14818959
  hypo
gcaagttccagtcatgcatatcgtatttctatactatttcaaaggttgagttgctgaagcggcttcattgtctggggacatacccaaggttcgtcatcgcgtgacgagaagattaaggacacagacgcaaacacggagcgggtcaagtagcggaaagtttaataggcaggaaagaagagaacagctcaccggtagagaggtaggagggctc

SEQ ID NO: 26121 - DNA, 124 bp, Homo sapiens
  chr12:14819208-14819332
  hypo
caaagaaaagggaggggaaatcgctatattgggtggacctggcttttagtacagctgcgggcattcatctacgcaagcttccagcttgcttatttatgcttgcagttcagcttttcaggctgct

SEQ ID NO: 26122 - DNA, 1019 bp, Homo sapiens; identical to SEQ ID NO: 8609
  chr12:15941608-15942627
  hypo

SEQ ID NO: 26123 - DNA, 197 bp, Homo sapiens
  chr12:16150421-16150618
  hypo
tgctcagcaaggtgttcggtaaaaatacttgagttagggggcgttcttgaaatcatcagcttattctgcagtcatgactttaacggaatcgtatgcaaaagagtcattgttagaatgaggaaactacatatctaaagacagggaaatatagcatggaacttttttctctttttaaattttaacgtggctctaaaaaa

SEQ ID NO: 26124 - DNA, 1617 bp, Homo sapiens; identical to SEQ ID NO: 8613
  chr12:19282356-19283973
  hypo

SEQ ID NO: 26125 - DNA, 111 bp, Homo sapiens
  chr12:19459536-19459647
  hypo
gtagcggaggtggtggcggcggtggaggcggcggcatcgaggtaataggtgactgatctccccgggcgctagctctgagcagatgcggactctcttcggtttcctaggcaa

SEQ ID NO: 26126 - DNA, 37 bp, Homo sapiens
  chr12:19539886-19539923
  hypo
tgtcaaaatggagtggcgcccacgaaaaaaatccatg

SEQ ID NO: 26127 - DNA, 30 bp, Homo sapiens
  chr12:20094235-20094265
  hypo
tggccgaggggccacgataactggttgccc

SEQ ID NO: 26128 - DNA, 30 bp, Homo sapiens; identical to SEQ ID NO: 8614
  chr12:20183925-20183955
  hypo

SEQ ID NO: 26129 - DNA, 30 bp, Homo sapiens
  chr12:20704789-20704819
  hypo
atgtaccatcatcccgtccaaccactacgg

SEQ ID NO: 26130 - DNA, 20 bp, Homo sapiens
  chr12:21547964-21547984
  hypo
aaataggaacagctccggtg

SEQ ID NO: 26131 - DNA, 793 bp, Homo sapiens; identical to SEQ ID NO: 8621
  chr12:21680358-21681151
  hypo

SEQ ID NO: 26132 - DNA, 26 bp, Homo sapiens
  chr12:21811389-21811415
  hypo
cgcccggccagaaataaatttctatg

SEQ ID NO: 26133 - DNA, 30 bp, Homo sapiens
  chr12:21833062-21833092
  hypo
actggaaattcaagtttgggccgaagttta

SEQ ID NO: 26134 - DNA, 110 bp, Homo sapiens
  chr12:21847671-21847781
  hypo
gctggatggcctgggcgctctcctccgactgccccagccaaactccgtgtcagtctgccagtcggttggtggcttgttggcctgctggtgcttgtcggtgcgttcctctc

SEQ ID NO: 26135 - DNA, 31 bp, Homo sapiens; identical to SEQ ID NO: 8628
  chr12:22198510-22198541
  hypo

SEQ ID NO: 26136 - DNA, 88 bp, Homo sapiens; identical to SEQ ID NO: 8629
  chr12:22486793-22486881
  hypo

SEQ ID NO: 26137 - DNA, 1133 bp, Homo sapiens; identical to SEQ ID NO: 8630
  chr12:22487133-22488266
  hypo

SEQ ID NO: 26138 - DNA, 421 bp, Homo sapiens; identical to SEQ ID NO: 8631
  chr12:22488339-22488760
  hypo

SEQ ID NO: 26139 - DNA, 1922 bp, Homo sapiens; identical to SEQ ID NO: 8632
  chr12:24714491-24716413
  hypo

SEQ ID NO: 26140 - DNA, 583 bp, Homo sapiens; identical to SEQ ID NO: 8635
  chr12:25101414-25101997
  hypo

SEQ ID NO: 26141 - DNA, 323 bp, Homo sapiens; identical to SEQ ID NO: 8636
  chr12:25102009-25102332
  hypo

SEQ ID NO: 26142 - DNA, 43 bp, Homo sapiens
  chr12:25344061-25344104
  hypo
caaagtagcctcacacggtggctcactcctgtaatagcattcg

SEQ ID NO: 26143 - DNA, 30 bp, Homo sapiens; identical to SEQ ID NO: 8639
  chr12:25368388-25368418
  hypo

SEQ ID NO: 26144 - DNA, 136 bp, Homo sapiens; identical to SEQ ID NO: 8640
  chr12:25378545-25378681
  hypo

SEQ ID NO: 26145 - DNA, 95 bp, Homo sapiens; identical to SEQ ID NO: 8641
  chr12:25380228-25380323
  hypo

SEQ ID NO: 26146 - DNA, 87 bp, Homo sapiens; identical to SEQ ID NO: 8642
  chr12:25398213-25398300
  hypo

SEQ ID NO: 26147 - DNA, 148 bp, Homo sapiens; identical to SEQ ID NO: 8643
  chr12:25404450-25404598
  hypo

SEQ ID NO: 26148 - DNA, 20 bp, Homo sapiens
  chr12:25537394-25537414
  hypo
aacatgtcacctgacacctt

SEQ ID NO: 26149 - DNA, 21 bp, Homo sapiens
  chr12:25537441-25537462
  hypo
gaagttgacaggatagcagga

SEQ ID NO: 26150 - DNA, 31 bp, Homo sapiens
  chr12:26178194-26178225
  hypo
taagaggcattcagggccaggcgtggtggct

SEQ ID NO: 26151 - DNA, 31 bp, Homo sapiens
  chr12:26278876-26278907
  hypo
cccgcgcgataagagacgcccggagtgtgca

SEQ ID NO: 26152 - DNA, 180 bp, Homo sapiens
  chr12:26398929-26399109
  hypo
tccccactgcatttgagagagcgaccaaatatgcaacttaaagctaacacacattggacgtgggagtccgtaggtacaacagaaataagcaccatcatcggccatgccgccggaacagttagaaacattcttcacctgctcaacctgaaaaaaggacccggctccagcttatcttggtaa

SEQ ID NO: 26153 - DNA, 30 bp, Homo sapiens
  chr12:26492169-26492199
  hypo
ttataaattgttctcggagctaacccactc

SEQ ID NO: 26154 - DNA, 200 bp, Homo sapiens
  chr12:26966973-26967173
  hypo
gcagctggaccatcatcgagccagccattgcaacagtaataaccatagtgtttttttctggagtttaggggaatgaggcactcttttcagctctggtgtaagaggacagaggtaaggctgcggcagatagcagccatgccataaacaaaacacctgcgcaagggcaggactaatgctgatgacgccgcagaatgaaggaa

SEQ ID NO: 26155 - DNA, 30 bp, Homo sapiens
  chr12:27311416-27311446
  hypo
tctttagaagtctccggggttgcatggcag

SEQ ID NO: 26156 - DNA, 31 bp, Homo sapiens; identical to SEQ ID NO: 8648
  chr12:27485803-27485834
  hypo

SEQ ID NO: 26157 - DNA, 13 bp, Homo sapiens
  chr12:27742308-27742321
  hypo
ctcaagcgatcct

SEQ ID NO: 26158 - DNA, 30 bp, Homo sapiens
  chr12:27950785-27950815
  hypo
agctggggcccaaccgcaggagcagccaga

SEQ ID NO: 26159 - DNA, 30 bp, Homo sapiens
  chr12:28721892-28721922
  hypo
attaattacttggacggtatgtggctaaat

SEQ ID NO: 26160 - DNA, 165 bp, Homo sapiens; identical to SEQ ID NO: 8650
  chr12:29302135-29302300
  hypo

SEQ ID NO: 26161 - DNA, 241 bp, Homo sapiens
  chr12:29373861-29374102
  hypo
gggtcttgtgtcccttctccccgattcttcccttggggcaggctgtccttatccacattgggctgccagcgcttgggaggggctactggcgcagtgtgtttactggagttgtgcgcatgctcacttgaggcatgaagtgagcgtgcgtacaactccaataactggtaacaacactcccttaccaggggcgtattcctgtaaggtcatatacccgtaaaatcagccgctttacctcttagtg

SEQ ID NO: 26162 - DNA, 22 bp, Homo sapiens
  chr12:30851645-30851667
  hypo
tttctctctctcgcgcgcgcgc

SEQ ID NO: 26163 - DNA, 31 bp, Homo sapiens
  chr12:31255937-31255968
  hypo
acttggatcaaaccctcgtgagtgaccccag

SEQ ID NO: 26164 - DNA, 31 bp, Homo sapiens
  chr12:31382410-31382441
  hypo
cccacccagaagaagacggaggattctagtt

SEQ ID NO: 26165 - DNA, 30 bp, Homo sapiens
  chr12:31432478-31432508
  hypo
ccattagccccacccgcacctcttggtatc

SEQ ID NO: 26166 - DNA, 31 bp, Homo sapiens
  chr12:31791719-31791750
  hypo
gagttacctctttcatcgacctcaggcttat

SEQ ID NO: 26167 - DNA, 37 bp, Homo sapiens
  chr12:31986809-31986846
  hypo
ctgaatctgggccaagcgcagtcactcacacctgtaa

SEQ ID NO: 26168 - DNA, 40 bp, Homo sapiens
  chr12:32140932-32140972
  hypo
tgctgggattacagacatgagacaccgtgcctggcctcta

SEQ ID NO: 26169 - DNA, 6 bp, Homo sapiens
  chr12:32142772-32142778
  hypo
aaaact

SEQ ID NO: 26170 - DNA, 31 bp, Homo sapiens
  chr12:32155350-32155381
  hypo
ttcatgagagaagacacgaatggatataaac

SEQ ID NO: 26171 - DNA, 31 bp, Homo sapiens
  chr12:32490527-32490558
  hypo
ctatccagcaaaaactcgccctgacccagag

SEQ ID NO: 26172 - DNA, 75 bp, Homo sapiens
  chr12:32831139-32831214
  hypo
tttttttcatgaacaccgccccccgctgctccgacccctgcttttttatttatttatttatttatttggtagaga

SEQ ID NO: 26173 - DNA, 301 bp, Homo sapiens
  chr12:32831273-32831574
  hypo
cttctgcttcctaaagtgctgggattacaccgcgctcggtcctgaacacacattttgtttgtttgtttgtttgtttacaaaacccctggagaacccgcgtattctaacctgggctggtttttgtatttttgcaaaataacaccccacacattctcgtatcagcgtgcagatttttttgcacccagtttggttgtttgcggccataagcttttctttaagcctttccaacccgtccttctagagaaagtgtcttcataaggaagtcacactgctcacgcctgtaatcccaacactttgggag

SEQ ID NO: 26174 - DNA, 194 bp, Homo sapiens
  chr12:32864282-32864476
  hypo
tttatggctttaactacgtaaggctctgtatattgacggcattcaaatatctccagacttgtatatctagttgctattcgacatatacacttaaatgtctaatagacatttcaaactctaataccgaattcctgacctgttcctcaactagatttggtatttctatagtcttcccccatcgcaataaatggcaa

SEQ ID NO: 26175 - DNA, 683 bp, Homo sapiens; identical to SEQ ID NO: 8672
  chr12:33049652-33050335
  hypo

SEQ ID NO: 26176 - DNA, 30 bp, Homo sapiens
  chr12:33205799-33205829
  hypo
caggtgcaggtgggcgccaggccctctgtg

SEQ ID NO: 26177 - DNA, 270 bp, Homo sapiens; identical to SEQ ID NO: 8673
  chr12:33591742-33592012
  hypo

SEQ ID NO: 26178 - DNA, 196 bp, Homo sapiens; identical to SEQ ID NO: 8674
  chr12:33592057-33592253
  hypo

SEQ ID NO: 26179 - DNA, 563 bp, Homo sapiens; identical to SEQ ID NO: 8675
  chr12:33592284-33592847
  hypo

SEQ ID NO: 26180 - DNA, 101 bp, Homo sapiens; identical to SEQ ID NO: 8676
  chr12:33592932-33593033
  hypo

SEQ ID NO: 26181 - DNA, 683 bp, Homo sapiens
  chr12:34319318-34320001
  hypo
tccagatccatgaacacagtgcggggcacgtacctgccacctgagtgggaccggagagcattagcgaggggagggtcgccgttcccaggagagtggttggggaaggactggggtctcaccgctggcctcattgtagtacacgttgatacgctccagctgcaggtcactgatcccgtggtaggtgcctgcggagtcgatggcatgttcatcagagttcacctcccagaactgcaagagattggaggggccagacgagccagggctgagtcaggaggccaggacgccggaggcgccccagtccctctcccacccccacccgcacccccatccctaggccgcagtgtccctgaggtccacactggccgtctcgccagccggccagttccaccgcgtccccagcagggagcccaggggccgcaaacgcaggggcgccacccctgccactgccactaccaacatcttctctggccacccggcaggcccgagctgggccctcagagccccggctgccaaccttggcgccgatctggttcccgcactgcccagtctgcgtgaacgctatctccctcatggccaaggcaggattagggcggcaggagaaacgcgaggaggagcagacgcgcagtgacccagcccgccctccgccaacgctgaaatagccccacgcccacctccctcaacct

SEQ ID NO: 26182 - DNA, 394 bp, Homo sapiens
  chr12:34358286-34358680
  hypo
gagactggggaaggactggagcgtcggaggaaagggggcctcccggaaagctcaaagtctgagcaggggatggaaaactctggcgtccccactcaacagcagggcggtgctgcggcgatccagtgcacgcccttgccgccggcgatggcgggaggctcttggaggccggaaagcgcagcgcagcggcccacagtgctccggcgtggagggggagagcagcccggcagggggcgagtggctgaggggtccctgatccgagccccgcggcctccgagtggggatgaagcctggagtcaggcaggcgtggctgggccaggctcttgtgtcatccaggcatcactgccggtgtctatggccataccaccctgaaggcgcctgatcttctctggtctgt

SEQ ID NO: 26183 - DNA, 726 bp, Homo sapiens
  chr12:38548365-38549091
  hypo
cagtgggccaggatcctcccacggatgacagtgttttcccggcagcccctgagccaggccctggagggtcgtggagtctctggcttgcaccaagggtgcgtgtgaagcccacgggggacaccccaaagcggcaagaaggcctccggggatagggaacaggacgccaggcttgaaacaggacgttgaggcagcacagggaaaaaagcggaaggccggagtcccccccacggatgacagtgccttccaggcagccactgcgccatgcccggggggcttgtgcagtccctgactcccacccaggctgcgtgtcgcacccacaggggtcaccctaaagcggcaagaaggccccagggggaagggaacaggacgccaggcttgaaaggggactttgaggtagtccggggaaaaacttcccacggaggacagtgttttccccgtagcccctgcgccagacccgggagagccatgcagcccatggctttcacccagggggcgtatcgctcccatgagggacaccccaaagcagcaagaaggcctccgggggaagggaacatgacgccacgattgaaatgtgaagttgaggcagcacggggaaaaaagcagcaggccagggtagtcccacggatgacagtgccttcccggcagccgctgcgcctgtcctgggagggtcgtggattctctggcttgcacccagggtggcatcgcgcccactggaggcacccaaag

SEQ ID NO: 26184 - DNA, 203 bp, Homo sapiens
  chr12:38551134-38551337
  hypo
gggaagggagtagaacgccaggcgtgaaaggtgacgttgaggcagcacgagggaaaaagcagcaggcagcgatcgtcacacggacgacagtgccttcccggcagcccctgcgccagactcggggttgtcgtggagttcctgacttgaacccagggtgcgtgtcgcgcccacggggggacaccccaaagcggcaagaatgcccc

SEQ ID NO: 26185 - DNA, 677 bp, Homo sapiens
  chr12:38553667-38554344
  hypo
ccagggtgagtgtcttgcccacggcgggcaccacaaagcagcaagaaggttcccgggggaaagggacagcacgtcagtcttgaagggggaagttgaggcagccccggggaaaaaaagcggggatgctggggtcctctcacggacgacactgccttcccagcagcctctgcagtgggcccgggagcgtcctggagtccctgtcttgcaccccgggtgcgtgtctcacccacggggagcaccacaaagcggcaagaaggccactgggggaagggtacaggacgccagggttgaaggggatagtggagacagtccaaggaaaaaagtggcgggatggtgtcgtcccaaggatggccacccctgcgccgggccagggatggtcgcggagtccctggcttgcacccaggttgtgtgtctcgcccacagggggcaccccaaagcagcacgaaggcctccaggggaagggaagaggacgccaggcttggaaggtgacgttgaggcagcagggggtaaaaagtggcgggccgggccctcccacggatgacagtgccttcccggaagccgctgcgcagggcccggcgtgtttgtggagtctctggcttgcacccagaatcgtgcggcgcccacgacgggcaccccaaagcggcaagatatcccccgctggaagggaacaggatgcc

SEQ ID NO: 26186 - DNA, 205 bp, Homo sapiens
  chr12:38595390-38595595
  hypo
agaccgggcagtgcgggaaccagatcggcgccaaggttggcagccagggctctgagggcccagctcgggcctgccgggtggccagggaagatgttggtagcggcagtggtggggctggcgcccctgcgttgcggcccctgggctccctgccagggacgcagtggaactggccagctggcgaggcggccagggtggaccccaggga

SEQ ID NO: 26187 - DNA, 20 bp, Homo sapiens
  chr12:40341755-40341775
  hypo
ctggccgagaatttcttgaa

SEQ ID NO: 26188 - DNA, 708 bp, Homo sapiens; identical to SEQ ID NO: 8682
  chr12:40618340-40619048
  hypo

SEQ ID NO: 26189 - DNA, 33 bp, Homo sapiens; identical to SEQ ID NO: 8685
  chr12:41582173-41582206
  hypo

SEQ ID NO: 26190 - DNA, 165 bp, Homo sapiens; identical to SEQ ID NO: 8686
  chr12:41582398-41582563
  hypo

SEQ ID NO: 26191 - DNA, 164 bp, Homo sapiens; identical to SEQ ID NO: 8687
  chr12:41582780-41582944
  hypo

SEQ ID NO: 26192 - DNA, 30 bp, Homo sapiens; identical to SEQ ID NO: 8688
  chr12:41699787-41699817
  hypo

SEQ ID NO: 26193 - DNA, 31 bp, Homo sapiens
  chr12:42633450-42633481
  hypo
tttctgtaattctcaacgttttcatattctg

SEQ ID NO: 26194 - DNA, 30 bp, Homo sapiens
  chr12:42842694-42842724
  hypo
gaaatcttgcagcaccgtgctttgtcccac

SEQ ID NO: 26195 - DNA, 90 bp, Homo sapiens
  chr12:42857518-42857608
  hypo
cctcaaaaaaaaaaagagcttgtaaagtgtgtgggccaattttggtatcttagaatacatacagaataattcaagcgtacaatatctttc

SEQ ID NO: 26196 - DNA, 569 bp, Homo sapiens; identical to SEQ ID NO: 8692
  chr12:45444112-45444681
  hypo

SEQ ID NO: 26197 - DNA, 692 bp, Homo sapiens; identical to SEQ ID NO: 8693
  chr12:45444714-45445406
  hypo

SEQ ID NO: 26198 - DNA, 1085 bp, Homo sapiens
  chr12:47628723-47629808
  hypo
ccaacctgcactgggcgctccgcccagaggtgagtccctcccagcccttctctccttctgtcctagccatccgcagagccatcctgtgcaaaggaaggagctaggctgtgcgccctgggcgtcatgatccttctgcgggcctccgaagtgcggcagctgcttcacaataagttcgtggtcatcctgggggactctgtgcatagggcagtatacaaggacctggtgcttctgctgcagaaggaccgcctgctcactcccgggcagcttagagcaaggggggagctgaacttcgaacaagatgagctggtggacggaggccagcggggccacatgcacaacggccttaactaccgtgaggtccgcgagttccgctccgaccaccatctggtacgtttttacttcctcacccgcgtgtactccgattacctccagaccatcttgaaagagctgcagtcgggcgagcacgcccccgacctggtcatcatgaattcctgcctctgggacatctccaggtatggtccgaactcctggagaagctacctggagaacctggagaacctgttccagtgcctgggccaggtgctgcccgagtcttgcctcctggtgtggaacacggccatgcctgtgggcgaggaagtcaccgggggttttcttccgcccaagctccggcggcagaaggccaccttcctgaaaaacgaagtggtcaaagccaacttccacagcgccaccgaggcacgtaaacataacttcgatgtactggacttgcatttccacttccgccacgcgagggagaacctgcactgggacggggtgcactggaatggacgtgtgcaccgctgcctctcccagctgctgctggcccacgtggccgacgcctggggtgtggagctgccccaccgccaccccgtgggcgagtggatcaagaagaaaaaacctggcccgagagtcgaagggccgccccaggccaacagaaatcacccggccttacctctgtccccacccttaccttcccccacataccgccccctgcttgggttcccaccccagcgcttgccgctgctcccgctcctgtccccacagcctcc

SEQ ID NO: 26199 - DNA, 30 bp, Homo sapiens
  chr12:47671343-47671373
  hypo
caattctgggagtgcgagtgtgggatcttc

SEQ ID NO: 26200 - DNA, 30 bp, Homo sapiens
  chr12:48174654-48174684
  hypo
ctgttttcttagcacgcagtgaggaatctt

SEQ ID NO: 26201 - DNA, 895 bp, Homo sapiens; identical to SEQ ID NO: 8704
  chr12:48397850-48398745
  hypo

SEQ ID NO: 26202 - DNA, 969 bp, Homo sapiens; identical to SEQ ID NO: 8706
  chr12:48576841-48577810
  hypo

SEQ ID NO: 26203 - DNA, 31 bp, Homo sapiens
  chr12:48590826-48590857
  hypo
agaaaagaaaactgaccgcaaaatgggctct

SEQ ID NO: 26204 - DNA, 30 bp, Homo sapiens
  chr12:48722975-48723005
  hypo
aaagggcccctccccgggtgagatatgcca

SEQ ID NO: 26205 - DNA, 31 bp, Homo sapiens
  chr12:48745137-48745168
  hypo
taccctctagttttcacgataggataaaggg

SEQ ID NO: 26206 - DNA, 139 bp, Homo sapiens
  chr12:49065583-49065722
  hypo
agagcttcatgttccactttgcgattatgtaagtatcggcgcttcttctccttgagcagatgctgaagtcgtttaaactgatcaatatacaacgactgcaaacgaattagcttttcacgcataatcagggccacttctt

SEQ ID NO: 26207 - DNA, 336 bp, Homo sapiens; identical to SEQ ID NO: 8711
  chr12:49182446-49182782
  hypo

SEQ ID NO: 26208 - DNA, 135 bp, Homo sapiens; identical to SEQ ID NO: 8712
  chr12:49183195-49183330
  hypo

SEQ ID NO: 26209 - DNA, 60 bp, Homo sapiens; identical to SEQ ID NO: 8714
  chr12:49351295-49351355
  hypo

SEQ ID NO: 26210 - DNA, 233 bp, Homo sapiens; identical to SEQ ID NO: 8716
  chr12:49363882-49364115
  hypo

SEQ ID NO: 26211 - DNA, 153 bp, Homo sapiens; identical to SEQ ID NO: 8718
  chr12:49371613-49371766
  hypo

SEQ ID NO: 26212 - DNA, 204 bp, Homo sapiens; identical to SEQ ID NO: 8719
  chr12:49374822-49375026
  hypo

SEQ ID NO: 26213 - DNA, 455 bp, Homo sapiens; identical to SEQ ID NO: 8720
  chr12:49375115-49375570
  hypo

SEQ ID NO: 26214 - DNA, 177 bp, Homo sapiens
  chr12:49416382-49416559
  hypo
tagattttctcccgccggttggccacctcgttccgaatgatggtgccaatgtactcgataaccattgtgtgcttttctaggtccttggctgcatagagccccaggccctggatacgggagcgagccaggtacacgttgttcttccattcggtgcgcagccgccggtactgagatgac

SEQ ID NO: 26215 - DNA, 251 bp, Homo sapiens
  chr12:49422760-49423011
  hypo
ttgtgtaacacttggccgcctctcccccagcttcggacaacccaggtgaactgggcctggcccacatccagagtagcacatacctgggatgctggcccgaggaatgagggggatgacaggggagagggcccggtcctcttgctcccaccggcctgagcccagatgagggaaacgaggggcctcctcccccaagatgctctcaggggatgaagctggcacaatgctgtcaggagaatcgctatcctcatcac

SEQ ID NO: 26216 - DNA, 49 bp, Homo sapiens
  chr12:49436024-49436073
  hypo
ttgtgggggtggagggcgtggtgccacctgagcccgtccaggggctgtc

SEQ ID NO: 26217 - DNA, 30 bp, Homo sapiens
  chr12:49444142-49444172
  hypo
ctcagtctccatctcgtgcagctcagcctc

SEQ ID NO: 26218 - DNA, 155 bp, Homo sapiens
  chr12:49620905-49621060
  hypo
agggcagcggggcacggggtttgcttcagatccgtgggtccttgctgagctctacttcattaagcgatcaatatttcctggctcctgagtggaactgcagttacatttccctttggaaaagctggtctgtttttaccaataggcctgcagaaaaa

SEQ ID NO: 26219 - DNA, 302 bp, Homo sapiens; identical to SEQ ID NO: 8732
  chr12:49761540-49761842
  hypo

SEQ ID NO: 26220 - DNA, 30 bp, Homo sapiens
  chr12:49934891-49934921
  hypo
agctgatcctgtaccggaagagcggtgagg

SEQ ID NO: 26221 - DNA, 96 bp, Homo sapiens
  chr12:49935550-49935646
  hypo
ggtgcatgtaggtgctgtggtcggggtattgggtgccgcaggcccgggcggggccttggcacccagtctgagtacgggggtcccccatgcacctgc

SEQ ID NO: 26222 - DNA, 103 bp, Homo sapiens
  chr12:49989770-49989873
  hypo
aaataaataaataaaaataagactagagcagcgaaatgtgacgatcacttagagaaacaggccattaggaatccattctcactgtgttcgctctagacaaaac

SEQ ID NO: 26223 - DNA, 65 bp, Homo sapiens
  chr12:50185863-50185928
  hypo
gctcctctccacctttcggcccagcctcagaggcactgagctctgaggggcgtctgtgcacctga

SEQ ID NO: 26224 - DNA, 31 bp, Homo sapiens
  chr12:50290502-50290533
  hypo
cacttcctcttaggaccgaggtctgggtctc

SEQ ID NO: 26225 - DNA, 98 bp, Homo sapiens
  chr12:50322850-50322948
  hypo
agccaccgtacccagctgagtttccaaatatttctgatttcaccagcgggggaagactggcaggctcctatatcctcgaagtatcctgccatgagatg

SEQ ID NO: 26226 - DNA, 143 bp, Homo sapiens
  chr12:50366349-50366492
  hypo
ggaacttactttctgggtttacgggcacggtgtggtgtcagcccatttggaagcaaagcctagatatggagggggccagacgaacaggacctgggaatgcacaggaccccctgaagcaggccggggatctgagtgatcttgct

SEQ ID NO: 26227 - DNA, 234 bp, Homo sapiens
  chr12:50400183-50400417
  hypo
catcactgttctagcacggaaaacaatacacaccagcttttcgcagtcagcctcagctctctgtctccgtttgatctctacatccacctgattacgtgcatgcttcagcttaacatccagagcacttcgctcagtctctgctttcatcaaaagatccttgtatttccccagctcatggtcagtcctctgccactttttacggaaatcctcaaagtccttcgccaactggataaa

SEQ ID NO: 26228 - DNA, 27 bp, Homo sapiens
  chr12:50432783-50432810
  hypo
tgagacagagtcttgctctgtcgccca

SEQ ID NO: 26229 - DNA, 31 bp, Homo sapiens
  chr12:50470988-50471019
  hypo
tcgccaggtcttcacacgctatggaaagtgc

SEQ ID NO: 26230 - DNA, 30 bp, Homo sapiens
  chr12:50476154-50476184
  hypo
accgggctggttagcgtccagctcagggag

SEQ ID NO: 26231 - DNA, 47 bp, Homo sapiens
  chr12:50484388-50484435
  hypo
ggaggcagtgctgtgccggagctgccttgtgccgatttgcacaagcc

SEQ ID NO: 26232 - DNA, 23 bp, Homo sapiens
  chr12:50558873-50558896
  hypo
ctccaggatgactaactacaacg

SEQ ID NO: 26233 - DNA, 22 bp, Homo sapiens
  chr12:50559195-50559217
  hypo
cgtctcaaaaaaaaaagaaaaa

SEQ ID NO: 26234 - DNA, 19 bp, Homo sapiens
  chr12:50609261-50609280
  hypo
tatttttctttgaggcagt

SEQ ID NO: 26235 - DNA, 30 bp, Homo sapiens
  chr12:50790623-50790653
  hypo
ctagatgtgttggccgggtgcagtggctca

SEQ ID NO: 26236 - DNA, 23 bp, Homo sapiens
  chr12:51041858-51041881
  hypo
agcctaggcgacagatcgatgct

SEQ ID NO: 26237 - DNA, 137 bp, Homo sapiens
  chr12:51116976-51117113
  hypo
tcttgcaggcattgagttaatcgccgccttctatggctgcctgtatgcgggctgtatacctgtgaccgtcagacctccacatgctcagaacctcacggccacgctgcccactgtccgaatgattgttgatgtaagta

SEQ ID NO: 26238 - DNA, 41 bp, Homo sapiens
  chr12:51148429-51148470
  hypo
aaaaaaagaaagtctattccgtgcctgctggatttttttca

SEQ ID NO: 26239 - DNA, 30 bp, Homo sapiens
  chr12:51346491-51346521
  hypo
ccgccaggtgagcccggcgggctctcatcg

SEQ ID NO: 26240 - DNA, 30 bp, Homo sapiens
  chr12:51346932-51346962
  hypo
tggaaattgcacatcgtgtcctggccttac

SEQ ID NO: 26241 - DNA, 30 bp, Homo sapiens
  chr12:51376078-51376108
  hypo
gtcagcctgcatcagaatcaccgaagctgc

SEQ ID NO: 26242 - DNA, 537 bp, Homo sapiens
  chr12:51421109-51421646
  hypo
aaaccctgtctcaaaaaaaaaggatagccacctggaaggaacatttcctcgcgcccccagagccacatcatagtatctgctgccccaccaagagcaccccacacctgggaggaaccgagaaacatcagctagtgcagccagtttgaccgccttaggtgtcctcccaagcctccgtagtgaattgttttcctcctcgcccagctgactcgattctccccagacttcatcctacctacccaaaagcaatcccactctatcgccagtttcagcctcacaccgtatcttttgctctgaagatgagactgccaaactggtgaagagggaataaatggcctaacaaattaccgtaattttctgcaatgtcgtttacagccaccaaaaacattagatcctcccgccaccctcactccccgacccctcgcactgcttacagcattaaaggtaattgagcttctttattcacgtaaaaacagctaggagaaaatttcattagtaagagagaccaagaaatgaggaaaggagcgtgaactgcaaaga

SEQ ID NO: 26243 - DNA, 152 bp, Homo sapiens
  chr12:51479054-51479206
  hypo
agcagcctcaaactcccgggcacaaatgcctaaccatatttctaaaatggtgcttctccttagtttctatccctgtgccttatatttcttcttagcatccacgtatttgtttttgtcttgtctcacttgactaaattcggtgagagcaagga

SEQ ID NO: 26244 - DNA, 35 bp, Homo sapiens
  chr12:51565446-51565481
  hypo
caccgcacccggccgaaaggagatttttcatctgt

SEQ ID NO: 26245 - DNA, 30 bp, Homo sapiens
  chr12:51756227-51756257
  hypo
tacatgaagagcctcggcaagccatgcatg

SEQ ID NO: 26246 - DNA, 233 bp, Homo sapiens; identical to SEQ ID NO: 8748
  chr12:51818418-51818651
  hypo

SEQ ID NO: 26247 - DNA, 30 bp, Homo sapiens
  chr12:52231194-52231224
  hypo
ggcgtggggcctgccggtaccccctgtgac

SEQ ID NO: 26248 - DNA, 30 bp, Homo sapiens
  chr12:52283209-52283239
  hypo
aacgccgggaccagcgggggctcacggcgt

SEQ ID NO: 26249 - DNA, 30 bp, Homo sapiens; identical to SEQ ID NO: 8750
  chr12:52294236-52294266
  hypo

SEQ ID NO: 26250 - DNA, 634 bp, Homo sapiens; identical to SEQ ID NO: 8753
  chr12:52400891-52401525
  hypo

SEQ ID NO: 26251 - DNA, 31 bp, Homo sapiens
  chr12:52539825-52539856
  hypo
agacgatagaggtgtgcggtgctcctgggct

SEQ ID NO: 26252 - DNA, 223 bp, Homo sapiens
  chr12:52913871-52914094
  hypo
ccccccaggttgtagaggctccggctgccatagccacccactccacaagcacccgcaaggctgaccctgccgaagccaccaccaccgccacccccggaccgggacacggaggtgaagctggtgcgggagacagacggggtgatggcagaggcggtgctgaagctacgactgcccccgctccggaaggacacacttgactggcgagacatggtggcttgttcct

SEQ ID NO: 26253 - DNA, 186 bp, Homo sapiens
  chr12:53007441-53007627
  hypo
acttcactatggggagttttgcggcctcaccttggtctggtacagggcctcggcctcggccttgctcttccgggcgatctcctcatactgggcacggacctcagcaatgatgctgtccaggtccaggttccggttgttgtccatggacaggatgatggacgtgtcgctgatgtgggactggatctg

SEQ ID NO: 26254 - DNA, 106 bp, Homo sapiens
  chr12:53040688-53040794
  hypo
agggcatgctccccacgctgctcggcatctgcgatggcatcttgcacattcttacactatgacagaaggacagagaatggattctgcctgacggaggcggacagag

SEQ ID NO: 26255 - DNA, 269 bp, Homo sapiens
  chr12:53045571-53045840
  hypo
caaagccgcctccaccgaaaccaccaccactgaagccgctgccacctccaaagctgctgccgcctccaaaaccacctcctctgccaccaaatccaccagcggcgccaaagccaccacctcctccagccacactaatggagatgctcttggtccctccaaggccaacaagactccgactgccaaagccgcctccaccgaagcccccgccaccaccaccatggcggctcaagcaggagaagctggaagttgatctccggcttccaccagac

SEQ ID NO: 26256 - DNA, 31 bp, Homo sapiens
  chr12:53183639-53183670
  hypo
aagagcctgaaattctcgtgactgggcttgg

SEQ ID NO: 26257 - DNA, 176 bp, Homo sapiens
  chr12:53189554-53189730
  hypo
cctgcaaaggcacagctgctccgccctcccccaaagcctccagcccgggagccgccagctgccacgctgatggagatgctcttgttgccgcccaggttgtagaggctgcgactgccaaagccacctgctccgctccggaagccataggcccctccgccagctcccccagagtgggc

SEQ ID NO: 26258 - DNA, 102 bp, Homo sapiens
  chr12:53241430-53241532
  hypo
tagctggggcatgtaggacaccggtctccctgcctttcctccaaggttctccagatctgcttggggactgcgggacacctcgtttacctgtagcaggtgggc

SEQ ID NO: 26259 - DNA, 30 bp, Homo sapiens
  chr12:53293534-53293564
  hypo
tcccacccccaacccggcccatacctggcc

SEQ ID NO: 26260 - DNA, 30 bp, Homo sapiens
  chr12:53451966-53451996
  hypo
gacagattggagagcgagtagggagatcac

SEQ ID NO: 26261 - DNA, 56 bp, Homo sapiens
  chr12:53467252-53467308
  hypo
cacctgcagtggggggaaagacggagctgccacccggcctgcttttccatagctca

SEQ ID NO: 26262 - DNA, 30 bp, Homo sapiens
  chr12:53517546-53517576
  hypo
ggcccggcatggaacgtgctgatgtggacc

SEQ ID NO: 26263 - DNA, 18 bp, Homo sapiens
  chr12:53572935-53572953
  hypo
gcaaaaagataactattt

SEQ ID NO: 26264 - DNA, 30 bp, Homo sapiens
  chr12:53646914-53646944
  hypo
tggattggctgggtcgcaagaattcttgtg

SEQ ID NO: 26265 - DNA, 91 bp, Homo sapiens
  chr12:53663004-53663095
  hypo
tcccctctacctggaacgaattctctttgtcttactgcggaatgctgctgcacaaggaagcccagaggccacactccgccttgctcagccc

SEQ ID NO: 26266 - DNA, 28 bp, Homo sapiens
  chr12:53672063-53672091
  hypo
gtctgggcaacacggcgaaaccccgtct

SEQ ID NO: 26267 - DNA, 308 bp, Homo sapiens
  chr12:53685892-53686200
  hypo
tctggggatgactggcgactggggaagacgtcaacaaagaagggcagagaaacctgagaagataggagagggtcctaggaatggctcagacatggaaaggggctgagattgttagagcttgggcctcttggtgagacaagcatcctaatcgccagtgtctcctcctcagtatggggcctcgccagtgctgagtcaaggggtggatccacgaagtaccttctatgtcctgaaccctcacaataacctgtcaagcacagaggagcaatttcgagccaatttcagcaggtcaggggcgcgaagacaagaag

SEQ ID NO: 26268 - DNA, 30 bp, Homo sapiens
  chr12:53686638-53686668
  hypo
ctgcggctgagctgtcgggcagtggccctg

SEQ ID NO: 26269 - DNA, 25 bp, Homo sapiens
  chr12:53691195-53691220
  hypo
gagcgagactctgtctcagaaagca

SEQ ID NO: 26270 - DNA, 238 bp, Homo sapiens; identical to SEQ ID NO: 8767
  chr12:53719554-53719792
  hypo

SEQ ID NO: 26271 - DNA, 30 bp, Homo sapiens
  chr12:53746265-53746295
  hypo
cgtgagccaccgcgccgggacagctttttg

SEQ ID NO: 26272 - DNA, 31 bp, Homo sapiens
  chr12:53761921-53761952
  hypo
ggagttgaagaccagccgcagggcaacagag

SEQ ID NO: 26273 - DNA, 31 bp, Homo sapiens; identical to SEQ ID NO: 8768
  chr12:53765076-53765107
  hypo

SEQ ID NO: 26274 - DNA, 30 bp, Homo sapiens
  chr12:53818167-53818197
  hypo
tccccagagctatccgctgcctctacagcc

SEQ ID NO: 26275 - DNA, 205 bp, Homo sapiens
  chr12:53899812-53900017
  hypo
gaactgtccacccagccggccactgtgtgtcatggctctgcaaccaccagggaggcagcccgtggtgaggctgcccgccgtgccctgcagtacctcaagatcatggcaggcagcaagtgaagccccagctggactcatggatgtgcaccctttgctccctgctctttctgcctctgggctcatgtatctgcgcagctctggtacc

SEQ ID NO: 26276 - DNA, 29 bp, Homo sapiens
  chr12:53966366-53966395
  hypo
gtagcctccccttacccgtggtttcactt

SEQ ID NO: 26277 - DNA, 116 bp, Homo sapiens
  chr12:53994680-53994796
  hypo
aacagccactttgattcacaacgagacattcacaataaagtatattgtaaacgtacctgtccacagcccggggcattgcacacaaacggtctgtcgtctcccatatttcatatagc

SEQ ID NO: 26278 - DNA, 52 bp, Homo sapiens; identical to SEQ ID NO: 8784
  chr12:54333550-54333602
  hypo

SEQ ID NO: 26279 - DNA, 370 bp, Homo sapiens; identical to SEQ ID NO: 8800
  chr12:54393353-54393723
  hypo

SEQ ID NO: 26280 - DNA, 620 bp, Homo sapiens; identical to SEQ ID NO: 8801
  chr12:54393798-54394418
  hypo

SEQ ID NO: 26281 - DNA, 89 bp, Homo sapiens; identical to SEQ ID NO: 8802
  chr12:54394466-54394555
  hypo

SEQ ID NO: 26282 - DNA, 82 bp, Homo sapiens; identical to SEQ ID NO: 8803
  chr12:54398703-54398785
  hypo

SEQ ID NO: 26283 - DNA, 24 bp, Homo sapiens
  chr12:54398888-54398912
  hypo
cgcgggcttggaggaccctgagga

SEQ ID NO: 26284 - DNA, 221 bp, Homo sapiens; identical to SEQ ID NO: 8805
  chr12:54399453-54399674
  hypo

SEQ ID NO: 26285 - DNA, 45 bp, Homo sapiens; identical to SEQ ID NO: 8815
  chr12:54427061-54427106
  hypo

SEQ ID NO: 26286 - DNA, 286 bp, Homo sapiens; identical to SEQ ID NO: 8816
  chr12:54427293-54427579
  hypo

SEQ ID NO: 26287 - DNA, 140 bp, Homo sapiens
  chr12:54651325-54651465
  hypo
attccacttgtcccttaaccacgcgcctgtctagcaccttctccacaacatactcctcctcatcctctgaagaagaactgtcagctgtccgcttggttttctttcccatgtcgcacaccgttccacctgaaagactaagg

SEQ ID NO: 26288 - DNA, 42 bp, Homo sapiens; identical to SEQ ID NO: 8824
  chr12:54686413-54686455
  hypo

SEQ ID NO: 26289 - DNA, 34 bp, Homo sapiens
  chr12:54720205-54720239
  hypo
gagccactgcgccgggccaggaattcttattgta

SEQ ID NO: 26290 - DNA, 31 bp, Homo sapiens
  chr12:54813173-54813204
  hypo
gggcgtggggggggggcgcacccctccaacc

SEQ ID NO: 26291 - DNA, 40 bp, Homo sapiens
  chr12:55481151-55481191
  hypo
acaggatctgttcctattcggccatcttggctcctccccc

SEQ ID NO: 26292 - DNA, 270 bp, Homo sapiens
  chr12:56142455-56142725
  hypo
gcccagctgtgggtgtacctacggcctgtaccccgcccagccacagtctacctgcagatcttgcgactaaaacccctaactggggaagggaccgcagggggagggggcggaggccggcgtcacatccgtatccgctcactgaagattgagctgcactcacgctcaggccattggcagagcatcgacttcaagcaagtgctacacagctggttccgccagccacagagcaactggggcatcgagatcaacgcctttgatcccagtggcaca

SEQ ID NO: 26293 - DNA, 89 bp, Homo sapiens
  chr12:56182546-56182635
  hypo
gcactccagcctgggcaacagaatgaccttgtctcaaaggaaaaaaaagaaagaaagaaaagaaatgtagaccacgctctagcagcctg

SEQ ID NO: 26294 - DNA, 152 bp, Homo sapiens
  chr12:56183313-56183465
  hypo
caaagagaaactatcacggaagcacctttttcagaagacaacctataactactacccaactcgattctcttccctcctctttcttggaaaccttggtacatggacttgctactattgttaagaattatttagggccaggcgcggtggctcac

SEQ ID NO: 26295 - DNA, 32 bp, Homo sapiens
  chr12:56183704-56183736
  hypo
gcaaaagaatgaaactccgtctcaaaaaaaaa

SEQ ID NO: 26296 - DNA, 30 bp, Homo sapiens
  chr12:56350370-56350400
  hypo
aaggatcaggatctcggaatctgggaagga

SEQ ID NO: 26297 - DNA, 30 bp, Homo sapiens
  chr12:56359143-56359173
  hypo
tcctcagagcagcacgggacattccagacc

SEQ ID NO: 26298 - DNA, 30 bp, Homo sapiens
  chr12:56381232-56381262
  hypo
tcaccacgccgggccggtaaggcttttgaa

SEQ ID NO: 26299 - DNA, 152 bp, Homo sapiens; identical to SEQ ID NO: 8830
  chr12:56390555-56390707
  hypo

SEQ ID NO: 26300 - DNA, 88 bp, Homo sapiens; identical to SEQ ID NO: 8831
  chr12:56472731-56472819
  hypo

SEQ ID NO: 26301 - DNA, 441 bp, Homo sapiens
  chr12:56558006-56558447
  hypo
ctcttccccacctgcccgctcaccctccctccaggtggacccctctccctcacccttctcccctcttggccccttctcacctggcagtgggctggcactgggcaggaggttgccctgaacagctgccacaatggcagggctttgggctgcggcggatccgagccccggcccgagaggcaaggaagatggcatggtggtggtcgccggcaggttaggatgtagagggttcgccatggacacaggcaggttaggtggggggagagtgcccggggcgaacgggagatggtggtgatgcccatgcaggttaggaggagcggggaggttaatactgatggagtcagctagactaccaaatgggatgatggatggagcaggaggaggaggaggaggcggcatgccaaaaggcaaacccaaaggagcattacccgccacgcctgggtg

SEQ ID NO: 26302 - DNA, 24 bp, Homo sapiens
  chr12:56558811-56558835
  hypo
cacccatttcggcctcccaaagaa

SEQ ID NO: 26303 - DNA, 149 bp, Homo sapiens
  chr12:56601394-56601543
  hypo
acatgaaatcactccacgtcctgagtgacactcactctaggatctcgttgtattcaattgtctcctccaggttctgaaggttggggttgacactgcggattgcacgcatgtatgcctttagcagctggatgtctcgcttctgttgtggg

SEQ ID NO: 26304 - DNA, 208 bp, Homo sapiens
  chr12:56604086-56604294
  hypo
ccctgttcacaggtcacaggccgcttcgggttgtgctcacagtcgctgaggtgagacatgaggttgtcaagccggacaacggcactacagccgaacacagcgttgtcacaggcaatctgcagctttgacaacatgttccgcatgatccgaggtactgggcgcagatgggcgaccgtcacaacactacggtccactggacatgtctgtt

SEQ ID NO: 26305 - DNA, 91 bp, Homo sapiens
  chr12:56610572-56610663
  hypo
taaggaagcacacacacggggtccagtagatttgaacatagctgggagggggaaagaaaaggacaagagaggccgggcgtggtggctcacg

SEQ ID NO: 26306 - DNA, 30 bp, Homo sapiens
  chr12:56610902-56610932
  hypo
gacacagcaagactccgtcttaaaaaaaaa

SEQ ID NO: 26307 - DNA, 31 bp, Homo sapiens
  chr12:56649705-56649736
  hypo
ctgccacagcttgtcccgggcattcacatct

SEQ ID NO: 26308 - DNA, 27 bp, Homo sapiens
  chr12:56882540-56882567
  hypo
ccgaaggccaaaccagcgcccagtaac

SEQ ID NO: 26309 - DNA, 3 bp, Homo sapiens
  chr12:56882583-56882586
  hypo
cgc

SEQ ID NO: 26310 - DNA, 31 bp, Homo sapiens; identical to SEQ ID NO: 8838
  chr12:56958137-56958168
  hypo

SEQ ID NO: 26311 - DNA, 31 bp, Homo sapiens
  chr12:56993680-56993711
  hypo
gccagtgaccccaccccgcccctgctggctg

SEQ ID NO: 26312 - DNA, 17 bp, Homo sapiens
  chr12:57063685-57063702
  hypo
cccggccaaaagtttat

SEQ ID NO: 26313 - DNA, 9 bp, Homo sapiens
  chr12:57120638-57120647
  hypo
ctaccgccc

SEQ ID NO: 26314 - DNA, 33 bp, Homo sapiens
  chr12:57446183-57446216
  hypo
gagcaaaactccgtctcaaaaaaaaaaaaaaaa

SEQ ID NO: 26315 - DNA, 23 bp, Homo sapiens
  chr12:57462656-57462679
  hypo
tttctttacgtctgaacaaaatg

SEQ ID NO: 26316 - DNA, 30 bp, Homo sapiens
  chr12:57489956-57489986
  hypo
tgggtcagaatgggcggagaagccttccat

SEQ ID NO: 26317 - DNA, 30 bp, Homo sapiens
  chr12:57540572-57540602
  hypo
tcttaacgagtgggcgactcagggaacccc

SEQ ID NO: 26318 - DNA, 30 bp, Homo sapiens
  chr12:57559886-57559916
  hypo
gaccgattcaagtgcgagaacaaccggtgc

SEQ ID NO: 26319 - DNA, 46 bp, Homo sapiens
  chr12:57571126-57571172
  hypo
tcccaccctctacctacgatcccaccacagtcgctccctgagggcc

SEQ ID NO: 26320 - DNA, 30 bp, Homo sapiens
  chr12:57584956-57584986
  hypo
cctcatcagctagacgagggagatagcagg

SEQ ID NO: 26321 - DNA, 30 bp, Homo sapiens
  chr12:57587758-57587788
  hypo
gtggattgtgaggacgcctcagatgagatg

SEQ ID NO: 26322 - DNA, 30 bp, Homo sapiens
  chr12:57595577-57595607
  hypo
gtgtggacgagttccgctgcaaggattcgg

SEQ ID NO: 26323 - DNA, 31 bp, Homo sapiens
  chr12:57605266-57605297
  hypo
cagctgcacggatggccgggtggcccccagc

SEQ ID NO: 26324 - DNA, 30 bp, Homo sapiens
  chr12:57863251-57863281
  hypo
cagtgaccactccccggcagggagtgcagc

SEQ ID NO: 26325 - DNA, 156 bp, Homo sapiens
  chr12:57881106-57881262
  hypo
cttccactttgtcactaattccgcacatggtaactccgaactctaaaactctgaccgttaagagcttgcatcgagagccactgcgagtagctgctgttatgacatggccatttcattctccacaacaagagaagcagccgcggcttcagtcaccgc

SEQ ID NO: 26326 - DNA, 43 bp, Homo sapiens
  chr12:58152984-58153027
  hypo
tccagccccccagctccaccacggtgacttggtgaagggggac

SEQ ID NO: 26327 - DNA, 459 bp, Homo sapiens; identical to SEQ ID NO: 8863
  chr12:58158887-58159346
  hypo

SEQ ID NO: 26328 - DNA, 31 bp, Homo sapiens
  chr12:58190007-58190038
  hypo
tgccatctgggttctacgttggctcttatgt

SEQ ID NO: 26329 - DNA, 30 bp, Homo sapiens
  chr12:58218605-58218635
  hypo
tcttgctctgcacccgatcttgtgcttgct

SEQ ID NO: 26330 - DNA, 113 bp, Homo sapiens
  chr12:58241493-58241606
  hypo
aaaaaaaaaaagtacaaccttcgaatcccgaaaggggtgtgtgcgtgtgggcggacctaggactccagagtataagagctggaactgacctcgggactgtgtcccccaaaaca

SEQ ID NO: 26331 - DNA, 78 bp, Homo sapiens; identical to SEQ ID NO: 8868
  chr12:58259122-58259200
  hypo

SEQ ID NO: 26332 - DNA, 138 bp, Homo sapiens
  chr12:58284173-58284311
  hypo
tgtcctgttcccactcctccccgacgatgctcctgctcagaacccactcctcacctcagtgaagcaacgcagcgggcaccctgtggacaaagctggatattggctctgaataaaagcgaatcatggggaaaatcagtg

SEQ ID NO: 26333 - DNA, 42 bp, Homo sapiens; identical to SEQ ID NO: 8870
  chr12:59314238-59314280
  hypo

SEQ ID NO: 26334 - DNA, 678 bp, Homo sapiens; identical to SEQ ID NO: 8871
  chr12:59989789-59990467
  hypo

SEQ ID NO: 26335 - DNA, 18 bp, Homo sapiens
  chr12:60384603-60384621
  hypo
taaaaagacgtgtccacg

SEQ ID NO: 26336 - DNA, 198 bp, Homo sapiens
  chr12:60507736-60507934
  hypo
tgtctagtttcatgaacgaggcttctggtgaagttctctacaccaaattatttactttgaaatacgcttcactaattagtgcttctgtcagtatatgccttcagagccattctgaagacatgcaaaccacccacttatccgtaagctgtgcccggcaacctaaggatttagatataaacataacggtgaattgtggga

SEQ ID NO: 26337 - DNA, 301 bp, Homo sapiens; identical to SEQ ID NO: 8873
  chr12:62584711-62585012
  hypo

SEQ ID NO: 26338 - DNA, 1483 bp, Homo sapiens; identical to SEQ ID NO: 8874
  chr12:62585030-62586513
  hypo

SEQ ID NO: 26339 - DNA, 23 bp, Homo sapiens
  chr12:62898313-62898336
  hypo
accgcacccggcctgtttttatg

SEQ ID NO: 26340 - DNA, 16 bp, Homo sapiens
  chr12:63033700-63033716
  hypo
ccgtgcccggccaggc

SEQ ID NO: 26341 - DNA, 30 bp, Homo sapiens
  chr12:63038405-63038435
  hypo
agtcagtctgctcgcgtagcgtcctttgaa

SEQ ID NO: 26342 - DNA, 30 bp, Homo sapiens; identical to SEQ ID NO: 8877
  chr12:63138854-63138884
  hypo

SEQ ID NO: 26343 - DNA, 30 bp, Homo sapiens
  chr12:63187177-63187207
  hypo
gctccttgttgcaaggagaaacgggagccg

SEQ ID NO: 26344 - DNA, 30 bp, Homo sapiens
  chr12:63187506-63187536
  hypo
agaaactccgtttcaaaaaaaaaaaaaaaa

SEQ ID NO: 26345 - DNA, 30 bp, Homo sapiens
  chr12:63195781-63195811
  hypo
ggtagggggcaggacggcggagttcttcag

SEQ ID NO: 26346 - DNA, 193 bp, Homo sapiens
  chr12:63271245-63271438
  hypo
tgttccaaggtaccacgcgatacggtaatagtaattaacatcagttgagcttaccaactctgctgaacactcgatgtactctctctctctattctctgaactctccatgaaatatatatgattttcctcatttttgagatgaagcaaaccaaaaaagtcatatggctgttaagtggcccggcagatatcccct

SEQ ID NO: 26347 - DNA, 31 bp, Homo sapiens
  chr12:63318526-63318557
  hypo
aagaaatgcaattagccgggtgtggtggctc

SEQ ID NO: 26348 - DNA, 330 bp, Homo sapiens; identical to SEQ ID NO: 8882
  chr12:64237614-64237944
  hypo

SEQ ID NO: 26349 - DNA, 111 bp, Homo sapiens; identical to SEQ ID NO: 8883
  chr12:64238194-64238305
  hypo

SEQ ID NO: 26350 - DNA, 276 bp, Homo sapiens
  chr12:64521628-64521904
  hypo
gtgaatgtctaggcaacgaaaaagaggagagccaccccctccagtaaggcgtcctggcaggaccagtgatggccattgcccgctccaccctccacatgccctttctaactcctcagttgacctagggtccccaagccttgccagtcacccccggggcctgctgcagaaccgtggcctcaacaatgacagtcctgagcggaggcgcaggcctggccatggcagcctgaccaacatcagccggcacgactccctcaagaagatcgacagccctcccat

SEQ ID NO: 26351 - DNA, 396 bp, Homo sapiens; identical to SEQ ID NO: 8886
  chr12:64845174-64845570
  hypo

SEQ ID NO: 26352 - DNA, 30 bp, Homo sapiens
  chr12:65128950-65128980
  hypo
gctccttggtgtaccgtgctggcaaggaag

SEQ ID NO: 26353 - DNA, 33 bp, Homo sapiens
  chr12:65557256-65557289
  hypo
tcccagaggccggggcgggcggatcacaaggtc

SEQ ID NO: 26354 - DNA, 24 bp, Homo sapiens
  chr12:65562062-65562086
  hypo
tttgactaacgtttttctgtacag

SEQ ID NO: 26355 - DNA, 42 bp, Homo sapiens
  chr12:66213995-66214037
  hypo
caggcgtgagccactgcgcccggcccacaattatgattaaat

SEQ ID NO: 26356 - DNA, 30 bp, Homo sapiens
  chr12:66284819-66284849
  hypo
aatatattcgtatatgtgaattgagccttc

SEQ ID NO: 26357 - DNA, 560 bp, Homo sapiens; identical to SEQ ID NO: 8903
  chr12:66582758-66583318
  hypo

SEQ ID NO: 26358 - DNA, 342 bp, Homo sapiens; identical to SEQ ID NO: 8904
  chr12:66629082-66629424
  hypo

SEQ ID NO: 26359 - DNA, 31 bp, Homo sapiens
  chr12:68646672-68646703
  hypo
gacatgtgccccatcccgtctccccagagca

SEQ ID NO: 26360 - DNA, 30 bp, Homo sapiens
  chr12:68770814-68770844
  hypo
attcaaagtgcggtgcgctcaccaggcacg

SEQ ID NO: 26361 - DNA, 85 bp, Homo sapiens
  chr12:68978213-68978298
  hypo
agccacaaatctcatagtctccgaggtcactaagagctttatttccttgccaggagcggtggctcacacctgtaatcccagcact

SEQ ID NO: 26362 - DNA, 24 bp, Homo sapiens
  chr12:68978597-68978621
  hypo
ctttttttccgttttcactagaaa

SEQ ID NO: 26363 - DNA, 44 bp, Homo sapiens
  chr12:69133794-69133838
  hypo
atagttgctggcagcccgcccgctagtatcggaattcattataa

SEQ ID NO: 26364 - DNA, 43 bp, Homo sapiens
  chr12:69190388-69190431
  hypo
aaatgtatgagtaatgcctttcgttacagtatcaagacagcta

SEQ ID NO: 26365 - DNA, 103 bp, Homo sapiens
  chr12:69644223-69644326
  hypo
gtggaaaagtaggtttcgttatatagaaattaactttaggctgggtgcagtggctcaagcctatatttgggaggccgaggcaggaggattgcttgaactcagg

SEQ ID NO: 26366 - DNA, 127 bp, Homo sapiens
  chr12:69964170-69964297
  hypo
acagaactgattttatacacccgcaaacgtgactcagtaaaatggcactacctctgcctgcgacgctatggctatgactcgaatctcttttcttttgaaagtggtcgaaggtgtcaaactggacaag

SEQ ID NO: 26367 - DNA, 30 bp, Homo sapiens
  chr12:69965239-69965269
  hypo
ttttgaataacagacgtttagttgtaagct

SEQ ID NO: 26368 - DNA, 88 bp, Homo sapiens
  chr12:69999284-69999372
  hypo
aaagtctgctgtgtgccgtattagcatattagatcaatagaagatattaagagaacctttttaaaaatcacaattactggccgggcgc

SEQ ID NO: 26369 - DNA, 30 bp, Homo sapiens
  chr12:70004772-70004802
  hypo
gcaacttgagtgtccggcgacagcgcaaca

SEQ ID NO: 26370 - DNA, 43 bp, Homo sapiens
  chr12:70087638-70087681
  hypo
ttcacaaactggttccaccatcggttcactaccagagtaacat

SEQ ID NO: 26371 - DNA, 172 bp, Homo sapiens
  chr12:70648186-70648358
  hypo
cccaggtgggatggagcgggatgtcagaaaatttcatcacactcctcagactggtgcccaatttaaaacgtatgaattatttatttctggaattttccatgtaatatttttgtactgcggttcaccatgaataactgaaactgaagaagaagaaaccgcggataaggggaga

SEQ ID NO: 26372 - DNA, 31 bp, Homo sapiens
  chr12:71925321-71925352
  hypo
aatcattaggaggtaacgtgggggtagcttt

SEQ ID NO: 26373 - DNA, 27 bp, Homo sapiens
  chr12:72042566-72042593
  hypo
acattagaaaataattcgagcagccag

SEQ ID NO: 26374 - DNA, 8 bp, Homo sapiens
  chr12:72127257-72127265
  hypo
ttggagac

SEQ ID NO: 26375 - DNA, 29 bp, Homo sapiens
  chr12:72150915-72150944
  hypo
ttgagtcttgccctgtcgcccaggctgaa

SEQ ID NO: 26376 - DNA, 105 bp, Homo sapiens
  chr12:72165398-72165503
  hypo
tgctgtttgttatctccctctcgcgttttgcatgaaaagacatagtttaagtattttattaagagaagattgaggccaggcacagtggctcacgcctgtaatccc

SEQ ID NO: 26377 - DNA, 41 bp, Homo sapiens
  chr12:72642201-72642242
  hypo
aaaaaaaaaaaaaaaaaagcgaagtgcttattcatatgtgt

SEQ ID NO: 26378 - DNA, 17 bp, Homo sapiens
  chr12:73147747-73147764
  hypo
cactgaaatcccaggag

SEQ ID NO: 26379 - DNA, 17 bp, Homo sapiens
  chr12:73148063-73148080
  hypo
ttgtgattcttctggtc

SEQ ID NO: 26380 - DNA, 20 bp, Homo sapiens
  chr12:74952274-74952294
  hypo
ttttttttttttgagacgga

SEQ ID NO: 26381 - DNA, 30 bp, Homo sapiens
  chr12:76530992-76531022
  hypo
cattggatcgcgagcggtgtctgcttgttc

SEQ ID NO: 26382 - DNA, 121 bp, Homo sapiens
  chr12:76878983-76879104
  hypo
tgacgcaccgtgcccggcctctcactacttttcaaacaacttttaacttctcaatatcaacaaaatttggaatagtaaatgactaagaccgggcgcagtagctcatgcctgtaatcccagc

SEQ ID NO: 26383 - DNA, 39 bp, Homo sapiens
  chr12:76879283-76879322
  hypo
ggaggttgcggtgagcagagatcacgccaccgcactcca

SEQ ID NO: 26384 - DNA, 39 bp, Homo sapiens
  chr12:77216171-77216210
  hypo
gtttatattatcagggcgaatcagcgcttgatttggcaa

SEQ ID NO: 26385 - DNA, 43 bp, Homo sapiens; identical to SEQ ID NO: 8928
  chr12:77272815-77272858
  hypo

SEQ ID NO: 26386 - DNA, 30 bp, Homo sapiens
  chr12:77378548-77378578
  hypo
cgcgacctgaacctcgacccctgaccccag

SEQ ID NO: 26387 - DNA, 33 bp, Homo sapiens
  chr12:77453496-77453529
  hypo
gggaggccaaggcaggcggatcacgaggtcagg

SEQ ID NO: 26388 - DNA, 30 bp, Homo sapiens; identical to SEQ ID NO: 8932
  chr12:77928810-77928840
  hypo

SEQ ID NO: 26389 - DNA, 39 bp, Homo sapiens
  chr12:79926687-79926726
  hypo
gcgtgagccaccgcgcccgaccatagaccagcctttact

SEQ ID NO: 26390 - DNA, 31 bp, Homo sapiens; identical to SEQ ID NO: 8935
  chr12:80083437-80083468
  hypo

SEQ ID NO: 26391 - DNA, 433 bp, Homo sapiens; identical to SEQ ID NO: 8936
  chr12:80084656-80085089
  hypo

SEQ ID NO: 26392 - DNA, 20 bp, Homo sapiens
  chr12:80194519-80194539
  hypo
ttttttttttttgaaacgga

SEQ ID NO: 26393 - DNA, 1480 bp, Homo sapiens; identical to SEQ ID NO: 8937
  chr12:81330380-81331860
  hypo

SEQ ID NO: 26394 - DNA, 232 bp, Homo sapiens; identical to SEQ ID NO: 8944
  chr12:83080990-83081222
  hypo

SEQ ID NO: 26395 - DNA, 30 bp, Homo sapiens; identical to SEQ ID NO: 8954
  chr12:85918797-85918827
  hypo

SEQ ID NO: 26396 - DNA, 29 bp, Homo sapiens
  chr12:89020050-89020079
  hypo
tgggcgaggtggctcacgcctgtaatgtc

SEQ ID NO: 26397 - DNA, 450 bp, Homo sapiens; identical to SEQ ID NO: 8957
  chr12:89747141-89747591
  hypo

SEQ ID NO: 26398 - DNA, 30 bp, Homo sapiens
  chr12:89785810-89785840
  hypo
ggttgaggttgagggcgggtatatgtgctt

SEQ ID NO: 26399 - DNA, 95 bp, Homo sapiens
  chr12:89800519-89800614
  hypo
taaaactggaggttatcgccatgggaaactacatgcccgatacgtaataatataatatataatatgtgatatataagataataccaggtcttcca

SEQ ID NO: 26400 - DNA, 34 bp, Homo sapiens
  chr12:89915162-89915196
  hypo
agccaccgcacccggcctcccctcacttaatttt

SEQ ID NO: 26401 - DNA, 31 bp, Homo sapiens
  chr12:89919632-89919663
  hypo
ccccccacctccaacccgtccttaccgtggc

SEQ ID NO: 26402 - DNA, 127 bp, Homo sapiens
  chr12:90049545-90049672
  hypo
gctccatgagagcccgcagctctgcgagcgtaattccaaagtctccatcatgattagcttccttcaaagagtttttcacaccactgtaagcaactgagttgtttgccatgtcgcccattacaagtat

SEQ ID NO: 26403 - DNA, 52 bp, Homo sapiens
  chr12:90313574-90313626
  hypo
gaggcgggagcgagcgtgctagccaagcatgtgggccgcgctgaggcttgac

SEQ ID NO: 26404 - DNA, 30 bp, Homo sapiens
  chr12:91348062-91348092
  hypo
ggtggcgcaggccgcggcctctgcggcccc

SEQ ID NO: 26405 - DNA, 31 bp, Homo sapiens
  chr12:93797480-93797511
  hypo
caattttatttgtagacgtgatttcccccac

SEQ ID NO: 26406 - DNA, 1186 bp, Homo sapiens; identical to SEQ ID NO: 8960
  chr12:93966029-93967215
  hypo

SEQ ID NO: 26407 - DNA, 529 bp, Homo sapiens; identical to SEQ ID NO: 8961
  chr12:93985155-93985684
  hypo

SEQ ID NO: 26408 - DNA, 30 bp, Homo sapiens
  chr12:94077129-94077159
  hypo
gtttttctctcctccgttggtttgattcat

SEQ ID NO: 26409 - DNA, 43 bp, Homo sapiens
  chr12:94145344-94145387
  hypo
aatcctttatcttgggccaggcgtggtggctcatgcctgtaat

SEQ ID NO: 26410 - DNA, 30 bp, Homo sapiens
  chr12:94533218-94533248
  hypo
gggtgggcttccaacggtcctacaggacaa

SEQ ID NO: 26411 - DNA, 1264 bp, Homo sapiens; identical to SEQ ID NO: 8962
  chr12:94542856-94544120
  hypo

SEQ ID NO: 26412 - DNA, 30 bp, Homo sapiens; identical to SEQ ID NO: 8963
  chr12:94544421-94544451
  hypo

SEQ ID NO: 26413 - DNA, 31 bp, Homo sapiens
  chr12:94658438-94658469
  hypo
gcatttttttaaatgtcgtttatttctggct

SEQ ID NO: 26414 - DNA, 30 bp, Homo sapiens
  chr12:95602790-95602820
  hypo
tttcctcataatggcgtatattttcatact

SEQ ID NO: 26415 - DNA, 29 bp, Homo sapiens
  chr12:95823033-95823062
  hypo
ccgcgcccggccagtccttctctatctgg

SEQ ID NO: 26416 - DNA, 30 bp, Homo sapiens; identical to SEQ ID NO: 8967
  chr12:96184005-96184035
  hypo

SEQ ID NO: 26417 - DNA, 376 bp, Homo sapiens; identical to SEQ ID NO: 8968
  chr12:96184964-96185340
  hypo

SEQ ID NO: 26418 - DNA, 24 bp, Homo sapiens
  chr12:96881021-96881045
  hypo
cacgacacccagccaatttaattt

SEQ ID NO: 26419 - DNA, 30 bp, Homo sapiens
  chr12:97339535-97339565
  hypo
agcattggaaataaccggcaaaatgcacca

SEQ ID NO: 26420 - DNA, 48 bp, Homo sapiens
  chr12:98948053-98948101
  hypo
tcaaaccaaggcaactgtggccgggcgcggtggctcatgcctgtaatc

SEQ ID NO: 26421 - DNA, 32 bp, Homo sapiens; identical to SEQ ID NO: 14547
  chr12:98948340-98948372
  hypo

SEQ ID NO: 26422 - DNA, 39 bp, Homo sapiens
  chr12:98983770-98983809
  hypo
gtccactttgggaggccgaggcaggtggatcacctgagg

SEQ ID NO: 26423 - DNA, 933 bp, Homo sapiens; identical to SEQ ID NO: 8973
  chr12:99287474-99288407
  hypo

SEQ ID NO: 26424 - DNA, 315 bp, Homo sapiens; identical to SEQ ID NO: 8974
  chr12:99288621-99288936
  hypo

SEQ ID NO: 26425 - DNA, 314 bp, Homo sapiens; identical to SEQ ID NO: 8975
  chr12:99289161-99289475
  hypo

SEQ ID NO: 26426 - DNA, 34 bp, Homo sapiens
  chr12:100969542-100969576
  hypo
accgcgcctggccgttatctctattttatagggg

SEQ ID NO: 26427 - DNA, 170 bp, Homo sapiens
  chr12:101711199-101711369
  hypo
ctttcagattggtgtgcgttcttcatcagtatcctgtgactttctttccacggtagcaatgagtattacccagcagatctgcaagttgctccaacccaggatctacggagaaaaggcaaagggatggtggcagaggaaatcgaagaggaacctgccgcaggagatgatga

SEQ ID NO: 26428 - DNA, 95 bp, Homo sapiens
  chr12:101718175-101718270
  hypo
cagttaatttttgtatttttttgtagagacggagtttcaccagctgaaaatttttgtatttttttgtagagatgttgtcccggctggtctcaaaa

SEQ ID NO: 26429 - DNA, 31 bp, Homo sapiens; identical to SEQ ID NO: 8980
  chr12:101762739-101762770
  hypo

SEQ ID NO: 26430 - DNA, 30 bp, Homo sapiens
  chr12:102132857-102132887
  hypo
ggagacgcgcggagcgaggtagggccctgc

SEQ ID NO: 26431 - DNA, 30 bp, Homo sapiens
  chr12:102133351-102133381
  hypo
ccatggggcgattgcgcgcccaaatagctg

SEQ ID NO: 26432 - DNA, 31 bp, Homo sapiens
  chr12:102280965-102280996
  hypo
aaagagacaaattgtccgaaaaaaatttgta

SEQ ID NO: 26433 - DNA, 30 bp, Homo sapiens
  chr12:102288360-102288390
  hypo
gcaagaatagaacacgaccctggaattcca

SEQ ID NO: 26434 - DNA, 261 bp, Homo sapiens
  chr12:102301885-102302146
  hypo
agcccagagtgagagtgcttgcggttcgatgttgacaaacccacccagagtaacacacatttatgactttttctccaggagttagctgtgccagtggttcatgacgggggcgctcttttggcctttgtctgtggtgtcgtgtacacgctcctacagtccatcatctcttacaaatcatgtccccagtggaacagtctctcgacatgccacatacggatggtcatctctgccgtttcttgcgcagctgtcatccccagtatc

SEQ ID NO: 26435 - DNA, 564 bp, Homo sapiens; identical to SEQ ID NO: 8986
  chr12:103351421-103351985
  hypo

SEQ ID NO: 26436 - DNA, 103 bp, Homo sapiens; identical to SEQ ID NO: 8987
  chr12:103352051-103352154
  hypo

SEQ ID NO: 26437 - DNA, 112 bp, Homo sapiens; identical to SEQ ID NO: 8988
  chr12:103352170-103352282
  hypo

SEQ ID NO: 26438 - DNA, 469 bp, Homo sapiens; identical to SEQ ID NO: 8989
  chr12:103352313-103352782
  hypo

SEQ ID NO: 26439 - DNA, 40 bp, Homo sapiens
  chr12:104220731-104220771
  hypo
atacatatgcctgggcgcggtggctcatgcctgtaatccc

SEQ ID NO: 26440 - DNA, 30 bp, Homo sapiens; identical to SEQ ID NO: 8998
  chr12:104459091-104459121
  hypo

SEQ ID NO: 26441 - DNA, 38 bp, Homo sapiens
  chr12:104506940-104506978
  hypo
ttacagacgtgagccaccgcgcccggcctggatattga

SEQ ID NO: 26442 - DNA, 30 bp, Homo sapiens
  chr12:104532892-104532922
  hypo
ctgcttccactaaccgagtggcctgcacca

SEQ ID NO: 26443 - DNA, 31 bp, Homo sapiens
  chr12:104598457-104598488
  hypo
tatccccctctcagggcgtgggacagggatg

SEQ ID NO: 26444 - DNA, 24 bp, Homo sapiens
  chr12:104671655-104671679
  hypo
tctttttttttttttttgagacga

SEQ ID NO: 26445 - DNA, 31 bp, Homo sapiens
  chr12:104684139-104684170
  hypo
tttgcaggtaaaaagagataacggtctatta

SEQ ID NO: 26446 - DNA, 18 bp, Homo sapiens
  chr12:104684834-104684852
  hypo
cctcggcctcctaaagtg

SEQ ID NO: 26447 - DNA, 93 bp, Homo sapiens
  chr12:104686066-104686159
  hypo
ctcagaatcccctggagtactcgttaattatgcatgcccaggctttacccgagttcttttgaagtagactcgggaaagagctaggaatctacc

SEQ ID NO: 26448 - DNA, 17 bp, Homo sapiens
  chr12:104693544-104693561
  hypo
caaaaaaaaaaaaaaaa

SEQ ID NO: 26449 - DNA, 35 bp, Homo sapiens
  chr12:104695396-104695431
  hypo
gagccaccgtgcccggctgcttttgttgaatttaa

SEQ ID NO: 26450 - DNA, 38 bp, Homo sapiens
  chr12:104696545-104696583
  hypo
cgtgagccaccgcgcccggccattcccattgttatgta

SEQ ID NO: 26451 - DNA, 37 bp, Homo sapiens
  chr12:104702053-104702090
  hypo
tgagccaccacgcctcgctgcccttttcactcttaat

SEQ ID NO: 26452 - DNA, 36 bp, Homo sapiens
  chr12:104703966-104704002
  hypo
tcccaggctggagtgcagtggcgcaatcttggctca

SEQ ID NO: 26453 - DNA, 226 bp, Homo sapiens; identical to SEQ ID NO: 9001
  chr12:104850310-104850536
  hypo

SEQ ID NO: 26454 - DNA, 2190 bp, Homo sapiens; identical to SEQ ID NO: 9002
  chr12:104850577-104852767
  hypo

SEQ ID NO: 26455 - DNA, 65 bp, Homo sapiens
  chr12:105096594-105096659
  hypo
ggacagcgggtcggcgagagtcgataatgggttccagcagattggacgccgttcagatctaactc

SEQ ID NO: 26456 - DNA, 30 bp, Homo sapiens
  chr12:105106499-105106529
  hypo
attcctaaaaccaacgtcatcattcttgaa

SEQ ID NO: 26457 - DNA, 30 bp, Homo sapiens
  chr12:105132895-105132925
  hypo
tgtgccagaggagcccgggtagtgggtgcg

SEQ ID NO: 26458 - DNA, 30 bp, Homo sapiens
  chr12:105150855-105150885
  hypo
gtggatgaggaccacgagctcatctactgc

SEQ ID NO: 26459 - DNA, 118 bp, Homo sapiens
  chr12:106460687-106460805
  hypo
cttcaggtactggggccggggccggttctggagcccctcaaagtcctggatctggaggaagttttctgcagagacgcagctgcggatgcgctggcgggcagggcgattctcctgcaaa

SEQ ID NO: 26460 - DNA, 55 bp, Homo sapiens; identical to SEQ ID NO: 9007
  chr12:106641514-106641569
  hypo

SEQ ID NO: 26461 - DNA, 190 bp, Homo sapiens
  chr12:106881471-106881661
  hypo
acatgtgcatctgtcccgctcaagcctgatcgcttcaaaggtggtaggataattagtagctaaatgaaacaaacataaagaggaagcggaacagtggtagttatgtgctgcatgtgatcacagagctcatggagaagactgaagggggcagaatgcgtgggtcagctggaataagcgagtcaatactgag

SEQ ID NO: 26462 - DNA, 44 bp, Homo sapiens; identical to SEQ ID NO: 9015
  chr12:107167935-107167979
  hypo

SEQ ID NO: 26463 - DNA, 378 bp, Homo sapiens; identical to SEQ ID NO: 9019
  chr12:108169035-108169413
  hypo

SEQ ID NO: 26464 - DNA, 358 bp, Homo sapiens; identical to SEQ ID NO: 9020
  chr12:108297405-108297763
  hypo

SEQ ID NO: 26465 - DNA, 30 bp, Homo sapiens; identical to SEQ ID NO: 9022
  chr12:108594027-108594057
  hypo

SEQ ID NO: 26466 - DNA, 515 bp, Homo sapiens
  chr12:108926053-108926568
  hypo
gtgcactggacggcccggtgcagagccttccggcagtgctgggtgtcaccatgagctctaaggcagaaaacaaaaagttgctgccaccaggacacaaagtggaaggcactcgaagggagaggccgtcttctcccaggtagaaactcactcttcagtaactctagcttctgagaagaccttagctttcagatctatccatgatgctttctccttccagagtctctacagtcacctacgaagtatttccctgaagcactctctccctcagccatgtaggggctactggaaagtgtacctgatattgtgatctgcaaccagcattctgcctttacagcattcacatgtgcggcacatggcgggggagtccaacagctctctgtaacctgatacagtccccagggaaattttactatggcgtcctactgacaggagagttatgaatccagggtagtgtcaaatttcatacccagagtcagatcttttttttttttttgaaagggagtctcgctcttgtc

SEQ ID NO: 26467 - DNA, 31 bp, Homo sapiens
  chr12:108931819-108931850
  hypo
ctcccacaaaaacatccgcaccagaaattac

SEQ ID NO: 26468 - DNA, 21 bp, Homo sapiens
  chr12:108939449-108939470
  hypo
aaaaacacatttggccaggtg

SEQ ID NO: 26469 - DNA, 33 bp, Homo sapiens
  chr12:108963689-108963722
  hypo
aaaacattcatccagccgggcgcagtggctcac

SEQ ID NO: 26470 - DNA, 29 bp, Homo sapiens
  chr12:109107871-109107900
  hypo
aaagaacaacctgggccgggcacagtggc

SEQ ID NO: 26471 - DNA, 87 bp, Homo sapiens
  chr12:109208616-109208703
  hypo
ggtgggaaggaagagcgccatgggggcggtgcggacgagcgcacgggccagtctcctccagccaggcagcagcggagtgggatgcgc

SEQ ID NO: 26472 - DNA, 43 bp, Homo sapiens
  chr12:109213024-109213067
  hypo
aaaacaggcagtaaccagggacggcttctgaacttctctgagc

SEQ ID NO: 26473 - DNA, 47 bp, Homo sapiens
  chr12:109488513-109488560
  hypo
aaaaacaaaaaaataatgggccgggcgcggtggctcacacctgtaat

SEQ ID NO: 26474 - DNA, 31 bp, Homo sapiens
  chr12:109506483-109506514
  hypo
taacttttttaaggtccgacttctccatcaa

SEQ ID NO: 26475 - DNA, 30 bp, Homo sapiens
  chr12:109534311-109534341
  hypo
ggtgggaggaggttcggtacagtggtgtca

SEQ ID NO: 26476 - DNA, 30 bp, Homo sapiens; identical to SEQ ID NO: 9029
  chr12:109747076-109747106
  hypo

SEQ ID NO: 26477 - DNA, 30 bp, Homo sapiens
  chr12:109878713-109878743
  hypo
atttcacctataagcgggggtcatgctagt

SEQ ID NO: 26478 - DNA, 30 bp, Homo sapiens
  chr12:109887567-109887597
  hypo
gccaacattcacttcgactttctaaaaaag

SEQ ID NO: 26479 - DNA, 31 bp, Homo sapiens
  chr12:109906335-109906366
  hypo
cctcatgtgacctgcacgcaaacccagccag

SEQ ID NO: 26480 - DNA, 30 bp, Homo sapiens
  chr12:109911493-109911523
  hypo
gtgaacttaggacacgaggcagtggaccag

SEQ ID NO: 26481 - DNA, 31 bp, Homo sapiens
  chr12:109963007-109963038
  hypo
accgctgggagccctgcgtggcctgtcctcc

SEQ ID NO: 26482 - DNA, 31 bp, Homo sapiens
  chr12:110019993-110020024
  hypo
cagtgcgcagaggttacgcagtttgtcccag

SEQ ID NO: 26483 - DNA, 83 bp, Homo sapiens
  chr12:110224629-110224712
  hypo
tggtggtggcccactgcggggagggagggtcaggagggacatcggtgagcctcacagcctgcgcctgccgctctggtggcaga

SEQ ID NO: 26484 - DNA, 46 bp, Homo sapiens
  chr12:110258636-110258682
  hypo
cctattaagggatcgtaatagggtcgttgtgagaggtatatacctt

SEQ ID NO: 26485 - DNA, 30 bp, Homo sapiens
  chr12:110340886-110340916
  hypo
agctagcacgacagcgagagcaggaggccc

SEQ ID NO: 26486 - DNA, 30 bp, Homo sapiens
  chr12:110368219-110368249
  hypo
gctagtgcaaggtacggaatccatgtgcaa

SEQ ID NO: 26487 - DNA, 193 bp, Homo sapiens
  chr12:110378868-110379061
  hypo
cttctgctcccagggcgcatgttctctcctctgtcggctgaggtcttccatccacacctccacgcatgctgtttagttcccagctgctcaaatacaagacacttgctgtgggctcctaaaattcactatgaactcgtgcatcctgaagccactcaaatccatctggcaaatgattaaacgttagcttggagcc

SEQ ID NO: 26488 - DNA, 30 bp, Homo sapiens
  chr12:110388930-110388960
  hypo
gattaaagcgtcaaccgtcctggcatttat

SEQ ID NO: 26489 - DNA, 31 bp, Homo sapiens; identical to SEQ ID NO: 9031
  chr12:110719374-110719405
  hypo

SEQ ID NO: 26490 - DNA, 445 bp, Homo sapiens
  chr12:110778336-110778781
  hypo
ccgcctcaaaaaaaaaaaaagaaaaaaaatgcagaaacctgtctcaatgtttaactgggcatttttcaaactaggggacaaaaactagaacttgccacttttatttaaagtgatgctcttattttagaccaatctgaccttcgttggctgcgtgggcatgctggatcctccgagaatcgaggtggcctcctccgtgaagctgtgccggcaagcaggcatccgggtcatcatgatcactggggacaacaagggcactgctgtggccatctgtcgccgcatcggcatcttcgggcaggatgaggacgtgacgtcaaaagctttcacaggccgggagtttgatgaactcaacccctccgcccagcgagacgcctgcctgaacgcccgctgttttgctcgagttgaaccctcccacaagtctaaaatcgtagaatttcttcagtctttt

SEQ ID NO: 26491 - DNA, 171 bp, Homo sapiens
  chr12:110783958-110784129
  hypo
ccttccaggggaggctggaggcgtgacacgtcttccctgtgtgtcagctcatcttccagatcacaccgctgaacgtgacccagtggctgatggtgctgaaaatctccttgcccgtgattctcatggatgagacgctcaagtttgtggcccgcaactacctggaacctggta

SEQ ID NO: 26492 - DNA, 43 bp, Homo sapiens
  chr12:110806696-110806739
  hypo
ccaccagtagcagaagggttgcggaaattgttccttctgcaga

SEQ ID NO: 26493 - DNA, 73 bp, Homo sapiens
  chr12:110808572-110808645
  hypo
tacctcaatggcccctcccagcgcagggcttcccggtgacctggccacagccgtgcctggaggatgaggtgag

SEQ ID NO: 26494 - DNA, 121 bp, Homo sapiens
  chr12:110915436-110915557
  hypo
aggcgtgagtcaacgcgcccagtcttgtcatccattcttgactaaatccattatgattaagatggctagaaatatgtgctttttctttttttttgagacagagtctccctctgtcgcgcag

SEQ ID NO: 26495 - DNA, 1 bp, Homo sapiens
  chr12:110916693-110916694
  hypo
a

SEQ ID NO: 26496 - DNA, 146 bp, Homo sapiens
  chr12:111083878-111084024
  hypo
ttgggaggagaggcagcagtgcgcacatggcaccgtcagggtctgtgctgatcctgggtgctcagagggcctgcagcagcaggttttgtaccaactctgccggcaacccaggtagaggcaggcacgagcacctgctaaactcagtt

SEQ ID NO: 26497 - DNA, 105 bp, Homo sapiens
  chr12:111087567-111087672
  hypo
caggctcagcccagggaagggcgctctaggtgcatgagcagcgctctgctgcaggcgggtgctgcggcagaggccagcttcccagatatcttttttttttgagac

SEQ ID NO: 26498 - DNA, 17 bp, Homo sapiens
  chr12:111195878-111195895
  hypo
aatgggccaggtgcagg

SEQ ID NO: 26499 - DNA, 794 bp, Homo sapiens; identical to SEQ ID NO: 9035
  chr12:111471165-111471959
  hypo

SEQ ID NO: 26500 - DNA, 137 bp, Homo sapiens; identical to SEQ ID NO: 9036
  chr12:111472058-111472195
  hypo

SEQ ID NO: 26501 - DNA, 315 bp, Homo sapiens; identical to SEQ ID NO: 9037
  chr12:111472356-111472671
  hypo

SEQ ID NO: 26502 - DNA, 84 bp, Homo sapiens; identical to SEQ ID NO: 9038
  chr12:111472851-111472935
  hypo

SEQ ID NO: 26503 - DNA, 30 bp, Homo sapiens; identical to SEQ ID NO: 9039
  chr12:111473179-111473209
  hypo

SEQ ID NO: 26504 - DNA, 30 bp, Homo sapiens
  chr12:111725501-111725531
  hypo
atgaaagccaccgccgccttcccgcgcacc

SEQ ID NO: 26505 - DNA, 30 bp, Homo sapiens
  chr12:111748331-111748361
  hypo
gctgtcgcagggctcggtcagcgagatcct

SEQ ID NO: 26506 - DNA, 447 bp, Homo sapiens; identical to SEQ ID NO: 9040
  chr12:111844352-111844799
  hypo

SEQ ID NO: 26507 - DNA, 30 bp, Homo sapiens
  chr12:111885535-111885565
  hypo
tccaccacttccagcgctcgcccatcccac

SEQ ID NO: 26508 - DNA, 51 bp, Homo sapiens
  chr12:112082502-112082553
  hypo
aatggttttctgccatcgcaatcagctatgcaaagcaagaattttgctcta

SEQ ID NO: 26509 - DNA, 55 bp, Homo sapiens
  chr12:112194069-112194124
  hypo
tcattcctggggctctcggagacaagggctgacccagggccgcctccctccactc

SEQ ID NO: 26510 - DNA, 31 bp, Homo sapiens
  chr12:112288206-112288237
  hypo
agactctaatatttttcgagaaaaagtcatt

SEQ ID NO: 26511 - DNA, 31 bp, Homo sapiens
  chr12:112430857-112430888
  hypo
gtggacgatggcctcacggacctccacagcg

SEQ ID NO: 26512 - DNA, 31 bp, Homo sapiens
  chr12:112591127-112591158
  hypo
ctggaggtgagtggaccgggggctgtgtttt

SEQ ID NO: 26513 - DNA, 131 bp, Homo sapiens
  chr12:112591859-112591990
  hypo
gatggaacactagacacgggaaccatgcggccagttctttgcagaggcaggtctctgaaaagaattatcctgagagaaaaaagcttcgtctgcatgcactcgcgcacacacacaaacgatacatagtaggg

SEQ ID NO: 26514 - DNA, 30 bp, Homo sapiens
  chr12:112605719-112605749
  hypo
gcctgtaggacagacgagacacatgggcac

SEQ ID NO: 26515 - DNA, 645 bp, Homo sapiens
  chr12:112610021-112610666
  hypo
tctctttggaaacacaggggcacctgaatgggccttcctgcaatcctagcttttaacaaaaacatggtgttccccattatgaaggctaatgcctctactgcaagttatcagactataaatgcttctcactccccatggcagcctggcctcagcggggcctccaggcagcggcctgggcattccccgcagccgtgcatttctgtatctgctccctggctttgttgtcactggcattaaaaaaggccccagactaattaggccacagtcctggctccctgccttgccctccctgtttcgtcagcccactcttccttgcacacctggcgcatagcaggtgttcataagtgttcgttcgatggacgtctaaatgaatctagcccttgtaaatgccccttgtcatggggcatgcccgcatcaggcagcaggggaggggataggcccagggccacatactcaggagacaggccactctggggtcagcagcatccgcggggtccaggtacacctcatggggatggagccgtgcgggtgtgatggcgaggtggcggcatagctggttgatgtactgcacaagtgccacgtccatctccagggtccactttcttgaggccttctgtgcatgtcggacatcgatgcatgcgcacc

SEQ ID NO: 26516 - DNA, 94 bp, Homo sapiens
  chr12:112612658-112612752
  hypo
attttcattgattgatgccaggtgcacttgctgtggacaaggctgagtaggggcgtgtgtgtgtgtatgtgcacacgtgcgtgagccagaggga

SEQ ID NO: 26517 - DNA, 71 bp, Homo sapiens
  chr12:112616769-112616840
  hypo
cggcttggtgataggccgcttggtgctcaccaccttcacggggtgctgctccttcccggccttgctgtact

SEQ ID NO: 26518 - DNA, 161 bp, Homo sapiens
  chr12:112628548-112628709
  hypo
cccccaccctagattccgatccccagggaaggcagcctcacctagcagctccaccacctgcaggaggacggatgtcggaatggtgtcaggctcatcttcggacttcccttcactgtcctctgatttccaggacagcagctgctctgcgaaggccatagcca

SEQ ID NO: 26519 - DNA, 31 bp, Homo sapiens
  chr12:112647931-112647962
  hypo
agggcctcaaagttagcgctgatctcttctg

SEQ ID NO: 26520 - DNA, 383 bp, Homo sapiens
  chr12:112657023-112657406
  hypo
tcaaagatgagagcatggcaccgcaaagagggcatgtcactgcaaaagaatgcacctccaaacggctttgcaaacacttattctaaatgtccttaacttgctgctggccttactcagtgatgtgtgtggaggctgcaggaggcgcgaagcaccgcagagggctcacctgtcttcggtcagcctgcaaaggaggtggtgggggccgagcacagtcccggtagagcatcctcagccgttcacactgtacctccacaactgcaagtcgctctcctgtagagggcacatgttgaatctgtgaaaacaactcccgcaactcccaagtgggtgctgactcttttggagcagcatcaaaacaataaaatgcacttatagagctcattgaa

SEQ ID NO: 26521 - DNA, 50 bp, Homo sapiens
  chr12:112684723-112684773
  hypo
cccagagatgcttctcgtgaggcccgactgggctgcgatggtgacatgca

SEQ ID NO: 26522 - DNA, 244 bp, Homo sapiens
  chr12:112743069-112743313
  hypo
ggtgtggatctaaagcgccgtggctcccagctgcttcttgccccaagccctcctcctctctctgcattccagccactctggcccactttttctccctaaaacatgctgcctcctgccacagacactttgcacgtgtggtatcctctttctggaatgttcttccctcacctactccccagcctcttcatctggtacatgactacttttccttcactaattacgattatctcgtgcgcttatttgc

SEQ ID NO: 26523 - DNA, 31 bp, Homo sapiens
  chr12:112814900-112814931
  hypo
gcaagaatctctgtctcgaacataaataatt

SEQ ID NO: 26524 - DNA, 30 bp, Homo sapiens; identical to SEQ ID NO: 9042
  chr12:112842259-112842289
  hypo

SEQ ID NO: 26525 - DNA, 36 bp, Homo sapiens; identical to SEQ ID NO: 9043
  chr12:112884176-112884212
  hypo

SEQ ID NO: 26526 - DNA, 197 bp, Homo sapiens; identical to SEQ ID NO: 9044
  chr12:112888120-112888317
  hypo

SEQ ID NO: 26527 - DNA, 30 bp, Homo sapiens; identical to SEQ ID NO: 9045
  chr12:112891142-112891172
  hypo

SEQ ID NO: 26528 - DNA, 87 bp, Homo sapiens; identical to SEQ ID NO: 9046
  chr12:112915450-112915537
  hypo

SEQ ID NO: 26529 - DNA, 117 bp, Homo sapiens; identical to SEQ ID NO: 9047
  chr12:112924320-112924437
  hypo

SEQ ID NO: 26530 - DNA, 153 bp, Homo sapiens; identical to SEQ ID NO: 9048
  chr12:112926826-112926979
  hypo

SEQ ID NO: 26531 - DNA, 2 bp, Homo sapiens
  chr12:113494413-113494415
  hypo
gg

SEQ ID NO: 26532 - DNA, 759 bp, Homo sapiens; identical to SEQ ID NO: 9052
  chr12:113494430-113495189
  hypo

SEQ ID NO: 26533 - DNA, 31 bp, Homo sapiens
  chr12:113595320-113595351
  hypo
cctttcggcctcccccgcgtgttgaggggtg

SEQ ID NO: 26534 - DNA, 173 bp, Homo sapiens
  chr12:113598990-113599163
  hypo
tgcacctgtgcctcagcgttaccctaatctgaccacaactgctctgcctacctgtgcacccacactccccaccctggctctcaccttggccacggtctcgcttcccacctcttcgctctgggcctcgccggtcagatgccccttcttcgtccgagtcacgatcatcaattttc

SEQ ID NO: 26535 - DNA, 30 bp, Homo sapiens
  chr12:113600982-113601012
  hypo
cctggtcccgctgccgggcctcctccctcc

SEQ ID NO: 26536 - DNA, 31 bp, Homo sapiens
  chr12:113609784-113609815
  hypo
tcatcccacacatagccgattttaaaataaa

SEQ ID NO: 26537 - DNA, 187 bp, Homo sapiens
  chr12:113629776-113629963
  hypo
cctgacaatctctagtcgattcttgcctttttctcccgattgcggatttgggggccacctctaagatgcctctctccagccctgtctcaaccatactccaaattagtgccaacccaggggcctggcacctcccacatcatccattgtcttgctgccaagtgcgaataaacggcgtgattgccaacct

SEQ ID NO: 26538 - DNA, 309 bp, Homo sapiens
  chr12:113669641-113669950
  hypo
aataaccttgaaaacagtcagcggggccactgttagagcagtgtagagacagaccacagtccacaccgcgtgacaggcggtggtctcacccaccacattcagggaatcaggacgagtctgaatgtagtgggcagtccaaggaatttcccagggtaactctggtcacactcagctctgccttctccctgcctttaaagccagctgctgcctaagatgggctggaccatgtgccttttctgagtgaaggaaggattgggctcgcgggggctggctgaggtctgagcaggatgctccgtctctgctttggtg

SEQ ID NO: 26539 - DNA, 30 bp, Homo sapiens
  chr12:113704076-113704106
  hypo
gatggagctggccacggccctgctgctgct

SEQ ID NO: 26540 - DNA, 398 bp, Homo sapiens; identical to SEQ ID NO: 9056
  chr12:113796496-113796894
  hypo

SEQ ID NO: 26541 - DNA, 19 bp, Homo sapiens
  chr12:113913883-113913902
  hypo
cggcggcgttacaaattgt

SEQ ID NO: 26542 - DNA, 16 bp, Homo sapiens
  chr12:113914207-113914223
  hypo
ctggtgtggcgctccg

SEQ ID NO: 26543 - DNA, 458 bp, Homo sapiens; identical to SEQ ID NO: 9067
  chr12:114029352-114029810
  hypo

SEQ ID NO: 26544 - DNA, 30 bp, Homo sapiens
  chr12:114254907-114254937
  hypo
ggcgctgcgagagacggccctgcacaaaag

SEQ ID NO: 26545 - DNA, 429 bp, Homo sapiens
  chr12:114273471-114273900
  hypo
ggaagagcacttctccgggcactctgctcatagatctcccgccccagcccaacctggcttgggcaggcgggggaaggccccactgccagccactcgccatgctggtcatgtctgcgctcccagctctggaggtgaaaggtagagacgctaaccacagcccatcagtcctccccagctggaataagacaacatgggaagcagagccacgctcccagccaaataaaagcctgtttgcccagcctccctggctgtgagtgctgtaaaacacagggttctgcgcacggatttcttccataccattatattctctcggctgcgctcgcaggtactgtggcctgccgcggccctgaaagcttctcgatgccgtgaccctgctggtttgtaacacgctcaggaagaaaaggacacagccagcggcggactttcctc

SEQ ID NO: 26546 - DNA, 84 bp, Homo sapiens
  chr12:114282480-114282564
  hypo
tgagcggccgtcttccgccgcagggcctgcagggtcacctcggagtcggcccactccagcaccagcctccgcccgtacaagtgg

SEQ ID NO: 26547 - DNA, 162 bp, Homo sapiens
  chr12:114282866-114283028
  hypo
tgccgtgtgtcatccgatctgtggagggcgaccccattagtgggctcgcctcccacccggctgtctgcatggcggccacttgagaaagccgagccctggccggctgctggatgacaagcgtgcaggcctctgggtgtcactgggtgtcgctctccttcactg

SEQ ID NO: 26548 - DNA, 266 bp, Homo sapiens
  chr12:114290575-114290841
  hypo
ctgaagtcccttgtccatgttcgcacagctgcaaagaggccgcttgatgtcacaggccacactaaccagcgtgcagcacgttcctcctctgcactcagtttaaacaaacgtgttgaacgcacgccactgacaatctaatagcgatggtttactgtgcacacaacacggctcagcactgtgctgggtgcgctgggcacccggcgaggaggaaggctgtcccggccttaatgagctttgtccggctcgctcatcattggtcccttcca

SEQ ID NO: 26549 - DNA, 133 bp, Homo sapiens
  chr12:114318247-114318380
  hypo
agatcctgacaggtacgacagctcttgttctgtgagccttgtcgtaaacatttttctgcatgagggtcatatttcaagtggcttcggtctcaggggaagcagagtgatgtcacagctgcgaacggcgagactc

SEQ ID NO: 26550 - DNA, 524 bp, Homo sapiens
  chr12:114337464-114337988
  hypo
aaatatttgctaaaccgacaagttatttcttaactaaaaagcagtgtttgagacctcccttttccgtggaaaactctgcgatgcgtgaggggagagaagctgttcctaaagaggaatcccccaagctgtctggggctccctgctgcctttcaccacccagaatgctggaagacatggcgcgcaattatcagctccaacaatgagccaacggcggccctccgagcaagcccagacaaagcacagagaccttgcagctgaaaaggctctgaatgcagacaggggaggtgtgaaagcaaggttagagtgagctgccgcggctgcttggggcaggaggggaggaatgagggcgcacaatgccacccttcccccggtacaggcacgctctccctggggcaccctgttccactgtctgagcttttgtcgcccactctggaaccagtctaggcgtgcagtgagggaaaacgccagctgcagcggaagcccgagcctgcgaaatctcaaaggaaggacgaaaacaacggcaa

SEQ ID NO: 26551 - DNA, 30 bp, Homo sapiens; identical to SEQ ID NO: 9072
  chr12:114841521-114841551
  hypo

SEQ ID NO: 26552 - DNA, 30 bp, Homo sapiens; identical to SEQ ID NO: 9085
  chr12:114881661-114881691
  hypo

SEQ ID NO: 26553 - DNA, 37 bp, Homo sapiens; identical to SEQ ID NO: 9089
  chr12:114885146-114885183
  hypo

SEQ ID NO: 26554 - DNA, 16 bp, Homo sapiens
  chr12:114885371-114885387
  hypo
cgctggaagaaacgaa

SEQ ID NO: 26555 - DNA, 80 bp, Homo sapiens
  chr12:114983016-114983096
  hypo
tgctctaagcactatccatctcgccactcattaattttaaagatgattctgaaaggtacggtaggaaacagaggcacagt

SEQ ID NO: 26556 - DNA, 13 bp, Homo sapiens
  chr12:115263647-115263660
  hypo
gcacgcgcgcaca

SEQ ID NO: 26557 - DNA, 204 bp, Homo sapiens
  chr12:116394792-116394996
  hypo
agggaatataaacaagagaatcgtttaacaccaaaataacacggtaataagtgaaaattgcatcttgataggatttgggcgtgcggtgaattccaaagcacgatttcctttttatactggcttgactgtaaatgacaagcggcaaagactgttttcaatatgtggcttatgcttctgcagtatgtcttacgaggtttgctttta

SEQ ID NO: 26558 - DNA, 184 bp, Homo sapiens
  chr12:116443622-116443806
  hypo
aagtcctttcatgtagcgaaatttttgtttatgtagctacggcaaactcaccccaagttcgtcgtcatcagaattatcaaagatgttgtctaagtcatgcagggaaggtgccaaatctgttacctgtgtaaggctactggagccagctctgccagcagcattatcctgccggacatctgtagga

SEQ ID NO: 26559 - DNA, 30 bp, Homo sapiens
  chr12:116731524-116731554
  hypo
tttgatttaatgtgcgagcaagcctgtctg

SEQ ID NO: 26560 - DNA, 167 bp, Homo sapiens
  chr12:116756164-116756331
  hypo
cttctgaaggaaaggcgtggctgttccgaggtgccttgtgaaatagccagccgtcctgggctgccctttcactgttcctgctgaagccaaaggtgccagaaaagcctagacattgagctccgcgctccccagtcgtgactctgtgtctacgacgaactttctaaagg

SEQ ID NO: 26561 - DNA, 168 bp, Homo sapiens
  chr12:116941256-116941424
  hypo
cctctgaccacaccaagctagcgacattccaatctctcataaaaagcatttcaaaatgaaagagactgggcaaataaatcgtggtacatgcacggaatgcgatggccttcaggcattgaaaagaaagaagtacgtttcccatactacggggatttgctcacctaactt

SEQ ID NO: 26562 - DNA, 193 bp, Homo sapiens
  chr12:116999940-117000133
  hypo
tgtggtgggatatgagcgtggagcatctctgctgctacctagggagaggctgcctgagaccgatgccaaaaccccagaaagcagagataaaagatagtgggagagtcctgacaacaatatttgtatccctggatccacctgtgcctgaaaccatccgtagctccaaactcgcaagttccgtgaaacaataaat

SEQ ID NO: 26563 - DNA, 181 bp, Homo sapiens
  chr12:117150118-117150299
  hypo
gtcggcccatatgcacgtcaccactcggctcccagctcaggtgcagaccaacggcgaccacttgctccactttgctctgtgacagcagacgaggtaaggcatgttgcagatacatgctgaatatagggatgcctgtacacaaaactgcactcatgctgtgataacacgcaaaaggtcacac

SEQ ID NO: 26564 - DNA, 30 bp, Homo sapiens
  chr12:117150586-117150616
  hypo
gagggtgtctgcattcggcggagtccaaga

SEQ ID NO: 26565 - DNA, 468 bp, Homo sapiens
  chr12:117155367-117155835
  hypo
ggtttcatctttcccgaatgggactggctggaggggccaagctgctttacagaagagttccatctggtaagcccgggtggtgagcgaagccaaagatgacaacacgagaaggggtcaaagccaaggtttcctcacgctgcctttgtcttcttcctgcagcctggcccgatggctgaagctgggtcccaggaggcgagttcttcagcggggcctcctcacccaggctggagcaagtccgctgcacccgtcaagcggggaagagctcgggcgggctttctccatagcaatactttgctatggggtcccggtaggtgttctcatgctgcacgctctgttggcaaaaggaaaataagagcgcagtgagagcgagcacagcttcacacacctccctctcggaagagtgagagtggatcgggactgtcagactctccctgcagggggctggccgagtccatctccaaatgtcac

SEQ ID NO: 26566 - DNA, 30 bp, Homo sapiens
  chr12:117187853-117187883
  hypo
ggagggggccggggcgaggggggcgcctac

SEQ ID NO: 26567 - DNA, 564 bp, Homo sapiens
  chr12:117407819-117408383
  hypo
attagataaagcaggcgaaggttctgagtaatgagcagatgctgctaatgcagggacggcggagaccttgccaggactccatctgctccgtgcttgcctgcctttggcctcgtgccacagcattagggaatggcagtgtgcttcgaaacccgctccctggtcaccgagtttgtcttgaaatctcgctctttggtgagaaatgagattacacacttcttaggtgcaaagaagtttttatttgtccccctcagtagagagaggagagacgcgatctggtgcatattagcatgaggaagcctggacgggacagccagcagtcctctttatatggtgccatcaagcacggcaaagtggcttatccacctccgcaacactcccagtgcaactgtctgaacgcacacatgctccattgtccgggactgtggctgccctgggcggaggtgactatgatttctcatttactgacgtatcaacaatggacgggggtgggtctctccaagctgctttttagcggtgaacagtaggaccatgttttagttagacggctgtagagactaggtactt

SEQ ID NO: 26568 - DNA, 196 bp, Homo sapiens
  chr12:117466158-117466354
  hypo
gcgtgtgccagggctcgagtcccacgtgctgccaactcaaacatagcctccttccccacccagctggccaccctggcctcagctccctcaggacgcctcagggatctcgctgcgcggtcctatacggtccctgcttagccagcttctgtgtgtccgccctcccagctccagccctgcaggccgtcttttccgtctc

SEQ ID NO: 26569 - DNA, 30 bp, Homo sapiens
  chr12:117477090-117477120
  hypo
cccttcccacctaccgtctcctgccaccaa

SEQ ID NO: 26570 - DNA, 245 bp, Homo sapiens
  chr12:117484291-117484536
  hypo
aggccttccagaaacgcagaccataagcgggaaaggcactgcgcgtctcgggagggctgcaggggcgctcaccatctgccccatgcacacgctggccgcctccatcatggccccgtcggcgatggagcgagcggactccttctcgatgtgagggtttcccgacagcagctcctcgaccacctgccaggtggggcggaaacaaacggtgaccttgggcctccatcagggtcgtggggggcagaggg

SEQ ID NO: 26571 - DNA, 36 bp, Homo sapiens
  chr12:117529345-117529381
  hypo
caccaatctgcggagcgaggacgtcttggagaggac

SEQ ID NO: 26572 - DNA, 121 bp, Homo sapiens
  chr12:117530033-117530154
  hypo
agcctggatgagacatctgagcgaagtggcacaggacggctccagcaccgagctcagtgcacatggaacgccatcctccagggtcccgctctgtggctgcgacagatggtgagatgatggg

SEQ ID NO: 26573 - DNA, 44 bp, Homo sapiens
  chr12:117588695-117588739
  hypo
gtgtgtgtgtgtcaggcgggaggactgtatgggtggaaagttga

SEQ ID NO: 26574 - DNA, 104 bp, Homo sapiens
  chr12:117588798-117588902
  hypo
gtgtgtgtgtcgggcggggaggactgtatgggtggaaagttgagtttggaagcatcaaataagttatggaaaagggaaccaacgtttgtcgaggacatgccatg

SEQ ID NO: 26575 - DNA, 30 bp, Homo sapiens
  chr12:117593453-117593483
  hypo
ggcccgaaggaggccggccatggggcgtcg

SEQ ID NO: 26576 - DNA, 30 bp, Homo sapiens
  chr12:117593713-117593743
  hypo
ggtggggtcccagccgtagatcacacagtt

SEQ ID NO: 26577 - DNA, 89 bp, Homo sapiens
  chr12:117599138-117599227
  hypo
ggaccaaggaactccacgggaggtggggagcatcaggcaagcagggccagaccgccgagaacctaaaagccacacggaggagagcaagt

SEQ ID NO: 26578 - DNA, 174 bp, Homo sapiens
  chr12:117600036-117600210
  hypo
tggatcatgatgaggacgaaggtctggcagcaggaaggagaaggtgcctgtgtgctggcttcttcagaagcgctctggccttggcccactgtaccacgggatgccgcatggggtgggctagggcatcagcttgcctgcactgaactcctagtgccgtcacggcatgtgcaggag

SEQ ID NO: 26579 - DNA, 88 bp, Homo sapiens
  chr12:117788577-117788665
  hypo
ctccaaacttatctgggctcccgaagaggctgacctctatggacatcaaaaggtctcttggccgggtgcggtggctcaagcctgtaat

SEQ ID NO: 26580 - DNA, 21 bp, Homo sapiens
  chr12:117799086-117799107
  hypo
ggttgcacccactcgcctcct

SEQ ID NO: 26581 - DNA, 30 bp, Homo sapiens; identical to SEQ ID NO: 9110
  chr12:117799355-117799385
  hypo

SEQ ID NO: 26582 - DNA, 601 bp, Homo sapiens
  chr12:118198706-118199307
  hypo
acgcaagtctgttcccggtttccttgacctgggcagttcctgggaccaaggggcagcccctcgcaggccgggtttcgaccgccccagggcacccaccgatcgcactcacttgggcgtgtgggcctcgtccacgcggtgccccagctggaactcgtgggatttgctccgatgcagcgcggtgaatcccgggatcaagtgtatcagttttcgggaggagggcggtggggtccccgggggcttcagcttgttcttcttcctcatgggcggcgtgcccggcggggtcacggtggtgacgatgttgggggtgcgcggcggggtgcggaccgcgtgccgctgccggggcgatgggggcagggaacggtggcccgactccagtggcgggggcgggcacaagcccgggtaggcgtccacggtaagcctgtccacgtgggtgtacacaggggccccgggagtggggctggtgtgacaatagtgctggacgcacttggacgggaccctggggctctgggagagatgggtgcggatccacggggtgggctccggggggcacacgggattgttctccttccccgtctctgtcgtgggccactggatggtccag

SEQ ID NO: 26583 - DNA, 31 bp, Homo sapiens
  chr12:118293654-118293685
  hypo
ttactaccctgtctggcgtcaacactgtgcc

SEQ ID NO: 26584 - DNA, 28 bp, Homo sapiens
  chr12:118473719-118473747
  hypo
aatgaaccaggccaggcgcagtggctca

SEQ ID NO: 26585 - DNA, 39 bp, Homo sapiens
  chr12:118474261-118474300
  hypo
atggccctctagcttccgaattaacgtgtaggacctcat

SEQ ID NO: 26586 - DNA, 113 bp, Homo sapiens
  chr12:118481548-118481661
  hypo
gccacataagactttaaatcctagaaacaagctggccttcggtgaaatctgctgtgacttttctttttgtttctttttaagagttgatgtaggccaggcgtggtggctcatgc

SEQ ID NO: 26587 - DNA, 326 bp, Homo sapiens
  chr12:118583594-118583920
  hypo
tcataaaatgtgaggccgagtcttattgcccaaaaagcacctttgcttcaagtggtccttttgacccaagaaggatgttctaaagaagatggctgaaaaccttcccccttggtgaagtctggcgcggacaccgtaacaatgcctaagaagtagcctgcacttcccgttctgatgtgttatccacagaggctcagtaccaaagaggtgcgcagggtaggagggtgagaaggtcacggtctcatgccatctgatgtaccgaaagaaaggaaaggaggtgtttgaaggtgcaaatcactgtgatttggtctctgcgatgcaaagggggg

SEQ ID NO: 26588 - DNA, 30 bp, Homo sapiens
  chr12:118588914-118588944
  hypo
ttattctctcgctgcgttccttctgaaggg

SEQ ID NO: 26589 - DNA, 214 bp, Homo sapiens
  chr12:118590037-118590251
  hypo
ctcaaggtgtgctctgcgcagagacactctctgctctagcttctggagctcacgttcatgttgtgcctctgtttgcatcttgattttgctctggtaggcgttgagcagctccatttcctgctggagctgtagcctcaaggcctggcattctgcttcttgagcctcatctagccgtaactgcggacacagaagacacacacggtcatgcaccctt

SEQ ID NO: 26590 - DNA, 15 bp, Homo sapiens
  chr12:118860466-118860481
  hypo
ttagacagagtcttg

SEQ ID NO: 26591 - DNA, 100 bp, Homo sapiens
  chr12:119626323-119626423
  hypo
attacaggtgtgagccactgcgcctggcccctaaactcttttccaagccatcgttgcatttagcctttgcagcaaaagtgtgcatcggagaggagacatg

SEQ ID NO: 26592 - DNA, 52 bp, Homo sapiens
  chr12:120117232-120117284
  hypo
cataggaaggtgcggcgggcagctctgagtgccagcccggtggcagattttc

SEQ ID NO: 26593 - DNA, 116 bp, Homo sapiens
  chr12:120117614-120117730
  hypo
tttgggaagagaggtcggcctgagcgctgcctcctgtcctttgatatctggcactgggaagtaaaggggagaatcttggtttccaaatcccaaatgctcaccgctgcctttgttcc

SEQ ID NO: 26594 - DNA, 31 bp, Homo sapiens
  chr12:120117937-120117968
  hypo
ggttctgaagctggcccgggaatttgtggtt

SEQ ID NO: 26595 - DNA, 197 bp, Homo sapiens
  chr12:120134817-120135014
  hypo
cctgttcaggaggtctcgcattccagggaaggcacgaggctggccaggagtccctgacctgctctcacgacctcacatctctggacctccaggcatggcttgccttccctcctgcctgagcacccctcactggtctccctgcccccacctcgtatctgatgggaaatcctccctcacctccacgtccaggctttcaa

SEQ ID NO: 26596 - DNA, 170 bp, Homo sapiens
  chr12:120137332-120137502
  hypo
ggtctgctctaaccagtagagcgtggtggaagtgagcacgcttgccagcttccgcttctatattcttggaagaagccagcgtggaaagcaacaaggcctccagccaccagccgcagctaagcgcccacattatggccagcactcattgcgtgccatgtttgtgagcctgt

SEQ ID NO: 26597 - DNA, 30 bp, Homo sapiens
  chr12:120147740-120147770
  hypo
ggcccacggtggtttcgttgcaatcaggac

SEQ ID NO: 26598 - DNA, 501 bp, Homo sapiens
  chr12:120147976-120148477
  hypo
tttacgagcatgaaacgtggcttcaacatattggctcccttgaaagtaaagaaaaaacaccatgtccttggcctcacacctgctatcatgagtagcttctccaggtccttgataatataaatttggaagactgctccaattcctgggacatgggttagggagtttttcaagacattcagggcgtagagcccttcctcggtgcccaccaacaccacctgcaagggcagaagtccgaaggcagaacataagcacggtcacgtcaccagaacaatctctagtaagagcaacaaggcctccacagccctttctttcttgatggggtgtggctgtaaccagacaccagctggccgtgcccatgcaagcattacctggtcactgaagggcagcgtgcagttcatgtctagacggtcatcaccttccagtttcagcagggagtttccaagcagtttcttttcataggtgaaagaaaagaaaaacagaagacatcgtgaggctgatctg

SEQ ID NO: 26599 - DNA, 368 bp, Homo sapiens
  chr12:120148731-120149099
  hypo
aggagatttcacctgcgcagggttaataagacacatgaaagactccttcccccataaggctgcagcagaagtgcaaaggcgccgtgttagcagcgagccagcacgcctctgcatctctttacctgaacccaggcaggcagaagctcgtaagaaacacagtcgcgggcctattgtacacatattaacaaggatttcagtaaaagctcacgtgtgaaacgaccaacaagtcatccaaacaggtctaaccactgagtaaagcccttttcaggaggcttgtggttaagaatctgccaattgctaacacataaagtgtttattaggagtgaagagtctgaaaagagctgtttggtcttcgctggagcaaacgt

SEQ ID NO: 26600 - DNA, 261 bp, Homo sapiens
  chr12:120156113-120156374
  hypo
ctggtgctctggcgaccgcacgatggcggacatggcgatctgctgcctcgcggtggctggcgtggatgggtgtgggtggtccgttgctttgcggtgggcagctgcagagagaccaggacaatgccttttggttagctgggtcgcctagaggaccaaactaagccgaatgtccctgggctatctttcaaggacccaagaccaaaagaatatgcgtcacatcaacttggcaatgcacaggggccatacgtttttcagacatgg

SEQ ID NO: 26601 - DNA, 305 bp, Homo sapiens
  chr12:120172977-120173282
  hypo
gtaagctgcatctctcgttccgtgatctcccggcggagatggtccacttcacttcgcagttgtacaatctcgtcgttggcgccagaagcctcatcgagttgtttggacaagtagaagttttggttgttgagttcagcgttgtcctcggtcagctggtttagctgctcctccaggtctgtgattacctaaaagaggaaaggaatccagttacacgccaagcacattcatttcaaataagaaattgcttctagggctatggatttctgaacccacgtgacactggcaatcaacgtgccgctcatgag

SEQ ID NO: 26602 - DNA, 30 bp, Homo sapiens
  chr12:120222617-120222647
  hypo
aggcgcgacttcagcgaaggcaggagcgcc

SEQ ID NO: 26603 - DNA, 31 bp, Homo sapiens
  chr12:120234817-120234848
  hypo
ctttcaggaagtttgtcggagagaggtcagg

SEQ ID NO: 26604 - DNA, 31 bp, Homo sapiens
  chr12:120421162-120421193
  hypo
gacttgtatgtttccacgattatttcataga

SEQ ID NO: 26605 - DNA, 30 bp, Homo sapiens
  chr12:120533272-120533302
  hypo
tgccccccgcccaccggcacaggagcccca

SEQ ID NO: 26606 - DNA, 30 bp, Homo sapiens
  chr12:120541722-120541752
  hypo
aaatccactccgatcgtggtgatgtagctg

SEQ ID NO: 26607 - DNA, 36 bp, Homo sapiens
  chr12:120545352-120545388
  hypo
cacttctacagaaacacgtgcacaagaataagtatc

SEQ ID NO: 26608 - DNA, 298 bp, Homo sapiens
  chr12:120565537-120565835
  hypo
aaatactttctgggaacgccatcttccaagctccccattggaacaaatgtattttcaaaaatgaaaacattgagcaaagatgtggagcggcaatgctgctgctggcccaggcctctcatgtcaggatggtgtcgtccacctgctccgtggagtcggcctggctggccagcttcttcagggaccttcggttaacctcgttcagcacctccaaactggccacatccaggatcttggagagggactgtggggaaggatgagcaggaggaaacatagtcagaacatacggctgccacgttct

SEQ ID NO: 26609 - DNA, 31 bp, Homo sapiens
  chr12:120571412-120571443
  hypo
gataggccctttagctcggcaaatgtttcac

SEQ ID NO: 26610 - DNA, 30 bp, Homo sapiens
  chr12:120578177-120578207
  hypo
gtattgttgccagacgcaatatgcttcctc

SEQ ID NO: 26611 - DNA, 186 bp, Homo sapiens
  chr12:120580359-120580545
  hypo
aagagagtgggtaggatctcacgcaaggtgcggggggtattggagacaacaatcttccagacatgcagggacgcctgccgcaccaccagctgggtgtctgagcggcccatgtacagccctgccaacacccggttccgccgctctacccccagggcagtgatgatcgcctgcagccagtagaagggg

SEQ ID NO: 26612 - DNA, 172 bp, Homo sapiens
  chr12:120613495-120613667
  hypo
aaataccaggggccacgcctcaaccacccgcatggccaagaaggcttgctcacctccgaggatagcaaataggtgcttggtcagggattccatggccgaagagtcactgcactggcgtgccaggttccgcagtgccagcacagcttcatccatcaggcggggactgttggat

SEQ ID NO: 26613 - DNA, 30 bp, Homo sapiens
  chr12:120647933-120647963
  hypo
gccacccacaagcccgtgagtgaggatgcc

SEQ ID NO: 26614 - DNA, 43 bp, Homo sapiens
  chr12:120758791-120758834
  hypo
cttttatttagaaaagaaagtcgtggccgtgtgcggtggctca

SEQ ID NO: 26615 - DNA, 241 bp, Homo sapiens
  chr12:120908354-120908595
  hypo
gatctcgctggactcaggtgatcctcccacctcggggcgccgtgaggggtctgcgctgcgtccagctagtttattttctattttttttgtagagaggctggtctcgaactcctgggctcaaccgatcctccagccttggcctcccaaagtgttggattaccggcttgagcccggcgcccggctggaatactcctaacctaaagattgttcaggctgggtgcggtggctcacgcctgtaatc

SEQ ID NO: 26616 - DNA, 37 bp, Homo sapiens
  chr12:120956374-120956411
  hypo
ttttttttccctgagacggaggctcgctctattccca

SEQ ID NO: 26617 - DNA, 32 bp, Homo sapiens
  chr12:120991483-120991515
  hypo
gcgtgagccacggcacccaaccaggaagagaa

SEQ ID NO: 26618 - DNA, 31 bp, Homo sapiens
  chr12:121038110-121038141
  hypo
tgcacggctcattagccgcattctgctgctc

SEQ ID NO: 26619 - DNA, 30 bp, Homo sapiens
  chr12:121104894-121104924
  hypo
aaagcgggggcgcccgccgacgaggaggcc

SEQ ID NO: 26620 - DNA, 30 bp, Homo sapiens
  chr12:121159497-121159527
  hypo
cttggattcagccccgagagaggggagaga

SEQ ID NO: 26621 - DNA, 95 bp, Homo sapiens
  chr12:121166588-121166683
  hypo
cgtgagccaccacacccggccttaaaaatgagttttaaaagggacgtaaaacattgtttttatatgagggacccactaaccgtttcccagatatg

SEQ ID NO: 26622 - DNA, 30 bp, Homo sapiens
  chr12:121177325-121177355
  hypo
actgggcggcccggcgggggctccctgggg

SEQ ID NO: 26623 - DNA, 42 bp, Homo sapiens
  chr12:121203844-121203886
  hypo
tctgtcagtggctgcacgaatctggaagcgtttgctaacgcc

SEQ ID NO: 26624 - DNA, 18 bp, Homo sapiens
  chr12:121203945-121203963
  hypo
gtcgagatcacaagctca

SEQ ID NO: 26625 - DNA, 196 bp, Homo sapiens
  chr12:121205187-121205383
  hypo
ttctcttacctacaaagtatccgatgagggtgcagtgaaagtaggagaccttctgcatgcgcccggagatgttggcaggtccaggggccccacaggagtccccactggcttgctttttgtagttgtcatagcgaaggacaaagcatagtaggagaccaggcataacgatgtctccgatgcccaacatggagaagtg

SEQ ID NO: 26626 - DNA, 30 bp, Homo sapiens
  chr12:121352804-121352834
  hypo
aggccttcccgggaacgcgtcagcacttga

SEQ ID NO: 26627 - DNA, 36 bp, Homo sapiens
  chr12:121531379-121531415
  hypo
ggggcagggggcagcacttgtcggggagactcaggc

SEQ ID NO: 26628 - DNA, 30 bp, Homo sapiens
  chr12:121687807-121687837
  hypo
acacatgatccgctcgtccatgaatgggca

SEQ ID NO: 26629 - DNA, 360 bp, Homo sapiens
  chr12:121688231-121688591
  hypo
gcttagcctggatcgcgccacgccctgccctgaggttttcattcactgttccccgtccctggaatgttcttctcaccaacatctacgtggcttggtctctcccaccatgcaggtgtctgactaaagctcaccttctcagggaggacttcctgaagccctgtctaaaacagacaacccccaatgccgccaccgcccacatcactcctcatcgtagcacttatccctgacgttatcgtacagatttgtttattgtttaacccctcccacgggaacgttagctccaagaaggcagggatttctggctgtcttgctcactgcggactctccgtgcctaggagcgttcctgcacaaagtaagggc

SEQ ID NO: 26630 - DNA, 31 bp, Homo sapiens
  chr12:121691829-121691860
  hypo
atgatgatgatgaagacgatttcagtgaaag

SEQ ID NO: 26631 - DNA, 30 bp, Homo sapiens
  chr12:121711981-121712011
  hypo
gtccaggctgccaccggctgccagcccacc

SEQ ID NO: 26632 - DNA, 78 bp, Homo sapiens
  chr12:121754199-121754277
  hypo
attatcatgactcagcaattccgttcgtaggcatcaaatgaaaacaggtattcaaccccgggcgcggtggctcacgcc

SEQ ID NO: 26633 - DNA, 153 bp, Homo sapiens
  chr12:121756056-121756209
  hypo
tataaaaacagagatcggcttacctgcgcaaaagccaagttcagcactgtttcagaggccaagtactgtaaccggtactccttggagagggccagagcctgcaggagcatgggcagcgcgatggtaggggaggaagatcgccagtacagctct

SEQ ID NO: 26634 - DNA, 31 bp, Homo sapiens
  chr12:122166515-122166546
  hypo
gcgcccggccgacactcacttctgaaatgga

SEQ ID NO: 26635 - DNA, 281 bp, Homo sapiens
  chr12:122182116-122182397
  hypo
actgtgcctggccgagagtttctcgttcccagtacttcagccgacattctgggttcagtcctcattggctgggattggttgaatgcccatttgtgaaccaatcactgagaagctgcttgggcagcgccatgccgtgtgctaagtctgtggccctgggcggtggagggatggccacatgggtgatgggagaagaagataagtagtttcccgggtgaaagttgggtgctgttataggaaggtgccctgccggacaagtaagcaggcagcgtccttttgtgggt

SEQ ID NO: 26636 - DNA, 310 bp, Homo sapiens
  chr12:122192679-122192989
  hypo
gtggacgtgaattttggaaggatgctattcaacccagtacaccttctataggctaaaaacggggcagaggagggggattggacgggccgttcatctctgtgccggtgcccccgggaagcctgccctgctgtttaaccttaggcaaatgacgaacctctcccagcctcagtttcttgacagatacagtgagcgtgacaggagctacttggcagggcagcttggagggcaggagaagctgtgtctggagactggttagactggtgcctgtttaaatattagcaccggttagcatcaccgttgttttgggcta

SEQ ID NO: 26637 - DNA, 270 bp, Homo sapiens
  chr12:122213468-122213738
  hypo
gcagggcagatgccccagcctcgccctcctctctggactcccccaggtgttcgtactggcgttcaccttcctcatcctcttcctcggcaacttcctgaccacgctcaaagtcgtgcatgccaagctccagaagaacagaggcaagacaaagcagccgtgagcctcgggctcctgtgccctcggcccggacttcagactgcagggggctcccgggctccttcccagcagccctctcaggcccgtggcatcgctgggagagggcccaggccc

SEQ ID NO: 26638 - DNA, 31 bp, Homo sapiens; identical to SEQ ID NO: 9131
  chr12:122214279-122214310
  hypo

SEQ ID NO: 26639 - DNA, 30 bp, Homo sapiens
  chr12:122218932-122218962
  hypo
atcaggggtgcggccgggcccagatgtggg

SEQ ID NO: 26640 - DNA, 131 bp, Homo sapiens; identical to SEQ ID NO: 9133
  chr12:122231553-122231684
  hypo

SEQ ID NO: 26641 - DNA, 224 bp, Homo sapiens; identical to SEQ ID NO: 9134
  chr12:122232040-122232264
  hypo

SEQ ID NO: 26642 - DNA, 77 bp, Homo sapiens
  chr12:122252456-122252533
  hypo
cgcaggtgctcagccggctgatgacgggccagggcgcctgcccctacccgcccttcatggccgctgcggccgccgct

SEQ ID NO: 26643 - DNA, 30 bp, Homo sapiens
  chr12:122254987-122255017
  hypo
cgaagcccaaggaccgcatcgcctcgtgcc

SEQ ID NO: 26644 - DNA, 196 bp, Homo sapiens
  chr12:122261813-122262009
  hypo
ccatgccaggctcccgagtgaatcattggcacgttttaaggactccctctgcgccaggcccatctcacccccagagttagcaggtctcagggtcacatgtaacagcagtgccgtgcagcttaacagcacacacgggcgcagggcctccttgtcctgtccccttcataacctcaggtaatcccggtagcctggtgaa

SEQ ID NO: 26645 - DNA, 31 bp, Homo sapiens
  chr12:122266346-122266377
  hypo
agggggaggtgcactgcgtgcatctgtgctg

SEQ ID NO: 26646 - DNA, 30 bp, Homo sapiens
  chr12:122268182-122268212
  hypo
ctgggactcccgagcgtggagcccctggcc

SEQ ID NO: 26647 - DNA, 212 bp, Homo sapiens
  chr12:122276668-122276880
  hypo
tctcaacaacaacaaaaagagatcatcaagccggcagacaagatgctgccaaactctgaccccacctcagggcctttctccgttcgctcttcctggaatccttttcccgagcatggtcccatggctggctcccaaatgtcaccttctcggagaggtcttccgttatcaaaattagctcccctgcgatcttcgcttccacatattctcatcaa

SEQ ID NO: 26648 - DNA, 42 bp, Homo sapiens
  chr12:122282338-122282380
  hypo
aaactgaggcatgaaacgattaaggatctattaggccgagtg

SEQ ID NO: 26649 - DNA, 31 bp, Homo sapiens
  chr12:122319020-122319051
  hypo
tttctgctctgctccacgctctgcccaggta

SEQ ID NO: 26650 - DNA, 5 bp, Homo sapiens
  chr12:122425345-122425350
  hypo
cctgg

SEQ ID NO: 26651 - DNA, 31 bp, Homo sapiens
  chr12:122444564-122444595
  hypo
agcccatggacttgccgcgctcctgttcagc

SEQ ID NO: 26652 - DNA, 268 bp, Homo sapiens; identical to SEQ ID NO: 9136
  chr12:122461112-122461380
  hypo

SEQ ID NO: 26653 - DNA, 77 bp, Homo sapiens
  chr12:122463062-122463139
  hypo
agagaagaccccagggcgatggtaggagacgaaagcttgggctgcagcgtaagcttggaggcccgctgcggtggctc

SEQ ID NO: 26654 - DNA, 31 bp, Homo sapiens; identical to SEQ ID NO: 9137
  chr12:122478893-122478924
  hypo

SEQ ID NO: 26655 - DNA, 214 bp, Homo sapiens
  chr12:122479006-122479220
  hypo
tccaggttacccgtgtggggccgcctgactgcctggtgcttcctcggcaggttgaggtagaggaggggcgtggggctgggagttgggcagatgggtccggcaagtggctctgctgctcccagcctcagtttccccctccggaaagtgaaggtggtaacggtgcctttccaacgggttgtggggaggattccacgaggtgtccataaatgcttct

SEQ ID NO: 26656 - DNA, 450 bp, Homo sapiens
  chr12:122480939-122481389
  hypo
tgactttaagggagtggaccacgtgtcccgtggaatatgccacctcccgctgtctctctctcccttttatttcctatcaagtggaactcagctccaggctggatgcagtcagacagaacgccttggcaatcccgcctcacggaccatgccgtgtcttctgtatcgcttccctgccagacacacaagacgtctggtttctacacccagaatgaggcctcaaatgtccccccaggattttaaatatgttaggccaccatccccagctggctgcctccagacgcagggtacagttggctcagtgtggggaaggtcaggccagtgccggaattctttgcctctctggacacatgggatggctgtggtgcttgggtgggtgggtgggtgggggtcagggggcgggagtgagctcaggggtcccaggaggaggcgtatccagtatccagaccccta

SEQ ID NO: 26657 - DNA, 281 bp, Homo sapiens
  chr12:122481628-122481909
  hypo
cgagatccgtctcaaaaaaaaaaaaaacggtaaccagacccctccccgggagagctgccatggggttccgggcattgaggcacagggatgctgagccctctgacctacccgtccttggcagctgtgggatttcatcctgtggttctgttcccaccccctacagacgataacagcaaccagagctccatcgcagatgcctcccccatcaaacaggagaacagcagcaactccagccccgctccagagcccaactcggctgtgcccagcgacggcaccgaggc

SEQ ID NO: 26658 - DNA, 146 bp, Homo sapiens
  chr12:122483262-122483408
  hypo
ggcgatagagcaagactctgtctcagaaaaattttaaaaagttaataataatacggggtcagacagcaggcagcgcctcaggtgtggggggctcgtaaggccactgcctggcctgggttttcatggtaagacgggagccactgggg

SEQ ID NO: 26659 - DNA, 31 bp, Homo sapiens
  chr12:122491262-122491293
  hypo
tgctgtcccgttcccccgccctctgtgtccc

SEQ ID NO: 26660 - DNA, 21 bp, Homo sapiens
  chr12:122491955-122491976
  hypo
gtcagtcattgctctggcaat

SEQ ID NO: 26661 - DNA, 30 bp, Homo sapiens
  chr12:122497811-122497841
  hypo
cgtttaggactgggcgtctccaagcccacc

SEQ ID NO: 26662 - DNA, 30 bp, Homo sapiens
  chr12:122499172-122499202
  hypo
gccctgccgttgaccgcagcctctctggac

SEQ ID NO: 26663 - DNA, 125 bp, Homo sapiens
  chr12:122602830-122602955
  hypo
ccatgtaatattttcagacagcggttgatcatgggtaaagcacaataccgcagaaaagggaggaatgccgtacattccagtgttatatttcaacaatacaaaacggtgttcagtgaacactcctt

SEQ ID NO: 26664 - DNA, 137 bp, Homo sapiens
  chr12:122614926-122615063
  hypo
tcattggcacatttcagataccgttctcttcacggggtacgtgtgccgtgcctaagccgaggcggccgggccgtgactcatgctaaagaaaatcagaagcactcccgggtgtgaccgctcaccttggtggcattcag

SEQ ID NO: 26665 - DNA, 453 bp, Homo sapiens
  chr12:122622453-122622906
  hypo
ggcagggctgggtggggaaggcggagcttgcagcacctgggatgcaccggttcagccctgccgttcccagccccagctgtgcaccattctgcagagcgggttttctgtggttcccagtcttgtccctccggctcctcattggagccttcagcttctcgtcgtgccctcctcccacgtagctctctagccctggcccttgggcacccaggatcagcgtagggggtgaggaagggtggacagtgtgcctgcaatgtgcctgtcttagtgaccagcgggttctccagcagaaccggcagatgaagcacatctcagctgagcagaaaaggcgcttcaacatcaagatgtgcttcgacatgctcaacagcctcatctccaacaattccaagctggtgagttgccaagagcgtgggctgtggcagggcaggggagctggcaggacgtgctccctgcgtg

SEQ ID NO: 26666 - DNA, 31 bp, Homo sapiens
  chr12:122667355-122667386
  hypo
actggctggttggagtcgagatgtttgacct

SEQ ID NO: 26667 - DNA, 30 bp, Homo sapiens
  chr12:122684978-122685008
  hypo
agatgagttctcagcgccattccagaaagg

SEQ ID NO: 26668 - DNA, 31 bp, Homo sapiens
  chr12:122712136-122712167
  hypo
cgccctctgcctgtgtcgccaccacagccca

SEQ ID NO: 26669 - DNA, 30 bp, Homo sapiens
  chr12:122794214-122794244
  hypo
actgagcagacctccgagtggcctctgagc

SEQ ID NO: 26670 - DNA, 30 bp, Homo sapiens
  chr12:122839905-122839935
  hypo
aagcgagggaggcgcgatgcatgcatggcg

SEQ ID NO: 26671 - DNA, 18 bp, Homo sapiens
  chr12:122952917-122952935
  hypo
taattaatttattttttg

SEQ ID NO: 26672 - DNA, 11 bp, Homo sapiens
  chr12:122953534-122953545
  hypo
tcaaaaataaa

SEQ ID NO: 26673 - DNA, 70 bp, Homo sapiens
  chr12:122958415-122958485
  hypo
tggtacctcaggctcatccagcgtctgcttttcagatgtttttccctccgggacagggaggtctagctca

SEQ ID NO: 26674 - DNA, 101 bp, Homo sapiens
  chr12:122970384-122970485
  hypo
ttttttacgacgacattcttactggcactcgggccaaaaacctgagtcactccgatgactcttttgctctcatattctgcgtccaattcatcaacacattt

SEQ ID NO: 26675 - DNA, 27 bp, Homo sapiens
  chr12:123044411-123044438
  hypo
gcgcccggcctatcttaagcattttta

SEQ ID NO: 26676 - DNA, 37 bp, Homo sapiens
  chr12:123120921-123120958
  hypo
gacagaccaagactccgtctcaaaacaaacaaacaaa

SEQ ID NO: 26677 - DNA, 183 bp, Homo sapiens
  chr12:123214459-123214642
  hypo
ccagggcccacagggtgcagacgatgccagccgccacccgggtggagatagtgttcaccgcgtggtgggggtggaccactttgaaatacctgtccgcagccaccaccgtaaggaacacgatgctcccggccctgttcatggccaacgtgaagagccccactcggcagggaatgtccccaaaag

SEQ ID NO: 26678 - DNA, 21 bp, Homo sapiens
  chr12:123234885-123234906
  hypo
aacttgtaagccgggcgcggt

SEQ ID NO: 26679 - DNA, 30 bp, Homo sapiens
  chr12:123339276-123339306
  hypo
gagccctcccacagcgtctcccacaggtct

SEQ ID NO: 26680 - DNA, 50 bp, Homo sapiens
  chr12:123340659-123340709
  hypo
ctgcccagctggagggcgagcggagccagggcctgcgtgaggaggctgag

SEQ ID NO: 26681 - DNA, 30 bp, Homo sapiens
  chr12:123341720-123341750
  hypo
tcccaggagcagggcgagttgcagggccgg

SEQ ID NO: 26682 - DNA, 88 bp, Homo sapiens
  chr12:123409956-123410044
  hypo
caggcatctacccaagagaggcgaaagcaaactcccacaaaaaaaacatgaatgttgggccgggcgcggtggctcatgcctgtaatcc

SEQ ID NO: 26683 - DNA, 31 bp, Homo sapiens; identical to SEQ ID NO: 9141
  chr12:123414419-123414450
  hypo

SEQ ID NO: 26684 - DNA, 158 bp, Homo sapiens
  chr12:123542054-123542212
  hypo
ctacaagtatttacaaagtgccgtagacaagaccgcatctgaaatcagagctgggcgggaggcaggacctgtggtttctaagtgctctctccacttccccaggcaatgggcctatggacaccaaagctggggcgcccggccagaacctgaagccccag

SEQ ID NO: 26685 - DNA, 30 bp, Homo sapiens
  chr12:123636702-123636732
  hypo
tccagaaagatctgcggagcccacagagtc

SEQ ID NO: 26686 - DNA, 31 bp, Homo sapiens
  chr12:123688895-123688926
  hypo
aggatgagaaaactttcggccaaattaattt

SEQ ID NO: 26687 - DNA, 31 bp, Homo sapiens
  chr12:123733912-123733943
  hypo
gggggcggcgcccgtccgggaggctctggcc

SEQ ID NO: 26688 - DNA, 30 bp, Homo sapiens
  chr12:123738276-123738306
  hypo
cgccatggggactccggctttgggagaagc

SEQ ID NO: 26689 - DNA, 31 bp, Homo sapiens; identical to SEQ ID NO: 9144
  chr12:123754991-123755022
  hypo

SEQ ID NO: 26690 - DNA, 31 bp, Homo sapiens
  chr12:123775567-123775598
  hypo
tacaggcgtgagccaccgcacccggccaatg

SEQ ID NO: 26691 - DNA, 31 bp, Homo sapiens
  chr12:123879620-123879651
  hypo
ggagcgccatgaagtccgaggaacagaagat

SEQ ID NO: 26692 - DNA, 43 bp, Homo sapiens
  chr12:123960129-123960172
  hypo
caggtcagccccagcagtagccgaagcagacattccaaggggg

SEQ ID NO: 26693 - DNA, 301 bp, Homo sapiens
  chr12:123997852-123998153
  hypo
tttgaacacttgtcccgacatgccctgtcctggggcgccaggacccactcactcatttactccttgctggggctgccttggctccccgagaggtgggcgggaggcgagcatgaggagagaggggcggctgggtctatgtggaagcccagcagcctcatcaccttcctgggcggcagccgtaggagctatgagaccgaggcagaagcctggcgcctgactcctatcccagcttcggcctcttagttgctttcccttcaggcctcggtgctctcgagaggcctgtgcacgcttcatcgatgtg

SEQ ID NO: 26694 - DNA, 30 bp, Homo sapiens
  chr12:123998629-123998659
  hypo
tggataagcacaacgcgctcagtccacaca

SEQ ID NO: 26695 - DNA, 24 bp, Homo sapiens
  chr12:124108088-124108112
  hypo
tctgcctgcagacctccgcctccc

SEQ ID NO: 26696 - DNA, 126 bp, Homo sapiens
  chr12:124111671-124111797
  hypo
accactctggagtaggcgtgagtcaatattgtctgtggaccgagaaagctttgtcaaaggggcaggctccttgctgctcactcacaccctctgcactgcggcacgtgttcccgacaccctaagcat

SEQ ID NO: 26697 - DNA, 277 bp, Homo sapiens
  chr12:124141810-124142087
  hypo
atagcctagcatcatacgttgactaaaacccagagtcagggcctgccagggccttccagatgctgcttgctgaggctcctgggaaccttttgccccgcatcttccacactctccctcttcagtccggccccaccgcccccttgctattgcctgaaacaggcctgcttcggccagaggggcgctgcactttctgttctctctgctcgcaagctcttcccgcaggtgtttgcatggcctactccctgcctgccttcacgtctctacttctgtgccacct

SEQ ID NO: 26698 - DNA, 31 bp, Homo sapiens; identical to SEQ ID NO: 9146
  chr12:124156317-124156348
  hypo

SEQ ID NO: 26699 - DNA, 30 bp, Homo sapiens
  chr12:124272251-124272281
  hypo
gggtcagagcttcacgggacactggctccc

SEQ ID NO: 26700 - DNA, 196 bp, Homo sapiens
  chr12:124335339-124335535
  hypo
gaatcgccacgcagctcgccgcaggccccctttccaaggggctggccggccgggccacctaactgcttctttctttcttccttcttgccctccagtttgaagggcaggagatttccctggactcccgcatgggcatcttcatcaccatgaaccccggctacgcaggccgcacggagctgcccgagtcggtgaaggc

SEQ ID NO: 26701 - DNA, 43 bp, Homo sapiens
  chr12:124338356-124338399
  hypo
gcacgcacacacgcacgcacacacacgcacacgcacggacaca

SEQ ID NO: 26702 - DNA, 42 bp, Homo sapiens
  chr12:124338458-124338500
  hypo
acatacgcacacgcacgcacacgcacacgcacacacacacac

SEQ ID NO: 26703 - DNA, 242 bp, Homo sapiens
  chr12:124404098-124404340
  hypo
tctctggctccggaacgtttccaccagccccgaaatgaaatcccatacccattagcagtcaccccctggccccccactcctagtccctggcagtcaccgctctgccttccatctgtaaggatttacttgctctgaacacttcatgtcaatggcatcatacggtgtgtgacttcatgactggtatctttcactccactccgtgacctcacggttcatccgtgttgctgcgtgtgtcagcgctt

SEQ ID NO: 26704 - DNA, 37 bp, Homo sapiens
  chr12:124514724-124514761
  hypo
gcaggctctgaaggaacgcctgcgctgtttcagaagg

SEQ ID NO: 26705 - DNA, 30 bp, Homo sapiens
  chr12:124788612-124788642
  hypo
tgccttcttggccgcgagaggcacttccct

SEQ ID NO: 26706 - DNA, 30 bp, Homo sapiens
  chr12:124798970-124799000
  hypo
actgcagcctgggccggcccagccgctggt

SEQ ID NO: 26707 - DNA, 30 bp, Homo sapiens
  chr12:124810859-124810889
  hypo
gggacttggcttttcggctgctgggtctgc

SEQ ID NO: 26708 - DNA, 31 bp, Homo sapiens
  chr12:124819653-124819684
  hypo
aagcagcagcagagaacgcgtagttacactg

SEQ ID NO: 26709 - DNA, 91 bp, Homo sapiens
  chr12:124832011-124832102
  hypo
acctgaaagagttctcggagctctccaagcctctcccaatcgcatgtgcctcaccaggatgttctgtaaaacgatacgcaggtggcacctg

SEQ ID NO: 26710 - DNA, 30 bp, Homo sapiens
  chr12:124832329-124832359
  hypo
acccgttgggggcaacgagggagcagggaa

SEQ ID NO: 26711 - DNA, 30 bp, Homo sapiens
  chr12:124832740-124832770
  hypo
tggctctgcccacgcggccctccatcatgt

SEQ ID NO: 26712 - DNA, 30 bp, Homo sapiens
  chr12:124833179-124833209
  hypo
tgtgtccacacccacgggtgccgacatggg

SEQ ID NO: 26713 - DNA, 30 bp, Homo sapiens
  chr12:124833920-124833950
  hypo
cttcgtgtggcccacggcccgtgagctact

SEQ ID NO: 26714 - DNA, 31 bp, Homo sapiens
  chr12:124850367-124850398
  hypo
ccagctgtgctctccccgccatcctcaaggt

SEQ ID NO: 26715 - DNA, 30 bp, Homo sapiens
  chr12:124856542-124856572
  hypo
ttagggctgcctggcgcccactcaccggtt

SEQ ID NO: 26716 - DNA, 30 bp, Homo sapiens
  chr12:124856776-124856806
  hypo
gcactcgctcttgacgggctcctcggcctt

SEQ ID NO: 26717 - DNA, 790 bp, Homo sapiens
  chr12:124869697-124870487
  hypo
ccatttacacgctggcgaggcgagcctgcaccttctgtgcttgtggaggagggaagggtctcagcctcccgtggcctgcctcaagccctccaggatgctggggctgagacgtccgcccccgcccccccagacctgtccctccccaaccacggcagccctaaagctgtgaggtcaaatggggcaggggagccactcgctcaggacccatttgcctccgggtcctcattccaacgcgctgacagcccgaattcctggctgagtcagtctggtccaccgcgctccttcccccacaccgtgagacagggctgagggcccccagaggtgtctgtctgagaggagtggggtgcagggtgggggtggagggcagcctggcccggcccgtctccaaggcagggacactcatagcagcattgccgcctgcagccatctcggggtactcccgggcttgaacccccagaagctgagttctaacaaggcggcataatagcccctccctggcccatgcctcctggggtgcagagacatctcctgaggcagtctgggctcctctcccagcttcccagaggcgcggtgcagcgtgactgggggctcaccatcttcagcttgtgctgctgcaagatctcatcgaggttctgcctcttcttgtagttgaagtagaagttcttacactgcgacacagtcttggagcccaccatccgggcgatggccgaccagttgcggccgtgttccaggagacctgtctcaggagaggagggcagtgagaagaggccaggcccggcacgcagagggg

SEQ ID NO: 26718 - DNA, 334 bp, Homo sapiens
  chr12:124879941-124880275
  hypo
tgtccagattgctgtaattcacggcagacgaacatgctgctgctcacgacattattacaaatgtcactgagcagggcctccgcgtgcacggcccccaggggacgctcactgccgtctccatgggcaggacccaggatgagctcactgtcatcactgaggacccaaccttgagatggtgggacacgggctcctctccgccggtgagtcatccccagccgtcctcccagcctccggatctgcccttccagaaggcaaacagagggcaggcactgtcttcccagttctcaggcaatgggcggtgggggcgggggtggtcaccggtgaggaggtggta

SEQ ID NO: 26719 - DNA, 459 bp, Homo sapiens
  chr12:124893320-124893779
  hypo
gaaagaaagcgaaggttacaagcactccaagggcattgcttcctgatcatctggctacatggagctacgaagtcatccgtgccgtggaggtgacttccgccaactccatgcacagggtgagaacaggataagacagcctggtgctaggggcatctttccccagttccaagtcagcggcagcacgttgtcacgtggcactgggcacggtgagaggatttatttacaccatggcaaccggcacatgctacaaacgcagcttccccctacagaaagctggttgttaaacatttaccagcactctacggcagaaagatgcgtgtcgacagaacgtgagcaacatttaacacgcacatggaagcctgttccgcctgtacagatgtgtgctgtgccagccgaggctctgttgtaaatcctaattcagatcccgacccgcaactcggcatcaaatccacagtccct

SEQ ID NO: 26720 - DNA, 30 bp, Homo sapiens
  chr12:124894793-124894823
  hypo
cctctctgatgcgatcgcccctgcactgca

SEQ ID NO: 26721 - DNA, 508 bp, Homo sapiens
  chr12:124895936-124896444
  hypo
tcgggggcggagcctcggcctccctgggcttccttcttggacccaggccggatgactggagcccaggacgggctgttcccgtctcagtgtcccatctctgcagaaagagaggcccccttggccacatgaacccccatcgctgcgggaaggccatattggctaccaggggccgggccctgccacctggcctagccagcctcacatcctcgctccccaacggtctgcagtcaggccccagcattcctgggctctggttttgcaattcactaggataacgcggcccttccatcaatgaatcatggactataaaccactgtgccagcgcttgagctgttccccgcaccgccccacagtccgtgattcacctcagggtggtggtgatggggctcggagcccaagagaggatgctcgggcctcaacccagcctccaggctcaaaagccgctcacggccgatctcaggggccaggttccgggaggtgggggctcggccctcccttgccaaagctc

SEQ ID NO: 26722 - DNA, 30 bp, Homo sapiens
  chr12:124901827-124901857
  hypo
cacgaagagcaagccggacactcactctac

SEQ ID NO: 26723 - DNA, 30 bp, Homo sapiens
  chr12:124905087-124905117
  hypo
ttgtgcatcgggaccgccccacgccccacg

SEQ ID NO: 26724 - DNA, 217 bp, Homo sapiens
  chr12:124911341-124911558
  hypo
aggttctgcagggaaacggagggcagggtcagaggcccagggacgaggtgctccggccggcgcaggggacccagggaagacacagaggggacggatggtctgcgccagagcagggaaaacgcgaaaccaaggagaaggagaatgatgagtttaaaaataataatagctcatgctgggggaagggagaatgtaaaggcctccccgacaggtttatggt

SEQ ID NO: 26725 - DNA, 30 bp, Homo sapiens
  chr12:124929689-124929719
  hypo
accagggcaacccccgggcaggcagaggca

SEQ ID NO: 26726 - DNA, 31 bp, Homo sapiens
  chr12:124947479-124947510
  hypo
cagcaactggggttgccgcttccatcaatcc

SEQ ID NO: 26727 - DNA, 31 bp, Homo sapiens
  chr12:124967299-124967330
  hypo
cccatggagatgcagacgagcctgaagttgt

SEQ ID NO: 26728 - DNA, 129 bp, Homo sapiens
  chr12:124971792-124971921
  hypo
tggtggcaagtgatggcgacaaacacccgacagccagcgaggcccaaagaccaggtttcagaacaaagcgacccctgaccccaaggccgccctgtaaaagaggaactccccgctcgtatcacagccaga

SEQ ID NO: 26729 - DNA, 461 bp, Homo sapiens
  chr12:124979223-124979684
  hypo
cctcagagcctcgagccgcaccaaggtgaatacacacggaacgggaggacaggaaggaaggggagctgtgacctatccggcccccttgccccctggaagccaccccaatcctacccaatactgcggcagcgggggagcagaggtgaggctaggctgcaggaaagtgaatacagcaggagctccacattcgcgtgccaatcccactaccagtccagagagggcagagccccagctcagcctggccccagcctccatcttcccagctttaaaatgggagcaaagagattttatcagatattctggaaaaggcttcagacaccaggggtctctgtggcggcctcccctctgccctgggaggctcagagccacatgagcctggctcccaggagaaaggaaggggtgaagactcagtggaatggaagaagggtctcaaaggtagccccaggcgcacacatgtgcac

SEQ ID NO: 26730 - DNA, 31 bp, Homo sapiens
  chr12:124979935-124979966
  hypo
aaaacaagatcagccacggggcagctggctc

SEQ ID NO: 26731 - DNA, 64 bp, Homo sapiens
  chr12:124980536-124980600
  hypo
cagaatgacagccagtcgggccctgcagcctagggataggtaccccaaacggctcctggggcag

SEQ ID NO: 26732 - DNA, 107 bp, Homo sapiens
  chr12:124989192-124989299
  hypo
ctgacaaacagatgaaacaaacgcagtctgtccatcaatggactacgattcagccacgcaaaggtaagcgctgactcagccacaacgcaggtgagccctgaagacat

SEQ ID NO: 26733 - DNA, 182 bp, Homo sapiens
  chr12:125009051-125009233
  hypo
agcctgtctgagaacaaggcccgcatggaaggaggcacagctgaggcaaagccagctcccagaggcattgtttgagcacctagatccagccgtgcctgaacgtgtcctaccctggccactctgaggacccatcaactccccgtcatagcctaactcggctcgagtgtgtctctgccacaact

SEQ ID NO: 26734 - DNA, 30 bp, Homo sapiens
  chr12:125020032-125020062
  hypo
ccagacccacttcccgtgagaaagtccagg

SEQ ID NO: 26735 - DNA, 30 bp, Homo sapiens
  chr12:125042451-125042481
  hypo
caggctccagagggcgacatcccctgcagg

SEQ ID NO: 26736 - DNA, 30 bp, Homo sapiens
  chr12:125062417-125062447
  hypo
cgagctcggcaaacacgcatgtcctcgcaa

SEQ ID NO: 26737 - DNA, 174 bp, Homo sapiens
  chr12:125062704-125062878
  hypo
ctgcaggggcggggccgagacaagcctgggcagggagaagggaagggagcccgtctgtgcctgtagcctgggcagggagaagggaagggagcccgtctgtgcctggaaaccaatttgctctggcagcgctgtggaagaaaaattccacgcatgtccccgcgagcccttcgaagc

SEQ ID NO: 26738 - DNA, 30 bp, Homo sapiens
  chr12:125089689-125089719
  hypo
gtttgctctttggtcggatatcataccccc

SEQ ID NO: 26739 - DNA, 219 bp, Homo sapiens
  chr12:125092406-125092625
  hypo
ggtcactactgcagcaaaagccgaaagccaagctccgtgtccatcgcgaaggcactgggcatgtggctatgcagccgtgacaaaggatgaagccatcccgtggccagggcgcagagtgacctcccagatctacgtttcatgtggcgtttctgccgtgtatttttaaacccggggacaaatgtatgcgtagtaaaggtcgtgaggtcatttgtctttggt

SEQ ID NO: 26740 - DNA, 319 bp, Homo sapiens
  chr12:125152046-125152365
  hypo
gacttgtggatggaacgtgtcaccttcagaggaagggggcaaaataaacctttgaaggtgagcttgctaaatgcttgcgtagtgaggcccctgcatctccttttgccgagactgggggaggctgaatggcaccaggccctgtctctcagccccgctcagccccatccctctagttcagtcctgtgggaccgcccgatccttgtgcagcccagctacaccagcaggtcgccgaatgtggattgtatccgggtggcatctacacagatcagaaggtagttcagataatgggatcctttgaagcagtcgatgaaacattcca

SEQ ID NO: 26741 - DNA, 31 bp, Homo sapiens
  chr12:125158872-125158903
  hypo
aagccccccgtctggccgtgctgagcagaca

SEQ ID NO: 26742 - DNA, 326 bp, Homo sapiens
  chr12:125184392-125184718
  hypo
gaggaaactgaggctcagagacgctaagcacacttccaaggtcatacagccaatgagcgggagagccaggatttggaccgctgaccacctggtttccaaacctggtctcccttcacccctcctccccgctccacgcctgcagtctccaggacggagaaagtccttttcacttagcgttccacttgtgtcctcattagaactcctacttgcggccgggcgtggcagctcacgcctgtaatcccagcactttcggaggctagaggcaagacaggcagcgtcaacaagcagagctgctggggcacggcgatagggactggaagggagtg

SEQ ID NO: 26743 - DNA, 40 bp, Homo sapiens
  chr12:125223878-125223918
  hypo
agcccatgaatgagaccggaaatggcgaataaaattcagg

SEQ ID NO: 26744 - DNA, 141 bp, Homo sapiens
  chr12:125236640-125236781
  hypo
gactgatgcatacaagacagccggctcctgaggcctggggcacagcgagcgccgactgccagaaaacaccgtggccgcggggcggctgcactgagccttgtcaatagtgagcactttgccgtgagccctgtctggcttaca

SEQ ID NO: 26745 - DNA, 30 bp, Homo sapiens
  chr12:125292498-125292528
  hypo
gggacacccagacccggcggccagagccag

SEQ ID NO: 26746 - DNA, 30 bp, Homo sapiens
  chr12:125333307-125333337
  hypo
ctagagaatcagagcgtgatcatcaccaga

SEQ ID NO: 26747 - DNA, 114 bp, Homo sapiens
  chr12:125411764-125411878
  hypo
tgtaacagtgtggcacgcaacgaggccagagacaaccacagaaccagagtcccgtttacctgccgggtttattcttcataggaagagtaaggaaaaatacggaagaatggtaaa

SEQ ID NO: 26748 - DNA, 44 bp, Homo sapiens
  chr12:125447386-125447430
  hypo
aaaaaaaaattaaaaagtgctggtgaggacgtgaagaaactgaa

SEQ ID NO: 26749 - DNA, 99 bp, Homo sapiens
  chr12:125500632-125500731
  hypo
tcggcagcggatccacgagccctgaatgcctgcattcatcaggggagcagctggcgcgttctggaggcgaaacgagcttgcttccgtgtcgaagctttt

SEQ ID NO: 26750 - DNA, 121 bp, Homo sapiens
  chr12:125566035-125566156
  hypo
ccagctgggtgcaggtgctcacggagctctgctccatgctcactcaggcgttctcagcaaaactcatctctcctatgggtaatccccgtcgaggccatgcgatgccctgcttaaaaaaata

SEQ ID NO: 26751 - DNA, 419 bp, Homo sapiens
  chr12:125578189-125578608
  hypo
ctctgctcaccccatggctcccgcagcttctgggaagtgaacagtcccaggccctgcggctacgtctcaggtcagaaaacagggccacctgccctcctgctgagatgcttctctctgtcgctcattttgctagtgtccgaggtatagactccatcctgccggagacgggggtgtgtgtgacgcacgttactcgcactcgaactgagatccagccggttggcagggagtctgtcggcatttggtggcttcgtggcaggcattattgggcagcactcctggccgtgtgcacccagcgtgggagggcctgcgtggatgccatgttcatagcgcttggtcccacagacacctggacacccgctgtcggagctgagtaaggacctggcacaggtcgactgcgcgaaagcctctgctcaccctct

SEQ ID NO: 26752 - DNA, 31 bp, Homo sapiens
  chr12:125636478-125636509
  hypo
agggatctaggttgtgcgctccttatgagaa

SEQ ID NO: 26753 - DNA, 30 bp, Homo sapiens; identical to SEQ ID NO: 9155
  chr12:127509692-127509722
  hypo

SEQ ID NO: 26754 - DNA, 167 bp, Homo sapiens
  chr12:128773736-128773903
  hypo
actctcacttgttcattaatgcgcatatgcacctatacacaccctctcacatgttaacatacatgcacacttatacacacgcacacatgctcatgtgcgcacacacacacagacacacatacgtgaatgcagccttgtgactagccgttagtttttaagaacaaggg

SEQ ID NO: 26755 - DNA, 43 bp, Homo sapiens
  chr12:129148683-129148726
  hypo
caggcacacacacatgcgcacaggcacacgcacccacacgcat

SEQ ID NO: 26756 - DNA, 530 bp, Homo sapiens
  chr12:129189629-129190159
  hypo
tgcaggaggctgtattcagcacgtggctgcagttcagtgatggctctgtgacgcccctggacatctacgacaccaaggacttctccctggcagccacctcccaggacgaggctgtcgtgtcagtcccccagccccgctctcccaggtggcccgttgtggtggccgaaggggaaggccagggcccactgatccgagtggacatgacgatcgccgaggcctgccagaaatctaaacgcaagagcatcctggctgtgggcgtcggcaacgtcagggtcaagttcggacagaacgatgctgactccagccccggcggggactatgaggaagatgagatcaagaaccacgccagcgaccgccggcagaagggccagcaccatgagcgcacaggccaagatgggcacctctatggcagctctcccgtggagcgtgaggaaggggctctccgaagagccactaccacggccaggtccctgctggacaacaaagtggtgaagaacagtcgggcagacgggggcaggctggcaggagag

SEQ ID NO: 26757 - DNA, 238 bp, Homo sapiens; identical to SEQ ID NO: 9163
  chr12:129338587-129338825
  hypo

SEQ ID NO: 26758 - DNA, 223 bp, Homo sapiens
  chr12:130037480-130037703
  hypo
cctggcatttaaggtcatccacggtccagatccaacaactacaacatggatgccccaagtccgagtctctggggacaagaaaggtcacgccaccatccgagccccagccttgctggtctgacagcatccaccggagcagcttcggttactcaacctttcaaggccaggctcttccccttttgagactccgagagtgttgcgcgtttgctcccagctgtgtctg

SEQ ID NO: 26759 - DNA, 31 bp, Homo sapiens; identical to SEQ ID NO: 9164
  chr12:130136921-130136952
  hypo

SEQ ID NO: 26760 - DNA, 373 bp, Homo sapiens
  chr12:130184499-130184872
  hypo
tctgataaaggaagatgctcccgatcctctgcaaggggggcccggactcatcgatgtcactgtggcctgtccggatcccattgcttctcctcgcgtcttccctgacgcagtcccctctctcaccccctgggtgcacggtgtagtagagctccacgggggtcccctccggctggtccacggacttcctcctcccggcaaccaccgtgggggggctgaaccagctggacaggagctccagctcggccacgcacagccccaggtccccctgcagccggcagctgccccgcacctctcgggtctctcggaaagcaaagaccctcaggcacggcagcttctccccggcgctgcggtcgtcccagtctctgcccatgat

SEQ ID NO: 26761 - DNA, 1245 bp, Homo sapiens; identical to SEQ ID NO: 9168
  chr12:130645408-130646653
  hypo

SEQ ID NO: 26762 - DNA, 170 bp, Homo sapiens; identical to SEQ ID NO: 9169
  chr12:130646945-130647115
  hypo

SEQ ID NO: 26763 - DNA, 31 bp, Homo sapiens; identical to SEQ ID NO: 9170
  chr12:130709678-130709709
  hypo

SEQ ID NO: 26764 - DNA, 144 bp, Homo sapiens
  chr12:130852206-130852350
  hypo
tgagtaaagtggcttctgagccgagctgcactcaccgaccgcaagaaaagcagaatgccagccggagcttacagcgggcaccggcaggcacagggaaatggccttagtagcacgggaggattccgtgagaaagtcaggaaactt

SEQ ID NO: 26765 - DNA, 34 bp, Homo sapiens
  chr12:130894170-130894204
  hypo
agccactgcgcccggcccagaatgtagcttttga

SEQ ID NO: 26766 - DNA, 163 bp, Homo sapiens
  chr12:130906936-130907099
  hypo
ggagtaagcagccacatgctccgcggctgaaagacacaacagcgatgatggggccactaaccgatggatgggactgtcacgggccgggacctctgaggaccagcgctgccacggggaaacctccggcccatgtgatccacccgtcctgcagaggctgggttcc

SEQ ID NO: 26767 - DNA, 307 bp, Homo sapiens
  chr12:130909490-130909797
  hypo
cagaattagtcctggaggcaccgaggggggggaagcatgcgtctactcaggccgggggcatgccgtggagggctctgcaatgaaaacagaatgggttacggggctggggcggggtggaggctgaggcagagcacacgcagagccagcgggccgggcaggagccagcgccatgcatccagccaaggagagggcaggtgagatcccggcggcacatcaggccccacagtgcccacggtaccgctgctgtagatggtgggtgtggccacggtgccaggggagactgcccgggggctacatcctcagaaac

SEQ ID NO: 26768 - DNA, 132 bp, Homo sapiens
  chr12:130913729-130913861
  hypo
cctggcaggaggtggagccaccgcacagactgtgtgcttactccgggcccagctcagcctcagcatgagacgaagattgtgcagatagtaggggcactgggcggaggctgcggacagcagaaaggcttcaac

SEQ ID NO: 26769 - DNA, 385 bp, Homo sapiens
  chr12:130919112-130919497
  hypo
ataaacttcagaaacctagcacgacttaggaccccagctgggcgtctccatctctctcagggacccaagggtagcggggaaagtgcccatgtctcttgatctccacggggcccgctccgagcccgcgcccaccaggaggatggtgtggggcccggcccgctctcacctgcttgccaagttcagagcctttcaggaagtcgtccaccgaggcgcccctcctcttgaagtctggagagtcataggcgtcctcctcgtctgaggcggcgtactgccccgcgctgcttctctctaggaagacgctccttttctctaacttggaaagaaaaaggaggcacacgggtgaggcagggccaccttcagctacgctcagccccacctgcattca

SEQ ID NO: 26770 - DNA, 142 bp, Homo sapiens
  chr12:130925067-130925209
  hypo
gggagcctctcctgaaggccccgagagaggtgcccttcacctcctgactccccacggagtgcccgtgtctggtgtttctcgttcttcacccccgcactcatcagaaggcatcgcgggaggcgtcagtgaaaagtgggtggcc

SEQ ID NO: 26771 - DNA, 30 bp, Homo sapiens
  chr12:130926963-130926993
  hypo
ttctccgatgtcgtcgatgttcacgtccag

SEQ ID NO: 26772 - DNA, 465 bp, Homo sapiens
  chr12:130933999-130934464
  hypo
ctcagcggctgtcatcgcagcgagatgcagcctgcagcgcccagcagagggtgaggatgcgggagatcagggtgctggacacaccccctttcactctcggtggtggggatcggggctctggacatgtcccctttcactctcggtggcgggatgtcccctggaaagacgcactcatggaccaacccctgcacctgtgaatgggaccttatttggaaacagtctttgcaaatgtgatggagttagtcatactgcagcggggcagattccaatccagggaagggtatccttaaaggaagaggggagaacgcacaaagacagggagggcgaggcggccaggcaggatggaggatggaggcagagactggagccacgcagctacaagccagggccgcctggtctcccggcagccagaagaggaaagaaggacccctccttggagccctcggagggcgagaccctgccgat

SEQ ID NO: 26773 - DNA, 125 bp, Homo sapiens
  chr12:130941077-130941202
  hypo
tgggaaaggcttgctgggggccgtggagatgtccaggggggccaccgcgctgccacccagcaggtcaatcttgccagcgtgctgccggaacttctccaggtcccgggacagcaggttgaactgct

SEQ ID NO: 26774 - DNA, 176 bp, Homo sapiens
  chr12:130968592-130968768
  hypo
atgggaaggatagactggaggcgaaacatctctccagagtctgccggcgactgtcacttaggtgtccttggccggaaggagcccgatgccccccgaagtggacccctggccccatgtcgcatcccagctgaaagcccctcggtggggagtaaagcggcatgctgtcacagggccac

SEQ ID NO: 26775 - DNA, 66 bp, Homo sapiens
  chr12:130985409-130985475
  hypo
catgctttaacccaagtgagccgcttctatcactctaccacacgcgtcatctaataatggaacaac

SEQ ID NO: 26776 - DNA, 216 bp, Homo sapiens
  chr12:131077262-131077478
  hypo
ttactgagggcacagagaacccgggggaccttggccgtggcgggccaatcagcctgcatttgtgagaagagcgtttcgcccagcacgtggatttgtttcccaggcagggaaatcgggagcgggagagatggacagcgagctggtgaggatccgggctgcgatgtcgggagcggtgagagcgagcgcggcttccacgctgacccttctggcctcatc

SEQ ID NO: 26777 - DNA, 569 bp, Homo sapiens
  chr12:131159258-131159827
  hypo
aaccttcttatcaccccaagccgaaaccccatatccatgaccggccgctccccattccccacccccgcccctgcaccctccatcagcatgctttccgtctgtgtgggttcgcctgctcgggacgggtcgtatacgtgggatcctgtaacacgtggccttccgggtccggcctcttccacacagcgtgtccgcaaggttcatccgtgtggtggcgtgtgtcaggcttcattccttttcgcggctgaatcagattccatcgtgtggatggaacacattcacgtttcgtttatctgctcatctgtagaggggcgtgcagtgagctttttacagatgttcccacccattcgtgtcaaagagagcatccttgatccaaagacacaaactacaaaagggcacagccgggactaggaccccagttgtcccgaaggacctgttggccgccagatagtggttgaaggaagggacgcaagccctggttgacggagccgcggcctctgctgagacaggcgggtttgtccgcaggccttcgggaacgatgggtgtctcacgcttctacctaaggccaacca

SEQ ID NO: 26778 - DNA, 190 bp, Homo sapiens
  chr12:131164353-131164543
  hypo
aatgtccctgtgttcacccaccgcgggaaggacctgtgactgtgaccacgcagagagtgtgttcgcccgccacgggaaggatccgtgagtgtgatcatgcaggcagtgtgttcacccaccgcgggaaggacccgtgagtgtgatcacgcagggagtgtgttcgcccgccgtgggaaggatccctgagtgt

SEQ ID NO: 26779 - DNA, 850 bp, Homo sapiens
  chr12:131272438-131273288
  hypo
accacctggctgggtgttctgcgcctagagactgggccccgggagagcgctccacagtgaacttgcgaaggatggaatttacataaagaaggcaccgtctttagtcctggaaaggcaccctgggattctctacctccgtccgtctttttcacaggcagggaactgaggtcccaggaggcccaggtcaccccacccaaggaggcagggcctcccctgcactctctggaacctctccctgccaagaagccagaggccctgttttctcaggcttaggaatctgcactctcttgttcaaagactgtgagtcagaagaggagggccaagtgccgccttgaatttctcttactgctcaaatggaaaacaatgaaacagggctgtccacatcacagcctgccacctgccagtcatttagagcctggcgcgcatttccatagctcctctgacgccaggacaatcagacccgtctccggagggctcctgcctctggatgtctaaatgttcttgccttaaacccggtgtgacgctccacccctcccacaccgcacacatacgaattttaacaaaatcttcaaagcagaacttaacaaaaggttgcgtggtaccaggtccatttggttccatgtgaaaccaactaggaagatccgcattaggctcttcctcagctgcgccgagggcctggtttctattcatttgagaagctgtgtgcgcccctgtatggtctgttctttcctttagggctcgcttttaacagtgagtgttgttgtggcaactaaaataaggagccggccagtgctcctagggaggaaaacctcggcaactccgcaggtgcaggcaccggccacagacccac

SEQ ID NO: 26780 - DNA, 31 bp, Homo sapiens
  chr12:131291827-131291858
  hypo
aagacccctactatgccggtcacaaccctac

SEQ ID NO: 26781 - DNA, 41 bp, Homo sapiens
  chr12:131294421-131294462
  hypo
tagctggacacagtggcgtgtacctgtagtcacaagtgctc

SEQ ID NO: 26782 - DNA, 30 bp, Homo sapiens
  chr12:131366696-131366726
  hypo
cctctaggtactcccgagagcgcctcctct

SEQ ID NO: 26783 - DNA, 30 bp, Homo sapiens
  chr12:131389263-131389293
  hypo
cggccacctgggcacgggctgaaccacacg

SEQ ID NO: 26784 - DNA, 938 bp, Homo sapiens
  chr12:131572480-131573418
  hypo
aggcctcagtttgaggagcaccgtcctctgcggacggccgtgacgccttctctctcctcccacgggctccgtttctcctctcccctcccgccagggcccggcccacagggctccctttgggcttccctcgtggtgtcgtagggagcagcccaggggagaaggcgcagagctgcccccatggagagcacctgttcgttcctggagatgggcggactgcacggtgctgtggccaaggctgctcgtcttaccagcagagaaactgagccccagagagaggggggcgcttgctggtggtcgcccgtcgttcaacagcgtgttattgaattaccggtagagcctgggctgtttaggtagcacccgggccatggggacctggcagtgaggatgctgtggcacgcacagagacacagcaagtcagtgcacgccacgtcctgccccgtaagggccacgcgggagatcatgtcggatgacttgtggataattaggctctaaaacgcagtcctggtgatgccggagctgtttgaaagacggaagcccaggagggcctgcctgagaaggtggcggtggattttacatctcagggtggagaggatggagcctcccggccctgagcaaggacagtccgggcagaggacagggtggggacggagggcaaggagggagcagccaggggtggtcctcggggaaacgccagggcggaggcaggggctccaggcccaggggtcgtgaggggcaggaggcggggagcaggagaggtggcggaggctgctgcggtgactcgagaagcggcagcccgctggtgtggcgggggtggaggggcacgagtcccactgcagatgaccagggttgccccatcttcgactaagaaagctggcgatctgtttctcccacgaaatcttctgactgttagaggtgtcgtcagttattacttctgagcc

SEQ ID NO: 26785 - DNA, 30 bp, Homo sapiens
  chr12:131623325-131623355
  hypo
ctgctctagccccacggctacagctgcgcc

SEQ ID NO: 26786 - DNA, 31 bp, Homo sapiens
  chr12:131693247-131693278
  hypo
tgagggtgcaggtcatcggggtcccgagtga

SEQ ID NO: 26787 - DNA, 249 bp, Homo sapiens
  chr12:131836987-131837236
  hypo
atgggttggaggagaagccagcggaggtgccgggatggcctggccgggcctgctggaaccagaggcaggccgattccaggaccagtgttctttccttggaaaacacggagtgagcttcctgacgtcgctgaccacttccatgagaatggaagaaggaggatgcaccccggaggggcagaatttcttgtcctggaatgccggcagtcagcccctcactcccgtcttcccgcagaggaggctctttgcctt

SEQ ID NO: 26788 - DNA, 218 bp, Homo sapiens
  chr12:132076427-132076645
  hypo
tcactgcaggaggacgcccccgctgggactcggcgtccgctgcgctgagccgctaaggagccggtctacttgctcccgcagcagcccgggggccggagctgccgacaccagggagacgcgttttctgcactgactcctacgctcccgcgtggacatccccagcatgatttctgtctccacccacttcgcacacaccccgccccggccagacaccccca

SEQ ID NO: 26789 - DNA, 30 bp, Homo sapiens
  chr12:132084638-132084668
  hypo
ggagaggtcctggccgttcttgtcactgcg

SEQ ID NO: 26790 - DNA, 31 bp, Homo sapiens
  chr12:132105679-132105710
  hypo
ctgtccctgggggaggcggacacaagggccc

SEQ ID NO: 26791 - DNA, 266 bp, Homo sapiens
  chr12:132169224-132169490
  hypo
gaatcacggcgtgtccgtctcctgctctgtagaatgggaatcatgcgtgtctgattcctgctctgtagattgagaatcacggcgtctctgtttcctgctctgtagaaaatgggaatcacgtgtgtccgtttcctgctctatagaatgggaatcatggcgtgtctgtttactgctctgtacaatgggaaggaatcacgcgtgtccgtttcctgctctatagaatgggaatcatggcgtgtctgtttactgctctgtacaatgggaat

SEQ ID NO: 26792 - DNA, 65 bp, Homo sapiens
  chr12:132205018-132205083
  hypo
aggactcttaagtgttcgtgcctagcaggaagttttttcttggacattttcgtaactggattgca

SEQ ID NO: 26793 - DNA, 30 bp, Homo sapiens
  chr12:132218726-132218756
  hypo
ggctcctgccgccctcgaggacttgaaggc

SEQ ID NO: 26794 - DNA, 215 bp, Homo sapiens
  chr12:132218967-132219182
  hypo
ctaggaggtcagagaggcagccgcccaccccacgcactccctgcttgtaagccggggccgcattgttgtgttaccacacttctgttttagagcctgttacggttttgagttacacagacatgtgtgggcttgtgcatgtttgaatgccctgtggacccggagctctgtgaggcaaaggctgggactgtcttactagccagcgtgctccttgcacc

SEQ ID NO: 26795 - DNA, 119 bp, Homo sapiens
  chr12:132221104-132221223
  hypo
cacaggcatcgtgtccgccgaccgtagaacctgaaatccgtagtaaacacccctccagcgctttggttcagctcagctccagcgaatgttaggatgtgaggcttcgtgttacagtagaa

SEQ ID NO: 26796 - DNA, 678 bp, Homo sapiens
  chr12:132221596-132222274
  hypo
agtagtagcaaaagactgaggcgacgcacatcctcggtggaggactaatggagtccctctggtgtgctctcgcggtgggctgcagagctctgggggtgggccagggcccgagcgctgcagggccacccaccggaatggctcttcctgagggtggaggcgaggtgactcaaggggagggcagcacgaggcagtctgttcacgtcagaaggggagggaagtgtctgtagtgcttctgtatcggcacctaaaagggcaggtaagaaggaccagtggccagcacagagaggggaactggaaggacgaggtcgcagacaggagtggctgactcacctgcccgtttgcgctgcttgcattttttcagcgtgactcgtcaccctctcaaaacatgcagattgacgtggtacttattttgagactaaactggtatcctgagttaattccttacaactctgtattttaataatacgtgcttttatcattttgtttcatcagctcagtgtgtttttgtttaggcggaagtggcccccgtaacatctttcccccgtagagacttgcatacccagtactgctgtgtctcgtgggaggctgctgggtcactaagcttttctggctttcatacgctgggtatttaataatcaccttaggatatactcagtcgttctttcttatttacttcct

SEQ ID NO: 26797 - DNA, 31 bp, Homo sapiens
  chr12:132224662-132224693
  hypo
ccactgcagggtggcccggggtagctggatg

SEQ ID NO: 26798 - DNA, 88 bp, Homo sapiens
  chr12:132241829-132241917
  hypo
ccctaggcaggagccccgtggtgcgagctgcccggccccgtgttgagatgcggtaggtggtcagcagtgacttcgggggtggctggtg

SEQ ID NO: 26799 - DNA, 37 bp, Homo sapiens
  chr12:132244044-132244081
  hypo
ctatgtatgaaaatagtaggccgggcgcggtggctca

SEQ ID NO: 26800 - DNA, 582 bp, Homo sapiens
  chr12:132259527-132260109
  hypo
tcagctggagagttgactcctcgcactcctgtttgtcttgactgtgcctcagatggcgtctcgcgcccgtttggttttgtctttcacagacgtttgccagggaccatgtttttccatctcccctctgttttaacacagcgccttaccaatcacacaccaaattagtgcagtgattttgtgagcgtggagagagtaaatgaggagagttcttcaccagaaaaagacagcaaagacgtgtttctcttccttctcgtcacagaacaaactccttactcgagggtggagtatgtgtctcagctctccttctcttcagctctctctttgttttcctggggaaatcccgggccttgttgaaaggacctgcagcagctctgacttcccgaacactcacaggtgcccgtgttgaggttcccaatggcgtctttcagcccctgggccggcttgctttctgcgcagcgtgtgctcctgatgtagaggccgtggatactggcatttttttagtgcatcagctgatttctctggtgtccacccagggctcgcctcagaggatgtgctcagctcgcaaacctgtgttctttgctc

SEQ ID NO: 26801 - DNA, 30 bp, Homo sapiens
  chr12:132263618-132263648
  hypo
gcactcaccggcaccgcactctgcacatac

SEQ ID NO: 26802 - DNA, 30 bp, Homo sapiens
  chr12:132270203-132270233
  hypo
agggtccttggccgcgtgtggattatgtca

SEQ ID NO: 26803 - DNA, 30 bp, Homo sapiens
  chr12:132282352-132282382
  hypo
gggcgtcccagtcccgggctaggtgataat

SEQ ID NO: 26804 - DNA, 202 bp, Homo sapiens
  chr12:132284497-132284699
  hypo
ggccgtcagctccccgtgggcatgtgtccctgccggcacccatgctgcaactgccggacaggccctccctgcggcagtggtgcacagcaggggagcagcccagccccgcctcaccatgctgagcaccgcatgttgccttgagcgccggctgcttgctcctggcgcctttcctgacgtgcagatgcccgggactccactgcag

SEQ ID NO: 26805 - DNA, 43 bp, Homo sapiens
  chr12:132285799-132285842
  hypo
ttacatggaaaagtttttgtacgtatgtagtcttttttttttt

SEQ ID NO: 26806 - DNA, 33 bp, Homo sapiens; identical to SEQ ID NO: 9172
  chr12:132312726-132312759
  hypo

SEQ ID NO: 26807 - DNA, 30 bp, Homo sapiens
  chr12:132329600-132329630
  hypo
ggatgccctgtcccgcgctgcccaggcccc

SEQ ID NO: 26808 - DNA, 148 bp, Homo sapiens
  chr12:132329847-132329995
  hypo
acttctggcggctgacgcgggaccggcacctggtgtccctgcagccggcacagatgcaccgcttctggcggggcctgccgctgcacctggacagcgtggacgccgtgtacgagcgcaccagcgaccacaagatcgtcttctttaaagg

SEQ ID NO: 26809 - DNA, 38 bp, Homo sapiens; identical to SEQ ID NO: 9175
  chr12:132380827-132380865
  hypo

SEQ ID NO: 26810 - DNA, 30 bp, Homo sapiens
  chr12:132390059-132390089
  hypo
aacaggtgtggactcgcttccctgtaagca

SEQ ID NO: 26811 - DNA, 30 bp, Homo sapiens
  chr12:132400535-132400565
  hypo
gcccaaaccccccacggaccccctgggagc

SEQ ID NO: 26812 - DNA, 30 bp, Homo sapiens
  chr12:132401010-132401040
  hypo
gggcgtggtgatgacgccccctcgaaaccg

SEQ ID NO: 26813 - DNA, 30 bp, Homo sapiens
  chr12:132404841-132404871
  hypo
aggcgctcgcagctcggctgggtgcatcct

SEQ ID NO: 26814 - DNA, 30 bp, Homo sapiens
  chr12:132406593-132406623
  hypo
gttctttgttcaagcgttcctctggggacc

SEQ ID NO: 26815 - DNA, 30 bp, Homo sapiens
  chr12:132412423-132412453
  hypo
ccctccagtcatcacgcagccctgtggttt

SEQ ID NO: 26816 - DNA, 192 bp, Homo sapiens
  chr12:132423549-132423741
  hypo
tactgggattacaggcgtgagccactatgcccggccctccagatgcatttttaacagctgaattcatgtgtgaaatgacgtaaggtccgcgtagtccttctttctcagagaccagcgtgcgaggcccaagggacccaccttccgtcacccgttctgctttgtttacagggtgtgtccgcagccggccaggtg

SEQ ID NO: 26817 - DNA, 30 bp, Homo sapiens
  chr12:132429296-132429326
  hypo
aggaaagggtgcatcgcggaacaggccctt

SEQ ID NO: 26818 - DNA, 30 bp, Homo sapiens
  chr12:132446727-132446757
  hypo
gcgctatgatgagtgcgtcttcaacaccca

SEQ ID NO: 26819 - DNA, 179 bp, Homo sapiens
  chr12:132514277-132514456
  hypo
cacccccgtccctacgggtgccgcggccgccacccctgtacagccacagaatgaggatcttgaggcagggcctgagagagcacgctgcgccgtacttccagcagctgcggcagaccacggctccacgcctgctgcagttccctgagctgaggctggtgcagttcgactcaggtatgcgg

SEQ ID NO: 26820 - DNA, 30 bp, Homo sapiens
  chr12:132529443-132529473
  hypo
ctgccccctgtgtacgtgaggaaggagcgg

SEQ ID NO: 26821 - DNA, 523 bp, Homo sapiens
  chr12:132536799-132537322
  hypo
ttgtcacacagtggcggatttgggaggcttcctcgttctgtggccccctttccgcacagtagtggagtgatccttgtcagaaggagttggctcagggcccatctccgcaaacccccaggactccctactgcccacgctctgagtcgcctggccctggctttcagccccttggtgctccctgagtgtgctggcagccgcgccccagcccttcacttaactgccctcgtgagatgttttcagagcgcactgttgagaattgcagccccgccctgctgttttcctccatagcagccagtacgtcttcagacccactgcacattttacctgtttgtcgtctgatgtgagtgctgtgatcgctgggactctagcgtctgggagcacagacccatcatttgattgatgttgtcgattaaatgaagagttaattcaccctactaatatttatggaccgcgggcctgcgcggcgtggagcctgggcattctcgggggagcgagagaggcacagtcccgccctccctttacc

SEQ ID NO: 26822 - DNA, 30 bp, Homo sapiens
  chr12:132537733-132537763
  hypo
tctctccgtgcagagcgaatcgcaaaagag

SEQ ID NO: 26823 - DNA, 176 bp, Homo sapiens
  chr12:132541956-132542132
  hypo
gcttcatatgctgtatgactccgtttcaataacagaaaacagatgaatgattgccagatgcgggaggggctccactacggagaggaattcgagaacgttgggagtggtggggtcatggcagtagctacgtgatgataatgtgtccgtcagaattcgtagaaccatatattgtactc

SEQ ID NO: 26824 - DNA, 207 bp, Homo sapiens
  chr12:132546644-132546851
  hypo
ccttttctagacgccgggaggctctgctcccgcccaggtggtgcacacccagcccccgccacgggcagtcggctccccagccacggcgacccctgacctggtgtccatggcaacgactcagggtgttcgagcggtcacttctgtgacagcctcggccgtggtcactaccaacctgaccccagtgcagaccccggcacggtctttggt

SEQ ID NO: 26825 - DNA, 184 bp, Homo sapiens
  chr12:132549671-132549855
  hypo
gggggtggagagtgagcgaggtgagatgcagcctgcgtggcttccctgtgctgctgagggaccctgcagggaccaaggcctgtgtggctggagcagagggcgctgtgcatgtaagccgtaggcatgggcaggtggcggtctctgaagctgctctcaggtgaccgctgtaggcagggagagcatt

SEQ ID NO: 26826 - DNA, 135 bp, Homo sapiens
  chr12:132551606-132551741
  hypo
cctcacacccacccacttgagcgtgccatcacgtgttctagcacaaacgtgccttggcgctttccaggcgcaaggctgggtcctcaattgaactgttaacattctgaaatttccgtcttaatttaagtgtaattt

SEQ ID NO: 26827 - DNA, 372 bp, Homo sapiens
  chr12:132556449-132556821
  hypo
tgagtacaggtgtgtccgagggctgttagtacagtggacagatggactgttgtagtgggttatagtcattgaatcttgtgatgttcaatcattgtgttctggggtgactcactgggtcctgtggtagttgtcattgtgcatggatgagttcaattactgctcttgtgtgtgtgacctcacggcatcggggcagctcagcctcgttcgtgcgctctgcctgccttgtcaggtctgtttctgagacgcgctcctgcttgtgttgcccagggtggcctcgaactcctgaactcaagcagttctccctcctcagcctccggagggcccgggaccgcaggtgtgtgccacgatgccgggcttttgccagggttttta

SEQ ID NO: 26828 - DNA, 39 bp, Homo sapiens
  chr12:132581293-132581332
  hypo
tattccaaatatattccgtgtagggatagatcgtaattt

SEQ ID NO: 26829 - DNA, 99 bp, Homo sapiens
  chr12:132581391-132581490
  hypo
ataagcctaggaggaacacgcacttacaagactttgtgtggacacatgctggctcttttcctaggtaagtacctaggagtggaacggctggattgtatg

SEQ ID NO: 26830 - DNA, 30 bp, Homo sapiens
  chr12:132588622-132588652
  hypo
tgccccggcgcgggcgaggagcagccagcg

SEQ ID NO: 26831 - DNA, 170 bp, Homo sapiens
  chr12:132603516-132603686
  hypo
ggtccgcgctgcagcgtctttgcaggtctcccagcagcaggcgacagagccacaagcacagctctcagtccagggaaggacccagcagccaatcgcagcgccgccacctttcctgccaggccggcgctcgccaccaggcaggctgtttagcttgcgctccacctccccac

SEQ ID NO: 26832 - DNA, 116 bp, Homo sapiens
  chr12:132617355-132617471
  hypo
ggggctgccaggggcggggacgctggaggagctaggggtgtgggccactgtgctgcctgccccggcctggcggcctctccgtagcagagctgaggctgggacgcaggtgggggagc

SEQ ID NO: 26833 - DNA, 101 bp, Homo sapiens
  chr12:132630792-132630893
  hypo
cataagggggatcatacggtatgtggcttcttccactcatcggcgtgttcgaagttcgttctctttgtggctgagtagcagcgcgtcgtatagcacagcac

SEQ ID NO: 26834 - DNA, 30 bp, Homo sapiens
  chr12:132637719-132637749
  hypo
ccgggtggatactgcgtagagttccgggta

SEQ ID NO: 26835 - DNA, 37 bp, Homo sapiens
  chr12:132643488-132643525
  hypo
ggccggaactatccatcggctccgagggtggagcagg

SEQ ID NO: 26836 - DNA, 30 bp, Homo sapiens
  chr12:132643882-132643912
  hypo
tgtgctccgcaccacgtctgtctcgatggc

SEQ ID NO: 26837 - DNA, 153 bp, Homo sapiens
  chr12:132653074-132653227
  hypo
ccagggctgctgagcgtgggtggggactgccgactgcagtacagacccagacggcaggagcccggcaaagcctgcccttccgaggagcctcacgtcggaggagctgcctgggctgtgctggcgccaggcttagaagccggggccccaactccg

SEQ ID NO: 26838 - DNA, 164 bp, Homo sapiens
  chr12:132666022-132666186
  hypo
cacagcacacacacacacactcggtacacacacccagcacgcacacatagtacacacacccagcacaactcacactcagtacacacacccagcacatgtacccacccagcacacgttcactcgcaccctgcacagcccagcgcgcacacacccagcagacagca

SEQ ID NO: 26839 - DNA, 30 bp, Homo sapiens
  chr12:132667045-132667075
  hypo
ggtgcgtggggccgcgtggctgtcctcggg

SEQ ID NO: 26840 - DNA, 30 bp, Homo sapiens
  chr12:132682593-132682623
  hypo
caaacggggccctgcgcggctgccttggag

SEQ ID NO: 26841 - DNA, 30 bp, Homo sapiens
  chr12:132688094-132688124
  hypo
atccatccacacctcggcggcgcgcagggc

SEQ ID NO: 26842 - DNA, 30 bp, Homo sapiens
  chr12:132975804-132975834
  hypo
cctgacccgctgagcgcatcccgtccctcc

SEQ ID NO: 26843 - DNA, 31 bp, Homo sapiens; identical to SEQ ID NO: 9177
  chr12:132982486-132982517
  hypo

SEQ ID NO: 26844 - DNA, 30 bp, Homo sapiens
  chr12:132983574-132983604
  hypo
cctgctcacctgtgcgaggcagccctgcag

SEQ ID NO: 26845 - DNA, 215 bp, Homo sapiens
  chr12:132986545-132986760
  hypo
ctgaggctctggtgcctcacacggattggccaaaacagggagcggagccgggaaggccacggacatctgtgtggtgtcacgaacaaggtccggccacgtgtgtgggagacgcgggcgccgaggcaggcgccaaactaagcccggccaccaaggggacgcccacaccccacctccgtggtgacccctgaacccccggagctcaccatccacaccag

SEQ ID NO: 26846 - DNA, 30 bp, Homo sapiens
  chr12:133000013-133000043
  hypo
cactgagccaatcacggtgtccaggcgacc

SEQ ID NO: 26847 - DNA, 30 bp, Homo sapiens
  chr12:133009941-133009971
  hypo
tggacacgcagaggcgggtggggctgtgca

SEQ ID NO: 26848 - DNA, 30 bp, Homo sapiens
  chr12:133015505-133015535
  hypo
ccactctctccctgcgcgggagccacgtgt

SEQ ID NO: 26849 - DNA, 30 bp, Homo sapiens
  chr12:133016772-133016802
  hypo
ccaccgcgcaggggcggtcatggcgaggga

SEQ ID NO: 26850 - DNA, 30 bp, Homo sapiens
  chr12:133018295-133018325
  hypo
acaggggcttcggtcggcttatgtgctctt

SEQ ID NO: 26851 - DNA, 30 bp, Homo sapiens
  chr12:133019839-133019869
  hypo
tgcgctgctcctgccgggaggacacgcccg

SEQ ID NO: 26852 - DNA, 30 bp, Homo sapiens
  chr12:133060202-133060232
  hypo
aggtgggaacagctcgggcccaagaaccaa

SEQ ID NO: 26853 - DNA, 30 bp, Homo sapiens
  chr12:133077296-133077326
  hypo
gactccgtccagcccgggacagcccattca

SEQ ID NO: 26854 - DNA, 45 bp, Homo sapiens
  chr12:133088779-133088824
  hypo
ccagtgtgacaggggtcgagacccccctctcggctcatgcctggg

SEQ ID NO: 26855 - DNA, 351 bp, Homo sapiens
  chr12:133100821-133101172
  hypo
actagcccaccaccctgcccccggctcccgcccagtaaggctcagactcctcggggctgcatccctgcccggccagggcctcctccagtgtgggtgcctgctactgtgcggcttgatggacctcatgggccgggggcatttgacctcaggggcctgggtgacatcccttaattcgcactggcaccgtctgccttgtgtgcaccctgtcagccacccagggaggcctgttgctgcaggaggtgcacagagcgggcctctggctgagccgaaggtcggcagggagccaggctcatggctgcagcgagccacaccagccagtcctgggacgggtttccccgggctggggcgtgc

SEQ ID NO: 26856 - DNA, 242 bp, Homo sapiens
  chr12:133101436-133101678
  hypo
aaagtaaatacatgcagggctcggggtctggtccctgcatggtcacttaacctgtctgcgcctctgttttctcatccgtgaaatgtaaaggaaaatagtttctactcggggccaccgtgtgagcaaatgtgtgagtgtgtgcaaagcgcccgggccaggccctggcacgcatcggcgcccatgttggctggtgtcaggggtggtggcggtgggcgtggggcgtgggggtggggtgaagggag

SEQ ID NO: 26857 - DNA, 30 bp, Homo sapiens
  chr12:133103098-133103128
  hypo
gcgggtgggcccatcgggacccagggcctt

SEQ ID NO: 26858 - DNA, 431 bp, Homo sapiens
  chr12:133111678-133112109
  hypo
attatgagaacaggccgggctgctgtgacacgggggttaggaattaatgttaacactgtttctggttaagactttttgtgttgataaataattcatgaggcagttagcactttgagcctgacaacacgagaatatattaatacggtcggctccaagaaaggtcagccacgtgcttggggccagggggccatcttttattcattccctgacacaggctcattaattattctggcccagccggagctgtgctcggagggacactaatgagaaaaaggagagtggatttgagatccacacgccatccgctgtggggacgtagagggagagatggaaagaaacactggtgaggcctctgaggcgggatggggcctgcagcctggctccctgacagtgctggttgggtgtgaagaggtgagcggagctgatccgca

SEQ ID NO: 26859 - DNA, 513 bp, Homo sapiens
  chr12:133121645-133122158
  hypo
gcccagcatggggccgtgcggcacggagctcagggcctcgcccagtgtggggcagtgcggcacagagcgggcgtcttctttggagcctgagtcttggcctcctgaccatgcccagcatgtcccttcggggcctggggtctgtcctctgctcccaggcattcctgcctatcacaaacccacaccagggtgacgttccctgagcccccgagcccagccccggcgccgtgaatggtcgcctcactcgggcagcttccgagaggtggatgtgtctctccttttctcctcgccctgattaattgcctcattcaatgccgactccactgcagttaaacattaattcagtaggacttaataacacgaattcattcacgcccctgcctgcgcctggctgacagtgccgtgctatttggttaatgagaggatccatgcagcgtcctctggtgcgcttgctggaaagcacccctcagtgtctccttgctgttggatgcattaaaccctcgcctgtgtggtcag

SEQ ID NO: 26860 - DNA, 30 bp, Homo sapiens
  chr12:133122900-133122930
  hypo
gcccttggtgagctccgcacctgcagcctc

SEQ ID NO: 26861 - DNA, 191 bp, Homo sapiens
  chr12:133123386-133123577
  hypo
gcgctgggagcagcacgttctcgctgcagagtgtctgctaaagcgcatttcacaccgtactgtgagctccgtcgctgaacactcggcagccgcggctgcacatggagggtggctgtgcgtttggttccctgcattaacccagtgggctccacataggagggcgccgcccacacatccggctggcactcacc

SEQ ID NO: 26862 - DNA, 215 bp, Homo sapiens
  chr12:133131956-133132171
  hypo
cacccgagcgtgagcgtggcctccacggtagccgccccacccgagcgtgagcatggcctccacggtagctgcgccaccggagcgtgagcgtggcctccacggtagccgccccacccgagcgtgagcgtggcctccacggtagccgccccacccgagcgtgagcgtgggggccacggtagccgcctcacccgagcgtgagcgtgggggccacaccc

SEQ ID NO: 26863 - DNA, 31 bp, Homo sapiens
  chr12:133148107-133148138
  hypo
ccggtgcgtaggcccgcgtgctggcaggggg

SEQ ID NO: 26864 - DNA, 31 bp, Homo sapiens
  chr12:133148662-133148693
  hypo
cttagaatggcagggccgccctggtctgaga

SEQ ID NO: 26865 - DNA, 31 bp, Homo sapiens
  chr12:133153970-133154001
  hypo
gaggagtttggcctctcgctgaacagtagga

SEQ ID NO: 26866 - DNA, 30 bp, Homo sapiens
  chr12:133156530-133156560
  hypo
tttggggcaggctccgtagctgtcggtgtc

SEQ ID NO: 26867 - DNA, 31 bp, Homo sapiens
  chr12:133158012-133158043
  hypo
tgccccccccaggtgccgcccatcctgcctc

SEQ ID NO: 26868 - DNA, 30 bp, Homo sapiens
  chr12:133168317-133168347
  hypo
cagcccctgacctccggggcccccacgcac

SEQ ID NO: 26869 - DNA, 30 bp, Homo sapiens
  chr12:133183673-133183703
  hypo
gcggcattgccctgcgtgtggtcagcggcc

SEQ ID NO: 26870 - DNA, 46 bp, Homo sapiens
  chr12:133200000-133200046
  hypo
aacccaggctgactggcgcccacggctgcaccgggcgacccctggt

SEQ ID NO: 26871 - DNA, 31 bp, Homo sapiens
  chr12:133200832-133200863
  hypo
cagggccttgggaacccgtctcgtctcagag

SEQ ID NO: 26872 - DNA, 132 bp, Homo sapiens
  chr12:133209228-133209360
  hypo
aaaagacaaaagactgctcaccgggaagggctccgaccgccccctcggcctcctgggagagctggctggcccccctcctcctcacgggggtgctccctggagcactgcgcctcagcccgtccttcatgcagt

SEQ ID NO: 26873 - DNA, 40 bp, Homo sapiens
  chr12:133210034-133210074
  hypo
cactgcgcccggccaacccggaacttttcaaaagagacat

SEQ ID NO: 26874 - DNA, 60 bp, Homo sapiens
  chr12:133220202-133220262
  hypo
ccacgtgacttctgcccgggatgtggctgtgcccctgcagctgcccggcccactgcccaa

SEQ ID NO: 26875 - DNA, 154 bp, Homo sapiens
  chr12:133222187-133222341
  hypo
aacaaacaaaaaaacctgacacgctaaaggatttttaaaaatacccaaagtctcaaatatgtaaaatgtccaggttgcaataaagcgttatttggcgtaacaacaaccaggaaaatctgaataattctcaagcgagaagagaaccagtagggtt

SEQ ID NO: 26876 - DNA, 30 bp, Homo sapiens
  chr12:133225532-133225562
  hypo
ctcctccgctttagcgactcgctggttcac

SEQ ID NO: 26877 - DNA, 278 bp, Homo sapiens
  chr12:133225890-133226168
  hypo
cctgcacaatctgccacggaaggtccaggatgctgcgggcagttcttcgcaagaagctccccagccccgtggcaggaccatcccggatggccccgggcctgagcacaccctctgccgactccagacgctgcctcttcctgcgggcgaggcgctgccgggcctgcagctgccacttcttcttgtggaaccggagccagacaagccattcctcctgggatggatggtgagcacagccagtgtgcaagtggtgagatgggaatgcccgccatgactttctc

SEQ ID NO: 26878 - DNA, 31 bp, Homo sapiens
  chr12:133256229-133256260
  hypo
tgatttggctataatgcgaagagatcacgct

SEQ ID NO: 26879 - DNA, 62 bp, Homo sapiens
  chr12:133277668-133277730
  hypo
gttggctccttagagccgcagtgctgagtacacatgtgtgctgtctgcgtacacacagaaca

SEQ ID NO: 26880 - DNA, 181 bp, Homo sapiens
  chr12:133280427-133280608
  hypo
atgggccactggttctcgggaatttagagaaggaagcagagacaactgagaagacagactggccgggaacacggaggatctgggatggaagaggggagagctgggaagccgcgcctctgagtagcgtgggggcagagtcgccatcctaggtgggtgcaggtgtatgcggaagcagcattca

SEQ ID NO: 26881 - DNA, 30 bp, Homo sapiens
  chr12:133301535-133301565
  hypo
ggagggagcacgggcgggaatctgcagctg

SEQ ID NO: 26882 - DNA, 31 bp, Homo sapiens
  chr12:133306572-133306603
  hypo
atgggcttcctccccacggggggcctttggt

SEQ ID NO: 26883 - DNA, 30 bp, Homo sapiens
  chr12:133308349-133308379
  hypo
tgagctcccgtgcccggccatcgttgatgt

SEQ ID NO: 26884 - DNA, 148 bp, Homo sapiens
  chr12:133312228-133312376
  hypo
agatccctgggccacgtgcccacctgtggcatggctgagtggccgcacggctgcactctgacctgggggaggggaggcggtctcctttcttgcagccccgtctgggctgtgaggttcagaaccaggagggcccgagcacgaggcctca

SEQ ID NO: 26885 - DNA, 32 bp, Homo sapiens
  chr12:133348834-133348866
  hypo
agactgggtgacaggccgggcgcaggggctca

SEQ ID NO: 26886 - DNA, 296 bp, Homo sapiens
  chr12:133351406-133351702
  hypo
ctgggcacagctcccgggccccagcccttcacacacagcagggactgccgagtcacagaccaccgctcatctgctttacaaagcacattacaacaaagtggtatttgaattcacagaacgaggaaaacactgttggatgaatgaaaccagaatgaaatgatttcatctgtcaccccattaccactgactacacagcagctgctcagtgtgggctcaacaaatccgtttatgtctgaatgactaacacgtctgccagcctcctgtccgagagcatctacagcgcacgtcggctaccc

SEQ ID NO: 26887 - DNA, 30 bp, Homo sapiens
  chr12:133353832-133353862
  hypo
tcgggcagtcctcacgaagcacctgagact

SEQ ID NO: 26888 - DNA, 30 bp, Homo sapiens
  chr12:133354128-133354158
  hypo
ttcactcaagtactcggcaatttgcaaaat

SEQ ID NO: 26889 - DNA, 30 bp, Homo sapiens
  chr12:133354395-133354425
  hypo
gaggaaggaagccacgttgtccatgccctg

SEQ ID NO: 26890 - DNA, 31 bp, Homo sapiens
  chr12:133356749-133356780
  hypo
gcatgcacagccccccgcgtgcacacacacc

SEQ ID NO: 26891 - DNA, 221 bp, Homo sapiens
  chr12:133357042-133357263
  hypo
cacccctcttatctgccgaacacaaatgggatcatatgctattctcaagtttgcttttgcaatgcaacacgacatacaggacaccactcccagcacaatataaatacacatgcacgcggagctcattggccccaggccctcacagctgcactgccatttaatctaacgccaccttctacggaccagagcaggtgctctgcggcctccgtcaccaacaactg

SEQ ID NO: 26892 - DNA, 30 bp, Homo sapiens
  chr12:133360655-133360685
  hypo
gaagttttgttcttcgggtctcacgcgtgg

SEQ ID NO: 26893 - DNA, 30 bp, Homo sapiens
  chr12:133373594-133373624
  hypo
tgctctcacaagagcggtgcttggtgctac

SEQ ID NO: 26894 - DNA, 30 bp, Homo sapiens
  chr12:133374896-133374926
  hypo
agcttccacggccccggccgcagcctcacc

SEQ ID NO: 26895 - DNA, 30 bp, Homo sapiens
  chr12:133380456-133380486
  hypo
gaggactctggacccgggtcactctacacc

SEQ ID NO: 26896 - DNA, 30 bp, Homo sapiens
  chr12:133382212-133382242
  hypo
ccgagacccccaggcgctctcccagcacag

SEQ ID NO: 26897 - DNA, 201 bp, Homo sapiens
  chr12:133384550-133384751
  hypo
tgcggcctggaggacgtccttaatggaggggaactggcccagggtatccgcaggaatctcctggccgttgaccatatagggggtgtcctgcgtgcccactgtcttcgacagaatgccataggtccctcgggtggaggcgctgctgtacgatgagctgtcgctgtcatttccatccacctcagacacgctgtctccagccag

SEQ ID NO: 26898 - DNA, 30 bp, Homo sapiens
  chr12:133402536-133402566
  hypo
ggaccactgtcatccgccgagactacctgc

SEQ ID NO: 26899 - DNA, 137 bp, Homo sapiens
  chr12:133412306-133412443
  hypo
ggcgttttgatccagcggcccaagtggacccacattcaaggccagcactgggcagggcgggtctcacaaatgcatgctcccagcacagcgcacggccctcacagtgccaggctcccagcacagcgcacggccctcac

SEQ ID NO: 26900 - DNA, 70 bp, Homo sapiens
  chr12:133414279-133414349
  hypo
tgctggtcagcgcgcggatctgcagggctaggctgtgctctgcatgcggccctccgtcctcagggaggca

SEQ ID NO: 26901 - DNA, 30 bp, Homo sapiens
  chr12:133424551-133424581
  hypo
tccccaacccgcagcgggtcaggtaaaaca

SEQ ID NO: 26902 - DNA, 128 bp, Homo sapiens
  chr12:133428294-133428422
  hypo
ttgcagagggcacacgtaatcctggactgctgaagcacacgcacattcagccggagcacgtgggacccagggcagaaagacagcaggttagagaggccgccgggaagcacagcgaggagaggtgcacc

SEQ ID NO: 26903 - DNA, 334 bp, Homo sapiens
  chr12:133435629-133435963
  hypo
agccaagggtgaacacggtcgcacctcacgcagtcgtgcagcaggtcctggcagatgatgcatgtcagcgtctcctccatcttgtctggcttcccagccgctgctctgacgtcctcgtggacggtttgggcatttctacgcggttgtgcgaccaacaactgcccgttcaggtcaaggtccccatctacaggagaaagggatgtgttctgtcgtaaccaagaaggaaatacacgcaggttcaggtcaaggtccccgtccacaggagaaagggatgtgttctaactgtcgtaaccgagaaggaaatacatgcagtcttttttttttcgagacagag

SEQ ID NO: 26904 - DNA, 123 bp, Homo sapiens; identical to SEQ ID NO: 9181
  chr12:133443617-133443740
  hypo

SEQ ID NO: 26905 - DNA, 75 bp, Homo sapiens
  chr12:133448787-133448862
  hypo
tgtagccaggaggaacgttcagagagcgccctcacgtgcacccccgtgcgggtctgaccccggcaagccttcctc

SEQ ID NO: 26906 - DNA, 126 bp, Homo sapiens
  chr12:133449099-133449225
  hypo
agtgtaaatacgtaacgatgcacacatccacgcacccctcaccattctctcaagaaatggctcgcccacttctccctgactgacagcctaaccagccactacacctcctcacgtgcttggcagctc

SEQ ID NO: 26907 - DNA, 591 bp, Homo sapiens; identical to SEQ ID NO: 9183
  chr12:133464151-133464742
  hypo

SEQ ID NO: 26908 - DNA, 8 bp, Homo sapiens
  chr12:133481374-133481382
  hypo
tttcctca

SEQ ID NO: 26909 - DNA, 173 bp, Homo sapiens; identical to SEQ ID NO: 9185
  chr12:133481489-133481662
  hypo

SEQ ID NO: 26910 - DNA, 252 bp, Homo sapiens; identical to SEQ ID NO: 9186
  chr12:133484600-133484852
  hypo

SEQ ID NO: 26911 - DNA, 186 bp, Homo sapiens; identical to SEQ ID NO: 9187
  chr12:133485161-133485347
  hypo

SEQ ID NO: 26912 - DNA, 250 bp, Homo sapiens; identical to SEQ ID NO: 9188
  chr12:133485439-133485689
  hypo

SEQ ID NO: 26913 - DNA, 62 bp, Homo sapiens; identical to SEQ ID NO: 9189
  chr12:133485815-133485877
  hypo

SEQ ID NO: 26914 - DNA, 55 bp, Homo sapiens; identical to SEQ ID NO: 9190
  chr12:133706913-133706968
  hypo

SEQ ID NO: 26915 - DNA, 408 bp, Homo sapiens
  chr13:20392319-20392727
  hypo
gatgcctccttggtgatgaaacggtgggtgatttggggtagatgacattcatgacgccagctcttctggaagtcatagtaaggcaccgaggggtggctcctctccctgcagcggctgtcgcttaccatcctgtagaccgtgacctcctcacacagcgccaggacgaggatcgcggtgagccagcaggtgactgcgatcctggagctggtcgcagcaggccatcctgcacgcggtggaggcgccccctgcaggccgcagcgcatccccagcttctggacgcactgtgagcggttatgcagcagcacgctcatatgagatgccccgcagggtgctatgcaggcccacgtccccacaaagcccatggcaggcgcccgggtgccggagcacgcacttggccccatggatctc

SEQ ID NO: 26916 - DNA, 86 bp, Homo sapiens
  chr13:20521928-20522014
  hypo
cggccgctatgtatctcttttaaaaatccgtttacctatcctacaacagcaaaatgaagatgaccgctctattctcaatgacaatt

SEQ ID NO: 26917 - DNA, 663 bp, Homo sapiens; identical to SEQ ID NO: 9194
  chr13:20735460-20736123
  hypo

SEQ ID NO: 26918 - DNA, 87 bp, Homo sapiens; identical to SEQ ID NO: 9195
  chr13:20766767-20766854
  hypo

SEQ ID NO: 26919 - DNA, 30 bp, Homo sapiens
  chr13:20987502-20987532
  hypo
gtcactaggagacacgattccttcctacgt

SEQ ID NO: 26920 - DNA, 30 bp, Homo sapiens
  chr13:21047554-21047584
  hypo
cacatggccagactcggcccctggtaccag

SEQ ID NO: 26921 - DNA, 128 bp, Homo sapiens
  chr13:21057364-21057492
  hypo
ggatatcctaatacaccgggattttaccatgacacactgaacacacaaatcaatcacacatgaatcccaaatatgtacaattaagatacagcaagtaattttttatttattattatttttttaagacg

SEQ ID NO: 26922 - DNA, 39 bp, Homo sapiens
  chr13:21057551-21057590
  hypo
tccgcctcctgggttcacgccatctggactgaccatatc

SEQ ID NO: 26923 - DNA, 31 bp, Homo sapiens
  chr13:21563687-21563718
  hypo
gcagaagagaagactgcgtccacatcccgag

SEQ ID NO: 26924 - DNA, 30 bp, Homo sapiens
  chr13:21572945-21572975
  hypo
cacggggcgggggccgcagcgacattgtgc

SEQ ID NO: 26925 - DNA, 30 bp, Homo sapiens
  chr13:21573234-21573264
  hypo
gcacgtgccgtgtgcgagccaattatgact

SEQ ID NO: 26926 - DNA, 31 bp, Homo sapiens
  chr13:21597467-21597498
  hypo
acactgggaccacaggcgctcgccccctctc

SEQ ID NO: 26927 - DNA, 623 bp, Homo sapiens; identical to SEQ ID NO: 9202
  chr13:21635132-21635755
  hypo

SEQ ID NO: 26928 - DNA, 228 bp, Homo sapiens; identical to SEQ ID NO: 9203
  chr13:21635777-21636005
  hypo

SEQ ID NO: 26929 - DNA, 20 bp, Homo sapiens
  chr13:21744612-21744632
  hypo
ctggccggttatatactttc

SEQ ID NO: 26930 - DNA, 26 bp, Homo sapiens
  chr13:21745685-21745711
  hypo
tgagcgagactccatctcaaaaaaaa

SEQ ID NO: 26931 - DNA, 32 bp, Homo sapiens
  chr13:21809449-21809481
  hypo
cggtgcgcagcaaagcgcggcccatgtgtgca

SEQ ID NO: 26932 - DNA, 24 bp, Homo sapiens
  chr13:22049273-22049297
  hypo
gagccaccgcgcccggctgtttct

SEQ ID NO: 26933 - DNA, 15 bp, Homo sapiens
  chr13:22091943-22091958
  hypo
gcgcgcgcgcacacg

SEQ ID NO: 26934 - DNA, 161 bp, Homo sapiens
  chr13:22214671-22214832
  hypo
aataaccagccttgcccgatcatggcagcattgactggaccccagaaggaaatgaacttgtctgaccagagtgaggcatcccacatgcaaaatgtaagtacctcatgtgctccctctcggggtcatgccagtacaggtctagctcccgagagggagggagg

SEQ ID NO: 26935 - DNA, 88 bp, Homo sapiens; identical to SEQ ID NO: 9206
  chr13:22243707-22243795
  hypo

SEQ ID NO: 26936 - DNA, 558 bp, Homo sapiens; identical to SEQ ID NO: 9207
  chr13:22244072-22244630
  hypo

SEQ ID NO: 26937 - DNA, 187 bp, Homo sapiens; identical to SEQ ID NO: 9208
  chr13:22245212-22245399
  hypo

SEQ ID NO: 26938 - DNA, 97 bp, Homo sapiens; identical to SEQ ID NO: 9210
  chr13:22247844-22247941
  hypo

SEQ ID NO: 26939 - DNA, 32 bp, Homo sapiens
  chr13:22392837-22392869
  hypo
actttgggttcactgcgttgtgaattgtaaca

SEQ ID NO: 26940 - DNA, 32 bp, Homo sapiens
  chr13:22392988-22393020
  hypo
cactcaccgtgagggtccgcggcttcattctt

SEQ ID NO: 26941 - DNA, 181 bp, Homo sapiens
  chr13:22539243-22539424
  hypo
aagtcataaaggggatctctgcgatgctcaggagggaagagaccgcctttaggagaaggggcgggacgtggtcagtgtgcatctagaaccatcactcctattgcggtggagaggtggtcataagggcaaagtgagcggtagcagggccggtgaggatgccgctggagcaagccaaggatgg

SEQ ID NO: 26942 - DNA, 31 bp, Homo sapiens; identical to SEQ ID NO: 9211
  chr13:22553926-22553957
  hypo

SEQ ID NO: 26943 - DNA, 31 bp, Homo sapiens
  chr13:23509169-23509200
  hypo
tcacctacctgtccctcggcctctggggtgg

SEQ ID NO: 26944 - DNA, 330 bp, Homo sapiens; identical to SEQ ID NO: 9213
  chr13:23733697-23734027
  hypo

SEQ ID NO: 26945 - DNA, 70 bp, Homo sapiens; identical to SEQ ID NO: 9214
  chr13:23734227-23734297
  hypo

SEQ ID NO: 26946 - DNA, 7 bp, Homo sapiens
  chr13:23734814-23734821
  hypo
cgccttc

SEQ ID NO: 26947 - DNA, 128 bp, Homo sapiens
  chr13:23896846-23896974
  hypo
ccccagcccaggccctatcatcgcacctgcggcgatgcacagaccgccccccacccatccacctccccccccccccccccccgccaacaggtgtaacgtggtgccgcgggcagaggattcacctggaa

SEQ ID NO: 26948 - DNA, 202 bp, Homo sapiens
  chr13:23897355-23897557
  hypo
aaataaaaatcaagaatgaggcgttagataataacctaaagattctacttgaaaaacatattaacagctatttgacttctttgaccgtgactgcaccagaccatgcacggcacagagctgcctgcaatgctgtggggtcgtgtgatcaagcctcacctggcaggtgcacaccggcgaatgcgtgcagcagacagcaggttgt

SEQ ID NO: 26949 - DNA, 30 bp, Homo sapiens
  chr13:23993512-23993542
  hypo
caaggtgggtaggacgtgttaagggtggcc

SEQ ID NO: 26950 - DNA, 31 bp, Homo sapiens
  chr13:24155136-24155167
  hypo
tatttgtttctttggccggagtgtgtcttgc

SEQ ID NO: 26951 - DNA, 30 bp, Homo sapiens
  chr13:24408271-24408301
  hypo
gaggggagaggggccgagcccccggagccg

SEQ ID NO: 26952 - DNA, 276 bp, Homo sapiens
  chr13:24718598-24718874
  hypo
aaaagtttcctatttaagaagcgttggaggatggcaaaacccagctctccttcctggttgtcgcacagcgtacacaatgcacaagcactggcccagacaaactttgatcaggcaccgctgagcagctcttgggggctctttggtgcctgcaggttgctgccattgtgcccctcactcagctccgtccgggttgcagcacaccagccccgctgcagcagccaccgagagaggatcccacctttcagactttggccagcgtggcgtagttggtgtttt

SEQ ID NO: 26953 - DNA, 824 bp, Homo sapiens; identical to SEQ ID NO: 9218
  chr13:24734727-24735551
  hypo

SEQ ID NO: 26954 - DNA, 31 bp, Homo sapiens
  chr13:24797671-24797702
  hypo
gcctccgcagagcctacggcctgggccgcat

SEQ ID NO: 26955 - DNA, 31 bp, Homo sapiens
  chr13:24860470-24860501
  hypo
ggactggtggtggggccgcagtgaagataag

SEQ ID NO: 26956 - DNA, 30 bp, Homo sapiens
  chr13:25026144-25026174
  hypo
tttacccaggcccttcgggacaagcggaga

SEQ ID NO: 26957 - DNA, 227 bp, Homo sapiens
  chr13:25026479-25026706
  hypo
ctgcagggcaacaagacgacctccccgtgggtctggactatgtgaccagctctctgagactcacccgataccgcaggcgaataacctggtgtgcgggcggctcctcttcacgagctgtaatgtcaggctctcatcctggaggtgcccatcagacaccaggaggatgttccgtgaccctcgagcagggtacaataagctaagatatcggagtgttttccagaagtctg

SEQ ID NO: 26958 - DNA, 1081 bp, Homo sapiens; identical to SEQ ID NO: 9221
  chr13:25321112-25322193
  hypo

SEQ ID NO: 26959 - DNA, 79 bp, Homo sapiens
  chr13:25642760-25642839
  hypo
acacacacacacaggcacacacgcacgaacgcacacacacggacatgcatgcatgcacgtggacacacgggcacacacg

SEQ ID NO: 26960 - DNA, 30 bp, Homo sapiens
  chr13:25668701-25668731
  hypo
ctaggctaggcgcggcggctcacgcctgta

SEQ ID NO: 26961 - DNA, 18 bp, Homo sapiens
  chr13:25744716-25744734
  hypo
gtctggggcggcgggcgc

SEQ ID NO: 26962 - DNA, 294 bp, Homo sapiens; identical to SEQ ID NO: 9226
  chr13:25745300-25745594
  hypo

SEQ ID NO: 26963 - DNA, 354 bp, Homo sapiens; identical to SEQ ID NO: 9227
  chr13:25745726-25746080
  hypo

SEQ ID NO: 26964 - DNA, 30 bp, Homo sapiens
  chr13:25889270-25889300
  hypo
gtaataatgaaaaatcgcatcatccaaact

SEQ ID NO: 26965 - DNA, 31 bp, Homo sapiens
  chr13:25932390-25932421
  hypo
tggcattcaaaatgggcgaggggggaaaatg

SEQ ID NO: 26966 - DNA, 373 bp, Homo sapiens; identical to SEQ ID NO: 9229
  chr13:25946300-25946673
  hypo

SEQ ID NO: 26967 - DNA, 112 bp, Homo sapiens; identical to SEQ ID NO: 9230
  chr13:25946801-25946913
  hypo

SEQ ID NO: 26968 - DNA, 119 bp, Homo sapiens; identical to SEQ ID NO: 9231
  chr13:26043051-26043170
  hypo

SEQ ID NO: 26969 - DNA, 30 bp, Homo sapiens; identical to SEQ ID NO: 9232
  chr13:26594656-26594686
  hypo

SEQ ID NO: 26970 - DNA, 390 bp, Homo sapiens; identical to SEQ ID NO: 9234
  chr13:26625266-26625656
  hypo

SEQ ID NO: 26971 - DNA, 124 bp, Homo sapiens; identical to SEQ ID NO: 9235
  chr13:26626239-26626363
  hypo

SEQ ID NO: 26972 - DNA, 987 bp, Homo sapiens; identical to SEQ ID NO: 9237
  chr13:27334232-27335219
  hypo

SEQ ID NO: 26973 - DNA, 38 bp, Homo sapiens
  chr13:27556410-27556448
  hypo
caaaaccatctcactgcgctttatgggggatttttttt

SEQ ID NO: 26974 - DNA, 179 bp, Homo sapiens
  chr13:27620502-27620681
  hypo
atctacggcatcaccccgaaagcacttgcggggagaagcctcctctcctcacacccccaagtggatgaccctgtgactgagtcattagagggctggccaagcgagctcctgattccatcactgctggagactgaagagcttggctgaattatccagacacgcttcgtgtggaaccctgt

SEQ ID NO: 26975 - DNA, 333 bp, Homo sapiens
  chr13:27690667-27691000
  hypo
atagtgctcattgaccggaaactgttctggaccaatctctttctctaatgccgaagcattggcgccctataaaatgaaaaacaaaaatcttagtatttatagtagtcatgcaccacataatgacacttcagtcaatgacaggccgcaacatgatggtcctatcacattacgatggagctgccctacacaggtgcgtctttatcctttacaccgtatttttagctgtacctttcttacgtttagatatgttcagatgcacacttattcctgtgttacgattgcctagaaaatacaggaacatgctgtataggtttgtggccttcgagcaacagg

SEQ ID NO: 26976 - DNA, 38 bp, Homo sapiens
  chr13:27691059-27691097
  hypo
tctgatgttcgcatgcacaatgacgaaatggcctaacg

SEQ ID NO: 26977 - DNA, 133 bp, Homo sapiens; identical to SEQ ID NO: 9238
  chr13:27744843-27744976
  hypo

SEQ ID NO: 26978 - DNA, 30 bp, Homo sapiens; identical to SEQ ID NO: 9240
  chr13:27868706-27868736
  hypo

SEQ ID NO: 26979 - DNA, 32 bp, Homo sapiens
  chr13:27914839-27914871
  hypo
tcttcaaaaaatgctcaacagcggcagggcgc

SEQ ID NO: 26980 - DNA, 30 bp, Homo sapiens
  chr13:28026792-28026822
  hypo
accacgcccggccacttggaagcttttaaa

SEQ ID NO: 26981 - DNA, 58 bp, Homo sapiens
  chr13:28152522-28152580
  hypo
tgtataccgagaagccgcaaacagtcgtagtaatcatattctgcgccgcataacatca

SEQ ID NO: 26982 - DNA, 30 bp, Homo sapiens; identical to SEQ ID NO: 9243
  chr13:28179804-28179834
  hypo

SEQ ID NO: 26983 - DNA, 268 bp, Homo sapiens
  chr13:28239903-28240171
  hypo
agaccatgaacaaaaagagggcgataaggaaccagcgaagagccaggcccagaaagaagaaaacccgaagaaacacagaagccatccttacaagcacagcttccgcgctcgaggttccgccagttactccccgccacgaaagcggagcagccaggacaagtacgaaaagcggtccaaccggcggtgaggctggaaccagggccagccagccctgcgggcctccgtgctccttcggggtgcggtgtgcggagaaggcctgagctggcag

SEQ ID NO: 26984 - DNA, 205 bp, Homo sapiens; identical to SEQ ID NO: 9253
  chr13:28493987-28494192
  hypo

SEQ ID NO: 26985 - DNA, 391 bp, Homo sapiens; identical to SEQ ID NO: 9262
  chr13:28551993-28552384
  hypo

SEQ ID NO: 26986 - DNA, 334 bp, Homo sapiens; identical to SEQ ID NO: 9263
  chr13:28552659-28552993
  hypo

SEQ ID NO: 26987 - DNA, 244 bp, Homo sapiens
  chr13:28575158-28575402
  hypo
cagctggaaacctttgtggctcgcgatgccttctgcctgagtattgctcgcagcctctgggcttattccacccactcagcccagcagtctggctcagcttgcaatatgggcccagatcccacacctgccaagggcgagccaggcgcagagccaggaggggtgcgtgggttagtgaccaagggtccgaccactgtgtgcagccaggcacgctggctgctgcagcggggtgggcagctccaggcac

SEQ ID NO: 26988 - DNA, 30 bp, Homo sapiens; identical to SEQ ID NO: 9264
  chr13:28578210-28578240
  hypo

SEQ ID NO: 26989 - DNA, 67 bp, Homo sapiens; identical to SEQ ID NO: 9265
  chr13:28592625-28592692
  hypo

SEQ ID NO: 26990 - DNA, 30 bp, Homo sapiens; identical to SEQ ID NO: 9266
  chr13:28599040-28599070
  hypo

SEQ ID NO: 26991 - DNA, 30 bp, Homo sapiens; identical to SEQ ID NO: 9267
  chr13:28602387-28602417
  hypo

SEQ ID NO: 26992 - DNA, 500 bp, Homo sapiens; identical to SEQ ID NO: 9268
  chr13:28608022-28608522
  hypo

SEQ ID NO: 26993 - DNA, 30 bp, Homo sapiens; identical to SEQ ID NO: 9269
  chr13:28610100-28610130
  hypo

SEQ ID NO: 26994 - DNA, 30 bp, Homo sapiens; identical to SEQ ID NO: 9270
  chr13:28611397-28611427
  hypo

SEQ ID NO: 26995 - DNA, 30 bp, Homo sapiens; identical to SEQ ID NO: 9271
  chr13:28622462-28622492
  hypo

SEQ ID NO: 26996 - DNA, 30 bp, Homo sapiens; identical to SEQ ID NO: 9272
  chr13:28623585-28623615
  hypo

SEQ ID NO: 26997 - DNA, 107 bp, Homo sapiens; identical to SEQ ID NO: 9273
  chr13:28636039-28636146
  hypo

SEQ ID NO: 26998 - DNA, 30 bp, Homo sapiens; identical to SEQ ID NO: 9274
  chr13:28644712-28644742
  hypo

SEQ ID NO: 26999 - DNA, 170 bp, Homo sapiens; identical to SEQ ID NO: 9275
  chr13:28674056-28674226
  hypo

SEQ ID NO: 27000 - DNA, 470 bp, Homo sapiens; identical to SEQ ID NO: 9276
  chr13:28674720-28675190
  hypo

SEQ ID NO: 27001 - DNA, 23 bp, Homo sapiens
  chr13:28705877-28705900
  hypo
agttcactataccctcgaactcc

SEQ ID NO: 27002 - DNA, 70 bp, Homo sapiens
  chr13:28745558-28745628
  hypo
ttaagagctcagtcacgcaagactgctctccacttcagataccagtgacatgtagcgggtcctcagatta

SEQ ID NO: 27003 - DNA, 30 bp, Homo sapiens
  chr13:28745879-28745909
  hypo
agggatttttatggacgcttcatctcgcag

SEQ ID NO: 27004 - DNA, 31 bp, Homo sapiens
  chr13:28777902-28777933
  hypo
ttgtttagtgagaaagcgtctctgcttttct

SEQ ID NO: 27005 - DNA, 30 bp, Homo sapiens
  chr13:28778232-28778262
  hypo
accacgcccgaccagcttctctgttttata

SEQ ID NO: 27006 - DNA, 31 bp, Homo sapiens
  chr13:28818188-28818219
  hypo
agcatctttttatgttcgaggcatttttctt

SEQ ID NO: 27007 - DNA, 1002 bp, Homo sapiens; identical to SEQ ID NO: 9277
  chr13:29067983-29068985
  hypo

SEQ ID NO: 27008 - DNA, 31 bp, Homo sapiens
  chr13:29241509-29241540
  hypo
gccacatagcaagacccgtctcttagaataa

SEQ ID NO: 27009 - DNA, 30 bp, Homo sapiens; identical to SEQ ID NO: 9283
  chr13:29283831-29283861
  hypo

SEQ ID NO: 27010 - DNA, 1128 bp, Homo sapiens; identical to SEQ ID NO: 9284
  chr13:29292470-29293598
  hypo

SEQ ID NO: 27011 - DNA, 166 bp, Homo sapiens; identical to SEQ ID NO: 9285
  chr13:29394546-29394712
  hypo

SEQ ID NO: 27012 - DNA, 223 bp, Homo sapiens
  chr13:29913840-29914063
  hypo
gggaccatctctctctggatacgggcatagtcccagttgggaggagcggtgaggaggggccgggtgcggacccagcgcttcccattgacgtagacgactttgcagccatccttgacctgggagcggagaaggggcctggaccgcaaggcccggtgtttctgggattggggcggcaccctggcccggggcggcactatggtccggggccagcccaggtaccagc

SEQ ID NO: 27013 - DNA, 205 bp, Homo sapiens
  chr13:29920652-29920857
  hypo
cccatacagccagcaacgccagtctcactcccaccatgtccccccaacagcacgagagggacatgccccaggctacaagcctccctgctgagaaaggtttcacgtctccccacctgcagcagcttctgtgcgcctgtctgtactcccagatcacctcctctccagactctgtccaggaaactgcacaaatcgtttcaaagttcag

SEQ ID NO: 27014 - DNA, 30 bp, Homo sapiens
  chr13:30079643-30079673
  hypo
atctgagccatcaccgctcccgaaacacat

SEQ ID NO: 27015 - DNA, 31 bp, Homo sapiens
  chr13:30087321-30087352
  hypo
gggtggggaggatgctcgggtctctcccact

SEQ ID NO: 27016 - DNA, 30 bp, Homo sapiens
  chr13:30096169-30096199
  hypo
ggagaaaaggttttcgaatactgtgtgttc

SEQ ID NO: 27017 - DNA, 46 bp, Homo sapiens
  chr13:30101131-30101177
  hypo
ggaggacccacagccgacttcaggaggacccgggtgccgggaccct

SEQ ID NO: 27018 - DNA, 348 bp, Homo sapiens
  chr13:30106966-30107314
  hypo
agatgagaattatgatcactgcgaatatgtcggggttttcagccagcacgccgggggcgttcagagtcatgtgtgtccgtgagaactccccgatgggtctgcctatcagctcgtcgaaggtggcgctccaggccctcgctacgcttgaagtacctgccacaaagcacacacaacagaggagatgtgaggacaactgttagccaggtatttgtagtggagctccatgttgataacatcattgcaggagtcaccgacggtgcactggaatctggcagcagcagccagaccacagtgtatgctgagccagaagtgacggtcgactagtgctaagtgcgagaaggcttctag

SEQ ID NO: 27019 - DNA, 247 bp, Homo sapiens
  chr13:30123248-30123495
  hypo
tttacgtggagcggacgtgctagtgggcactaagagaatagcctctatcagagaggagaatgcaattcaatttacctgaaattcctttcaggtatctggaaacaaatggccaattgcccgcatgctcacctgaatgatcaaagaccaggagaaaaccgtacccgtggaccaggaggaagccagcgaagaacaaggcagcccaggatgcgggaccagtgccattccttcccaccgcatgagagtgcca

SEQ ID NO: 27020 - DNA, 39 bp, Homo sapiens
  chr13:30128332-30128371
  hypo
aaaagctctgaggccccggtcaggcgccatgaaggggaa

SEQ ID NO: 27021 - DNA, 32 bp, Homo sapiens
  chr13:30149063-30149095
  hypo
agccaccgtgcgtggccagagcagctaatact

SEQ ID NO: 27022 - DNA, 30 bp, Homo sapiens
  chr13:30163288-30163318
  hypo
aaagggggcacctccgcaagatattgtaga

SEQ ID NO: 27023 - DNA, 215 bp, Homo sapiens
  chr13:30707385-30707600
  hypo
cctggaggaccagccatttgacgcccttgtccactgggaggatgttttccatgattccacttcttcccttcctcggccacctaaggcaggccggcttatgcgtgactgtcaaccgaggcaggccacagcgctgtgggcaggcggttttgcacgtatccttagtgaccctgaaggcccagcctctgctggctgcctgagccgagggttttacttct

SEQ ID NO: 27024 - DNA, 30 bp, Homo sapiens
  chr13:30905017-30905047
  hypo
gtgagccaccgcgcccggccgccagtataa

SEQ ID NO: 27025 - DNA, 82 bp, Homo sapiens
  chr13:30910052-30910134
  hypo
cataaacagaatctgtctgatcgttatcatcatggtagttcgactgatgtactaagatatggatgttcaggtcgcttaagaa

SEQ ID NO: 27026 - DNA, 328 bp, Homo sapiens; identical to SEQ ID NO: 9286
  chr13:30982477-30982805
  hypo

SEQ ID NO: 27027 - DNA, 21 bp, Homo sapiens
  chr13:31069567-31069588
  hypo
gctctgtcctccagagcgaca

SEQ ID NO: 27028 - DNA, 31 bp, Homo sapiens
  chr13:31185333-31185364
  hypo
tgctttttttttgagacgcagtctcgcttta

SEQ ID NO: 27029 - DNA, 207 bp, Homo sapiens
  chr13:31208406-31208613
  hypo
acgaagggaagattcacgttgccagtggaacacagcaggacagcaagagagttcatgatgctactcagaatggcatgaaatttaaagcttataaattgtttctggaattttccgcttaatattttcagaccacggttgagttcaggtaactgaaaccataggaagcaaaacacggatgaagagggaccacttcgtattgcctaattt

SEQ ID NO: 27030 - DNA, 66 bp, Homo sapiens
  chr13:31306160-31306226
  hypo
cagaatcttaatgtgcgcgctgtaatttaatggccgtctcggctattaacacgctcttctcgggtg

SEQ ID NO: 27031 - DNA, 30 bp, Homo sapiens
  chr13:31392474-31392504
  hypo
atttttagctgttacggtcatagacgggtt

SEQ ID NO: 27032 - DNA, 30 bp, Homo sapiens
  chr13:31579359-31579389
  hypo
gggccgccgagtgccgacccccgggtgggc

SEQ ID NO: 27033 - DNA, 30 bp, Homo sapiens
  chr13:31609960-31609990
  hypo
cttagagaagtcagcggctttgcactctga

SEQ ID NO: 27034 - DNA, 31 bp, Homo sapiens
  chr13:32930125-32930156
  hypo
gagagcatgtaaacttcgaggaaattgatat

SEQ ID NO: 27035 - DNA, 132 bp, Homo sapiens
  chr13:32983247-32983379
  hypo
cagtaataaacacatcggagcgcgcatgtcaagtagtccttgagatactgcggtgaattaagagggagatgaaagacaaaactaaagtaaaatgcttccattttcaaaaacgagtgaatatacattccagaa

SEQ ID NO: 27036 - DNA, 36 bp, Homo sapiens
  chr13:33103875-33103911
  hypo
tttttagacaagagtccgactctattgcccaggctg

SEQ ID NO: 27037 - DNA, 31 bp, Homo sapiens; identical to SEQ ID NO: 9291
  chr13:33162267-33162298
  hypo

SEQ ID NO: 27038 - DNA, 222 bp, Homo sapiens
  chr13:36788652-36788874
  hypo
gaggaagccatggccgctgcgcacgtgctgggtcctggggcagcctcccagcaggaggagctccacagccgctgcgtcccgggcccgccccctgcactaatggctcctggccgcagctgagggcgagcacgccccaggcgcccttaaagtggccctgtcgccagttctggcgcgtgggggagcagcaggccgctctgaggggtcaacgcggaacccgggtcg

SEQ ID NO: 27039 - DNA, 150 bp, Homo sapiens; identical to SEQ ID NO: 9303
  chr13:37005430-37005580
  hypo

SEQ ID NO: 27040 - DNA, 163 bp, Homo sapiens; identical to SEQ ID NO: 9304
  chr13:37005899-37006062
  hypo

SEQ ID NO: 27041 - DNA, 224 bp, Homo sapiens; identical to SEQ ID NO: 9305
  chr13:37006433-37006657
  hypo

SEQ ID NO: 27042 - DNA, 254 bp, Homo sapiens; identical to SEQ ID NO: 9307
  chr13:37393237-37393491
  hypo

SEQ ID NO: 27043 - DNA, 291 bp, Homo sapiens
  chr13:37643721-37644012
  hypo
ctcatgcagccaggtgggacccgaccctaggcccggagctttcatcactcgggactctggccccacactgctgctctcacccacgcactgctgctgtggggagggcgtggggaggaggcggagctgggcccggggctgtgccacgcttcacgcttcacggaaccagcgggagccaaggacaagcaggagccgccccgcagccccttgggggccgccgctatgaggccaggccaagtcgcccagcccagagggggagtgatggagccacgcgattgggcacagaggagtggg

SEQ ID NO: 27044 - DNA, 34 bp, Homo sapiens; identical to SEQ ID NO: 9311
  chr13:39612008-39612042
  hypo

SEQ ID NO: 27045 - DNA, 31 bp, Homo sapiens
  chr13:40956513-40956544
  hypo
ggcagaggccaggcagcgttttggggtggga

SEQ ID NO: 27046 - DNA, 30 bp, Homo sapiens
  chr13:41056273-41056303
  hypo
ggtgaaattagcctcgggagaaactaagat

SEQ ID NO: 27047 - DNA, 30 bp, Homo sapiens; identical to SEQ ID NO: 9312
  chr13:41345331-41345361
  hypo

SEQ ID NO: 27048 - DNA, 158 bp, Homo sapiens; identical to SEQ ID NO: 9313
  chr13:41364042-41364200
  hypo

SEQ ID NO: 27049 - DNA, 57 bp, Homo sapiens; identical to SEQ ID NO: 9316
  chr13:42615948-42616005
  hypo

SEQ ID NO: 27050 - DNA, 43 bp, Homo sapiens
  chr13:43217490-43217533
  hypo
ctggtgatgtgggctcaggagcggatctcttgatctgtgggtt

SEQ ID NO: 27051 - DNA, 31 bp, Homo sapiens
  chr13:43543175-43543206
  hypo
gatccataggtggccccgccctccctcattc

SEQ ID NO: 27052 - DNA, 598 bp, Homo sapiens; identical to SEQ ID NO: 9320
  chr13:43566053-43566651
  hypo

SEQ ID NO: 27053 - DNA, 30 bp, Homo sapiens
  chr13:43596591-43596621
  hypo
tggaaaacaccatacgcttcaactgctggt

SEQ ID NO: 27054 - DNA, 106 bp, Homo sapiens
  chr13:43620968-43621074
  hypo
tggatccagcagggtgtccactgcgtttctgatccagtgaggtgcacattgccgcacctgatcaggctaaaggctcgcctttgttactgcacggctaagtgcccta

SEQ ID NO: 27055 - DNA, 28 bp, Homo sapiens
  chr13:44471009-44471037
  hypo
cagcctcgttttcatacttgatatttca

SEQ ID NO: 27056 - DNA, 36 bp, Homo sapiens
  chr13:44544878-44544914
  hypo
tcaccctgctcacccacgccccggtcactgcaaggg

SEQ ID NO: 27057 - DNA, 30 bp, Homo sapiens
  chr13:44545158-44545188
  hypo
cggccctgggccagcgcaccatctgccact

SEQ ID NO: 27058 - DNA, 104 bp, Homo sapiens; identical to SEQ ID NO: 9329
  chr13:45150766-45150870
  hypo

SEQ ID NO: 27059 - DNA, 30 bp, Homo sapiens
  chr13:45154385-45154415
  hypo
ctccaaaattcttacgacagcaatatatga

SEQ ID NO: 27060 - DNA, 10 bp, Homo sapiens
  chr13:45459160-45459170
  hypo
aaacgactta

SEQ ID NO: 27061 - DNA, 31 bp, Homo sapiens
  chr13:45465264-45465295
  hypo
ggtcacattgctacaccgaaagacagctcca

SEQ ID NO: 27062 - DNA, 30 bp, Homo sapiens
  chr13:45767894-45767924
  hypo
ttgttgcctttgttcgtgacacaggtaatt

SEQ ID NO: 27063 - DNA, 132 bp, Homo sapiens
  chr13:45926320-45926452
  hypo
agaatagcgaacgcttccttgtgccagggaaggtggagcagtcatgactcaggcttcgggagcctcaggctcgcagctacaggcttatacacactcacatcaaatgctaatggggcccgagtcagaaagaaa

SEQ ID NO: 27064 - DNA, 23 bp, Homo sapiens
  chr13:45933586-45933609
  hypo
accgcgcccggcccaagtttctt

SEQ ID NO: 27065 - DNA, 28 bp, Homo sapiens
  chr13:45936012-45936040
  hypo
tagagacgggttttcactgtgttagcca

SEQ ID NO: 27066 - DNA, 137 bp, Homo sapiens
  chr13:46037881-46038018
  hypo
gtctcaaattctgctcttaaaagatcagagccttcatttgggaacatagccaggcactgatttgtgctataaagcctgaataaagccttcagactttacccagacaatggtcaaaattgctacgaagctgtttccac

SEQ ID NO: 27067 - DNA, 31 bp, Homo sapiens
  chr13:46048626-46048657
  hypo
atacagacagtgtatccgtatcagctaagag

SEQ ID NO: 27068 - DNA, 88 bp, Homo sapiens
  chr13:46287704-46287792
  hypo
tgcgcgaggagaaccggatgctcagcaaggagaacaagatcctacaggtcttctgggaggagcacaaggcctcgctgggccgagagga

SEQ ID NO: 27069 - DNA, 31 bp, Homo sapiens
  chr13:46288450-46288481
  hypo
ctctacgccttcatgccggccaggagccagg

SEQ ID NO: 27070 - DNA, 31 bp, Homo sapiens
  chr13:46444487-46444518
  hypo
cacagtttactggccccgagccccttttcct

SEQ ID NO: 27071 - DNA, 30 bp, Homo sapiens
  chr13:46543087-46543117
  hypo
actccgattgctcccgaggctgctgctcct

SEQ ID NO: 27072 - DNA, 30 bp, Homo sapiens
  chr13:46559599-46559629
  hypo
ttcgatgagtatctcgaccttcacggtccc

SEQ ID NO: 27073 - DNA, 17 bp, Homo sapiens
  chr13:46622414-46622431
  hypo
caaactttgaagatttc

SEQ ID NO: 27074 - DNA, 43 bp, Homo sapiens
  chr13:46946400-46946443
  hypo
cacctgagattgcaagtcctgcggctgttgctgcacatcctgg

SEQ ID NO: 27075 - DNA, 121 bp, Homo sapiens
  chr13:46948514-46948635
  hypo
aacaccgtgttttaacacccagaggggtgcgccgttcctaggggtacagcaataccaagttgatgcatggagtggacggagcaagctcctagtccatgtccctgctccaaaaatccattta

SEQ ID NO: 27076 - DNA, 41 bp, Homo sapiens
  chr13:48731918-48731959
  hypo
aacatgtatttaaaagggaatcggccgggggcagtgactca

SEQ ID NO: 27077 - DNA, 31 bp, Homo sapiens
  chr13:48759963-48759994
  hypo
ttacactgaaagagcccgattttcattagct

SEQ ID NO: 27078 - DNA, 30 bp, Homo sapiens
  chr13:49752543-49752573
  hypo
gaagacagaagcatcgaggtgaggattcca

SEQ ID NO: 27079 - DNA, 37 bp, Homo sapiens
  chr13:49848523-49848560
  hypo
aacatagttcagtcttcggtgcattacaggttactga

SEQ ID NO: 27080 - DNA, 185 bp, Homo sapiens
  chr13:49922257-49922442
  hypo
cccttcaaacccggacgctagaggccttgtgtttgttgcagttttgcctgaggctttggggaaatgatggcattgcggttcctttcctctgatgtctcgggcaattcagtgcttgtccgaaacccgcacaccctcctgcttacgacaacaaaagtgccacagtggccgggcgcagtgactcacac

SEQ ID NO: 27081 - DNA, 30 bp, Homo sapiens
  chr13:50262868-50262898
  hypo
aaaaaaagaagtgtcgggttaaggagaggc

SEQ ID NO: 27082 - DNA, 30 bp, Homo sapiens
  chr13:50702395-50702425
  hypo
gccccctttcccagcgaaccaacactggca

SEQ ID NO: 27083 - DNA, 93 bp, Homo sapiens
  chr13:52334719-52334812
  hypo
ttttagcttttttgacgcagctctccctcactcgtaacaatgaaaacaaatgacacacacacaaaatcctacatcagcggccctcaaccttgt

SEQ ID NO: 27084 - DNA, 30 bp, Homo sapiens
  chr13:52335568-52335598
  hypo
ttcaacctcacgtgtcgggagcatcaggga

SEQ ID NO: 27085 - DNA, 183 bp, Homo sapiens
  chr13:52335913-52336096
  hypo
tgcatgtgccccatgcagccacggtacatggaagctgtcacttgagccatcagaccggctcagcccatgtgaccggagctctgaagaggcacacacgcatgccccgcacaggctgttagcacttgtcgcctcgctgccctggtccagactacccttgcttgcgtcagtcaaaactgttgtaac

SEQ ID NO: 27086 - DNA, 30 bp, Homo sapiens
  chr13:52336387-52336417
  hypo
cgttcagacctcattcgggaagcagagtgt

SEQ ID NO: 27087 - DNA, 125 bp, Homo sapiens
  chr13:52390164-52390289
  hypo
caagcaaagaacctgcagcagcggcacacggtgcacacggcgctgcactccgcaatgcctgtagcaggccagcccgccccctatgtggaagctactgctttgacgttgttagattttatagctga

SEQ ID NO: 27088 - DNA, 38 bp, Homo sapiens
  chr13:52564915-52564953
  hypo
tcaactaggcaaaaataaaaccgaacccaccctggcac

SEQ ID NO: 27089 - DNA, 38 bp, Homo sapiens
  chr13:52565192-52565230
  hypo
cagcctggcgacggagcgagactctgtctcatatttaa

SEQ ID NO: 27090 - DNA, 31 bp, Homo sapiens
  chr13:52732303-52732334
  hypo
gtccggccctagtgttcgttttttaattaca

SEQ ID NO: 27091 - DNA, 946 bp, Homo sapiens; identical to SEQ ID NO: 9360
  chr13:53424834-53425780
  hypo

SEQ ID NO: 27092 - DNA, 30 bp, Homo sapiens
  chr13:60422151-60422181
  hypo
catctaaccatagagcgcatcttgctggtt

SEQ ID NO: 27093 - DNA, 161 bp, Homo sapiens
  chr13:60492534-60492695
  hypo
cctttgagaaaagactcgagttctggcctatatcactgacggatgactgcagcgaccttcgtttacagaaaatactcagtggcaaacaggcaacagaagccatgggcttcaggaaccacccaggactgcaacaacattaagaaccacgaaagtaagcctga

SEQ ID NO: 27094 - DNA, 30 bp, Homo sapiens
  chr13:60587328-60587358
  hypo
tcaatgccaggttccgcctgcattccacat

SEQ ID NO: 27095 - DNA, 31 bp, Homo sapiens
  chr13:70989770-70989801
  hypo
ggcaaagtaaaatcaacgttgttaaagaagc

SEQ ID NO: 27096 - DNA, 30 bp, Homo sapiens; identical to SEQ ID NO: 9374
  chr13:72966642-72966672
  hypo

SEQ ID NO: 27097 - DNA, 84 bp, Homo sapiens
  chr13:73324106-73324190
  hypo
cttattaaaaagaacccgtcacgtaatagccgctcattaaatatttgtgtaacaaaaacagaacgaatacgtaggttaagttca

SEQ ID NO: 27098 - DNA, 30 bp, Homo sapiens
  chr13:73394526-73394556
  hypo
atgtgatgatctttcgggaggtgatagcgt

SEQ ID NO: 27099 - DNA, 73 bp, Homo sapiens
  chr13:73636810-73636883
  hypo
atacaatagaaggagtaaccccgatttggagaaacgacgcatccactactgcgattaccctggtatgtgctct

SEQ ID NO: 27100 - DNA, 1470 bp, Homo sapiens; identical to SEQ ID NO: 9375
  chr13:74707124-74708594
  hypo

SEQ ID NO: 27101 - DNA, 185 bp, Homo sapiens; identical to SEQ ID NO: 9376
  chr13:74709333-74709518
  hypo

SEQ ID NO: 27102 - DNA, 36 bp, Homo sapiens; identical to SEQ ID NO: 9377
  chr13:75794020-75794056
  hypo

SEQ ID NO: 27103 - DNA, 946 bp, Homo sapiens; identical to SEQ ID NO: 9379
  chr13:76055017-76055963
  hypo

SEQ ID NO: 27104 - DNA, 76 bp, Homo sapiens
  chr13:76352658-76352734
  hypo
cgcccggccaatcgagtgccttttaacaatgcgcccttaagcagatgtaagcaccgtaaggcatattgagtttttt

SEQ ID NO: 27105 - DNA, 30 bp, Homo sapiens
  chr13:77553651-77553681
  hypo
tccagcggagtgtgcggagggaggcgtgtt

SEQ ID NO: 27106 - DNA, 31 bp, Homo sapiens
  chr13:77850148-77850179
  hypo
tctactttcctccatacgatttatccacatt

SEQ ID NO: 27107 - DNA, 30 bp, Homo sapiens; identical to SEQ ID NO: 9382
  chr13:78272624-78272654
  hypo

SEQ ID NO: 27108 - DNA, 264 bp, Homo sapiens; identical to SEQ ID NO: 9384
  chr13:79169849-79170113
  hypo

SEQ ID NO: 27109 - DNA, 36 bp, Homo sapiens; identical to SEQ ID NO: 9385
  chr13:79170347-79170383
  hypo

SEQ ID NO: 27110 - DNA, 778 bp, Homo sapiens; identical to SEQ ID NO: 9386
  chr13:79170467-79171245
  hypo

SEQ ID NO: 27111 - DNA, 144 bp, Homo sapiens; identical to SEQ ID NO: 9387
  chr13:79176276-79176420
  hypo

SEQ ID NO: 27112 - DNA, 576 bp, Homo sapiens; identical to SEQ ID NO: 9388
  chr13:79176608-79177184
  hypo

SEQ ID NO: 27113 - DNA, 317 bp, Homo sapiens; identical to SEQ ID NO: 9389
  chr13:79177305-79177622
  hypo

SEQ ID NO: 27114 - DNA, 120 bp, Homo sapiens; identical to SEQ ID NO: 9390
  chr13:79177885-79178005
  hypo

SEQ ID NO: 27115 - DNA, 31 bp, Homo sapiens; identical to SEQ ID NO: 9391
  chr13:79979539-79979570
  hypo

SEQ ID NO: 27116 - DNA, 37 bp, Homo sapiens
  chr13:79992931-79992968
  hypo
tttttttttttttttctgaggcggagtctcgctctgt

SEQ ID NO: 27117 - DNA, 36 bp, Homo sapiens
  chr13:79993207-79993243
  hypo
tgagccaccgcgcccggcccagggtttttgtttgtt

SEQ ID NO: 27118 - DNA, 368 bp, Homo sapiens; identical to SEQ ID NO: 9396
  chr13:80916946-80917314
  hypo

SEQ ID NO: 27119 - DNA, 450 bp, Homo sapiens; identical to SEQ ID NO: 9398
  chr13:88323380-88323830
  hypo

SEQ ID NO: 27120 - DNA, 651 bp, Homo sapiens; identical to SEQ ID NO: 9399
  chr13:88323867-88324518
  hypo

SEQ ID NO: 27121 - DNA, 64 bp, Homo sapiens; identical to SEQ ID NO: 9400
  chr13:88324920-88324984
  hypo

SEQ ID NO: 27122 - DNA, 31 bp, Homo sapiens; identical to SEQ ID NO: 9403
  chr13:90384876-90384907
  hypo

SEQ ID NO: 27123 - DNA, 44 bp, Homo sapiens
  chr13:91755717-91755761
  hypo
aaataaacctataaaaagatgcgctccaggccgggcacggtggc

SEQ ID NO: 27124 - DNA, 30 bp, Homo sapiens; identical to SEQ ID NO: 9406
  chr13:93152311-93152341
  hypo

SEQ ID NO: 27125 - DNA, 819 bp, Homo sapiens; identical to SEQ ID NO: 9413
  chr13:95201108-95201927
  hypo

SEQ ID NO: 27126 - DNA, 150 bp, Homo sapiens
  chr13:95238871-95239021
  hypo
tacaatcatagagtacgttatctaatcacatacaattaagctagaattccataagaacaagaaaacccatacatgtttggaaattaagacatacgtgtctaagtaacccacggatgagagaagaaatcaaattatttttttttttttttt

SEQ ID NO: 27127 - DNA, 274 bp, Homo sapiens; identical to SEQ ID NO: 9419
  chr13:95359620-95359894
  hypo

SEQ ID NO: 27128 - DNA, 466 bp, Homo sapiens; identical to SEQ ID NO: 9421
  chr13:95363493-95363959
  hypo

SEQ ID NO: 27129 - DNA, 226 bp, Homo sapiens; identical to SEQ ID NO: 9422
  chr13:95364064-95364290
  hypo

SEQ ID NO: 27130 - DNA, 1127 bp, Homo sapiens; identical to SEQ ID NO: 9423
  chr13:95364329-95365456
  hypo

SEQ ID NO: 27131 - DNA, 612 bp, Homo sapiens; identical to SEQ ID NO: 9425
  chr13:95619807-95620419
  hypo

SEQ ID NO: 27132 - DNA, 134 bp, Homo sapiens; identical to SEQ ID NO: 9426
  chr13:95620647-95620781
  hypo

SEQ ID NO: 27133 - DNA, 159 bp, Homo sapiens; identical to SEQ ID NO: 9427
  chr13:95620853-95621012
  hypo

SEQ ID NO: 27134 - DNA, 30 bp, Homo sapiens
  chr13:95711730-95711760
  hypo
cggctgcctgctcgcgaaatgcaaagcatt

SEQ ID NO: 27135 - DNA, 109 bp, Homo sapiens
  chr13:95751945-95752054
  hypo
gctcctgatccatgtttgatacgtgtcccataggtggctggccctttgctgcgatgcacaagcggcactatcggcttcatgactcaacgcaaatgagagagaacactaa

SEQ ID NO: 27136 - DNA, 92 bp, Homo sapiens
  chr13:95775583-95775675
  hypo
aaattgatgcttgtttgatgtcgctctggagtgttttttgtttttttgcgggggacgaagtctcactctgttgcccaggctgaagcacacta

SEQ ID NO: 27137 - DNA, 42 bp, Homo sapiens
  chr13:95852646-95852688
  hypo
gacagcatattttcagggacacgaggacactttctaaagata

SEQ ID NO: 27138 - DNA, 30 bp, Homo sapiens
  chr13:95910917-95910947
  hypo
aaactgcggggtgaacgagtgagtgactct

SEQ ID NO: 27139 - DNA, 210 bp, Homo sapiens
  chr13:96061945-96062155
  hypo
ttaaaataagtaacttcgtcttagatagcacctgctgaaaagtttctggccaacacagcttttcctggctccaaagctcctatctgttctttgtcaccacaatacctcactccttaaaggcaacgtctgtcctaggccccactcatagaagcagagggtggacagggctgtacccgtcgtttcctcttcttcacccgagcatccccagcc

SEQ ID NO: 27140 - DNA, 462 bp, Homo sapiens
  chr13:96085828-96086290
  hypo
cttaaaattcgtctacgaaattttaataaatatccgtgtagaaaatcagaacgactctttcaggccatctttaaaatgtcattggtaaaccatacttgatcctaaattcctgtacttcctcaggccatccgagcatgaaacgctgtcacctacccacatccgctggctgtgacgcttgtcaaagtgttctctatcggctgcatgcctagaccaccaaagcgttctgaccggacagtgtcactggagaaggcggcgcgacatgtccagggcgcagatctgggctctggtgtctggtgtcggagggtttggagctctcgttgctgctaccacgtccaatgagtggaaagtgaccacgcgagcctcctcggtgataacagccacttgggtttaccagggtctgtggatgaactgcgcaggtaacgcgttgggttctttccattgccgaccgcattttactatctt

SEQ ID NO: 27141 - DNA, 31 bp, Homo sapiens
  chr13:96126086-96126117
  hypo
ccaggctgttaagcttcggagggaacaaacc

SEQ ID NO: 27142 - DNA, 31 bp, Homo sapiens
  chr13:96210199-96210230
  hypo
acctttggtaaattcccgacaacttgcactt

SEQ ID NO: 27143 - DNA, 185 bp, Homo sapiens
  chr13:96353303-96353488
  hypo
cctattccagccttttcgacaaaggtagcatccttcctacttttccttcaggtttcaggtgagccttcaggggaatcccccgagggctgtccagtggaactttccgcgatgatgggagatatttggtatcatttgcattgtcccatgcagtggtgttggagcttaggtcacgctaccccaaaata

SEQ ID NO: 27144 - DNA, 154 bp, Homo sapiens
  chr13:96409577-96409731
  hypo
gtaagaaagtgaaaaacgtgctttccttcctccgttcttctctgtcctttcacgtgcctacatgtatttgcttcccggtaagtttttgggacccaggtcttctgagtctagatctgttgttcatgctcatggaccatatcggtagaaatcaagg

SEQ ID NO: 27145 - DNA, 351 bp, Homo sapiens; identical to SEQ ID NO: 9435
  chr13:96705466-96705817
  hypo

SEQ ID NO: 27146 - DNA, 30 bp, Homo sapiens
  chr13:97999349-97999379
  hypo
ccccggcgcctctgcggaggccgctccggg

SEQ ID NO: 27147 - DNA, 81 bp, Homo sapiens
  chr13:98679645-98679726
  hypo
tgacctttctagctgtttgtccgggtgttcttaacattagtgactccttttttttttgagacggagtcttgctctgtcacc

SEQ ID NO: 27148 - DNA, 22 bp, Homo sapiens
  chr13:98829879-98829901
  hypo
gacagagcgagaccctgtctca

SEQ ID NO: 27149 - DNA, 295 bp, Homo sapiens
  chr13:98870044-98870339
  hypo
gcaaggcctcttgttcttgttcgtcatcatatcctacgccgcagcggtgcctgtgcatgaaactgactggtgacagttctgctcggtcgtttaactatacgagagttggtgctgtcctagcataacaagggaaagagcaagtgggaagagcttctgagtcccttcctcgtgttttcacagcgtgaaggtggggctgggattggagtccggcccgccagaccctcaacttacccatcttctgggcactaagagccgcctcctttgtgagattcgcggacttcctctgcctcctact

SEQ ID NO: 27150 - DNA, 44 bp, Homo sapiens
  chr13:98917860-98917904
  hypo
ccgcgcccagcccttcctgaatttatatacgacatgtgagatca

SEQ ID NO: 27151 - DNA, 30 bp, Homo sapiens
  chr13:98945158-98945188
  hypo
atcctgtgtagataacgtgctttgttctaa

SEQ ID NO: 27152 - DNA, 146 bp, Homo sapiens
  chr13:99047527-99047673
  hypo
agggggccagagctgccggcgaggaaaggaaccgaaggtttccgccggggagccggggtcgcacccgagccctgcgccgaggagaagccccgcgggtaacaagcaggcggacggagccgcctcggcgcccacggaggaagaggagg

SEQ ID NO: 27153 - DNA, 31 bp, Homo sapiens
  chr13:99054006-99054037
  hypo
agtgaaagcaattaaacgtcttggtagatgc

SEQ ID NO: 27154 - DNA, 31 bp, Homo sapiens; identical to SEQ ID NO: 9440
  chr13:99064433-99064464
  hypo

SEQ ID NO: 27155 - DNA, 163 bp, Homo sapiens
  chr13:99068033-99068196
  hypo
gtgtacccatgcctttcctcacgttgccgtgatacggaagcgcaggttggctcctgtcgattgggatgggtaagatccgaattcgaggtcacacccccgccatggggctgtcttcagctgtaggtgtgggcctcgttgaaccgcatttcctcctgggtgaaat

SEQ ID NO: 27156 - DNA, 30 bp, Homo sapiens
  chr13:99115929-99115959
  hypo
caggggccgacttacgcgtcggaatcctcg

SEQ ID NO: 27157 - DNA, 30 bp, Homo sapiens
  chr13:99174594-99174624
  hypo
ttcccaaacctgcccgaacagaaccaccta

SEQ ID NO: 27158 - DNA, 113 bp, Homo sapiens
  chr13:99189689-99189802
  hypo
aataaacaagtgaggcgagtgcagctgaggagctgaggccccagccgccagctgtggcacgagaggcagacagaccttccagactaaggaccgggccacgcactggccagggt

SEQ ID NO: 27159 - DNA, 167 bp, Homo sapiens
  chr13:99204542-99204709
  hypo
ggatgatgggaagggacgcagaccctggacgctgggtaccaaattgatcagaaacatgggagaaggtgtggtcagcaaggtggggacaggccagctggggacacaagtggctacgggacagcagagaggcaaaccatctgcagctaagccggcggaggtcttcttcc

SEQ ID NO: 27160 - DNA, 30 bp, Homo sapiens
  chr13:99219202-99219232
  hypo
gcttccaaagttcgacgaaactatacctaa

SEQ ID NO: 27161 - DNA, 330 bp, Homo sapiens; identical to SEQ ID NO: 9441
  chr13:99229763-99230093
  hypo

SEQ ID NO: 27162 - DNA, 42 bp, Homo sapiens
  chr13:99293493-99293535
  hypo
gctgaaagcgctaccggtttccgagacgcgactgcacgacca

SEQ ID NO: 27163 - DNA, 31 bp, Homo sapiens
  chr13:99329817-99329848
  hypo
ataatacagggccccacgctggcctccagaa

SEQ ID NO: 27164 - DNA, 73 bp, Homo sapiens
  chr13:99428650-99428723
  hypo
taaatttgcacaaggccactgcgtacactggtacgtgcttccttgaaaatgtgacattttcaggcagggcgcg

SEQ ID NO: 27165 - DNA, 355 bp, Homo sapiens; identical to SEQ ID NO: 9443
  chr13:99739097-99739452
  hypo

SEQ ID NO: 27166 - DNA, 102 bp, Homo sapiens
  chr13:99851315-99851417
  hypo
gaaaaataactcgaacgaacctaaaggtaaatgtaaaatgtacttcaagactgtgaaaatgggctgggcccagaggctcacgcctgtaatcccaacactttg

SEQ ID NO: 27167 - DNA, 57 bp, Homo sapiens
  chr13:99851656-99851713
  hypo
aaacgaacaaaacaagactgtgaaaatgaactttacgaataaagcctaaagaagcaa

SEQ ID NO: 27168 - DNA, 41 bp, Homo sapiens
  chr13:99863140-99863181
  hypo
caggtgtgagccaccatgctgggccccgctttttccctttg

SEQ ID NO: 27169 - DNA, 31 bp, Homo sapiens
  chr13:99870196-99870227
  hypo
ttcttgccactaaccacgcatttccccactt

SEQ ID NO: 27170 - DNA, 161 bp, Homo sapiens
  chr13:100035863-100036024
  hypo
ggcttcctagccagggctgtgcgtcagtccccgtgctaagggttgaaagcaacgttccggggaggagcacgctcactgcgtgcatttgtaagcctagtcctcacccactgagtggtcccatgacatgggcggcaccccccgtttggaaaagccctggctgg

SEQ ID NO: 27171 - DNA, 30 bp, Homo sapiens
  chr13:100066633-100066663
  hypo
aagatctgcgtccaccgctccaactgctgt

SEQ ID NO: 27172 - DNA, 135 bp, Homo sapiens
  chr13:100068638-100068773
  hypo
ctttgctcattgatgtcggtagacatgaggacgcagggcactgacagctcccggactgtgctgcgcgggctgtggccccacacctgcccaaaggtgagctcctctgcaccccgtgttctgcgtctccaccccatg

SEQ ID NO: 27173 - DNA, 193 bp, Homo sapiens
  chr13:100068976-100069169
  hypo
gagaattaccaaaagcgcttccagaagtgttctaaaattctcccccgggggtgacacagcaaaggtagcctggtcctatcggtggctggaggctgacgctggcctctgctccttctggcctgacagcagtggccgggatcctggagcgtccacgcaggttagggcgtgctctacaccccgcgtaggctagggc

SEQ ID NO: 27174 - DNA, 30 bp, Homo sapiens
  chr13:100307605-100307635
  hypo
aggcgtgagccactgcgcctggcctggtgt

SEQ ID NO: 27175 - DNA, 67 bp, Homo sapiens; identical to SEQ ID NO: 9446
  chr13:100620552-100620619
  hypo

SEQ ID NO: 27176 - DNA, 1399 bp, Homo sapiens; identical to SEQ ID NO: 9447
  chr13:100620631-100622030
  hypo

SEQ ID NO: 27177 - DNA, 348 bp, Homo sapiens; identical to SEQ ID NO: 9448
  chr13:100622155-100622503
  hypo

SEQ ID NO: 27178 - DNA, 321 bp, Homo sapiens; identical to SEQ ID NO: 9450
  chr13:100632438-100632759
  hypo

SEQ ID NO: 27179 - DNA, 379 bp, Homo sapiens; identical to SEQ ID NO: 9451
  chr13:100633419-100633798
  hypo

SEQ ID NO: 27180 - DNA, 397 bp, Homo sapiens; identical to SEQ ID NO: 9452
  chr13:100634347-100634744
  hypo

SEQ ID NO: 27181 - DNA, 30 bp, Homo sapiens
  chr13:101178560-101178590
  hypo
caaaaagggcagcgcgggcagcgcttccag

SEQ ID NO: 27182 - DNA, 30 bp, Homo sapiens
  chr13:101184479-101184509
  hypo
ggccctgctgtacacgaagcactgcaccgc

SEQ ID NO: 27183 - DNA, 30 bp, Homo sapiens
  chr13:101297850-101297880
  hypo
tgagcaggtgagccccgtgcaccgctccaa

SEQ ID NO: 27184 - DNA, 15 bp, Homo sapiens
  chr13:101302747-101302762
  hypo
gcctggcatctccac

SEQ ID NO: 27185 - DNA, 58 bp, Homo sapiens
  chr13:101302821-101302879
  hypo
cgactctctctctgccagagcaacacaatgagcatcagattcgcgttccaaaagctgg

SEQ ID NO: 27186 - DNA, 210 bp, Homo sapiens
  chr13:101317802-101318012
  hypo
tctgggcccccacctcgcgtgaccagttcctgattccaacaggtgggcgcacctgatgggacagcccgtctgtaccagctccctaatcaaatcatcttctgagcacctaagaatgccccaaacagaaatgggtcaaatgatgggtggccccaaagagcaacaaaggtccacagccaccatgcgacttagcacctgcgacttaagtgcttg

SEQ ID NO: 27187 - DNA, 208 bp, Homo sapiens
  chr13:101327900-101328108
  hypo
ccagtatcgcagaatccgatccgttgctccctctggactggaatccgtatcctcggcatttcatcattccaagattctctactccacgtacccttgctgccaccctcttctactttccatcgctgaagttggtgaaagaggcgcctgcccccagttttgtggtctctcaactccacgtgttcgttttcacactcggtgaaattgcctt

SEQ ID NO: 27188 - DNA, 30 bp, Homo sapiens; identical to SEQ ID NO: 9456
  chr13:101422012-101422042
  hypo

SEQ ID NO: 27189 - DNA, 50 bp, Homo sapiens; identical to SEQ ID NO: 9458
  chr13:102068307-102068357
  hypo

SEQ ID NO: 27190 - DNA, 228 bp, Homo sapiens; identical to SEQ ID NO: 9459
  chr13:102068417-102068645
  hypo

SEQ ID NO: 27191 - DNA, 259 bp, Homo sapiens; identical to SEQ ID NO: 9460
  chr13:102068811-102069070
  hypo

SEQ ID NO: 27192 - DNA, 108 bp, Homo sapiens; identical to SEQ ID NO: 9462
  chr13:102568659-102568767
  hypo

SEQ ID NO: 27193 - DNA, 263 bp, Homo sapiens; identical to SEQ ID NO: 9463
  chr13:102569312-102569575
  hypo

SEQ ID NO: 27194 - DNA, 109 bp, Homo sapiens; identical to SEQ ID NO: 9464
  chr13:102569800-102569909
  hypo

SEQ ID NO: 27195 - DNA, 679 bp, Homo sapiens; identical to SEQ ID NO: 9465
  chr13:103046558-103047237
  hypo

SEQ ID NO: 27196 - DNA, 33 bp, Homo sapiens
  chr13:103262163-103262196
  hypo
gggttatatttcgacatgcgatttgggtagaga

SEQ ID NO: 27197 - DNA, 861 bp, Homo sapiens; identical to SEQ ID NO: 9468
  chr13:103451012-103451873
  hypo

SEQ ID NO: 27198 - DNA, 31 bp, Homo sapiens
  chr13:103453932-103453963
  hypo
gcctggaagagggaaccgcaatcaatcaaaa

SEQ ID NO: 27199 - DNA, 30 bp, Homo sapiens; identical to SEQ ID NO: 9470
  chr13:103454353-103454383
  hypo

SEQ ID NO: 27200 - DNA, 45 bp, Homo sapiens
  chr13:103568842-103568887
  hypo
gctactgttctgaccttattgcggcccactcttcctctaatcttt

SEQ ID NO: 27201 - DNA, 37 bp, Homo sapiens
  chr13:106549791-106549828
  hypo
ttgagccaccgcactcggcccattatcaatagttttt

SEQ ID NO: 27202 - DNA, 659 bp, Homo sapiens
  chr13:106912352-106913011
  hypo
tcttattccagtgactgctgtcgtcatcagaagacgcagaaacccacagagagcggaacagcctgcgaagacacagacgtggggaaggcgccctgcggccatggaggcgcagattgcggtgacaggactgcaggtcaggagcgccagtgtcctccaccgaagctcggagagagagcacggcccgcccccgtcagacttctggcctccagaaccgtgacagaattgattgtgttgatgtaagccacccgttttgtggcagttagctacagcaggcacaggaaaatgatacgggtgtgttaaatttgttacgtctactcccccctgagaagccagttttctgctctgaaccggagatccagaaggaccctccagggatgacctcccaactctttgcctagagatcggcaagcacgttgccggaggctctgtccagaacatccgctctgcggctcacttttcatggtcccacctgaggccacgtctgccgaagctgcctccgatgtcgctcacctgccatcgggagagtatgcagccttcccgcctgtgcctccttcatctccggctgctcgcatcccccaggcaccgcctcaaccccgtgagcacctccctaagtgagaggccctcctaaccggcctttcgctgagcccacaaggctctga

SEQ ID NO: 27203 - DNA, 31 bp, Homo sapiens
  chr13:106915515-106915546
  hypo
gagtcataaaggtggccgtgttgcatcctca

SEQ ID NO: 27204 - DNA, 30 bp, Homo sapiens
  chr13:107027610-107027640
  hypo
aggagaggagggcccgagttcaagcaggga

SEQ ID NO: 27205 - DNA, 2699 bp, Homo sapiens; identical to SEQ ID NO: 9472
  chr13:107186447-107189146
  hypo

SEQ ID NO: 27206 - DNA, 31 bp, Homo sapiens
  chr13:108210141-108210172
  hypo
agtgaaaaagcaagcacggacacccatgcag

SEQ ID NO: 27207 - DNA, 256 bp, Homo sapiens; identical to SEQ ID NO: 9475
  chr13:108518444-108518700
  hypo

SEQ ID NO: 27208 - DNA, 262 bp, Homo sapiens; identical to SEQ ID NO: 9476
  chr13:108518708-108518970
  hypo

SEQ ID NO: 27209 - DNA, 465 bp, Homo sapiens; identical to SEQ ID NO: 9477
  chr13:108519280-108519745
  hypo

SEQ ID NO: 27210 - DNA, 195 bp, Homo sapiens; identical to SEQ ID NO: 9478
  chr13:108519901-108520096
  hypo

SEQ ID NO: 27211 - DNA, 225 bp, Homo sapiens; identical to SEQ ID NO: 9479
  chr13:108520309-108520534
  hypo

SEQ ID NO: 27212 - DNA, 13 bp, Homo sapiens
  chr13:108520812-108520825
  hypo
ggtcacctcgatt

SEQ ID NO: 27213 - DNA, 84 bp, Homo sapiens; identical to SEQ ID NO: 9482
  chr13:109147713-109147797
  hypo

SEQ ID NO: 27214 - DNA, 124 bp, Homo sapiens; identical to SEQ ID NO: 9483
  chr13:109148154-109148278
  hypo

SEQ ID NO: 27215 - DNA, 94 bp, Homo sapiens
  chr13:109779846-109779940
  hypo
tatgaggctgtgagcgcctgcctctccgcggccagggaagcggccaacgaaggtcagccctggggagggacccagcctcgtgttccgggctcgc

SEQ ID NO: 27216 - DNA, 45 bp, Homo sapiens
  chr13:109934404-109934449
  hypo
ccacccaccctgggtcgagagtcagagaagcgcggccggtcccac

SEQ ID NO: 27217 - DNA, 30 bp, Homo sapiens
  chr13:109985084-109985114
  hypo
gtccaccggacctgccgggtgtagcagaga

SEQ ID NO: 27218 - DNA, 30 bp, Homo sapiens
  chr13:110174216-110174246
  hypo
gtgcgctcggatctcgggccccggcgtggg

SEQ ID NO: 27219 - DNA, 30 bp, Homo sapiens
  chr13:110397628-110397658
  hypo
gcgctcacataccccgcggtgcacagttac

SEQ ID NO: 27220 - DNA, 30 bp, Homo sapiens
  chr13:110408112-110408142
  hypo
ctccagacacacagcgcaggggctactaca

SEQ ID NO: 27221 - DNA, 249 bp, Homo sapiens
  chr13:110424382-110424631
  hypo
ccatctgggtatgggaagtcccgaacaaagaaaggagggcagagaggctcacccggcatgcgctgggcccaggcagcgcagggcagtcatgggtgagggtggccactgagatgacgggatcgggggcggcttctgccgcagacccgggaattcacgtggtcagatggtccctgacttcagtccctattttcggtggttcatagcacggagcggtgcaggtaggtgcacgctcttcccaggtcctctgca

SEQ ID NO: 27222 - DNA, 2107 bp, Homo sapiens; identical to SEQ ID NO: 9486
  chr13:110434418-110436525
  hypo

SEQ ID NO: 27223 - DNA, 30 bp, Homo sapiens
  chr13:110900678-110900708
  hypo
aaccctctggaaggcgctcagccgcctccg

SEQ ID NO: 27224 - DNA, 131 bp, Homo sapiens; identical to SEQ ID NO: 9488
  chr13:110959517-110959648
  hypo

SEQ ID NO: 27225 - DNA, 390 bp, Homo sapiens; identical to SEQ ID NO: 9489
  chr13:110959752-110960142
  hypo

SEQ ID NO: 27226 - DNA, 442 bp, Homo sapiens; identical to SEQ ID NO: 9490
  chr13:110960344-110960786
  hypo

SEQ ID NO: 27227 - DNA, 104 bp, Homo sapiens
  chr13:111122537-111122641
  hypo
caggcgtgagccactgtgccaggccgcacacatcttcaatagtgtttgtctaatgaaaccatggaagccattgtggacaactttccacccgagatgaaacatcc

SEQ ID NO: 27228 - DNA, 171 bp, Homo sapiens
  chr13:111135307-111135478
  hypo
aaacatgaagagggggcggtgaaaagcaggggacaggtgagttcccagagaagggagtaccaccaggcacaggaggacacagctttccaggtggaaggacataacacggtgccagagagaacgtggtccacacatgaggtgggttcaaaccctcacgcggacaggcatctc

SEQ ID NO: 27229 - DNA, 30 bp, Homo sapiens
  chr13:111144432-111144462
  hypo
tgggcctccagggtcgcagggagagctggg

SEQ ID NO: 27230 - DNA, 375 bp, Homo sapiens; identical to SEQ ID NO: 9492
  chr13:111213573-111213948
  hypo

SEQ ID NO: 27231 - DNA, 72 bp, Homo sapiens; identical to SEQ ID NO: 9493
  chr13:111214282-111214354
  hypo

SEQ ID NO: 27232 - DNA, 172 bp, Homo sapiens; identical to SEQ ID NO: 9494
  chr13:111268136-111268308
  hypo

SEQ ID NO: 27233 - DNA, 30 bp, Homo sapiens
  chr13:111277408-111277438
  hypo
aatccgagctagtacgtttctcatgcacgt

SEQ ID NO: 27234 - DNA, 31 bp, Homo sapiens
  chr13:111278360-111278391
  hypo
cacaccagagaggagccggcgcggagctcca

SEQ ID NO: 27235 - DNA, 30 bp, Homo sapiens
  chr13:111287102-111287132
  hypo
agcagactgtatgacgctgtggtgagtcag

SEQ ID NO: 27236 - DNA, 30 bp, Homo sapiens
  chr13:111288423-111288453
  hypo
actggccactcccacggagcctggggaggc

SEQ ID NO: 27237 - DNA, 192 bp, Homo sapiens
  chr13:111289093-111289285
  hypo
gtgggctgcaggtgagggctccgtccctgggagctggtgggaggagctggaggctggcgccgccctgctcagagctgcctgcttgggctcgtctgaggcggttccgagctgcaggtgtctccaccaacctgctgtgctacacagcggggtctggggcagcctcaccactgcgtgtcttggtttcctcttctg

SEQ ID NO: 27238 - DNA, 273 bp, Homo sapiens
  chr13:111290652-111290925
  hypo
gcccagggtagctgcggcccccggaccacgacgcccacttccccacacctcctgctgtccccctctccgcaggtccagccctctcctggtggccgcgtttggcgcctgctctctcaccaggcagtgcaaccaccaagccttccagaagcacggtcgctccaccaccacctccgacatgatcgccgaggtgggggccgccttcagcaagctctttgaaacctgagcccgcgcagaccagaagtaaacaggcaccttggacgggggagagcgtgt

SEQ ID NO: 27239 - DNA, 227 bp, Homo sapiens
  chr13:111294869-111295096
  hypo
tgaagccagcagggcgcggttacgtcccccggagactgtggattgtggatgccccctccccaccccgtggttgggctctgggccgacacccacccagccctgggcttccctgattccctgcagctgggcctctttctgggtctggcagggatgggtacagcccgcgagcgctgggctctgggcaaggctccactcaactctgagcatctgtcgtccaagcaaggctg

SEQ ID NO: 27240 - DNA, 92 bp, Homo sapiens
  chr13:111301302-111301394
  hypo
acagcccccagccacgaggggagcaagcacgagccgggaagagagctctgcgctcgcacacgggattcatctccgccgcctctgcccgtttc

SEQ ID NO: 27241 - DNA, 290 bp, Homo sapiens
  chr13:111305193-111305483
  hypo
ttatttctgccagccttgcaccgaaatgggtatttccttcgatggtcagtgtaggcagcaaacgcatctggaagcacagagcctggcatggtggccacagctgccacaggtgaccccacagggatgacatcacacaccacaactcacacgagaggatggcagccatcagaccccacccacgctgagctaaccgctgagtcaagcagagcccccgctcctctacttcagtatcatcaacggcctttgggatcctatgtattttattttacgtatttaaagcaaattgtaag

SEQ ID NO: 27242 - DNA, 30 bp, Homo sapiens
  chr13:111305919-111305949
  hypo
ctctcagaatgtaaacgcatgcagaattag

SEQ ID NO: 27243 - DNA, 332 bp, Homo sapiens
  chr13:111306175-111306507
  hypo
cttgaatactgtgggtgcacacggacattaattttttagcgtgttcctgctctgtgccggctgatatcagcaagtttctatactactccggttccaccgtgcaacctgccacggctccctgagaggcaaaatgtggcgacggcagtgtaagctcgtgctggaactctccaggaggtaagcaatctcccagagcccaggccggaggaccggattggccttcaggtggggatggtaacaagccatgtgagccccagtgagctcacgaggtaacagggtgcacactcacagggagcccgctgggtacacatgccagttgccgagggacttcctat

SEQ ID NO: 27244 - DNA, 31 bp, Homo sapiens
  chr13:111307807-111307838
  hypo
ccatatggtagaaaaccgactgaggccaaga

SEQ ID NO: 27245 - DNA, 30 bp, Homo sapiens
  chr13:111330419-111330449
  hypo
ctcagatgcaccagcgcacagggagagctg

SEQ ID NO: 27246 - DNA, 130 bp, Homo sapiens
  chr13:111363842-111363972
  hypo
gagccaccgcgtccggccaagtgttatagtcttttgtgcagaccaagtagtggccaataaatcttgtagaaactaaagtactcatttgcttttaactaggccaagactagaatagcgtgatctgtaagta

SEQ ID NO: 27247 - DNA, 31 bp, Homo sapiens
  chr13:111409606-111409637
  hypo
gtggccacccaaggacgcggcaaactctacg

SEQ ID NO: 27248 - DNA, 31 bp, Homo sapiens
  chr13:111481866-111481897
  hypo
ggctgcagagctagtacgcggcagagagagg

SEQ ID NO: 27249 - DNA, 356 bp, Homo sapiens
  chr13:111682504-111682860
  hypo
gcagggctcactgccctcagccgttgggactgccatcctgggtcgccactctctccagagagtgcctaccatccccacgctccagccacggttacagggcagaactccctgtcttcgtgggcaaagcatccgtggactcaccgctttgtgccatcgaattgcagcagtgtggctggagcagttggcggccctgatgcccagcgcacagagaacgcatccgggatgcgctcaaggatgctgccaacagggttctcagcctgcccgtggagcctgtcttcctaacttggcactcgtgccatcgttggaccaagatgtcattgggcaccgtcccctccggacagatgctttccagccca

SEQ ID NO: 27250 - DNA, 31 bp, Homo sapiens
  chr13:111881138-111881169
  hypo
ccccagcacagaaggtcggaagaggacgtgg

SEQ ID NO: 27251 - DNA, 51 bp, Homo sapiens
  chr13:111881626-111881677
  hypo
ccctctgttttaatccgcgtattttaatctactttgcgtatctgtttgttt

SEQ ID NO: 27252 - DNA, 57 bp, Homo sapiens
  chr13:111936029-111936086
  hypo
gtgtgtgaggccatcgctcagcatctgcacgctgtctgctgcgtctaacgacccctc

SEQ ID NO: 27253 - DNA, 60 bp, Homo sapiens
  chr13:111940219-111940279
  hypo
ggggaacagacaggcacggatggccacgtcgacactgagagttgtcggccttttgttttc

SEQ ID NO: 27254 - DNA, 30 bp, Homo sapiens
  chr13:111967916-111967946
  hypo
ctcctccctggccccgccctgctgagtcct

SEQ ID NO: 27255 - DNA, 31 bp, Homo sapiens
  chr13:111980477-111980508
  hypo
agagtggctttgttttcgggggtgacacttg

SEQ ID NO: 27256 - DNA, 31 bp, Homo sapiens
  chr13:111999133-111999164
  hypo
gtactcaacctgctaacgggtggtatctgcc

SEQ ID NO: 27257 - DNA, 57 bp, Homo sapiens
  chr13:112051222-112051279
  hypo
ctcttgtctctacagcgtgtggacagcgcgcgccctctacagcgtgtgggtgcgcgt

SEQ ID NO: 27258 - DNA, 925 bp, Homo sapiens
  chr13:112199982-112200907
  hypo
ctggggacttcagtccttgagcggcagcaacgcaaagctccaagtgtgaacaaaagcgaactttttcttgaggccgtgatagaggaatgaccgcctcctgggacctgtggttttcttcggcgcaggagaaggcgacagggccctgtcctcggggatgggcggaggtgctggggatgaaggagggaccctgcgccttctgttctgagcaagcttccagggttccttagctccgcaatgcgttggagactccggcttccttgcacacgtcaggggaggactccacggagcctcgctcctcagaccggggtccggggaccggcggcaccggaatcgcctgggcgcctgtgggactgtcaggccccccccggtctattaaaccggacagcaggcgactgcgcgggacccagggcgactccgacagacggggagccggggggagtgtggtccggagtcgattctcagacgtgagggtgccggagagatcccctgcccggcttgtggagcccgggttgctgggcccgagggtcaggtgaggtcagggatggataaaacggaaaatgtcctcatatattgttcccggagagatgtatttcgagaagaaaatggatgaaaccacttgttaaagccgaaatgtaatggggcacgcagtgggtgtggacgtcaaactcgctgccggccagggggcttgccctgggaaccccactcccgctgaaggccagcagtgagagaggtgggacagcagtttctgcatctgttcgcagcaaggcagtctcttctgcctcgcagtctcgttcaggcaacactgcgggaattcggcgtgcatcgctggcgggccgctgctccctgccgccctcccgggttgtggctgagcccacgggaggcgcgtatttcccacgccatcgctggctgcgcttgctcctgtggg

SEQ ID NO: 27259 - DNA, 66 bp, Homo sapiens
  chr13:112273029-112273095
  hypo
tctgcctgcatccctgtcctccgtggggctgtgaagggccccggcggcagggccctctcctggggg

SEQ ID NO: 27260 - DNA, 31 bp, Homo sapiens
  chr13:112559717-112559748
  hypo
tgtggccccacgtccccgcccccttctgcgt

SEQ ID NO: 27261 - DNA, 30 bp, Homo sapiens
  chr13:112573543-112573573
  hypo
tcataaggaccacacggctgaacacctgcc

SEQ ID NO: 27262 - DNA, 276 bp, Homo sapiens
  chr13:112618853-112619129
  hypo
tcccgaagtgcaaagttagttttattcggaagtcttaccgcggaccatagcccagggcctgcggcctgagagcagcaccgtggagaggctctgcctgagcgctctggtccagcgtttccacccacagccggaccgctctggcacagcgttgcagcaccgcggagaggctctgcctgagcgctctggtccagcgtttccacccacagctcatacacgtgtggcagagcttccgtacgggcagaaccacatccagccggctcagaagctgcagtgatc

SEQ ID NO: 27263 - DNA, 105 bp, Homo sapiens
  chr13:112690794-112690899
  hypo
ctggacagcaggcctgagagccggacatgcttccgtgtggccgtcacatccccagagttgcacccgcgcaggccgtgtgtgcacgtgttcttgaatcctagggtg

SEQ ID NO: 27264 - DNA, 171 bp, Homo sapiens
  chr13:112691505-112691676
  hypo
ccgcgtctccaccagtggccacggcgcgcagcccttcctcaggcccagctccctccgcgtctccaccagtggccacggcgcgcagcccttcctcaggcccagctccctccgcgtctccaccagccctttcttagacgcaactctctcagcgtctccaggtcagctcccctt

SEQ ID NO: 27265 - DNA, 30 bp, Homo sapiens; identical to SEQ ID NO: 9498
  chr13:112710413-112710443
  hypo

SEQ ID NO: 27266 - DNA, 30 bp, Homo sapiens; identical to SEQ ID NO: 9499
  chr13:112710808-112710838
  hypo

SEQ ID NO: 27267 - DNA, 850 bp, Homo sapiens; identical to SEQ ID NO: 9500
  chr13:112711800-112712650
  hypo

SEQ ID NO: 27268 - DNA, 30 bp, Homo sapiens; identical to SEQ ID NO: 9505
  chr13:112726647-112726677
  hypo

SEQ ID NO: 27269 - DNA, 30 bp, Homo sapiens; identical to SEQ ID NO: 9506
  chr13:112727145-112727175
  hypo

SEQ ID NO: 27270 - DNA, 163 bp, Homo sapiens
  chr13:112998005-112998168
  hypo
tccttctgcaggatgaaggaccgaacacagggcctcgtctccaaaggtgctcagtaaatggtggctgccgcatgctggccgccccccaaacagccccagcgcggcgtgtcctcgccgtcaccctcctctctgtccagggctcgggggagcttattaataaata

SEQ ID NO: 27271 - DNA, 31 bp, Homo sapiens
  chr13:113097958-113097989
  hypo
cccaagggcagccccacgcctgcagtggtga

SEQ ID NO: 27272 - DNA, 552 bp, Homo sapiens
  chr13:113098819-113099371
  hypo
agactggggtttggggtcaagcgggggtctgggaccgtgcctcaccacgggatctgtgtacacagcgatgcacccagcgtacgcgggcccttccctctgagccctcggcccctcatctgcaggatgggtgagccctggagaagcgggcagaagcagaggaggcagcgaacgcagagcatgtggcctgtgactgagcctagaaagtccgctcggcaacagaggctgcaatccagaaagccccctcggtgacagaggctacaatctagaaagctcgctcagcgacagaggctaccacctagaaagcctgctcggcgacagacactacaatctagacagcccatttggcgacagtggctacaacccagacagcccgctcagcaacagtgtctatgatctagaaagctccctcggcaacagcagctgtcatctagaaagcccgctcagcgacagaggccacaatctagaaagcctcctcagcgacagcggctgcgacccagaaagccctctcagtgacagtggctatgatcgctcgcaactctggcccctggctct

SEQ ID NO: 27273 - DNA, 23 bp, Homo sapiens
  chr13:113218174-113218197
  hypo
caagacttcgcctcaaaaaaaaa

SEQ ID NO: 27274 - DNA, 147 bp, Homo sapiens
  chr13:113244575-113244722
  hypo
caccgcgcccggtccagccatctttcttaacgtgcatacacgatgtgactcactggagccctgataagattattgatttcttgaggagaacaatgttgtcggaaaccttctccaactgttgctcacgggtatacagtcagggctgtc

SEQ ID NO: 27275 - DNA, 157 bp, Homo sapiens
  chr13:113291587-113291744
  hypo
ggaggagggcaacagagccaccgtctgctttcatcgcccaagcgcagcggctctgccacctggcagccgaggccatgcaagatttcgcaggaggagcccatggccgcggggaggaggagtgggcgcaggagcccacggaacaggccaggcaggaggg

SEQ ID NO: 27276 - DNA, 115 bp, Homo sapiens
  chr13:113346803-113346918
  hypo
atagatctatataagtgtttgcgtagcttgcatttttaattcccctttgctgtattattacgcttatggcatcacattttcttttaatctaagcggtaaatattctttagtgaac

SEQ ID NO: 27277 - DNA, 308 bp, Homo sapiens
  chr13:113347705-113348013
  hypo
ctagggtgatgtatgtgctgtcgggggcgtgaggtggtgtatgctctctggggtgatgtatgagctgtgggtacggggagaggggacggggtggagagtgtgtgtgccgtggggtggtgtatgtgctgtgggagccatggggtagcgtgtgtgccgtggactggcgtatgtgttgtggagtagtgtatgtgctatggggtagcatatgagccatggggtagtgcatgtgccatgaggtagtttgacctccatgacgtaacactttaaaagcacttctaggccaggcgcggtggctcatgcctgtaatc

SEQ ID NO: 27278 - DNA, 1104 bp, Homo sapiens
  chr13:113350457-113351561
  hypo
cctggtgggtctgtgcagtgacgggacaggtcacggcgctcgtgcacgctgggtgcccagtgcacggggcgtctttgttgcgcgcatggacctgcggctgcatcaccgtccatgcttctgggcttcttaaggagaccgcctctcaccttgggctttccggaaccttctccccgcactcctcttcacgtggagagtgggtgaccttgccctgctctcccggggagagcggtggtcactggtgggaacgcccctgccacgcccagcagcctttctgcctctgcgcttgcctcctccggttggagcgagtgacccgttctgccgaagtccagtcccgtgtgtgctgcggccccgtctctctccctctctgagtgacactgtctgccctgctgcttgccgtcccgctgttggcaccgctttagaccccatatttcccagcggtcaccgtgctcatttttggcttccagctaccgtttttcttaggttaccccgcgtagctggcccgtccttccttctcctgtctcttctgtgcctaccgcggggggttcccttaccaaggtctccatcacccccaggcccacctccctcgggcccctctctgcccttgccctccacctcagcgactccgtggggcttttgtgatcccagctgcagttagcgagcgcccctgtgtgctcagagacacgccagtgagccgggaaggacagagacccaagtcccatccctctggggcccccttggaatgggggaggcgaacaggaaaccaccacagtgagtgttggggtgccccgcaggcgacggtgctgagaaaaagagagtggggttgggggcagtgcgtgcgcaggctggcgggtgggcgaggcgggtggaggatgcgtggggcgcagtgcttgcgcgcagtgggtggcggggtggacgaggtgagggcctggccaggtgggtgcctgcgtgtccagcctgaggggcggcccacgcagcagcctctgggagccctggggccttccgtgggctgcttcctgtggcgtcctgcgggctggccgcccctcggtgggctccggtgctggcctctgccttccccagggccacggtgggctcctagtggccttt

SEQ ID NO: 27279 - DNA, 30 bp, Homo sapiens
  chr13:113358399-113358429
  hypo
cctgctgtcccaggcgggggagtcacggga

SEQ ID NO: 27280 - DNA, 135 bp, Homo sapiens
  chr13:113369393-113369528
  hypo
gtgttgtagcctgtatgactccgccgttcctttgcatggatataccacgttttgctcacacattcacctgttgaaggacacttgggttgtttcctgcggcagcttttcctgaccgaaagcttctcaaaaggacta

SEQ ID NO: 27281 - DNA, 188 bp, Homo sapiens
  chr13:113379233-113379421
  hypo
cctctgctccagccacccctgcggccatgcctgtggtcccctgtgtgggctgggctgtggccttggacctggtccccacgtcattttcttctcccttggggtggattgtctgtgggcccggtgtgggaccaacagctgatggccgacgcctcttgccgtaggttgccggccatgcatacctgggggaa

SEQ ID NO: 27282 - DNA, 92 bp, Homo sapiens
  chr13:113383739-113383831
  hypo
aggcactgaggcagcgcggttcccacctcggcattgcaggcccagagtatctaacgcgtctgcgtgtgaacagtgtcggaaggcactgaggc

SEQ ID NO: 27283 - DNA, 111 bp, Homo sapiens
  chr13:113396991-113397102
  hypo
tttcacttagatggtatcccccgtgtgtgacggccggccttcgccctgtgcctccccgcagtgtggctggatctcagggggctcggacacgtgctcagactgaaggtcaga

SEQ ID NO: 27284 - DNA, 231 bp, Homo sapiens
  chr13:113398457-113398688
  hypo
aacaagaaggcaggagaatgtcgctgtcctcccagcacccggtttgggacggtctgggagggtgtgatggagtgcagtgttctgtatgttgatgtgtgttgacggatttctctgtcctcccggcacccggcttgggacggtctgggagggtgtgatggagtatggtgttctgtatattgatgtgtgttgatggatttttctttcctcccggcacccggcttcggatggtct

SEQ ID NO: 27285 - DNA, 563 bp, Homo sapiens
  chr13:113400247-113400810
  hypo
cccccaggccctggtgaccaccgttctgctttctctgtctgtgattttgaccactttagatacgtcatttcagtggactcatcctgtgtcgttttgtggcggaatcacgttctgttgtgtgtatacaccacgtttttcttgtccgttcacctgtgatggactcttgggcgtctgccgtaggccgctgtgaatgctggcggcggtgatcgtgtgctgacgtctcctccacgtactgagttcgtgtcttttggatgcgcgcccagaggtggcactgctggatcctgtgctgggtcatacctatgtttaattctctgaggaacctccgtgctgtctccatagcagccgtgtcgtttcacacttgcaccaacagtgcacagggctccggttccccacgtcctcaccgggtaactggggttccggctccccacgtcctccccgggtaactggggttccggttccccacgtcctcaccgggtaactggggttccggctccccgcgtcctccccgggtaactggggctctggttccccacgtcctcaccggcacttggcactgtctagtg

SEQ ID NO: 27286 - DNA, 49 bp, Homo sapiens
  chr13:113401541-113401590
  hypo
gcctcagggccagggtggattcgggagcgtaagggaagggactgttgct

SEQ ID NO: 27287 - DNA, 30 bp, Homo sapiens
  chr13:113406735-113406765
  hypo
caggagaatcctcccggcgggcgcccctgt

SEQ ID NO: 27288 - DNA, 30 bp, Homo sapiens
  chr13:113409130-113409160
  hypo
ccacgatccacaatcgaccacctgtccatg

SEQ ID NO: 27289 - DNA, 75 bp, Homo sapiens
  chr13:113417107-113417182
  hypo
tgctcacggtatgacgggcagccctccaggagtggcgtggaggccggggcactcagtcacgtgtgtgccgggagc

SEQ ID NO: 27290 - DNA, 283 bp, Homo sapiens
  chr13:113419583-113419866
  hypo
aggcctggcaagttgttctgacggccaggcccatccttggggaggcctctgaggacgcctggaaccccaggcccgccctgccttgttttctggtcctggcctgggggggtcgtggtctcgctggtgcagcctcctccgggcaggccccgcctctgctcccttcccctcactccatctgattcggccccgtttccttgtccactccacgttcttctgagcgtgtctctgggacatggttaaggttaagaagcggcctctgaacgagggagaatgtactgaaatt

SEQ ID NO: 27291 - DNA, 221 bp, Homo sapiens
  chr13:113424803-113425024
  hypo
tcccagcagatgccagtggctcggaccaaggaggacagagggatgggcgtgcccacgtgaagcctcaccccagaccccagaccctgcttacatgccgggacgaaggtgggagagaaccgtgcatctcagcacggcggtggaaacgtggtccacctgcggagggcctgtttgcgtttattacacccgagcaaggcccgcacgcccaccagaggggccagggt

SEQ ID NO: 27292 - DNA, 417 bp, Homo sapiens
  chr13:113425244-113425661
  hypo
ataccggccattagggagaatcgccctgtaaacattgatccagtgattgaggccggtcggcttgcttctgttctgccccgcggtgtaattcagctaataggttttgtttgtctcagctgaaatgtgaaacttccattaggtgtctaaccctggctaaaagtggttttcagcctatttttaaaaaatctcctttgtccctgcatgcattctaaccccattctaacctgatgcgggcagccacaacccaggccctaacagagttcatggtaaggatggtgaaggcgtgacccacggtggaaagttggttattttgggtaatccagcgattttctgattgaacttcgaatgcggaaacatcttgcccttactggggcaacgaggggaggcaaggcgtgcgccaggcagagacaccttgga

SEQ ID NO: 27293 - DNA, 30 bp, Homo sapiens
  chr13:113430251-113430281
  hypo
cccacaggctgctgcgcctcccgggcgtga

SEQ ID NO: 27294 - DNA, 43 bp, Homo sapiens
  chr13:113445466-113445509
  hypo
tactgcttagaactcagcctgcgcagcccagaggtacagagag

SEQ ID NO: 27295 - DNA, 191 bp, Homo sapiens
  chr13:113446209-113446400
  hypo
caggaagccctcactcaggaacgcacagaccggggtcaacaggctctcaggagcgccgtctgcgtgcaggtggagggtgtggcggggccaggagagcacttggccgcctttcatctcaacctctgaggacagaagggggctctcaaatccgcccatgcattgagatcttcgctcttcacagaggtgggatt

SEQ ID NO: 27296 - DNA, 201 bp, Homo sapiens
  chr13:113461152-113461353
  hypo
ctgtcaccgtagagtcgcctattctaaacatttcgtactcacggctcataggcggtgttttgtgactggctctttcactcagcatgatgttttcaaggtttctctgcatctgagcaggcgtcagcgcttcattccgtctgatgaatgagtcacggtcccctgcacatacctggcattttgtgtatcacgcgtcctctgtgg

SEQ ID NO: 27297 - DNA, 103 bp, Homo sapiens
  chr13:113461412-113461515
  hypo
tgtgtttcacacccaccagattggctttcagatgtgaaaggctggagagggcatggcgagggaggcaccacgggccgccggcaggagcgtggcggagccacca

SEQ ID NO: 27298 - DNA, 30 bp, Homo sapiens
  chr13:113461735-113461765
  hypo
tggacagctccgccgcggtgcatggcagaa

SEQ ID NO: 27299 - DNA, 31 bp, Homo sapiens
  chr13:113463034-113463065
  hypo
ctccgctgggcactgacgggcatctcactgt

SEQ ID NO: 27300 - DNA, 71 bp, Homo sapiens
  chr13:113472457-113472528
  hypo
gcggtgaccgtgtgtgcgcttggtgacagggcggtgaccgtcggtgcgcttggtgacgggcagtgactgtt

SEQ ID NO: 27301 - DNA, 30 bp, Homo sapiens
  chr13:113474398-113474428
  hypo
ccgggctccactctcgtctctggtttgtct

SEQ ID NO: 27302 - DNA, 335 bp, Homo sapiens
  chr13:113477606-113477941
  hypo
ctgcccacttgccttcgtgtccgcatcatttctgatcatcgtatctttacaggcccttaggatcggaaaacctgctgcttagaggagctacactgaagaacactgagaaaatctttggtaaatatttaattaattattaaccattgcccctaacattaaggatgcatgaagcaaaagttaaaacccgcagcggaacccgagagcgtttcttggcaccttgaggtgctggaggctttctggccgcgcaagttctgccccactgagatttgatcagtgaataagtgcaatcctgaagcagcagcatcagagaatacggcttacggattaaggcctct

SEQ ID NO: 27303 - DNA, 38 bp, Homo sapiens
  chr13:113482706-113482744
  hypo
tgagtaggggggaaagcgcccagcggtgttgagtgggg

SEQ ID NO: 27304 - DNA, 192 bp, Homo sapiens
  chr13:113488275-113488467
  hypo
ggtgccgcgaagcacgtctgtctcccgggtcctctgctggcctctcgcatcccaaagccatgctctgtctctgccgtcccagtggctcccacaaggccctgaaggtcgctgacccccaggcgtgcaggaggaggcattgtatagatgggtgcacccacgtgctggctgaaggcctgcgctggaccttcgttc

SEQ ID NO: 27305 - DNA, 577 bp, Homo sapiens
  chr13:113497160-113497737
  hypo
ccaccacttgttgtatagcaccgcccagcagcccgcacacctgagcctcccactccgtgggtccggctttctgtctttggggctgctgcggtagggggccggcctgagtgtctctcacagcagggcctcccctccccgtcagacgcgctaaagccgggcaacacgtggctggggtggacacgctccctcctgtcagacaccttaactccgggtgatgcgtggctgggtggacatgctccctcctgtgagaggtcctaacgccgagcgacgcatggttgggtggacgtgctctctcccgtcagatgtcctaacgccgagtgacgcacggctgagtgcacatgctccctcctgtgagatgccctaaagctacactgtgcgtggctggggtggacgcactccctcctgtcagacgtcctaaagctgggtgacgcatggccgggtgggcgcgttccctcccatcagatgccctaacgttgggtgatgcgtggctgggtggacgcgctccctctgctccccacgtggctgctttgtcccacggtgtctgcacccttctcccgacaccaccctggggtcttct

SEQ ID NO: 27306 - DNA, 95 bp, Homo sapiens
  chr13:113498378-113498473
  hypo
tgggggctcctgagggggcagctccatctgcagctcgctttccaatagcgcgaggctgtgctttgctgtgacgtggtcgccgtgccatgctgagc

SEQ ID NO: 27307 - DNA, 31 bp, Homo sapiens
  chr13:113507107-113507138
  hypo
atctcagtggctttttcgtgatgatacttgc

SEQ ID NO: 27308 - DNA, 31 bp, Homo sapiens
  chr13:113516370-113516401
  hypo
aaggcatcacgtcaggcgtaaggcgtcacgt

SEQ ID NO: 27309 - DNA, 142 bp, Homo sapiens
  chr13:113536447-113536589
  hypo
tcacaggccttgccctcgagcatggcaccctggccgcctggacccagcactgtggttgttgagccacaccagtggcctctgggcattcggctcaacgcaggagggacattctgctggcccaccctgcgcgctgtcatgcaga

SEQ ID NO: 27310 - DNA, 139 bp, Homo sapiens
  chr13:113537190-113537329
  hypo
gcaccagaacctgtctcgggctgacgggggtggcacacaggacacgggtggatcccaacaggcagcaccgcacctctgcccgcctcccgcactgcagctccgcccgccgggctctgcgtccccacgtcccctcgtccca

SEQ ID NO: 27311 - DNA, 77 bp, Homo sapiens
  chr13:113539459-113539536
  hypo
cacataccacagacacgcgtgtgcatgctcctacacaatacatatgcacatatcatgaacagcgtaagttcctacac

SEQ ID NO: 27312 - DNA, 30 bp, Homo sapiens
  chr13:113544110-113544140
  hypo
cacctgggagcagccgcggcctgcggggtg

SEQ ID NO: 27313 - DNA, 31 bp, Homo sapiens; identical to SEQ ID NO: 9515
  chr13:113548669-113548700
  hypo

SEQ ID NO: 27314 - DNA, 30 bp, Homo sapiens
  chr13:113565872-113565902
  hypo
agagacctgggccccgggcctcacccaagc

SEQ ID NO: 27315 - DNA, 189 bp, Homo sapiens; identical to SEQ ID NO: 9516
  chr13:113597655-113597844
  hypo

SEQ ID NO: 27316 - DNA, 280 bp, Homo sapiens
  chr13:113627844-113628124
  hypo
tgctgaccttctgtgatctgacgccacggctcagtgcttcccaagagctcctgagaacgcagcgctcaggcctcccagctgggtgagtctgacgccctccatgcgaagacggcgcgagcacggcttcacctgtggaaccaggggcagacttatgagctcccgggggtttcagttccggcctgctctgaggacactggggggccggccctgtgtttgcttggagcgcccttcagggagacccgtggctccaggggctggcgctgagtgaccacaggcaagg

SEQ ID NO: 27317 - DNA, 31 bp, Homo sapiens
  chr13:113638952-113638983
  hypo
gggtgagtgatctcagcggaattccccttta

SEQ ID NO: 27318 - DNA, 30 bp, Homo sapiens
  chr13:113641396-113641426
  hypo
acacagatggcacccggtgaactcactcag

SEQ ID NO: 27319 - DNA, 30 bp, Homo sapiens
  chr13:113642769-113642799
  hypo
tcggcagctctgtgcggcctggagggacgt

SEQ ID NO: 27320 - DNA, 93 bp, Homo sapiens
  chr13:113644355-113644448
  hypo
cagtcctcactcacccgccactcacctcctgcttaccccctgttcactcacctgccgctcacttcctgctgtgcagcccgaccagtaccggtc

SEQ ID NO: 27321 - DNA, 30 bp, Homo sapiens
  chr13:113647374-113647404
  hypo
ccttgagaagctcccgcttctgcagtaagg

SEQ ID NO: 27322 - DNA, 309 bp, Homo sapiens
  chr13:113648322-113648631
  hypo
tacccaggacagggtcccagccgaccctccgccttcgtctttttcctgattaaaaaaaagcaccttcatgcggggtgcggcgcttgggaccccccaagctgacgtcactgtctgtgccggtgtctcgggcaggggcaggtgtggatgccaagctgacgtcactgtgccagtgtctcgggcaggggcgtggctgccaacggggcacggtgcgtgggatgccaagctgacatcactatgcaggtgtctcgggcaggggctggcgtggctgtcggcgtgacggggcgcggcgcgtgggacgccaagctgacg

SEQ ID NO: 27323 - DNA, 30 bp, Homo sapiens
  chr13:113663191-113663221
  hypo
gggattcttacgcccgcctgcatcagagaa

SEQ ID NO: 27324 - DNA, 30 bp, Homo sapiens
  chr13:113718438-113718468
  hypo
agctgcatcccatccgcacatccatccgca

SEQ ID NO: 27325 - DNA, 463 bp, Homo sapiens
  chr13:113719079-113719542
  hypo
aagaggtcaaggagggcaggacgctatgggagggcgttcaccgtctttgcgtcagccggtctcacctgatgggtctgtgtgggaacggtttccgccggtgtctgctttcagggcagcaggaggtgggtgcagtgcacaaggcatgcaattgtgttttctctgtccccaaggccatcgaaagtttcgccctcatggtgaagcagacggctcagatgctgcagtccttcgggaccgagctggctgaaacagagctgcccaatgacgtccagtcgacaagctcagtgctgtgtgcgcacacagagaagaaggacaaggcgaaggtacatggggggtgctccggctggaagctgtggggggctccggtcagtcagaagctgcgcggggctccggtcggaagctgcggggggtctttcgtcccagcgggagtttgtgtcagcagcacgtaagaccaagaagtcagcag

SEQ ID NO: 27326 - DNA, 30 bp, Homo sapiens
  chr13:113731342-113731372
  hypo
ccttactgagcatgcggtttcaggagcacg

SEQ ID NO: 27327 - DNA, 30 bp, Homo sapiens
  chr13:113748343-113748373
  hypo
gggaccacagccctcggtatcccataggtc

SEQ ID NO: 27328 - DNA, 30 bp, Homo sapiens
  chr13:113769397-113769427
  hypo
gcaggccttcccgccggagtcctggacttg

SEQ ID NO: 27329 - DNA, 30 bp, Homo sapiens
  chr13:113771922-113771952
  hypo
ctcccctgtccgaccgcggtgctgggtggg

SEQ ID NO: 27330 - DNA, 264 bp, Homo sapiens
  chr13:113796034-113796298
  hypo
tgaggccctcgaaggcggggcctaggcgtcacagctgcaccttgcacagcaaccccactcccactcatagctggcccgacccgcagcgttggcctcacccgggggcatattcgaagggcagagttccaggcccgccttttcaagagcctggtgacccagctcaccttccggcttcaggtgcggctcagcccccagaccgtgttctgcccccggctaccatgactgtcccctccagacacaggttactcccgagtgttctgtcac

SEQ ID NO: 27331 - DNA, 30 bp, Homo sapiens
  chr13:113797338-113797368
  hypo
gggtggaggcccctgcggctggcagattca

SEQ ID NO: 27332 - DNA, 361 bp, Homo sapiens
  chr13:113797732-113798093
  hypo
ggaaagaattttgcagggagtcgcacacgcccagcacttgggttctcctgttggcatcctccggccagatgcattcatcccatttcgcccggcccgtttgtctctgtccatccgtcaagctttcttgacttcttggtgcattttcaggcaaaccgcagacgccaacactcccctcgctgcctgggttgctgcctggcgtccattgttcacaggcggtcacctgaggggaggccaacgctcggacagctgcgctcacctgcagatccgacccctgccgacgacgtggggcctcgccctgcaagcccgctgcccctccgggtgcccctgcgctctgcctcccggctctctgactcttctccct

SEQ ID NO: 27333 - DNA, 30 bp, Homo sapiens
  chr13:113803258-113803288
  hypo
ggtgaggcggtgcacgaggtggaggtggtc

SEQ ID NO: 27334 - DNA, 30 bp, Homo sapiens
  chr13:113803564-113803594
  hypo
aacatgttctgtgccggctacgacaccaag

SEQ ID NO: 27335 - DNA, 30 bp, Homo sapiens
  chr13:113826038-113826068
  hypo
ggtgcggggctccccgtgtgcacccctgag

SEQ ID NO: 27336 - DNA, 30 bp, Homo sapiens
  chr13:113826539-113826569
  hypo
acccgcttggcccacgcagcagcagagccg

SEQ ID NO: 27337 - DNA, 30 bp, Homo sapiens
  chr13:113832340-113832370
  hypo
gaaggagattaactcgggtgtgctgaaaat

SEQ ID NO: 27338 - DNA, 30 bp, Homo sapiens
  chr13:113884308-113884338
  hypo
cctttcctcagcagcgttcgcggccacgga

SEQ ID NO: 27339 - DNA, 92 bp, Homo sapiens
  chr13:113887592-113887684
  hypo
cggcgaggccgtggaccggagcctgttgcggagcctcctgggcatgctgtctgacctgcaggtgagtgctgcctgtgcggaagatacctggg

SEQ ID NO: 27340 - DNA, 116 bp, Homo sapiens
  chr13:113887884-113888000
  hypo
cactacataaaatgcacgtttttcatggaaaatataaacagagacaaagccagatgacacgctgggggaaaatattagcaacacacacaaaagacaaagggcgaagttctttagag

SEQ ID NO: 27341 - DNA, 88 bp, Homo sapiens; identical to SEQ ID NO: 9520
  chr13:113951224-113951312
  hypo

SEQ ID NO: 27342 - DNA, 32 bp, Homo sapiens
  chr13:113953157-113953189
  hypo
ttttaaaaactcacttcaggccgggagcagtg

SEQ ID NO: 27343 - DNA, 21 bp, Homo sapiens
  chr13:113969598-113969619
  hypo
aaccagcgtggagatgccggt

SEQ ID NO: 27344 - DNA, 58 bp, Homo sapiens
  chr13:113985422-113985480
  hypo
gcccgggtgtgtgcacgaaagcctaggtgtgtgcatgggaacccgggtgtgtgcatgg

SEQ ID NO: 27345 - DNA, 127 bp, Homo sapiens
  chr13:113985702-113985829
  hypo
ggataccaggaggcacgggctgcagcatgggaggcggcccaggaggagatgccaagaaggcacagcaaggacagccagtgcaggagccacccgggtgcccacccagcagctgcgcacccccactgcc

SEQ ID NO: 27346 - DNA, 30 bp, Homo sapiens
  chr13:114004354-114004384
  hypo
ctcacaggcagtcacgggctgtgcgcacac

SEQ ID NO: 27347 - DNA, 30 bp, Homo sapiens
  chr13:114005302-114005332
  hypo
gaaggaatcacccacgggtttctgttccac

SEQ ID NO: 27348 - DNA, 92 bp, Homo sapiens
  chr13:114009703-114009795
  hypo
gattctggtccatctgcgcctgggccccactcagcaccatccagacgcgggcacggtgctccagcgggacccctttccggacatagcgcttc

SEQ ID NO: 27349 - DNA, 454 bp, Homo sapiens; identical to SEQ ID NO: 9522
  chr13:114017991-114018445
  hypo

SEQ ID NO: 27350 - DNA, 31 bp, Homo sapiens; identical to SEQ ID NO: 9523
  chr13:114048391-114048422
  hypo

SEQ ID NO: 27351 - DNA, 406 bp, Homo sapiens
  chr13:114055640-114056046
  hypo
ggggcagggactctggaggtccgtgtgcttcgtgagagaggggaccctgtcctcctagcaggggtccagcggcaccacagcaagacttctgtggccaagtacacgccatgctcagctctgcccccacccgcacccccggaccatcctgtgtgcagctgggctgccccgggacccacacgcgcgaggggcacccggtgctcaggagcctccacacacagcagctcgcacttagaacccacacgccaagcagaaacccctcgaagcgggctgggagcacggacccctgatttatagaggaggccccgggggccctgtcgggggagctgtggggaccggccccccagagctcagcacagcccggccctccttccagacaccagcactcgcatgtcccagcaggtgaggg

SEQ ID NO: 27352 - DNA, 30 bp, Homo sapiens
  chr13:114060113-114060143
  hypo
tctggggtggctttcggacaaggctctgct

SEQ ID NO: 27353 - DNA, 587 bp, Homo sapiens
  chr13:114074643-114075230
  hypo
agactcactttctgattctcacggaggggtttgatttgcggatggagaccgagtccaccctgtttgaatgcagccgcgccctgctcatgcgagctggccttctcttccatacagcagggtggagagggaagcccactttccggtaagcgggcaaaacaggtactacgaccgtgttacttatgctagcaacagttccgacttaccttaattgggtttcttttcctgaaaggtaattctcagttaatttccccacacccacgggtgctgggaccacactccatggacgtgtgtgacgtgaggcccttcgcccccgtgtgcctgtctctctggttcttctgacttaaagcaccagtagcagcacagttagtccagttattcggaagctcagcacggagccacattgctgcagcatagaaggccacggattcctccatcagcatggactacacttcccacaaaacgaacggggcatctctatggaaaaagcaaagcgtgtccctatccctgggacacctctacccctgggacacacctagccccaggacccgcccacccccgggacccgctcaccccgggacaccactacc

SEQ ID NO: 27354 - DNA, 30 bp, Homo sapiens
  chr13:114085717-114085747
  hypo
ctcccttggcccggcgggagggctgcagca

SEQ ID NO: 27355 - DNA, 27 bp, Homo sapiens
  chr13:114108040-114108067
  hypo
ggggctcctctcgctgtccctggaagg

SEQ ID NO: 27356 - DNA, 96 bp, Homo sapiens
  chr13:114115113-114115209
  hypo
tgagaggagcttcccgtgactgccaagaagccacgttctgaggaggccccggagtggccccagctcagccctgcagtctccggcaaggtgacagag

SEQ ID NO: 27357 - DNA, 390 bp, Homo sapiens
  chr13:114122901-114123291
  hypo
acgcgagacgtgccacgctccatcaacctctccttcagacaagcggcctatgaggacgcagcactaaagggggcgggggagggccctggacaggcggggcggaggcagcacagtgtgtaaccttccctgaatctgcgcataaaagcagatgcagcaattagaaagcaaagccaaacacccagaggcaacatttaccataaatttaggtgagaaagtatcaccacaaacccaagttgtaagctaggggatgagccactgccagcaacaggacccgtgtgttgccgtcatgccggggacgtggggggcacagggcctctgacagatgtgagaacaggagggcctcagaggtgcctacacgccgggaccaggtaaggacgagcctgaagtagg

SEQ ID NO: 27358 - DNA, 61 bp, Homo sapiens
  chr13:114185956-114186017
  hypo
agatcaagagcagcacgcgtgtggacctgcaggtgacacggcgccccgtacatgcagatca

SEQ ID NO: 27359 - DNA, 126 bp, Homo sapiens
  chr13:114188363-114188489
  hypo
gtcgtggaagttctccgaatcctggttttgattggtcagattcttttttcactagcggcggtttttcttttatgtcttgttataaagaagtatctcattggaccctattatcggaagctgcacatg

SEQ ID NO: 27360 - DNA, 84 bp, Homo sapiens
  chr13:114188958-114189042
  hypo
gctggggcgtggtcgcgctcatgtatagaccagctgctggagagactgagctgggaggatggcttgagcccaggaggccaaggc

SEQ ID NO: 27361 - DNA, 747 bp, Homo sapiens
  chr13:114189676-114190423
  hypo
cagtagtcctgacagcgcacctgggcaccgtcaccattgtcccaacagtgcacctgtgcaccgtcactgttcagcccggcaggtgctcttcctgctgtttatcccagagaaatgaagccgtgttcacacagtagcctgtacacaggtgtttatagcagctttattcgtattagccataaacagtccaaaggtacttcagtgggtaaataaatgttcaacaaactgagctatgtccataccacggaacgccacccagcagtaaaaccaccggcacacacctccgagaactgcgcagagtgggcaggcagcccccaaaggctgcgtactgtgtggttctttttatgtcacatttatgaggcgagaagattctgaagttgaggaaaggctcgtggttcccaggaattgaggatgggcagtctggggaggggctggggatggcactcgctgtcttcgctgtgtctgtatcggcacctgagtgggggtctggggaggggatggggatggcattcgctgtgtttgctgtgtctatatcggcacctgagtcggggtctggggagggactggggatggatggcactcgctgtctttgctgtgtccgtatcagcacctgagtgggatcttgtgctgtaatttggcaagatgttaccattggggaaactaaagggtaatgaggactttgtattactcttaaaactgcaggttaatatataattatctcaaaataaaaagtttccggctgggcgcggt

SEQ ID NO: 27362 - DNA, 30 bp, Homo sapiens
  chr13:114192832-114192862
  hypo
ggggagggagcatccgccgctccgccgtgc

SEQ ID NO: 27363 - DNA, 30 bp, Homo sapiens
  chr13:114199040-114199070
  hypo
gccgccatggcctgcgcggagagattaggt

SEQ ID NO: 27364 - DNA, 30 bp, Homo sapiens
  chr13:114201781-114201811
  hypo
cgggcctgcagagccggccctgctcctcat

SEQ ID NO: 27365 - DNA, 449 bp, Homo sapiens
  chr13:114202508-114202957
  hypo
cagggaccatcgcagcgtgcctgtggctcgtctgggttctctgtttcgtgtgtgtttaactctgtgtgggtccagtcttcagcagtgacgtaatgaaccgctcttgcagtttctcctggcggcgctggtcctgtctctcattctgccgaggagcagccagtacatcaagtggatcgtctctgcggggcttgcccaggtcagcgagttttcctttgtcctggggagccgggcgcgaagagcgggcgtcatctctcgggaggtgagtggcttccccccgcggagcgcttctcgggcggcacgggctgcactctgggtttgagtcgggtgtggcgaaggcggctcggcagcacagcggggcctgggggcagggtcctcctccaggggggcacgcagaggcctggctgctctctgctcatccagcatgtggcgttttcagaggaaagttgcag

SEQ ID NO: 27366 - DNA, 30 bp, Homo sapiens
  chr13:114203816-114203846
  hypo
gtgtgtgcccagaccggagagacggtccag

SEQ ID NO: 27367 - DNA, 31 bp, Homo sapiens
  chr13:114205218-114205249
  hypo
tttaagccagggttttcgtatacctgtcagc

SEQ ID NO: 27368 - DNA, 30 bp, Homo sapiens
  chr13:114237584-114237614
  hypo
ggcttggaggccaccgggtccagcagaggc

SEQ ID NO: 27369 - DNA, 43 bp, Homo sapiens
  chr13:114244324-114244367
  hypo
ttttgctgtaagacttcgggatgtagcccgtgtggggctgttt

SEQ ID NO: 27370 - DNA, 84 bp, Homo sapiens
  chr13:114246252-114246336
  hypo
agcctggaaaagcatccgccctttgtacctttttcccgactggctgagattcccgcagcatcccgactccgcttcagggctcct

SEQ ID NO: 27371 - DNA, 780 bp, Homo sapiens
  chr13:114251688-114252468
  hypo
cccaggcctggaccccgtcgcgctgtctggcagcgtgtgctgcatttccctctggaggattttcccaccggaacctgtgtgatgtgttgtggaggaagctgtgtgaggcaggggtcccggggcctgaacggctggaccttgctagccctgcgacctcaggtggggactcctggcctctgtgtgctcgcctgtcccacgtgggcggccagctgccctccctacagggcagtgagggagaaaggagggcgtcagctgcttgccacgtcctggctgaacttggatggattcaaaagagtgaacataaggctttgacgaaattaggagcacctcacaggcctgggcgctgtgtaagacctcctcccagccacgaggggctgatctgatcagagctggagggacggccattgccgtgtgtccaatgtgagggctctgagctcaggagccagcatccagacacgctggggactctgcggcctctgtctttgccccagtgttgcacagaggggccctggctttccctgggcactgtttagaatgattgagggggtggcaggtggccagaaacgggagaggtggagtctccgaggcagcaggcctcccctgcaggctgctgcttccaggagggctgcaggcacgaggtgttcaaatgcagcagtgacttcataagaaaagggagtggagccgccgacatttcaggtgagttgtcatcaagagtgcagaatccaactgtgttgggagccacttgctggtgcctggccaagttcccgtctggtccctcta

SEQ ID NO: 27372 - DNA, 31 bp, Homo sapiens
  chr13:114256383-114256414
  hypo
gcagtcgagggagaagcggatggagttaccc

SEQ ID NO: 27373 - DNA, 213 bp, Homo sapiens
  chr13:114271796-114272009
  hypo
cttcacctgcagaaccgttcacctgcagagcccttcacctgcagaaccattcacctgcagagccgctcacctgcagaacccttcacctgcagagccgctcacctgcagagcccttcacctgcagaacccttcacctgcagagccgctcacctgcagagccgctcacctgcagagccgctcacctgcagagccgctcacctgcagagctgctca

SEQ ID NO: 27374 - DNA, 30 bp, Homo sapiens
  chr13:114276770-114276800
  hypo
tttcccagggtgctcgctaccacctggttt

SEQ ID NO: 27375 - DNA, 945 bp, Homo sapiens
  chr13:114283924-114284869
  hypo
gactgggctaacatgcgtgatctgagcacgtgtaaggtaggctggctaagctgtgatgtgtggtaggagaggtggatgacgtgcatttcgacttagggtattttcagctcatgcgggtttatcgggatgttccttgtaagttcctcgttgtaagtcagttcctcgttgtaagtccactctttgtgagtaggtttgctcctgcctggaggacagcggcacggtgacggcatctgttttggggccaagatccagtgccttgcgtggtcctgggattcctggggaagggagtggacccatgaggtgggttagaatcgtgtgtgggattctccagccccctgtacctgtgcgtgtggtatgcgcggagccagccagcactgcctggcgtggagctggcgggttctcagtctgacatcaactcccggagaatggcatctgctgaactcaacgtaggaagccgtgcggggccagcgcgctctcaggcagcctgagtggcagggtccttttgtcagctgtttggatctcccacgtggcccagtgccccagcagcacacacacacacacacacacacacacgcgtattgaacaaaacaagtttcacaggacatttatccacgcccaggagatttatcttttgtatggcttcattttgcagaaaattcacttgtttgatttcatggcctggtgatccacagaaggccgcactctgatgagtctctgatcatcggagagatgagtgtcaatgaaaagatcagtccttgaaatgtttttcttctccggagctgacaggtgatctggcctagggataattggaaagtgtccccgtcagctgctcccagggccaccgcaggtgatgcatttatccccgtaagaaggggagctgggggggcccagcttagagtagctcagggcatcggccacatgaagcccccccgccagcatacaggt

SEQ ID NO: 27376 - DNA, 689 bp, Homo sapiens; identical to SEQ ID NO: 9524
  chr13:114285597-114286286
  hypo

SEQ ID NO: 27377 - DNA, 31 bp, Homo sapiens
  chr13:114287596-114287627
  hypo
gtcagtaagtgtgtgccgggggccgagaggc

SEQ ID NO: 27378 - DNA, 30 bp, Homo sapiens
  chr13:114294191-114294221
  hypo
cctcctgtttctgtcgttatgggttccagg

SEQ ID NO: 27379 - DNA, 30 bp, Homo sapiens
  chr13:114295265-114295295
  hypo
attgccatgctggtgcggctatggagactg

SEQ ID NO: 27380 - DNA, 30 bp, Homo sapiens
  chr13:114295872-114295902
  hypo
tgttaggcccagacgcggtgggcccgggtg

SEQ ID NO: 27381 - DNA, 483 bp, Homo sapiens
  chr13:114302290-114302773
  hypo
ccgtgtcttctgtgctggtgtcgcacccgccggccaccgccaccctgcgtcttagacgtcccgccgcagctgtgtttccacctcatctccagcttgagtggcagccagcggcgccacctgcacacgagccccctccattcgagaagcacagactatgagtgtggccacgcgtcccatgacgtgaactcacgtctgcgccgagacctttgccggcggttttttactgacggagtaagcactggagatgcttggtacagcgtcttccatcggtaaattgatttagttaaccttacaacatatctgcaaggtttttaatctttcttccaagaccgtttctcatggacttttctgtgtgtctgttgggggctgacggacttcgacgcgccagtcgcttgtgcttggggccctttgggtactaacagccacactgctgagcatgtgaaatcaggacccaggctgcacaccgccgtcggggtgagacgc

SEQ ID NO: 27382 - DNA, 30 bp, Homo sapiens
  chr13:114303497-114303527
  hypo
ggaagaactgatactcgcgagcaggtcctt

SEQ ID NO: 27383 - DNA, 549 bp, Homo sapiens
  chr13:114304587-114305136
  hypo
cgttccagtcaggaccggctaagtcacacctttgtttcatttttctacatgaaggggcttattgctttcctttcgctaagtgtgagaggactcagcagctgtggtgagggaagcgtggaaggaaggaacctacctgggctttcttcccgtaataagggaagtagtgcagactgaaggtgccgttgggagggtagtacttgacctgcagcggctggccgagctcgcggggctggtcctggggaggagaggccactgcctgagtcaggcgggagctggtgtgtgccggtgtctgtgtgttgcgtttgtgtgcgtgtgtgcacacacgcgctgtgtaggtgcttgcataaacactttattgcatacttagcataaatcagatgcaatctttctaatcagtgctgagatctcagcaaggatatgatttgttagcatgcaaaatgcccagtgacccctccgtgtgcctctaacaacttgaaatgttggaaggatgacgcaggtgggtgaagctgggaggcggcttgcttgtctgtactcgagggtagccactgc

SEQ ID NO: 27384 - DNA, 30 bp, Homo sapiens
  chr13:114312312-114312342
  hypo
tccatgcacccagccggcccgccccccgca

SEQ ID NO: 27385 - DNA, 478 bp, Homo sapiens
  chr13:114497775-114498253
  hypo
tcaagcatgcacatgtgtgtgcgtgtgatgagcacacattagggttgggcacacgccctgccgtctggggttgcttctcagaggcgcgtgccgagggcccggggatggcaacgcccttccgtgcagaaggcgcctgggtgggtcttgcggaatagacgcgtgaggacgacccgcagggtggagtccggcctggccagggctggaagtcataggacgaaaggtagaggtgagaagaggcagttctgtgaaagaagccccgacctcgagctgggactttgaattggtttgcgtttgaaaaccggggttggtaaaagctgggcacccacacctctccttctgttgcagctggtggcagcgatcgtgtttatcagttttggcgtggtggccgccttctgctgcgccatcgtggacggcgtatttgcagcacagcacattgtgagtacattgtcattgtgtgcacagtcgctttccggggctg

SEQ ID NO: 27386 - DNA, 264 bp, Homo sapiens
  chr13:114502705-114502969
  hypo
ggataatacatttacagtgtccgagaaacttctggatttccctgagccaccgacagcggcagtgtgacctcatttctctttccaggtgagtgagatgcggggagtaatgacccgcgggcggccgccgccttcgccaggaccgtcggagggcacagctctgtgacggcgctctctgtgtgtctcgcacctgccctgtgtggattcctggctttaactaaacgcagcctctcatcctcagcacgcgtgtcagaggaggaggagctg

SEQ ID NO: 27387 - DNA, 30 bp, Homo sapiens
  chr13:114536567-114536597
  hypo
cggtgtgacaggcaccggtgtgacaggtcg

SEQ ID NO: 27388 - DNA, 231 bp, Homo sapiens
  chr13:114537012-114537243
  hypo
tgctgtgataggccccggtgtgacaggtcggtgtgacaggcaccagtgtgacaggtaggtcatgctgtgataggccccggtgtgacaggtcggtgtgacaggcaccagtgtgacaggccccggtgtgacaggtaggtcatgctgtgacaggcaccggtgtgacaggccccggtgtgacaggtcggtgtgacaggcaccggtgtgacaggtcggtcacgttggctccctggc

SEQ ID NO: 27389 - DNA, 301 bp, Homo sapiens; identical to SEQ ID NO: 9525
  chr13:114565969-114566270
  hypo

SEQ ID NO: 27390 - DNA, 79 bp, Homo sapiens; identical to SEQ ID NO: 9526
  chr13:114566409-114566488
  hypo

SEQ ID NO: 27391 - DNA, 190 bp, Homo sapiens
  chr13:114617342-114617532
  hypo
aggagagattcacacatgagccgacggtggaggaggcattgatcaggagtgattcacacgtgagccaacagtggaggaggcgttgatcaggagagattcacgcctgagctgacggtggaggaagcgttcatcaggagagattcgcacgtgagctgacagtggaggaggcgttgatcaggagagattcaca

SEQ ID NO: 27392 - DNA, 30 bp, Homo sapiens
  chr13:114742406-114742436
  hypo
cacccttagcgttccgagcacagggcagcg

SEQ ID NO: 27393 - DNA, 30 bp, Homo sapiens
  chr13:114748282-114748312
  hypo
agccgaaagccgaggcggggccagcaggcc

SEQ ID NO: 27394 - DNA, 197 bp, Homo sapiens
  chr13:114748560-114748757
  hypo
aggtgggctttctgcggagggcgtggcggtggtggcagcggttctgggagagggaaaccccagcgccacttgtctatgggccgggacggcgtgcatctcactttgccggctctgcgctcttccttctcttctccctcccaaaggctgcggctttgcatgggcagcttgctggcgccactgggcgcgtcccgcagact

SEQ ID NO: 27395 - DNA, 30 bp, Homo sapiens
  chr13:114749034-114749064
  hypo
gcaagtacatgtgcacgtgtgctctccctg

SEQ ID NO: 27396 - DNA, 30 bp, Homo sapiens
  chr13:114751220-114751250
  hypo
tactcctcctgctccgggccgtcatacaca

SEQ ID NO: 27397 - DNA, 30 bp, Homo sapiens
  chr13:114764875-114764905
  hypo
ttgatgcgagattccgacacaaactcacca

SEQ ID NO: 27398 - DNA, 99 bp, Homo sapiens
  chr13:114767790-114767889
  hypo
gctgttcaagagagaaaagggcggggcgctgggagccgccaggacagcgcagttcacaaccagtggatgccgaacgccgttcattccagggattcacag

SEQ ID NO: 27399 - DNA, 30 bp, Homo sapiens
  chr13:114771083-114771113
  hypo
gggtgtggacaacacggccagtggtacaga

SEQ ID NO: 27400 - DNA, 30 bp, Homo sapiens
  chr13:114775090-114775120
  hypo
ggctgcccggaggacgaatcacataaatcg

SEQ ID NO: 27401 - DNA, 43 bp, Homo sapiens; identical to SEQ ID NO: 9527
  chr13:114776306-114776349
  hypo

SEQ ID NO: 27402 - DNA, 30 bp, Homo sapiens; identical to SEQ ID NO: 9528
  chr13:114776875-114776905
  hypo

SEQ ID NO: 27403 - DNA, 30 bp, Homo sapiens
  chr13:114778698-114778728
  hypo
tgcagtgtacctgacgtccgggtcatctgc

SEQ ID NO: 27404 - DNA, 497 bp, Homo sapiens
  chr13:114780586-114781083
  hypo
gtctagccagggctgcggggggttctgcctgggtgggagtcaccctgcacagcgctatggcagtttctcagcaacatgagggtgttcagggcactcaccctggaagcgcttggccgccgcctcccggagggagaagaagatgtcacacatgacggtcgggcagctcaccccagactcagtgatggcgtggaagacgcggtccacatactgccgtaggttctcctgcaacgggacacggcactgggacccactcccgaggctgcccacaggtgcgtgtagcaccagggcacgcccagggaggggcgcgtggggaggggctgagggcgggcgcagggcagctgcggcagtgagacacgtgtgaacagccactccctggaaatctgtgctgggagctgtggcaattcacgcgtgaaaatcactacacaggcaccacgtcggctccccggctcggccccgacctcgtttactgagtggggaatggacgttcactagaatgt

SEQ ID NO: 27405 - DNA, 145 bp, Homo sapiens
  chr13:114791747-114791892
  hypo
ggggagctgccacctggaactcggtccatgctgcatgcctcctgcacctccaacagggcccaccctccccctgggagcctggcagctccctgccttccctcgctctggcaaaaccatcttctccgcctgtctataagtgaggctt

SEQ ID NO: 27406 - DNA, 30 bp, Homo sapiens
  chr13:114799761-114799791
  hypo
tctcaggacagaagcgttcagatttgcaag

SEQ ID NO: 27407 - DNA, 30 bp, Homo sapiens
  chr13:114807160-114807190
  hypo
ccgtgtgtgtggacacgcacgtgtgtgcat

SEQ ID NO: 27408 - DNA, 247 bp, Homo sapiens
  chr13:114807618-114807865
  hypo
tccagaaacattcccgaggcgcggcaaacgtgtgcccatcccatccccggcaggacagggcttgtcaggcgctgggcaccgagccatctcccatcctgcgtcccttcatggcaccaccatgtcaaccctgccagtggcctccgcacactgcggaccacgccacccaccacggtgagcacccacggcagcacatgcacctctgttgaccgatgcacgtgaactcctagggagtcgcacacacatgtga

SEQ ID NO: 27409 - DNA, 30 bp, Homo sapiens
  chr13:114827286-114827316
  hypo
tggtgccctatccacggaggcggcagtggg

SEQ ID NO: 27410 - DNA, 30 bp, Homo sapiens
  chr13:114843009-114843039
  hypo
ccctccctgcccgacgatgcccagtcccac

SEQ ID NO: 27411 - DNA, 30 bp, Homo sapiens
  chr13:114847024-114847054
  hypo
tatcctgagaaacacgactccaaaccctgt

SEQ ID NO: 27412 - DNA, 35 bp, Homo sapiens
  chr13:114855634-114855669
  hypo
taccaacgggtggggccgcacggcaacaggtttaa

SEQ ID NO: 27413 - DNA, 222 bp, Homo sapiens
  chr13:114867636-114867858
  hypo
cagtgccagaaaacagagagacgggggctgtgaagcacaggatccacagcgggcgggtggtaggcgggcagcaggtgggcggtaggcgggcagtgggcaggcagcgggctgagaagcagagcagagccccagccaggagcccagagggcggcagagcagcgggcaccgaaccagactgtcggacctgtgctgggggagagcgagagtgaaggaggaagagag

SEQ ID NO: 27414 - DNA, 85 bp, Homo sapiens
  chr13:114869699-114869784
  hypo
acacccacccctgatgcgtccacactgccacggccacggacacccacccctgatgcgtccacgctgtccccggccacggacaccc

SEQ ID NO: 27415 - DNA, 30 bp, Homo sapiens
  chr13:114881846-114881876
  hypo
tttcataaacatgccgcattctgaggaatc

SEQ ID NO: 27416 - DNA, 30 bp, Homo sapiens
  chr13:114902141-114902171
  hypo
aactgaaggaagaacggtggaatcaggtat

SEQ ID NO: 27417 - DNA, 230 bp, Homo sapiens
  chr13:114917487-114917717
  hypo
tctgaagaagaggcataaaaccgccttgaggaacggcatcgtctgtgctgaagcaggcagcgcccagctgacgactgtcaatgcagccctagcaaacacggccacgctgccctccatccagggtcctgtccagtgctgtgctaagcacttcacgtggtgacagctagctgcacaccaggcacggtcaggtgcttagcgtttattaagtcgttcaattcttctgtaacccc

SEQ ID NO: 27418 - DNA, 123 bp, Homo sapiens
  chr13:114961817-114961940
  hypo
ctcactctgtttccaatactgcgcccaggtaacgctgcctcctcatgccacaggtccagagcgcccagccgctggtagacacccgcgccccgctgacgttccgccatctccacctgaaactca

SEQ ID NO: 27419 - DNA, 30 bp, Homo sapiens
  chr13:114963680-114963710
  hypo
tgatctcctgacctcgtgaagtttacctca

SEQ ID NO: 27420 - DNA, 99 bp, Homo sapiens
  chr13:115024216-115024315
  hypo
atttcccctggcagccgcggttcaatatttgctaactcagtgtacacagtgactttatagaacataaatactgtggttgggtgcggtggctcccgtctg

SEQ ID NO: 27421 - DNA, 205 bp, Homo sapiens
  chr13:115052294-115052499
  hypo
ggttgatggagagcacgtgatttttttagttaagatcattttaagttatgatgcttccgaatgagcagtgcagaagacacatgaatggtctgttcctgagcgtcagggaaggcatgttgtgtcacatagttgaagtcagtggtcacagacggatgcctcaagagcccataggaatgagatgttttgcttgcggtgaggtcatctt

SEQ ID NO: 27422 - DNA, 30 bp, Homo sapiens
  chr14:20786054-20786084
  hypo
ccagagcgcgcatgcgtggggttgccccga

SEQ ID NO: 27423 - DNA, 31 bp, Homo sapiens
  chr14:20786685-20786716
  hypo
tgaggtgacctacctgcgtgctctcctggaa

SEQ ID NO: 27424 - DNA, 30 bp, Homo sapiens
  chr14:20904154-20904184
  hypo
agctatagggtgcacgcggtgcagtgaaac

SEQ ID NO: 27425 - DNA, 30 bp, Homo sapiens
  chr14:21238096-21238126
  hypo
tacacaggctgaagcgtgtttttagttctt

SEQ ID NO: 27426 - DNA, 211 bp, Homo sapiens
  chr14:21304293-21304504
  hypo
ctggggaaactcaccagtaggcgagatcagtgaccggtgtgcacgcacagagagctgactggaggctgaggagcttcctttgtccggctgctgtggcctgctctccggggtggaggggtaggtccacgggggatgcagacctgagcctctcccgggttttggcaccaaaatgtaaggttcttgtatccgtttgaaccccgagagggagcca

SEQ ID NO: 27427 - DNA, 24 bp, Homo sapiens
  chr14:21315805-21315829
  hypo
tccgtgatctgtaaaacagacaag

SEQ ID NO: 27428 - DNA, 488 bp, Homo sapiens
  chr14:21560060-21560548
  hypo
agaggcagagtgccccggtccctcacccgggcgcgggtgcagggaagccagagagcccagcgacctgccccgggcccaggtttcctcctcggcctccaccacctcctcttcttcctcaggctcctccgcacggtgccggcgagcccgggccgggagagcagaggacagcgggcggaagcctccgaagctgcggccgggaccgggctcagcaccctcgccgttgggccggccctcgccagctcgcaggctcaggtagcccaagaggctcgggggctcacggcgctcggccggggtgggagccggggccaagaggagcgctgggcccaacggctcataggccagcaggccgaggtcaggaggctggggggcgcgggcaggcccggaggcaggccccggggcacgcagtgggcccagcttgctggcgtgcaccttcatgtggttcttaaggaaccagggctccttgaagcagcggccgcacaccggacacg

SEQ ID NO: 27429 - DNA, 64 bp, Homo sapiens
  chr14:21689076-21689140
  hypo
ctctactaaaatacacaaaaaaagtcaggtatggtggcgcgccggtattcccaggaactcacaa

SEQ ID NO: 27430 - DNA, 31 bp, Homo sapiens
  chr14:21876123-21876154
  hypo
gaaataagctcaccaccgcatggattaagtg

SEQ ID NO: 27431 - DNA, 30 bp, Homo sapiens; identical to SEQ ID NO: 9553
  chr14:22694049-22694079
  hypo

SEQ ID NO: 27432 - DNA, 31 bp, Homo sapiens
  chr14:23240342-23240373
  hypo
ggacaaattacctccacgggaaggcttccta

SEQ ID NO: 27433 - DNA, 30 bp, Homo sapiens
  chr14:23375560-23375590
  hypo
cccgatctcgactacgactacagagggaaa

SEQ ID NO: 27434 - DNA, 28 bp, Homo sapiens
  chr14:23469629-23469657
  hypo
aaaggagaggaggagccgggcatggtgg

SEQ ID NO: 27435 - DNA, 32 bp, Homo sapiens
  chr14:23470947-23470979
  hypo
acaggtgtgagccactgcgcccagctccttct

SEQ ID NO: 27436 - DNA, 105 bp, Homo sapiens
  chr14:23518258-23518363
  hypo
atgatggcaagcagggcgccggtgctgagcccagcagctgagaggtgagcctcaggccagcaggatgccacagagccgtcaggctggcagcggcacacactaaca

SEQ ID NO: 27437 - DNA, 31 bp, Homo sapiens
  chr14:23536685-23536716
  hypo
agagtcctcccaggggcgcagggggggcggg

SEQ ID NO: 27438 - DNA, 46 bp, Homo sapiens
  chr14:23719830-23719876
  hypo
taagctactgtaaacccggaaaatctgagacaagtctcagttaatt

SEQ ID NO: 27439 - DNA, 149 bp, Homo sapiens
  chr14:23757711-23757860
  hypo
gccactgcgccgggcccacaacttttctttagtaaacgtgcctaaaacttggaaacaatcttttctgaagtgactcttctgttctttggtctttgaaaaagtctcttcttgcctacttaggttaatgtaataccgtatatatacttgcc

SEQ ID NO: 27440 - DNA, 189 bp, Homo sapiens; identical to SEQ ID NO: 9560
  chr14:23776070-23776259
  hypo

SEQ ID NO: 27441 - DNA, 327 bp, Homo sapiens
  chr14:23776953-23777280
  hypo
ccttgcctcttatagccgcccggatggcgaccccagcctcggccccagacacacgggctctggtggcagactttgtaggttataagctgaggcagaagggttatgtctgtggagctggccccggggagggcccagcagctgacccgctgcaccaagccatgcgggcagctggagatgagttcgagacccgcttccggcgcaccttctctgatctggcggctcagctgcatgtgaccccaggctcagcccaacaacgcttcacccaggtctccgatgaactttttcaagggggccccaactggggccgccttgtagccttctttgtct

SEQ ID NO: 27442 - DNA, 95 bp, Homo sapiens
  chr14:23793465-23793560
  hypo
ttttaacagcaggccccggggtcgcgtctacaggtcaggatagatgggctgctcctctttcccccgcctcccgtgagccccgtatgcttcctcct

SEQ ID NO: 27443 - DNA, 149 bp, Homo sapiens
  chr14:23815818-23815967
  hypo
gtgtgggccagcctcccgccagggtactcagaggccgctcagagggcagggttgggggtggcaagcagcgggacgtggtcacagcgggtagggggtggctgccgcagcagggaaggccggcgacacagctccccgtcccggagcacctc

SEQ ID NO: 27444 - DNA, 30 bp, Homo sapiens
  chr14:23855282-23855312
  hypo
tgttctccttcaggtcgtcgttggcacgga

SEQ ID NO: 27445 - DNA, 3 bp, Homo sapiens
  chr14:24456383-24456386
  hypo
ggt

SEQ ID NO: 27446 - DNA, 24 bp, Homo sapiens
  chr14:24456625-24456649
  hypo
cacgcccagctgaatgtccaaatc

SEQ ID NO: 27447 - DNA, 30 bp, Homo sapiens
  chr14:24608184-24608214
  hypo
ctctttattggaaccgggccccgctggccc

SEQ ID NO: 27448 - DNA, 94 bp, Homo sapiens
  chr14:24629477-24629571
  hypo
catcaatgcccactcgctggacccagccaccttgtatgaggtggaagagctggagacggccactgagcgctacctgcacgtacgcccccagcct

SEQ ID NO: 27449 - DNA, 30 bp, Homo sapiens
  chr14:24634133-24634163
  hypo
gagctcttcagaaccgcctacttctgcaga

SEQ ID NO: 27450 - DNA, 30 bp, Homo sapiens
  chr14:24731054-24731084
  hypo
cagcaagtccacaccgttcactactagcat

SEQ ID NO: 27451 - DNA, 30 bp, Homo sapiens
  chr14:24731527-24731557
  hypo
ggcccacatcggaacgtggcccatccatca

SEQ ID NO: 27452 - DNA, 54 bp, Homo sapiens
  chr14:24733718-24733772
  hypo
ttgtgcaggggctgcggatttgtgcatcactgcagatacgggaaggggcagggc

SEQ ID NO: 27453 - DNA, 30 bp, Homo sapiens
  chr14:24800290-24800320
  hypo
tcgctggccagccgcgtgaagcccacgatg

SEQ ID NO: 27454 - DNA, 30 bp, Homo sapiens; identical to SEQ ID NO: 9582
  chr14:30397154-30397184
  hypo

SEQ ID NO: 27455 - DNA, 79 bp, Homo sapiens
  chr14:31456367-31456446
  hypo
gaaagggcaagagtaacgtagaggcatggcagccggaaaaagaaaatataaaatacaatttaagggccaggcgcagtgg

SEQ ID NO: 27456 - DNA, 101 bp, Homo sapiens
  chr14:31456880-31456981
  hypo
gattattctgactactcgctgtgattctgcccacaatattttcttacattcaatcagttgaatataattttttttttttttgagacagactctcgttctgt

SEQ ID NO: 27457 - DNA, 31 bp, Homo sapiens
  chr14:31478709-31478740
  hypo
cacttttgcatttgtacggaaaaaattctga

SEQ ID NO: 27458 - DNA, 206 bp, Homo sapiens
  chr14:31484305-31484511
  hypo
actacaagcgtgagcgccaccgcgtccagcctcacacccacttttatttatttacttttcattagtttccttgaagggtattctgtgtccagtagccttaccaggaaggctgcttcagaatttgacacaaaccatgccactggtttccacaggtatgagttgcgtttccccaattactatagttttgttccgtttgcctatgttat

SEQ ID NO: 27459 - DNA, 30 bp, Homo sapiens
  chr14:31923652-31923682
  hypo
ttaaaaagtacaatcgtgctactgaaacaa

SEQ ID NO: 27460 - DNA, 263 bp, Homo sapiens
  chr14:32597575-32597838
  hypo
ctgcactccagcatgggctgggctcccaaacaggttcatcctcacaccaacttgcaagggcgtggcccgccttgtcaccatgagaccctgagaaagtcccttcacctcgctgggctctggtttcctcattccaaggatggctctgctatctgcgtgtcggctatcggtgctgaggctggcccgcctctgcgtgggcaggatcttggcattccttttgctccatggacgctgcctccctgggctcgccgcgcctggccgcccgg

SEQ ID NO: 27461 - DNA, 94 bp, Homo sapiens; identical to SEQ ID NO: 9588
  chr14:33404165-33404259
  hypo

SEQ ID NO: 27462 - DNA, 30 bp, Homo sapiens
  chr14:33462062-33462092
  hypo
aaaattatggtctctcggcagggtgtggtg

SEQ ID NO: 27463 - DNA, 30 bp, Homo sapiens; identical to SEQ ID NO: 9589
  chr14:34126415-34126445
  hypo

SEQ ID NO: 27464 - DNA, 38 bp, Homo sapiens
  chr14:34415280-34415318
  hypo
cctaaaaataacagtagaagccgggcgcggtggctcac

SEQ ID NO: 27465 - DNA, 31 bp, Homo sapiens
  chr14:34682592-34682623
  hypo
ttttgtggggagggggcgaatctgatgccat

SEQ ID NO: 27466 - DNA, 27 bp, Homo sapiens
  chr14:34918991-34919018
  hypo
agccaccacacccgacctaggcattgg

SEQ ID NO: 27467 - DNA, 11 bp, Homo sapiens
  chr14:34920905-34920916
  hypo
agaacgagact

SEQ ID NO: 27468 - DNA, 215 bp, Homo sapiens
  chr14:35023175-35023390
  hypo
aataacaataaagaagaattcgtccattcaacaaccgttcactgagcgcatagcctgtgcccagacactgttccaggcctctgggagcaaaaaggcctcggtgcccgtattctagttagacaacgagaagcgcggggaggtggggggcgggggtgggagagagaaaatctacaccgggctgcataggtaaattcgtaggttaggtgctaagtgct

SEQ ID NO: 27469 - DNA, 30 bp, Homo sapiens
  chr14:35070432-35070462
  hypo
tttttttttttttttttgagacggagtctc

SEQ ID NO: 27470 - DNA, 30 bp, Homo sapiens
  chr14:35070701-35070731
  hypo
tataggctgagccaccgtgcctggctccta

SEQ ID NO: 27471 - DNA, 37 bp, Homo sapiens
  chr14:35117758-35117795
  hypo
aatatcaagtgcctaaatggccgggcgcggtggctca

SEQ ID NO: 27472 - DNA, 98 bp, Homo sapiens
  chr14:35578167-35578265
  hypo
tttgcagagatgggcacgtgagccacagtgcctggccttgcattcttttttgtttgctttcgtctgtcttaaggctgaaagtgtcataaactatatta

SEQ ID NO: 27473 - DNA, 573 bp, Homo sapiens; identical to SEQ ID NO: 9595
  chr14:36003383-36003956
  hypo

SEQ ID NO: 27474 - DNA, 654 bp, Homo sapiens; identical to SEQ ID NO: 9596
  chr14:36004080-36004734
  hypo

SEQ ID NO: 27475 - DNA, 100 bp, Homo sapiens; identical to SEQ ID NO: 9597
  chr14:36004821-36004921
  hypo

SEQ ID NO: 27476 - DNA, 161 bp, Homo sapiens
  chr14:36288968-36289129
  hypo
gtgctgggttgccgccgccgctgcagccatcgtgccagcccctcgggtctccgcgaggccggctgacggtccagagtgggagacaagccaatttgggagcagataggatccagcttcattccacattactaccagttatttgataacgatagaccccaact

SEQ ID NO: 27477 - DNA, 203 bp, Homo sapiens; identical to SEQ ID NO: 9638
  chr14:37132602-37132805
  hypo

SEQ ID NO: 27478 - DNA, 30 bp, Homo sapiens
  chr14:37174262-37174292
  hypo
attttttttttgagacggatctcactctgt

SEQ ID NO: 27479 - DNA, 31 bp, Homo sapiens; identical to SEQ ID NO: 9658
  chr14:38678113-38678144
  hypo

SEQ ID NO: 27480 - DNA, 580 bp, Homo sapiens; identical to SEQ ID NO: 9659
  chr14:38678172-38678752
  hypo

SEQ ID NO: 27481 - DNA, 162 bp, Homo sapiens; identical to SEQ ID NO: 9663
  chr14:39735616-39735778
  hypo

SEQ ID NO: 27482 - DNA, 30 bp, Homo sapiens
  chr14:39856145-39856175
  hypo
cccagaaatgaagccgaagcattggcggat

SEQ ID NO: 27483 - DNA, 22 bp, Homo sapiens
  chr14:39889602-39889624
  hypo
gaagaaagcggctgggcgccgg

SEQ ID NO: 27484 - DNA, 199 bp, Homo sapiens
  chr14:39911464-39911663
  hypo
tctccgggcttttgggcgccaccttgttcccctcatcgagacactggtctttgcagcagaagctgcttgcagtacatctggtccagccagagcctcacatggagccagtgcctgtgctggtgcttggtgctgcccgctccgcagcagcagctggtatgcctggctgtgcgcagtggccggattccacactgacttgctc

SEQ ID NO: 27485 - DNA, 38 bp, Homo sapiens
  chr14:39914480-39914518
  hypo
cctgggcaacaaaagggaaaatccgtctctcaagaaaa

SEQ ID NO: 27486 - DNA, 38 bp, Homo sapiens
  chr14:40470105-40470143
  hypo
tggtttgaaaaggaaagtgtgcggccgggcgcggtggc

SEQ ID NO: 27487 - DNA, 30 bp, Homo sapiens; identical to SEQ ID NO: 9665
  chr14:42075745-42075775
  hypo

SEQ ID NO: 27488 - DNA, 264 bp, Homo sapiens; identical to SEQ ID NO: 9666
  chr14:42076129-42076393
  hypo

SEQ ID NO: 27489 - DNA, 105 bp, Homo sapiens
  chr14:43839405-43839510
  hypo
cacacaatggacacacatatacgcacacacgaatactgttcacctttaaagaagtacaacaccgatagaggagccaagatggccgaacaggaaaagctccggtct

SEQ ID NO: 27490 - DNA, 30 bp, Homo sapiens
  chr14:45365636-45365666
  hypo
ctcattagccctcacgtgttctgaacgtta

SEQ ID NO: 27491 - DNA, 216 bp, Homo sapiens; identical to SEQ ID NO: 9671
  chr14:45431366-45431582
  hypo

SEQ ID NO: 27492 - DNA, 30 bp, Homo sapiens
  chr14:45579832-45579862
  hypo
taagtttagaacgacggcatggaaatctgg

SEQ ID NO: 27493 - DNA, 30 bp, Homo sapiens
  chr14:45588021-45588051
  hypo
tgtaatagtggagtcacgttggcacataaa

SEQ ID NO: 27494 - DNA, 29 bp, Homo sapiens
  chr14:45588230-45588259
  hypo
tttttaaaatgttacggcactaagatctt

SEQ ID NO: 27495 - DNA, 31 bp, Homo sapiens
  chr14:48130915-48130946
  hypo
tgtcaactgcaaaaaacgaagtaatcagagt

SEQ ID NO: 27496 - DNA, 30 bp, Homo sapiens; identical to SEQ ID NO: 9677
  chr14:50022777-50022807
  hypo

SEQ ID NO: 27497 - DNA, 181 bp, Homo sapiens
  chr14:50233117-50233298
  hypo
gcactcaagcctgggggacaagagcgagacttctctcgaacaaacaaaaaacaaaaacgatgatagaagggtaatgtagctggaaggaggacacagccaggaattgaagctggaaaggcaagctgggtctggaccatgctgggtcttcttgcacagcactgtgatatgaattttttttttt

SEQ ID NO: 27498 - DNA, 151 bp, Homo sapiens
  chr14:50233597-50233748
  hypo
ccgagatattaattttggattctactaaggacgacgggagccagctcaaggtttttaagtgactcgatcagattcacgaggttggttcacaaggaacttcgataaccccaaagtctagtgagcataattcgactgggagaagacactgctg

SEQ ID NO: 27499 - DNA, 45 bp, Homo sapiens
  chr14:50327505-50327550
  hypo
acaagagatacaaaaattagccgggcatgctggtgtgtgcctgta

SEQ ID NO: 27500 - DNA, 121 bp, Homo sapiens
  chr14:50333978-50334099
  hypo
gcgcccggccagccgtttgcttttttaacagtgcaaaaaacaaggccgtgtctggctatatggggctttgcttgttcaaaatgtaacctctatacggccgcgcgcagtggctcacgcctgt

SEQ ID NO: 27501 - DNA, 26 bp, Homo sapiens
  chr14:50379101-50379127
  hypo
gatcattaaagacttacttttcggcc

SEQ ID NO: 27502 - DNA, 30 bp, Homo sapiens; identical to SEQ ID NO: 9683
  chr14:51027846-51027876
  hypo

SEQ ID NO: 27503 - DNA, 481 bp, Homo sapiens
  chr14:51171646-51172127
  hypo
tggtgcagcggacgtcgctgcagaactcgcactcgaaaggcttctcccccagtgcacgatcatgtgccttttcaagtctgagctgattttgaacttggcgctacagagccagcactggaaggagatatccccagtgtgggatcgcaggtggacggtgagctggctggagttgcggctgacataggggcagagctggcatttgtatggctgctcgtccgagtggatccgtaggtgcttcttgaggctcctgctgtccacggcagcatagtcacacaggtaacactcgtgcggcatcacatgtgcatggtcaggttgtccttccgctgaagcacttgtcacagaactcacacttgagcggttcgtcacccgttgtggattctgagatagcggtccaagtctttcatgccatggagagttttgaagtggcaacctgggtagcaacagtcgaatgtcctctctccaagggcggctgtttcttccc

SEQ ID NO: 27504 - DNA, 30 bp, Homo sapiens
  chr14:51172389-51172419
  hypo
gtgcccgcgtacaccgaaaacagtctctga

SEQ ID NO: 27505 - DNA, 30 bp, Homo sapiens
  chr14:51293778-51293808
  hypo
tcggagcctaataacgccaatgatcaaatt

SEQ ID NO: 27506 - DNA, 27 bp, Homo sapiens
  chr14:51358238-51358265
  hypo
gcgtgagccaccgcgcccagctgataa

SEQ ID NO: 27507 - DNA, 680 bp, Homo sapiens; identical to SEQ ID NO: 9684
  chr14:51410486-51411166
  hypo

SEQ ID NO: 27508 - DNA, 1890 bp, Homo sapiens; identical to SEQ ID NO: 9686
  chr14:51560770-51562660
  hypo

SEQ ID NO: 27509 - DNA, 30 bp, Homo sapiens
  chr14:51711222-51711252
  hypo
aaatataaagccctcgtggttgtgaggtca

SEQ ID NO: 27510 - DNA, 42 bp, Homo sapiens
  chr14:51836279-51836321
  hypo
tgagccaccgcccccggccccgaccatggttttgtaaagaga

SEQ ID NO: 27511 - DNA, 783 bp, Homo sapiens; identical to SEQ ID NO: 9687
  chr14:52117842-52118625
  hypo

SEQ ID NO: 27512 - DNA, 233 bp, Homo sapiens
  chr14:52210615-52210848
  hypo
ttggggggtgatattactccccgaatcgaaggggggcccgcccccatgcgatgtggatcttaatatccaggggggagaggcgggtgatattactccccgcatcgaggggggcttccgcgcccctgcgatatggatcgtaatatccagtgggggagaggggagtgatattactccccgatttttcctcggatcctttctatagtgcctccctcggttcacaccctgggacatta

SEQ ID NO: 27513 - DNA, 48 bp, Homo sapiens
  chr14:52373770-52373818
  hypo
ccgctggagaatcttttacagggactccgtgactttatcactaagcca

SEQ ID NO: 27514 - DNA, 20 bp, Homo sapiens
  chr14:53173039-53173059
  hypo
gcaggagcaagactccatct

SEQ ID NO: 27515 - DNA, 30 bp, Homo sapiens
  chr14:53194027-53194057
  hypo
tgagccaccgcacccggcctgtggatttta

SEQ ID NO: 27516 - DNA, 18 bp, Homo sapiens
  chr14:53251937-53251955
  hypo
gcccggctattatcaggt

SEQ ID NO: 27517 - DNA, 84 bp, Homo sapiens
  chr14:53259035-53259119
  hypo
agggcacaggtgagtagaggccgggaatactgcttcacgccttacagtgcgcaggacagcgccgcacaacaaagaattacctgg

SEQ ID NO: 27518 - DNA, 30 bp, Homo sapiens
  chr14:55439698-55439728
  hypo
catgagtagtgctctcgcagctgatttatt

SEQ ID NO: 27519 - DNA, 18 bp, Homo sapiens
  chr14:55517152-55517170
  hypo
tcttaaaaaatgtatatt

SEQ ID NO: 27520 - DNA, 83 bp, Homo sapiens
  chr14:55522690-55522773
  hypo
tttcatttaatatgttcggaccttaggtaattaaaaccacagataaggggggatcaccctaacatgaacgctgtttattctag

SEQ ID NO: 27521 - DNA, 31 bp, Homo sapiens
  chr14:55523173-55523204
  hypo
tgtgtgatgtgattgacgttaaaccttaaca

SEQ ID NO: 27522 - DNA, 30 bp, Homo sapiens
  chr14:55590025-55590055
  hypo
ctctctctggctcacgtctccaccagcaca

SEQ ID NO: 27523 - DNA, 43 bp, Homo sapiens
  chr14:55740425-55740468
  hypo
ttgaaggaggtccaaaatggacgcttgcatgtgtctttcccga

SEQ ID NO: 27524 - DNA, 27 bp, Homo sapiens
  chr14:55751787-55751814
  hypo
agcttctttcaagaattgttccggccg

SEQ ID NO: 27525 - DNA, 442 bp, Homo sapiens
  chr14:55765279-55765721
  hypo
gcaaatttggcagggtggaggcggaggagggcgggcgccggagcccagccggagcgggcgttgaaggctggcgcggcgagcgctgttcggggctggagggggtaaggccggcaagggcggcctgaccctccaggaggccatccagcggctgcgggacacggaggagatgttaagcaagaaacaggagttcctggagaagaaaatcgagcagaggcacggcaccaaaaacaagcccgcggccctccaggcactgaagcgtaagaagaggtatgagaagcagctggcgcagatcgacggtacattatcaaccatcgagttccagcagcaggccctggagaatgccaacaccaataccgaggtgctcaagaacatgggctctgcagccaaggccaagaaggcggcccacgacaacatggacatcgataaagttgatgagttaatg

SEQ ID NO: 27526 - DNA, 162 bp, Homo sapiens
  chr14:55765929-55766091
  hypo
aacctgccaagaagaggaagacgacgacatgaaggatttggagaactgggctgggtccagcgcgggcaggatggatgtggtgcaggcaggttccatcgctctcgactctcactccaaagcagtagggccgcattgctgctcgctctctgcatagcatggtct

SEQ ID NO: 27527 - DNA, 31 bp, Homo sapiens
  chr14:55772519-55772550
  hypo
tcccccacatttctcccggttactgcaagta

SEQ ID NO: 27528 - DNA, 222 bp, Homo sapiens
  chr14:55817969-55818191
  hypo
tctgagtgcctgaagcggcagggccagcgtgagcctgggagcctctcaaggaataacagcttccgtcgaaatgtgggcagagtattgcttgcaaatagcactcaggctgatgaaggcaaaacaaagaaaggcgtcttggaggcacctgacactcaggtgaatcctgtggggtctgtatctgtggattgtggcccttcaagagctgatcgttgttctcctaag

SEQ ID NO: 27529 - DNA, 165 bp, Homo sapiens
  chr14:55819828-55819993
  hypo
gggctatgaaagtgcacgttaaacctgagcgcctttacctttagatgagtgctttggcccctctgtgaatagcacgattaaaatccagttgtatataatggacagctaacggaacaatataatcaccacaatgcagctaggatagtgttgcggctataattttgt

SEQ ID NO: 27530 - DNA, 30 bp, Homo sapiens
  chr14:55822929-55822959
  hypo
tattttccatagctccgttccttcttcact

SEQ ID NO: 27531 - DNA, 15 bp, Homo sapiens
  chr14:55823188-55823203
  hypo
ggagtcttgctctgt

SEQ ID NO: 27532 - DNA, 3 bp, Homo sapiens
  chr14:55894690-55894693
  hypo
tca

SEQ ID NO: 27533 - DNA, 56 bp, Homo sapiens
  chr14:56088960-56089016
  hypo
ggatagcatgtatgaacggtttttgtgactgaagatcacaccgttcaaagaacctc

SEQ ID NO: 27534 - DNA, 19 bp, Homo sapiens
  chr14:57073330-57073349
  hypo
tgggtgtagtggttcacgc

SEQ ID NO: 27535 - DNA, 78 bp, Homo sapiens
  chr14:57073648-57073726
  hypo
gggaaacatagcagttgacaggaaagaacttttccttggcactgaattttgtgaagtcaatcacgtaagtccttatgt

SEQ ID NO: 27536 - DNA, 149 bp, Homo sapiens; identical to SEQ ID NO: 9719
  chr14:57265912-57266061
  hypo

SEQ ID NO: 27537 - DNA, 31 bp, Homo sapiens; identical to SEQ ID NO: 9735
  chr14:57734480-57734511
  hypo

SEQ ID NO: 27538 - DNA, 30 bp, Homo sapiens; identical to SEQ ID NO: 9737
  chr14:58546605-58546635
  hypo

SEQ ID NO: 27539 - DNA, 121 bp, Homo sapiens
  chr14:58599585-58599706
  hypo
agccactgcgcccggccaacccttgtccttttaaggctctgccacacctcttcaaacaggacagagctcacacccctttccaggtaaaggtgtgtgtgtgtgtgtacgtgcacgcacgcgc

SEQ ID NO: 27540 - DNA, 244 bp, Homo sapiens
  chr14:59112402-59112646
  hypo
gaccaacaaaccaagaaccagcgtgaacgctgaccccacgaaagggcttctgaggaacgggagcgtttgtgtcagagccccgggcggtgtctcacagggcaacagtgtgaaccttaagaattcgaaacaggcgtgtctgccctctggcgggataccttctctgaacaatgggacattctccccaccgaagcagtggtcgaaagaatcaaaggccgaacaagccgaaagcaagagggtgcccctg

SEQ ID NO: 27541 - DNA, 31 bp, Homo sapiens
  chr14:59706174-59706205
  hypo
tcagttttattcaccacgctcttacctagtc

SEQ ID NO: 27542 - DNA, 31 bp, Homo sapiens
  chr14:59789611-59789642
  hypo
ttgtaaccagattcatcgacttggatggcct

SEQ ID NO: 27543 - DNA, 30 bp, Homo sapiens
  chr14:59810622-59810652
  hypo
gagtagaatgggcacgtcttagagacgttc

SEQ ID NO: 27544 - DNA, 165 bp, Homo sapiens
  chr14:59821077-59821242
  hypo
tggtgattttttattttattttttggctcaaggtctttcttttaaaattctgaggggtgattacttaaggtcagtgcttgatgcactgccctagtctcggagctcacagcacgcctcctgggctcctctacagggttgggcttttgactacgagggtgttggtga

SEQ ID NO: 27545 - DNA, 15 bp, Homo sapiens
  chr14:59932273-59932288
  hypo
ggccagataaagtgc

SEQ ID NO: 27546 - DNA, 170 bp, Homo sapiens
  chr14:59935187-59935357
  hypo
tagcatccccatcttcgcgttaaggttagtccatgggggaagcctcccttgactgataccgtcctttccccacgtattgggccatgttcccctgttagtttcacagcactctgtattttccattgtagcacataaccatggtctataattttttgcgtgattatctaagc

SEQ ID NO: 27547 - DNA, 78 bp, Homo sapiens
  chr14:59961996-59962074
  hypo
attatagattttatggcgtttggagacaaaaacaggtgtgggtttgagttctgggtctgccagcggctttattacctt

SEQ ID NO: 27548 - DNA, 59 bp, Homo sapiens; identical to SEQ ID NO: 9744
  chr14:60097187-60097246
  hypo

SEQ ID NO: 27549 - DNA, 167 bp, Homo sapiens; identical to SEQ ID NO: 9745
  chr14:60097406-60097573
  hypo

SEQ ID NO: 27550 - DNA, 720 bp, Homo sapiens
  chr14:60193646-60194366
  hypo
attgagaaacagcagtgggggcggggcgccaggacctagaggcccagggccctttgtggccgcaggactttggttggaactcgagtcttcttcaggcttccgtggcaacatgggcgtctcaggctccagggctccgtctccagggggcagctcggggccaggctggggctcagttgaggggtagtcgaggaaggaacccggctcggccaggccccgccggcttggcgcacgctcctcggcccggacgccagtctcctcccggatggcatccagggcgctgggcttcatcgggggtgagtcctgctcccgcttggggctctcctccgaggccgaggaggcgtcgcacgactcgatgatgagctcgctgtccagctcggcctcgcgctcctccctcaggatgctgtactggatggatggcgaggcgggcgagggcggcgggccgcccacgtggccaaagctcacatagcctgagggcagcgcgtcctccgcggccatggggtcctcggacaccagctcgatctctgagtcccccgactccgcgctgctggcctcgtggtccagggggctggggatggttggcggtccggacctggccttgacctcgggcctgtcggccagctggcccaccggccgtgggttctcggcggtttcatacgataatccctttgcttctttgatggcggtgatcagctcatcctcggagatgctgcctttcccctg

SEQ ID NO: 27551 - DNA, 741 bp, Homo sapiens; identical to SEQ ID NO: 9746
  chr14:60385979-60386720
  hypo

SEQ ID NO: 27552 - DNA, 216 bp, Homo sapiens; identical to SEQ ID NO: 9753
  chr14:60973791-60974007
  hypo

SEQ ID NO: 27553 - DNA, 335 bp, Homo sapiens; identical to SEQ ID NO: 9761
  chr14:60981477-60981812
  hypo

SEQ ID NO: 27554 - DNA, 497 bp, Homo sapiens; identical to SEQ ID NO: 9775
  chr14:61123391-61123888
  hypo

SEQ ID NO: 27555 - DNA, 30 bp, Homo sapiens; identical to SEQ ID NO: 9776
  chr14:61124115-61124145
  hypo

SEQ ID NO: 27556 - DNA, 31 bp, Homo sapiens; identical to SEQ ID NO: 9778
  chr14:61736456-61736487
  hypo

SEQ ID NO: 27557 - DNA, 139 bp, Homo sapiens; identical to SEQ ID NO: 9779
  chr14:61747388-61747527
  hypo

SEQ ID NO: 27558 - DNA, 579 bp, Homo sapiens; identical to SEQ ID NO: 9780
  chr14:61747582-61748161
  hypo

SEQ ID NO: 27559 - DNA, 149 bp, Homo sapiens
  chr14:62015168-62015317
  hypo
tggtggccttcctgagcgtggtcccgcttgtggtctgagagctgagctcgtgctcatctgtgggtcaagagctccacaggaggaaggcagagaagcaaggctagcgatagatcaagagtgatggggagacctggcgtggtggctcatgc

SEQ ID NO: 27560 - DNA, 214 bp, Homo sapiens; identical to SEQ ID NO: 9783
  chr14:62162346-62162560
  hypo

SEQ ID NO: 27561 - DNA, 23 bp, Homo sapiens
  chr14:62207098-62207121
  hypo
gataaacacgatggacttggttg

SEQ ID NO: 27562 - DNA, 30 bp, Homo sapiens
  chr14:62273614-62273644
  hypo
ttcttgtttatagccggagtgttgatatag

SEQ ID NO: 27563 - DNA, 234 bp, Homo sapiens
  chr14:62523572-62523806
  hypo
tgacggcgtcggaggacaacacgctctggacgagcgcggcgcccaagggtcagcggcagcagcgagcagggggcacgggatgcagggaggctcttcgggaggcatgaaagtcagacgtgttccgaaacgtgagccgcgctggggggcacggcgcacgaccggggacaggaggaggacactgcggtcgcaaagcccaggccgtgcaaaggccccgtggtcagccaggagcccagt

SEQ ID NO: 27564 - DNA, 645 bp, Homo sapiens; identical to SEQ ID NO: 9788
  chr14:63512063-63512708
  hypo

SEQ ID NO: 27565 - DNA, 394 bp, Homo sapiens; identical to SEQ ID NO: 9789
  chr14:63512740-63513134
  hypo

SEQ ID NO: 27566 - DNA, 43 bp, Homo sapiens
  chr14:64190116-64190159
  hypo
aatctctcctttgtcttataacgtaccttaaaaaaattcaggc

SEQ ID NO: 27567 - DNA, 45 bp, Homo sapiens
  chr14:64191360-64191405
  hypo
gaaaaggaaaaggaggccaggcgcggtggctcacgcctgtaatgc

SEQ ID NO: 27568 - DNA, 37 bp, Homo sapiens
  chr14:64222413-64222450
  hypo
cctatggactaggcacggtgactcacgcctgtaatcc

SEQ ID NO: 27569 - DNA, 155 bp, Homo sapiens
  chr14:64884525-64884680
  hypo
tattctaatttctccacgtggcatgcgaaggagggcagcttctatcctccaactctgatgcaggctggcttttctttcaggggtgccgattgccggaaggcatgctgtggtggttgggcgcagtaaaatagttggggccccgatgcatgacttgc

SEQ ID NO: 27570 - DNA, 81 bp, Homo sapiens
  chr14:64888235-64888316
  hypo
gtaattatctaacaggcgataaagaaattgctctcctacaactcctcactttgaatacttgcgatatgacattcaagctca

SEQ ID NO: 27571 - DNA, 31 bp, Homo sapiens
  chr14:64892253-64892284
  hypo
gctgacaggggccaggcgagcagccccaaag

SEQ ID NO: 27572 - DNA, 27 bp, Homo sapiens
  chr14:64955675-64955702
  hypo
tgaaatcagcagggtgcggtggctcac

SEQ ID NO: 27573 - DNA, 44 bp, Homo sapiens; identical to SEQ ID NO: 9796
  chr14:65005556-65005600
  hypo

SEQ ID NO: 27574 - DNA, 17 bp, Homo sapiens
  chr14:65005779-65005796
  hypo
tttcaaagtgctgaaac

SEQ ID NO: 27575 - DNA, 21 bp, Homo sapiens
  chr14:65136323-65136344
  hypo
actagcatcagcagtattaat

SEQ ID NO: 27576 - DNA, 20 bp, Homo sapiens
  chr14:65136643-65136663
  hypo
tctcaaaaaaaaaaaaaaaa

SEQ ID NO: 27577 - DNA, 30 bp, Homo sapiens
  chr14:65150059-65150089
  hypo
tatgacgtactggtcggcagccccaggccg

SEQ ID NO: 27578 - DNA, 69 bp, Homo sapiens
  chr14:65194542-65194611
  hypo
ccagcagctggttgaacgtgaaggggcccctctccccgttcaacagccgggcagcggcagggcctgcac

SEQ ID NO: 27579 - DNA, 31 bp, Homo sapiens
  chr14:65195784-65195815
  hypo
catagaaaatatctacgcgctgaacaggtgt

SEQ ID NO: 27580 - DNA, 142 bp, Homo sapiens
  chr14:65208027-65208169
  hypo
tgctggaccaggccagcgtcattgcggagcgatttgtcagcagcttctctcggcggagcagcgtggcacaggaggacagcaagtccagtggctttgggagcccgcggctggtcagccggagcagcagcgtgctcagcctgga

SEQ ID NO: 27581 - DNA, 140 bp, Homo sapiens
  chr14:65209827-65209967
  hypo
agccagaggaccacctcgcctgggggccggccctccgcccggagccccctcagccccacagagaccttcagctggcccgacgtccgtgagctctgctccaagtatgcctcccgcgatgaggcacgccgagcagggggcgg

SEQ ID NO: 27582 - DNA, 143 bp, Homo sapiens
  chr14:65220229-65220372
  hypo
agccagcagcctctcccgcactcacctgttggaagccttcttgttgggcccctccaggtcatgcttgcggcccaggtagccttccatctgcacactctgcccatggtcccgcggggccggcagcgttgcgggctcatcaccct

SEQ ID NO: 27583 - DNA, 202 bp, Homo sapiens
  chr14:65233319-65233521
  hypo
gggaggatggagggcggggctgcgccagctcatctcgcctccacctgggctgagcctagtaggggtgagagggctctggctgcagtgactcccaggaactagacaaacgagaccagagactgaccggggacgttctctcggtggccgcatggtgggaaactggagcctcccctgctgtctcgccttcctcctcttgaggcct

SEQ ID NO: 27584 - DNA, 85 bp, Homo sapiens
  chr14:65237646-65237731
  hypo
ccaggagaggaggtcacgggccatgctgaagaagcggaatttatccgccgtgtccactagctgggtccggcgcccggcacaggca

SEQ ID NO: 27585 - DNA, 557 bp, Homo sapiens
  chr14:65239301-65239858
  hypo
acacccagcaggtggagctcccgctcgaaggctgtgtgcacccggtggaaggactcggccgtgctggcgtccagccccacgtcctcgggcagctcgcggtgcttctcgtcgatgaggcccaggatctcggcacccgtgtagaagtagcggtgcaggtcataggaggcggccagcagctgcatgcgcgtgtcaatgagctccaggaggtctgcccacatctcgttcagcccgtccttccactcggcgatggtggccgcctcgctgtggcccgcgtcgatgagtcgctcgatgaaggcattcacattgtccacccgctcctgcccaatcgccccggtctcccgggcaaagtcccggaacttgtcccgcagaagctaggcatggggcagacagaaatgtggttatggggggcacaggggttacaggtgtcaccagcttagccaaagactttcccaggcagcaactgcagctccgggagctgcgctgtcacaccttccccagggcaggcctgcatcggctggtcccgcctcacactggggaggttacgtcctatgcagcac

SEQ ID NO: 27586 - DNA, 31 bp, Homo sapiens
  chr14:65249010-65249041
  hypo
cagcttagccaacatccgattgacactggtc

SEQ ID NO: 27587 - DNA, 222 bp, Homo sapiens
  chr14:65271601-65271823
  hypo
tttgctgaagaggggccgatggcagcagccccggggcccacagaagggactttaccagcatctctccagagagcacctccagcagcttgatgagcatgcgcccatcccgcaggtccttgtagagatcggtgatgcggcaggacactcgagccaggtgcgagttcacccatttcgtgaaggtctttttctgaacaacttcccgctcatctaggtggagagaag

SEQ ID NO: 27588 - DNA, 91 bp, Homo sapiens
  chr14:65273126-65273217
  hypo
ctggagtggcctagccaggagcggggtctgcccggtcggagcaggctgtgtgctcgactgagcctcaaccgtgaaagggctggctttttaa

SEQ ID NO: 27589 - DNA, 65 bp, Homo sapiens
  chr14:65406322-65406387
  hypo
ccaggccacatctgagcggcgcacagggctccaaatgatgagcttgggatcggtcatgagggaaa

SEQ ID NO: 27590 - DNA, 35 bp, Homo sapiens
  chr14:65492491-65492526
  hypo
ccgctgtcctgcagcctggccgacagagtaagacc

SEQ ID NO: 27591 - DNA, 30 bp, Homo sapiens
  chr14:65747465-65747495
  hypo
tggcacaagctgcacgggaagcccatccgc

SEQ ID NO: 27592 - DNA, 31 bp, Homo sapiens
  chr14:66169220-66169251
  hypo
ggaggtataaatgcagcggctatgttagaag

SEQ ID NO: 27593 - DNA, 30 bp, Homo sapiens
  chr14:66308224-66308254
  hypo
ccacggggccgatggcggagggtcccgctc

SEQ ID NO: 27594 - DNA, 43 bp, Homo sapiens
  chr14:66814103-66814146
  hypo
taaaaaaaaaaaaaagccaggcgtagtggttcacgcttgtaat

SEQ ID NO: 27595 - DNA, 23 bp, Homo sapiens
  chr14:67585481-67585504
  hypo
gcggggggagttacctttcttaa

SEQ ID NO: 27596 - DNA, 31 bp, Homo sapiens
  chr14:67864473-67864504
  hypo
gcttgtagtacaccagcgtgttctgccgaag

SEQ ID NO: 27597 - DNA, 39 bp, Homo sapiens
  chr14:67876418-67876457
  hypo
gcctgtctctggcttcgctttcaccggtgatgactgctc

SEQ ID NO: 27598 - DNA, 215 bp, Homo sapiens
  chr14:68067573-68067788
  hypo
gcgtgagccaccgcacccagcccaaacccacagttttaatcatgcttttgcttggcaagccgatttctctaagccagagtgagccgcaaggagagcccacgggtattcatttcacttactcttttcctgtgccgggtagtttgaggtgcttgaggatgcagcagtgaacgatgttgatgacagtctctgccctcgggcagcttcctttctagtag

SEQ ID NO: 27599 - DNA, 23 bp, Homo sapiens
  chr14:68166833-68166856
  hypo
agacagagcgagaaaaaaaaaaa

SEQ ID NO: 27600 - DNA, 30 bp, Homo sapiens
  chr14:68214727-68214757
  hypo
caaacaggacaacccgggtcaagaaccaaa

SEQ ID NO: 27601 - DNA, 30 bp, Homo sapiens
  chr14:68829266-68829296
  hypo
tgaaagaaacataacagaggccgggcgcag

SEQ ID NO: 27602 - DNA, 71 bp, Homo sapiens
  chr14:69245928-69245999
  hypo
ctgctgagtgccaggcatcagcgttgacatgaaatagaacggtgaacaggaggctgggcgcggtggctcat

SEQ ID NO: 27603 - DNA, 31 bp, Homo sapiens; identical to SEQ ID NO: 9812
  chr14:69258877-69258908
  hypo

SEQ ID NO: 27604 - DNA, 228 bp, Homo sapiens; identical to SEQ ID NO: 9813
  chr14:69259277-69259505
  hypo

SEQ ID NO: 27605 - DNA, 196 bp, Homo sapiens
  chr14:69278084-69278280
  hypo
cactcgcagccagggcggctgtgtgggtgggaggacgcagggggctgcgctccagtctcccctaattagctcaacctggctacatccttaccattgcatgtgttcatccttatgtgaaacggagcccatattgacctagcacccagtatgtgcaaggcgctggctgaatagggagctgcagcgggagatttcagcg

SEQ ID NO: 27606 - DNA, 161 bp, Homo sapiens
  chr14:69345630-69345791
  hypo
agagaaaaaggaaaaacgcattatttcttgccccagacgccacccctgagcgtgctccatgcaggaggcgagtacctgggggtcgttgccaatatcataacccaagctgatgaggcaggctttgaactcctcgggacccagtgtgccggagtgatcctggg

SEQ ID NO: 27607 - DNA, 134 bp, Homo sapiens
  chr14:69352453-69352587
  hypo
tagaacatccaccaaccggcgcaacggggaaaagcactctcctcagagcacttccaaggccatgaaagtgtctacgcaggaaggctatgcaggagtctgtgggaatgcatagggcatgacgctatacacacagc

SEQ ID NO: 27608 - DNA, 121 bp, Homo sapiens
  chr14:69354665-69354786
  hypo
aagatttatccttcactgctgcgtttttcggcttcgcttccacttttgcaggaggtttaactgacaaccgcgccgatctcctcttgggcttttccttggcggctccttcagcagagctgac

SEQ ID NO: 27609 - DNA, 218 bp, Homo sapiens; identical to SEQ ID NO: 9816
  chr14:69444774-69444992
  hypo

SEQ ID NO: 27610 - DNA, 37 bp, Homo sapiens
  chr14:69445327-69445364
  hypo
ccagcctgaagaccaccgcccccgagcacagcccacg

SEQ ID NO: 27611 - DNA, 235 bp, Homo sapiens; identical to SEQ ID NO: 9817
  chr14:69445728-69445963
  hypo

SEQ ID NO: 27612 - DNA, 164 bp, Homo sapiens
  chr14:69550072-69550236
  hypo
ctgtactgtctggccccgtggtctagacactgcttggacaggatgtctcacctgctgatgaaactcctacgcaagaagatcaagaagtggaacctcaaactgcggcagtggaacctaaagttgcagggggcctcaaatctgaccctgtccgaaactcaaaatac

SEQ ID NO: 27613 - DNA, 31 bp, Homo sapiens; identical to SEQ ID NO: 9819
  chr14:69618276-69618307
  hypo

SEQ ID NO: 27614 - DNA, 96 bp, Homo sapiens; identical to SEQ ID NO: 9820
  chr14:69658737-69658833
  hypo

SEQ ID NO: 27615 - DNA, 140 bp, Homo sapiens
  chr14:69666739-69666879
  hypo
acgcattgtgcagcaacgttaggacggttaggatggctatgatgtcactaggcaataggaatttttctgcaccattgtaatcttataattttgtagaactattgtatgtgtcatctgttgttgaccgaaacattgttata

SEQ ID NO: 27616 - DNA, 31 bp, Homo sapiens
  chr14:70078067-70078098
  hypo
gccccatccactccagcgcagagggactgtc

SEQ ID NO: 27617 - DNA, 386 bp, Homo sapiens
  chr14:70236348-70236734
  hypo
cacctctagatctgtgtttgccggtctagacgttatcggtgcacttccttgaagtgccaggttgcagcgatcccagagcgttgataacgtgatctgatccctaagttgagacctgtcttcctgtaacgcttccgaataagaggtccggtcgaaaagagttgaaagatacgaaattaggtggtcgttggaatcctgatcgcagtaaagtggtccttggtaactgctcgagtagaacatgtctgcatccgccaatagtccgctaatagggagggctgtgcgattaaaggcttccatcgattgggtagtgtccttcaagtgggtggcgaagagccagtcgggcatatgtcatgaaggtttctccgaccgattaatggtttgctgcttga

SEQ ID NO: 27618 - DNA, 401 bp, Homo sapiens; identical to SEQ ID NO: 9825
  chr14:70346146-70346547
  hypo

SEQ ID NO: 27619 - DNA, 1534 bp, Homo sapiens; identical to SEQ ID NO: 9826
  chr14:70654355-70655889
  hypo

SEQ ID NO: 27620 - DNA, 218 bp, Homo sapiens; identical to SEQ ID NO: 9827
  chr14:70655919-70656137
  hypo

SEQ ID NO: 27621 - DNA, 17 bp, Homo sapiens
  chr14:71398551-71398568
  hypo
gatctagggccaggcac

SEQ ID NO: 27622 - DNA, 37 bp, Homo sapiens
  chr14:72939847-72939884
  hypo
accttttaaaaattattcattcggccgggcatggcgg

SEQ ID NO: 27623 - DNA, 36 bp, Homo sapiens
  chr14:72940123-72940159
  hypo
cctcggcaacagagcgagactccatctctggggaaa

SEQ ID NO: 27624 - DNA, 30 bp, Homo sapiens
  chr14:73180229-73180259
  hypo
tttcactgccatcctcgctgcagcctcttc

SEQ ID NO: 27625 - DNA, 30 bp, Homo sapiens
  chr14:73302674-73302704
  hypo
tcaagatacacccgccggagaccacattcc

SEQ ID NO: 27626 - DNA, 49 bp, Homo sapiens
  chr14:73390959-73391008
  hypo
ctacctttataatcgcgggtgcttaaccaatgggcgctgtgcaccaagt

SEQ ID NO: 27627 - DNA, 123 bp, Homo sapiens
  chr14:73392218-73392341
  hypo
ggttaagagctgaaatgccttcgcacggcgtgcaatgggtgaaccccaccgcctgctttctaacgggtccaagccgcgggcaggggcctgtgttacggagccgcatgacacaccaggcctact

SEQ ID NO: 27628 - DNA, 72 bp, Homo sapiens; identical to SEQ ID NO: 9832
  chr14:73393456-73393528
  hypo

SEQ ID NO: 27629 - DNA, 52 bp, Homo sapiens
  chr14:73428621-73428673
  hypo
aaggtttggctaccgcgggaacaccccagctctccgtcggagcacgtctgtc

SEQ ID NO: 27630 - DNA, 194 bp, Homo sapiens
  chr14:73459853-73460047
  hypo
cagggctttgaagatgactcccgggtgccggggagaacgggtggtgttattctctagtagctgctccaaagcacgccgaagcccagaaaagtccgtgggagggttgtaagtcctcgttcccttgtagtgaatggaactaaaggcttcagggaaacggcccagcttccggaaccggtcctggatgagcttctctg

SEQ ID NO: 27631 - DNA, 31 bp, Homo sapiens; identical to SEQ ID NO: 9833
  chr14:73485669-73485700
  hypo

SEQ ID NO: 27632 - DNA, 30 bp, Homo sapiens
  chr14:73570122-73570152
  hypo
agagagatcgtgaccgggatagagaaagga

SEQ ID NO: 27633 - DNA, 16 bp, Homo sapiens
  chr14:73602380-73602396
  hypo
ggggtggatttttaaa

SEQ ID NO: 27634 - DNA, 36 bp, Homo sapiens
  chr14:73855376-73855412
  hypo
ataaaaccttgaggctgagtgcggtagctcacgcct

SEQ ID NO: 27635 - DNA, 25 bp, Homo sapiens
  chr14:74110603-74110628
  hypo
gtttgtttgtttgttttgagacgga

SEQ ID NO: 27636 - DNA, 35 bp, Homo sapiens; identical to SEQ ID NO: 9834
  chr14:74111544-74111579
  hypo

SEQ ID NO: 27637 - DNA, 94 bp, Homo sapiens
  chr14:74113148-74113242
  hypo
tttaaacatagaaaagcggccagggtgtggtggctcacacctgtaatcccagaggcctgtaatcccagcactttgtgaggccgaggcgggcaga

SEQ ID NO: 27638 - DNA, 30 bp, Homo sapiens
  chr14:74184828-74184858
  hypo
gctttggacaagaacgctagcccctccccc

SEQ ID NO: 27639 - DNA, 267 bp, Homo sapiens
  chr14:74185259-74185526
  hypo
ggtggagtccctcccgaggggaccgggactctcccggtccaggaaagcacgaggacagcttccgacagaccaaatgcaaagagagctggatcctggagcccttaacgctgctcccagggccttcataaataaaagagccgtttatgtcattgtctcatttgtttcgcagggaaaagtccctgcaatcctctcctcactccctcttgagatgccagggtgtctgcgggcgctggcggcggtgcgggaagggccgaggcccaggactgg

SEQ ID NO: 27640 - DNA, 30 bp, Homo sapiens
  chr14:74185725-74185755
  hypo
gggttgctcagaaccggcctagcccacccg

SEQ ID NO: 27641 - DNA, 30 bp, Homo sapiens
  chr14:74185978-74186008
  hypo
cccagcggggacagcgctgcccaccttacc

SEQ ID NO: 27642 - DNA, 40 bp, Homo sapiens
  chr14:74244736-74244776
  hypo
gaagaacctgacagaacgcaccttataaaccatgataggg

SEQ ID NO: 27643 - DNA, 136 bp, Homo sapiens; identical to SEQ ID NO: 9841
  chr14:74253328-74253464
  hypo

SEQ ID NO: 27644 - DNA, 22 bp, Homo sapiens
  chr14:74311711-74311733
  hypo
tttaattcggttgattgtcttc

SEQ ID NO: 27645 - DNA, 30 bp, Homo sapiens
  chr14:74367436-74367466
  hypo
agcttgtccaacatacggcctgtgggcacg

SEQ ID NO: 27646 - DNA, 30 bp, Homo sapiens
  chr14:74367983-74368013
  hypo
catacggcagccgggcgcagtggttcacac

SEQ ID NO: 27647 - DNA, 36 bp, Homo sapiens
  chr14:74369045-74369081
  hypo
gattacaggcgtgagccactgcgcctggccctgata

SEQ ID NO: 27648 - DNA, 30 bp, Homo sapiens
  chr14:74418774-74418804
  hypo
ctgccaagatggaccgctcactgtctgtat

SEQ ID NO: 27649 - DNA, 23 bp, Homo sapiens
  chr14:74601753-74601776
  hypo
gggatttgttgttgttgttgtcg

SEQ ID NO: 27650 - DNA, 89 bp, Homo sapiens
  chr14:74626547-74626636
  hypo
tacaggtgtgaatcaccgtgccctgcctacagctgtctttatgaagtgctatgacaaacctaccatacagcaagcgttctcaactttgg

SEQ ID NO: 27651 - DNA, 162 bp, Homo sapiens
  chr14:74628385-74628547
  hypo
cacgggaacactctgccggtgcattgccggagcagcccacctgatggcagtgaagaatctttgggggagggagccccaccactgaactgtaaggactgccattgccaaggtgaacatagctgagaccctgcacgccaacctgcttgtcgctgcacagaagag

SEQ ID NO: 27652 - DNA, 15 bp, Homo sapiens
  chr14:74647250-74647265
  hypo
gcgcccagcctaggg

SEQ ID NO: 27653 - DNA, 473 bp, Homo sapiens; identical to SEQ ID NO: 9844
  chr14:74707071-74707544
  hypo

SEQ ID NO: 27654 - DNA, 175 bp, Homo sapiens; identical to SEQ ID NO: 9845
  chr14:74707572-74707747
  hypo

SEQ ID NO: 27655 - DNA, 737 bp, Homo sapiens; identical to SEQ ID NO: 9846
  chr14:74707791-74708528
  hypo

SEQ ID NO: 27656 - DNA, 30 bp, Homo sapiens
  chr14:74728371-74728401
  hypo
catgtggtgatgtacgctgcgtgccatgag

SEQ ID NO: 27657 - DNA, 30 bp, Homo sapiens
  chr14:74771139-74771169
  hypo
tgaatcaccgtgcccggcctacagctgtct

SEQ ID NO: 27658 - DNA, 95 bp, Homo sapiens
  chr14:74957658-74957753
  hypo
ctcacaaagacccacggtttcctaccacttactgggtgtgagatcttgggcaagttactctatgtgcttcgctttcctcatctgtaagacagctt

SEQ ID NO: 27659 - DNA, 27 bp, Homo sapiens
  chr14:75358763-75358790
  hypo
tcttaagcctaagtcaaccctcgatga

SEQ ID NO: 27660 - DNA, 30 bp, Homo sapiens
  chr14:75388090-75388120
  hypo
ccaccagatagtcacgttttgtcatgtcag

SEQ ID NO: 27661 - DNA, 30 bp, Homo sapiens
  chr14:75423074-75423104
  hypo
ggaactgtacgctgcgcgggggtctgtgtg

SEQ ID NO: 27662 - DNA, 31 bp, Homo sapiens
  chr14:75636943-75636974
  hypo
agtggaactaagtgaacggacaccatgaaaa

SEQ ID NO: 27663 - DNA, 31 bp, Homo sapiens
  chr14:75725465-75725496
  hypo
aattatggccaactgacggtggagggagtgg

SEQ ID NO: 27664 - DNA, 93 bp, Homo sapiens; identical to SEQ ID NO: 9853
  chr14:75743667-75743760
  hypo

SEQ ID NO: 27665 - DNA, 69 bp, Homo sapiens; identical to SEQ ID NO: 9854
  chr14:75743993-75744062
  hypo

SEQ ID NO: 27666 - DNA, 30 bp, Homo sapiens
  chr14:75747317-75747347
  hypo
ctgcagccaaatgccgcaaccggaggaggg

SEQ ID NO: 27667 - DNA, 113 bp, Homo sapiens
  chr14:75749397-75749510
  hypo
ttgatattccgttatcggcattagaatcttcctgctcgttatcgtatccagcaggctgaactgcctcttgatacttggttaaaaaaaattttcaggccgggcgcggtggccca

SEQ ID NO: 27668 - DNA, 71 bp, Homo sapiens
  chr14:75760257-75760328
  hypo
aaacaaagcaaaatcagtatccgcaacaaccttgcaggcacggaggccctcagaagggacaggagaggccg

SEQ ID NO: 27669 - DNA, 30 bp, Homo sapiens
  chr14:76013171-76013201
  hypo
cctcccagcagtgccgcagcgtttcgaggg

SEQ ID NO: 27670 - DNA, 94 bp, Homo sapiens
  chr14:76128608-76128702
  hypo
gatggcatcttgtcagcgtgcttgtcatagagtctaaataaatgttggcaggggttttttgttgtttttttttttttgagacggagttcactct

SEQ ID NO: 27671 - DNA, 104 bp, Homo sapiens
  chr14:76446071-76446175
  hypo
ctccacccgctctcccgtgacacgcagacacaaagggcgccagcctcctctacgcatccacagccaaaacccgctctccccgtgcccaccggcctggagggcgc

SEQ ID NO: 27672 - DNA, 15 bp, Homo sapiens
  chr14:76446538-76446553
  hypo
ttacagttactgata

SEQ ID NO: 27673 - DNA, 144 bp, Homo sapiens
  chr14:76446927-76447071
  hypo
tttggcatagtattccgactcggtgttttcctgggtgcagccttcctccctctccccatgcatctcctccagcagctcccgggtgctgttgtaaagggccaggacctgataggggacgtgggtcatcaccgttggctcaggggg

SEQ ID NO: 27674 - DNA, 143 bp, Homo sapiens
  chr14:76447284-76447427
  hypo
agagaccccagcagacgtgcagaaggagggaggaaaaccaggcggcctccccagatcccaaagactgaggcttggcaagaaggtgcatgaactcactgcactgcgagagcttcaggacttccaggaagcgctggcaaccctga

SEQ ID NO: 27675 - DNA, 762 bp, Homo sapiens; identical to SEQ ID NO: 9856
  chr14:76604775-76605537
  hypo

SEQ ID NO: 27676 - DNA, 31 bp, Homo sapiens
  chr14:76998234-76998265
  hypo
cgcccagcagcaggcccgggcctgccccctt

SEQ ID NO: 27677 - DNA, 351 bp, Homo sapiens; identical to SEQ ID NO: 9861
  chr14:77493408-77493759
  hypo

SEQ ID NO: 27678 - DNA, 31 bp, Homo sapiens
  chr14:77575062-77575093
  hypo
tttaccattctttgtacgtcattagctgaca

SEQ ID NO: 27679 - DNA, 694 bp, Homo sapiens; identical to SEQ ID NO: 9864
  chr14:77591173-77591867
  hypo

SEQ ID NO: 27680 - DNA, 30 bp, Homo sapiens; identical to SEQ ID NO: 9870
  chr14:77737480-77737510
  hypo

SEQ ID NO: 27681 - DNA, 31 bp, Homo sapiens
  chr14:77935682-77935713
  hypo
gctgctaacttggggccggggcccctccctt

SEQ ID NO: 27682 - DNA, 31 bp, Homo sapiens
  chr14:77949054-77949085
  hypo
ctgcattccaaagagacgagggatgatgggg

SEQ ID NO: 27683 - DNA, 145 bp, Homo sapiens
  chr14:78189474-78189619
  hypo
ccactgcgcccggccaccatgattggtacacatcttaaataacacctacctcttatcaggagctgccctggaaagattccggtcatgctgtctctcttttcgcctgtcatgccggatttcatccctctcacgtgcctccccatcc

SEQ ID NO: 27684 - DNA, 31 bp, Homo sapiens
  chr14:78291539-78291570
  hypo
tgagtctttgatttttcgatctgtatctcta

SEQ ID NO: 27685 - DNA, 96 bp, Homo sapiens
  chr14:78335481-78335577
  hypo
cagggagctttggttggatggcgtattggttttctcgggctagccgcaaacctctggcttaaacaacaaatgtattgtctcacagttctggaggcc

SEQ ID NO: 27686 - DNA, 35 bp, Homo sapiens
  chr14:78335636-78335671
  hypo
ctgttctaggcctcggccctagcttctggggggtt

SEQ ID NO: 27687 - DNA, 30 bp, Homo sapiens
  chr14:78388713-78388743
  hypo
agctggagggctggcgtggtagcgggcata

SEQ ID NO: 27688 - DNA, 20 bp, Homo sapiens
  chr14:79525884-79525904
  hypo
ccaccgcgcctggcctcagg

SEQ ID NO: 27689 - DNA, 208 bp, Homo sapiens
  chr14:81231424-81231632
  hypo
gtaagtgattgcttctcggccttctggctaagatcgagtgtggagatagagtaaacgacacagacaggcaggctcctactctcatagagtcaacaaacatttgcatgaaatgtcattacttttgtcccattcatctggtttgggcatatttatttgaacactaattatggtacccaatgaagtagcgctttctcgcagtttcatgttt

SEQ ID NO: 27690 - DNA, 31 bp, Homo sapiens; identical to SEQ ID NO: 9876
  chr14:81685635-81685666
  hypo

SEQ ID NO: 27691 - DNA, 31 bp, Homo sapiens
  chr14:88131325-88131356
  hypo
ttgtcatggcaaatgacgtggcaactactct

SEQ ID NO: 27692 - DNA, 33 bp, Homo sapiens
  chr14:88457547-88457580
  hypo
tttgtttgtttgtgttttgaacggagtctcact

SEQ ID NO: 27693 - DNA, 78 bp, Homo sapiens
  chr14:88457819-88457897
  hypo
acaggcgtgagccaccgtgcccggccctacattcttaactacttactgtaccataccgctttccctctctgacatgaa

SEQ ID NO: 27694 - DNA, 31 bp, Homo sapiens; identical to SEQ ID NO: 9890
  chr14:88459618-88459649
  hypo

SEQ ID NO: 27695 - DNA, 46 bp, Homo sapiens
  chr14:88625367-88625413
  hypo
cctccagcctctcccgggatcacagcatcccgtaataaccctcacc

SEQ ID NO: 27696 - DNA, 31 bp, Homo sapiens
  chr14:88669111-88669142
  hypo
tcttcctagagtcttccggttgcggggggtg

SEQ ID NO: 27697 - DNA, 37 bp, Homo sapiens
  chr14:88686788-88686825
  hypo
aaaaaaaaaaattactatagagcgaaagtaatcaaga

SEQ ID NO: 27698 - DNA, 30 bp, Homo sapiens; identical to SEQ ID NO: 9891
  chr14:88789534-88789564
  hypo

SEQ ID NO: 27699 - DNA, 30 bp, Homo sapiens; identical to SEQ ID NO: 9892
  chr14:88790077-88790107
  hypo

SEQ ID NO: 27700 - DNA, 30 bp, Homo sapiens
  chr14:88945553-88945583
  hypo
gggccaggccgggccgaggctcgcgcgcac

SEQ ID NO: 27701 - DNA, 21 bp, Homo sapiens
  chr14:88954148-88954169
  hypo
agtgcccacaaattagccagg

SEQ ID NO: 27702 - DNA, 547 bp, Homo sapiens; identical to SEQ ID NO: 9893
  chr14:89020728-89021275
  hypo

SEQ ID NO: 27703 - DNA, 140 bp, Homo sapiens; identical to SEQ ID NO: 9894
  chr14:89290906-89291046
  hypo

SEQ ID NO: 27704 - DNA, 181 bp, Homo sapiens
  chr14:89292609-89292790
  hypo
gcatgagccaccgcgcccagcccccaaatgtgtttttggcatagtaatcttatagatattgcttaaaaaaatacacaatcaaatatgtttgggacttgtgacaaaatattgaccctttacgttggtacaacagaagcttgttaagaacctttgatgtggccgggcacggtggcttatgcct

SEQ ID NO: 27705 - DNA, 112 bp, Homo sapiens; identical to SEQ ID NO: 9895
  chr14:89506987-89507099
  hypo

SEQ ID NO: 27706 - DNA, 30 bp, Homo sapiens
  chr14:89606226-89606256
  hypo
acttcatacaggctgcgctttgtggtaaat

SEQ ID NO: 27707 - DNA, 15 bp, Homo sapiens
  chr14:89627945-89627960
  hypo
cgtgcacagggccaa

SEQ ID NO: 27708 - DNA, 189 bp, Homo sapiens
  chr14:89657647-89657836
  hypo
tgaaaagaacatctgccccagcgcagcgtcccagctgccctggggcgaaattcactaatagtgcggtgatgccgcgtgacagaagctgccgcctgtgccctgtccaaataaatgaagtgtgcaattgaagtcgacatcaaaatgccttcccttgcagattactgcctctgtgtccgccaaacccaatga

SEQ ID NO: 27709 - DNA, 167 bp, Homo sapiens
  chr14:89711494-89711661
  hypo
tgcagaaaaggaatgctaaaacgtgaataaaaacaaaggaaaaatcgagtatgatgaacagacttgtatttttggaaacatatgcaaaagatacgcaggtgggtcattcggggccctttcctctttccatcttcctgacgctccacggatctactgaccaagtggat

SEQ ID NO: 27710 - DNA, 164 bp, Homo sapiens
  chr14:89811257-89811421
  hypo
gaacagctcagtggacttttccgaagaggtacgggcaagcaacccaaacacaccacccctccttccactttccagatctagattccgaaggccccacgccagagtctccttggcaaaggtgtagattccccaagcaagctggcgtggctcggtgtgcatgagta

SEQ ID NO: 27711 - DNA, 31 bp, Homo sapiens
  chr14:89845804-89845835
  hypo
cagtagaccgctcccccgacaatctcacaac

SEQ ID NO: 27712 - DNA, 57 bp, Homo sapiens; identical to SEQ ID NO: 9900
  chr14:90085512-90085569
  hypo

SEQ ID NO: 27713 - DNA, 30 bp, Homo sapiens
  chr14:90358153-90358183
  hypo
gccgctaccaatttcgggtcgcgctgctgg

SEQ ID NO: 27714 - DNA, 134 bp, Homo sapiens; identical to SEQ ID NO: 9901
  chr14:90420884-90421018
  hypo

SEQ ID NO: 27715 - DNA, 200 bp, Homo sapiens; identical to SEQ ID NO: 9902
  chr14:90421129-90421329
  hypo

SEQ ID NO: 27716 - DNA, 604 bp, Homo sapiens; identical to SEQ ID NO: 9903
  chr14:90422191-90422795
  hypo

SEQ ID NO: 27717 - DNA, 164 bp, Homo sapiens
  chr14:90505788-90505952
  hypo
aattaaaagtgactgctcaggcgaagacagtgacagtggcttctggaggtcgtacatcaggtttcgcatagagatgacagtggaaaatgtatgtgtgggtgttcgggcatgggggtgagagcagagtcataagtccttaacccgtggccatttcttagggggtt

SEQ ID NO: 27718 - DNA, 2173 bp, Homo sapiens; identical to SEQ ID NO: 9904
  chr14:90526633-90528806
  hypo

SEQ ID NO: 27719 - DNA, 232 bp, Homo sapiens; identical to SEQ ID NO: 9905
  chr14:90528869-90529101
  hypo

SEQ ID NO: 27720 - DNA, 161 bp, Homo sapiens
  chr14:90754245-90754406
  hypo
atcaggctttcgtgacggcttctcagcattcccgtgatctgacagccaccacccatgcacacagaaacaacattcatactccccagaagcacacccaggcgacagccaccaacccccctcctgagaggcgccgctactttgtgtctcgcttgcctttcaat

SEQ ID NO: 27721 - DNA, 381 bp, Homo sapiens; identical to SEQ ID NO: 9908
  chr14:90849476-90849857
  hypo

SEQ ID NO: 27722 - DNA, 504 bp, Homo sapiens; identical to SEQ ID NO: 9909
  chr14:90849897-90850401
  hypo

SEQ ID NO: 27723 - DNA, 30 bp, Homo sapiens
  chr14:90990071-90990101
  hypo
ggaagagcaccaaccgcacggcaggtgatc

SEQ ID NO: 27724 - DNA, 132 bp, Homo sapiens
  chr14:91127197-91127329
  hypo
taacaagcacctagtgcttggcgatggcacagggtgggcatccgaagaccttgagcaaggtgagcacgggcaatgtgttcagctcagggctggctgcgggcctcatcctacgccatgggacatcggcaggag

SEQ ID NO: 27725 - DNA, 41 bp, Homo sapiens
  chr14:91691164-91691205
  hypo
ggcacaggtgtaaccgtccatgttccgtgtgagcagagtcc

SEQ ID NO: 27726 - DNA, 42 bp, Homo sapiens
  chr14:91700729-91700771
  hypo
cggctcttctgggtgccgtggctccggcgcacggcgcgcagg

SEQ ID NO: 27727 - DNA, 30 bp, Homo sapiens
  chr14:91739005-91739035
  hypo
tccccgccgggctccggggaggccggactg

SEQ ID NO: 27728 - DNA, 45 bp, Homo sapiens
  chr14:91744415-91744460
  hypo
aggcaaggggtactcgtggcggccgagggcgttgcgtcccggtgt

SEQ ID NO: 27729 - DNA, 30 bp, Homo sapiens
  chr14:91750810-91750840
  hypo
caggtggaatgaatcgggacaggtcatcct

SEQ ID NO: 27730 - DNA, 30 bp, Homo sapiens
  chr14:91752078-91752108
  hypo
accagaaccgcaggcgtttagagagagctg

SEQ ID NO: 27731 - DNA, 30 bp, Homo sapiens; identical to SEQ ID NO: 9911
  chr14:91755601-91755631
  hypo

SEQ ID NO: 27732 - DNA, 235 bp, Homo sapiens
  chr14:91766242-91766477
  hypo
atgtgcagggccgggcgccggcgctcacctgtccagctcgccccgcagcctctggttctcgcccatggcgagggcgtttgtcctctgctcctgctgcagcgcctctcgctcagtggtcaagaccttctcccgctcctccagctccgccttgcgcttcagcatgtcaccgtgcctgttggagggaagcacctgccgtgagtctggccagggccttcttttccgacaggtaactcac

SEQ ID NO: 27733 - DNA, 396 bp, Homo sapiens
  chr14:91770037-91770433
  hypo
gccctacctctccccgagctccttgtgctccagctccagattccgatgcagtgtctttaggcagctgtgctggcggatgagggcctcgtactcggccgattgccgctcgtgcagcgtgcccaggtgctcgtggtcctgcagcagggcctcgtaggccgctgtaagttgctcctgctgcctctgcaggctttcgttctccgtctccttggccgtgtggtggttctgcagcagcgtgtactgcgcggtgagcgctgcgctctgggaactcagcgtggagttctccacctgccgagagggagaagcgcggcgtggcgcaggccccacagtcagcgaggagggctggggagcaggtcaagtgctcgagcagacacgaaaatagccgggaccctcagggca

SEQ ID NO: 27734 - DNA, 101 bp, Homo sapiens
  chr14:91775791-91775892
  hypo
acaaggattagccaggtgtggcggtgcatgcctgtggtcccagctaggtagtggtctccagctagggctggaggatcgcttgaacccgggaggtggacatg

SEQ ID NO: 27735 - DNA, 169 bp, Homo sapiens
  chr14:91781817-91781986
  hypo
ccccaccttttcccaccgccagttgggaaattgagaattgctgatttaagctgtggctaagctaggtaacggataatccatgcatccacaatacagtaccaggaatggctgtaatcccggctctccgtcttgcaggcaggggttctaggagaggcgttagtggtggagg

SEQ ID NO: 27736 - DNA, 27 bp, Homo sapiens
  chr14:91789563-91789590
  hypo
tagtgcaaatctcgtcagcacccccca

SEQ ID NO: 27737 - DNA, 30 bp, Homo sapiens
  chr14:91804724-91804754
  hypo
tgtgtggcttaaaagcgctgctgttgagct

SEQ ID NO: 27738 - DNA, 534 bp, Homo sapiens
  chr14:91805117-91805651
  hypo
taaactatgtccatccgccactcaggtctccctccctgtgtgtggggcaggtaaggagaccccagcggcagctgtaccaccccacagccaggctccacaggtgacatccatcagctgcaggaaacctgggagaacaggctcaccagattggagggaaggaggggcacctcatccctccagccaagaaaacacatcaggtgtggtcgtcccggccccaagctggagctgagcgtggactggaggctgcttctgtggacaacttgcaccgtctggacgggaggaaaccctgaagaccgggaagaatccccgcccccatccctgtgcaggcctcagaaggggaggcagctagtccgaggtcaaagagtaagctcagggcagaccccagctgactccggggcacacgtcagagctgtgccattggcagcaccacacatgtgagtcgacaccacaccagaaacatgtctgcaacacacacaaaggtaggagaagcagccggggactcacagctcctgcctgacgcgccgcagcctggcc

SEQ ID NO: 27739 - DNA, 261 bp, Homo sapiens
  chr14:91805897-91806158
  hypo
gacagatatttcagcggagactaagaaacgaggaggaaggtgggaaaaggctggcatgggttttgaaaagaggtgaaatatttagtgaaacaaaagggagtgtacgaaggaggagggccccaagctccgcgtcctgattccctgtatcctcccacaggcccgaggtgaccatgcactgcaggggccgtaaccagggaaagcacgcacgtcccacccccaccagaacctcagcagcaggaccgaggcgtctaggctgaagat

SEQ ID NO: 27740 - DNA, 45 bp, Homo sapiens
  chr14:91825111-91825156
  hypo
tttggggttataggagtgagccactgcgctcggcctcattgagtc

SEQ ID NO: 27741 - DNA, 30 bp, Homo sapiens
  chr14:91841604-91841634
  hypo
gtgtgtgtgtgtgcgcgcgcgcatgtggga

SEQ ID NO: 27742 - DNA, 90 bp, Homo sapiens
  chr14:91842700-91842790
  hypo
ttcattcactcacccaacaagcgtttagtgagcccccgtcccctcaaggcatgtgctaggagccagggcgttatagtgaatggaaacaga

SEQ ID NO: 27743 - DNA, 30 bp, Homo sapiens
  chr14:91849093-91849123
  hypo
tggcacagactcaagcgaacactccaaacc

SEQ ID NO: 27744 - DNA, 30 bp, Homo sapiens
  chr14:91849584-91849614
  hypo
gtgcccagggcaatccgttccacagaacgg

SEQ ID NO: 27745 - DNA, 127 bp, Homo sapiens
  chr14:91850942-91851069
  hypo
tcactattgtgctgcacactacgcactggcaccgggaggaaagggtggccagcctaccccaactgcacacctgggacgcccatcagctgctctctccaacacgtgcggctgctctatggtgcagggc

SEQ ID NO: 27746 - DNA, 31 bp, Homo sapiens
  chr14:91861311-91861342
  hypo
cctcccctcccacccacgtgtcccctgagta

SEQ ID NO: 27747 - DNA, 49 bp, Homo sapiens; identical to SEQ ID NO: 9912
  chr14:91976435-91976484
  hypo

SEQ ID NO: 27748 - DNA, 26 bp, Homo sapiens
  chr14:91984187-91984213
  hypo
gccactgtgcccggccttttgtccta

SEQ ID NO: 27749 - DNA, 26 bp, Homo sapiens
  chr14:92081552-92081578
  hypo
ccacctcctgtcacatcggcggcagc

SEQ ID NO: 27750 - DNA, 157 bp, Homo sapiens
  chr14:92492785-92492942
  hypo
agccatctttgcattgttcctcgtccgcctccttgctcgccgcagccggcagctttatcgccagagtccctgaactctcgctttctttttaatcccctgcatcggatcactggcgtgccctaccatgtcagacgcagccgtggacaccagctccgaa

SEQ ID NO: 27751 - DNA, 31 bp, Homo sapiens
  chr14:92554792-92554823
  hypo
tatccctcctctcagccgtgtgatatgtgat

SEQ ID NO: 27752 - DNA, 30 bp, Homo sapiens; identical to SEQ ID NO: 9917
  chr14:92789485-92789515
  hypo

SEQ ID NO: 27753 - DNA, 16 bp, Homo sapiens
  chr14:92790082-92790098
  hypo
tgctccagccccagcg

SEQ ID NO: 27754 - DNA, 827 bp, Homo sapiens; identical to SEQ ID NO: 9919
  chr14:92980081-92980908
  hypo

SEQ ID NO: 27755 - DNA, 30 bp, Homo sapiens
  chr14:92994921-92994951
  hypo
cgtgggggtgtggacggcatgatcatctgg

SEQ ID NO: 27756 - DNA, 27 bp, Homo sapiens
  chr14:93000627-93000654
  hypo
tagaaagtaaatggggctgggcgtggt

SEQ ID NO: 27757 - DNA, 30 bp, Homo sapiens
  chr14:93078612-93078642
  hypo
acaggcaagacacccggccggtgcagtaca

SEQ ID NO: 27758 - DNA, 30 bp, Homo sapiens
  chr14:93107808-93107838
  hypo
aggctgctgagccacgtgatagagagattg

SEQ ID NO: 27759 - DNA, 30 bp, Homo sapiens
  chr14:93151433-93151463
  hypo
tccaccgctgggagcgccggcgtactctca

SEQ ID NO: 27760 - DNA, 30 bp, Homo sapiens
  chr14:93155015-93155045
  hypo
ccacagctgctccccgtgccactcagggtg

SEQ ID NO: 27761 - DNA, 16 bp, Homo sapiens
  chr14:93389556-93389572
  hypo
cgacagacggacgcac

SEQ ID NO: 27762 - DNA, 31 bp, Homo sapiens
  chr14:93423288-93423319
  hypo
gagtctgggagccacacgcccagctaggaag

SEQ ID NO: 27763 - DNA, 283 bp, Homo sapiens
  chr14:93454158-93454441
  hypo
tcttcctcaccccatgactcccggactgggggagggcactggcttccacacggcagacgccaggacggcagctcacgcagactcagaccagggctagccttggtcccagctgccgcctcatgccggcaacgcacctacccggcctggtctgcagctggcgcttagccgccccagggcaggggagccacaagcacaatcctgctctgcggagcctcccctgcactgaaagggcgggtctcagcctgggtggcagacaacagccgatgtgaaaacaaaaacagtg

SEQ ID NO: 27764 - DNA, 190 bp, Homo sapiens
  chr14:93486021-93486211
  hypo
cactgcaaacaggctgcggtctccctccactagctagaaaagagatgggcccttgggtgcggcccccacaggagaaagggcccagctcctgagactggggaggccacggagaaaaggacactgtgcagggggatgcccggggggaaggacaccacagaggcaggtctcccagatgcgatggggacaggaa

SEQ ID NO: 27765 - DNA, 22 bp, Homo sapiens
  chr14:93509347-93509369
  hypo
cgagactgtctcaaaaaaaaaa

SEQ ID NO: 27766 - DNA, 47 bp, Homo sapiens
  chr14:93525815-93525862
  hypo
aggggtggagggggtgcgggtctcaaggtgggcgcaggtgctggtca

SEQ ID NO: 27767 - DNA, 30 bp, Homo sapiens
  chr14:93533460-93533490
  hypo
ctttctaaaacccccgttccatcccttcct

SEQ ID NO: 27768 - DNA, 30 bp, Homo sapiens
  chr14:93570839-93570869
  hypo
ctgacatcgatcgacggcagctggatgctg

SEQ ID NO: 27769 - DNA, 416 bp, Homo sapiens
  chr14:93706462-93706878
  hypo
ttctctttaaaaaaggagcctcgaatgcgatgcacagccgacctgcagattagtgttaactctgggagctcgggagcgtgcaccaccaccagtgtcaccgagcgcacccgcacagcagctaaccagtcaggcagcagaacgagtggcggcagtttgccggggcgtgcagacacacgacatgtttcccatcttggagactatctactgttcggcttttctaaaatgtcagattattcctgagtgtatatccacagggtaaaggaggaaaagaccgtaagagaaactatagttttgggagaaatcagcgttgttgacacccaatagaaaacctatttacttcaaagtgcatgtaattcatttacccggtagctcataaacgctccctagccctgcatagttttcgagtgagtgtgagt

SEQ ID NO: 27770 - DNA, 31 bp, Homo sapiens
  chr14:93763604-93763635
  hypo
tcatgtttaaaaatatcgttaacatttgtgt

SEQ ID NO: 27771 - DNA, 30 bp, Homo sapiens
  chr14:93770536-93770566
  hypo
actagcactgagcccggcacacaatatttt

SEQ ID NO: 27772 - DNA, 30 bp, Homo sapiens
  chr14:93813480-93813510
  hypo
gggcgagggcagagcgccccctcgtggctg

SEQ ID NO: 27773 - DNA, 30 bp, Homo sapiens
  chr14:94209922-94209952
  hypo
tcaaggagccgatgtcggtgaatgtgcttc

SEQ ID NO: 27774 - DNA, 30 bp, Homo sapiens
  chr14:94210244-94210274
  hypo
tgaaagggggcgggacgctgaaaagcactt

SEQ ID NO: 27775 - DNA, 30 bp, Homo sapiens
  chr14:94210751-94210781
  hypo
aggccggtgccagggcgtccacctcctatg

SEQ ID NO: 27776 - DNA, 96 bp, Homo sapiens
  chr14:94404859-94404955
  hypo
acaggcgtgagccaccgcgcccggccaagttctgacttttaaagtaacaacatggacgtgtcctgcctctgggtcgctggctttctgcttctgacc

SEQ ID NO: 27777 - DNA, 30 bp, Homo sapiens
  chr14:94417498-94417528
  hypo
cagagcggtccagccgcggttgcagcggtg

SEQ ID NO: 27778 - DNA, 72 bp, Homo sapiens; identical to SEQ ID NO: 9929
  chr14:94640375-94640447
  hypo

SEQ ID NO: 27779 - DNA, 31 bp, Homo sapiens
  chr14:94844985-94845016
  hypo
gagagaagcagagacacgttgtaaggctgat

SEQ ID NO: 27780 - DNA, 31 bp, Homo sapiens
  chr14:95200598-95200629
  hypo
aaatggtgtcttgcaacggttatgcctaact

SEQ ID NO: 27781 - DNA, 37 bp, Homo sapiens; identical to SEQ ID NO: 9935
  chr14:95864477-95864514
  hypo

SEQ ID NO: 27782 - DNA, 31 bp, Homo sapiens; identical to SEQ ID NO: 9936
  chr14:95932616-95932647
  hypo

SEQ ID NO: 27783 - DNA, 36 bp, Homo sapiens
  chr14:96015606-96015642
  hypo
ggattacaggcatgagccaccgcgcctggcctttaa

SEQ ID NO: 27784 - DNA, 249 bp, Homo sapiens; identical to SEQ ID NO: 9937
  chr14:96152797-96153046
  hypo

SEQ ID NO: 27785 - DNA, 23 bp, Homo sapiens
  chr14:96342286-96342309
  hypo
aagccacattcgccacgctcccg

SEQ ID NO: 27786 - DNA, 363 bp, Homo sapiens; identical to SEQ ID NO: 9939
  chr14:96342879-96343242
  hypo

SEQ ID NO: 27787 - DNA, 145 bp, Homo sapiens; identical to SEQ ID NO: 9941
  chr14:96505487-96505632
  hypo

SEQ ID NO: 27788 - DNA, 73 bp, Homo sapiens
  chr14:96547959-96548032
  hypo
cagggtctcgctggcacgcagactggaaagcagtggtgccatcagacctcactgcagccatgatttcctgggc

SEQ ID NO: 27789 - DNA, 188 bp, Homo sapiens
  chr14:96653285-96653473
  hypo
gcgctggtatgtgcgacgtgtgtttctgtgtgtgtgcatatgtgtatgtgttgtgggctacttccgattgggcggtcaggcaggcttctctgggagaagtgtcacttgagccaaagtggccaggggacccggctatggaagatgagacaatcagggtgatggttggaactggccgcccccaggattag

SEQ ID NO: 27790 - DNA, 31 bp, Homo sapiens
  chr14:96694176-96694207
  hypo
caaattgtctcagggacggaacacccatcag

SEQ ID NO: 27791 - DNA, 31 bp, Homo sapiens
  chr14:96912062-96912093
  hypo
actgcacatttggaagcgtgcattcgattta

SEQ ID NO: 27792 - DNA, 31 bp, Homo sapiens
  chr14:97045400-97045431
  hypo
cgtgctcttctgtgtgcgtggaagttcttgc

SEQ ID NO: 27793 - DNA, 41 bp, Homo sapiens
  chr14:97262845-97262886
  hypo
ctgattataataaacacaatgcggccgggcgcggtggctca

SEQ ID NO: 27794 - DNA, 38 bp, Homo sapiens
  chr14:97338412-97338450
  hypo
attgtaggcgtgagctactgcgccgggcctctagcagg

SEQ ID NO: 27795 - DNA, 31 bp, Homo sapiens
  chr14:97513199-97513230
  hypo
ataggtatttcacctccgaagaatcccaggc

SEQ ID NO: 27796 - DNA, 571 bp, Homo sapiens; identical to SEQ ID NO: 9944
  chr14:97685395-97685966
  hypo

SEQ ID NO: 27797 - DNA, 118 bp, Homo sapiens
  chr14:99651821-99651939
  hypo
gccagacacagagaaccggaggtgcccaggccaaggagggaaaggtccgcaaggtagggagctgtgtgagcacactcaaggtgcagggcgctgggccacgcgacgcagaaagcagctc

SEQ ID NO: 27798 - DNA, 30 bp, Homo sapiens
  chr14:99707178-99707208
  hypo
ccacgcgcgagacgccgctgtaacagaggt

SEQ ID NO: 27799 - DNA, 18 bp, Homo sapiens
  chr14:99716739-99716757
  hypo
gggcgacagcgagactct

SEQ ID NO: 27800 - DNA, 30 bp, Homo sapiens
  chr14:99880378-99880408
  hypo
ccaaatgaagcaggcggcgtccagccgcgc

SEQ ID NO: 27801 - DNA, 30 bp, Homo sapiens
  chr14:99891614-99891644
  hypo
aactccgccatccacgtgcacaccttggta

SEQ ID NO: 27802 - DNA, 30 bp, Homo sapiens
  chr14:99893310-99893340
  hypo
aactcaggtggggacgcagggagaagcagg

SEQ ID NO: 27803 - DNA, 101 bp, Homo sapiens
  chr14:99975811-99975912
  hypo
gctgcctgtccctgctgcacacgcagcacgcacacacacgcagcacgcacagacatgcagcacgcacgcagcacgcacacgcacacacatgcacacactcc

SEQ ID NO: 27804 - DNA, 62 bp, Homo sapiens
  chr14:99976342-99976404
  hypo
gacatggggcatgggcccatgcgttgggccacagaggaggcgggcagctgctccctgctcct

SEQ ID NO: 27805 - DNA, 305 bp, Homo sapiens; identical to SEQ ID NO: 9950
  chr14:100070159-100070464
  hypo

SEQ ID NO: 27806 - DNA, 240 bp, Homo sapiens; identical to SEQ ID NO: 9951
  chr14:100070680-100070920
  hypo

SEQ ID NO: 27807 - DNA, 42 bp, Homo sapiens; identical to SEQ ID NO: 9952
  chr14:100071435-100071477
  hypo

SEQ ID NO: 27808 - DNA, 929 bp, Homo sapiens; identical to SEQ ID NO: 9953
  chr14:100149918-100150847
  hypo

SEQ ID NO: 27809 - DNA, 30 bp, Homo sapiens; identical to SEQ ID NO: 9955
  chr14:100371996-100372026
  hypo

SEQ ID NO: 27810 - DNA, 30 bp, Homo sapiens
  chr14:100434919-100434949
  hypo
tgtggttgtctaagcgtgctttactttgga

SEQ ID NO: 27811 - DNA, 544 bp, Homo sapiens; identical to SEQ ID NO: 9956
  chr14:100437405-100437949
  hypo

SEQ ID NO: 27812 - DNA, 985 bp, Homo sapiens; identical to SEQ ID NO: 9957
  chr14:100438017-100439002
  hypo

SEQ ID NO: 27813 - DNA, 30 bp, Homo sapiens
  chr14:100485479-100485509
  hypo
tttttcagtacttacgttcacatataatgt

SEQ ID NO: 27814 - DNA, 30 bp, Homo sapiens
  chr14:100504751-100504781
  hypo
atggactcagatggcggacaaggttgccca

SEQ ID NO: 27815 - DNA, 31 bp, Homo sapiens
  chr14:100587317-100587348
  hypo
ctcccaccatccccatcgccctgactcctgt

SEQ ID NO: 27816 - DNA, 105 bp, Homo sapiens
  chr14:100591101-100591206
  hypo
aactgcttcatcacccgcagtgctgaattctgtaccccagggcccaatccaagctgtgtggggtcactggccgtccgggaatgggcataccgcctggcggtcggg

SEQ ID NO: 27817 - DNA, 30 bp, Homo sapiens; identical to SEQ ID NO: 9958
  chr14:100613211-100613241
  hypo

SEQ ID NO: 27818 - DNA, 31 bp, Homo sapiens
  chr14:100615569-100615600
  hypo
acctccatgcgggtcacggccttggggtgga

SEQ ID NO: 27819 - DNA, 258 bp, Homo sapiens
  chr14:100644259-100644517
  hypo
gtgctttgcactcgcggttccccccccgggagcattgatacccccgcccctgggagcattgatcctcctgcccctgcagcccggagcccggagcagcccacgttgctcccgctgcggcccagcccagcccagcccagcccagcccagcccagtgccgcgcctgtcctcgaacctggcccaacgctcgccgggagcagggacctgcgtgcagctatggaaccgaggcgcgggctgcgggatcccgccctacctcccata

SEQ ID NO: 27820 - DNA, 12 bp, Homo sapiens
  chr14:100685054-100685066
  hypo
tgtgactttgtt

SEQ ID NO: 27821 - DNA, 20 bp, Homo sapiens
  chr14:100720797-100720817
  hypo
tcttttcttttcttttcgac

SEQ ID NO: 27822 - DNA, 31 bp, Homo sapiens
  chr14:100725479-100725510
  hypo
ttagccttgaaaatttcggagtacctatttc

SEQ ID NO: 27823 - DNA, 31 bp, Homo sapiens
  chr14:100731699-100731730
  hypo
agggaaactccttccccgcctcccccaccaa

SEQ ID NO: 27824 - DNA, 104 bp, Homo sapiens
  chr14:100749399-100749503
  hypo
cacagcccagtgaaatgcccacgcagccggacctatgagcccatgtcagccctggaagctccggagctaactgggatggactcggaagaacttgaccaaataca

SEQ ID NO: 27825 - DNA, 35 bp, Homo sapiens
  chr14:100754245-100754280
  hypo
ctggctcagtggctcacggccgtggtctctcccac

SEQ ID NO: 27826 - DNA, 30 bp, Homo sapiens
  chr14:100757483-100757513
  hypo
cagtttctgtacagcgacaccaggctgtgc

SEQ ID NO: 27827 - DNA, 90 bp, Homo sapiens; identical to SEQ ID NO: 9959
  chr14:100773414-100773504
  hypo

SEQ ID NO: 27828 - DNA, 137 bp, Homo sapiens
  chr14:100847789-100847926
  hypo
actcccagaagactaagacagcggcaggcattaagcacggagacaggcaagggtaaagacgtggagccacaggggccccctgcagggcgtgccccagcccctctctacgtgggcccgggagtgtctgagtttattca

SEQ ID NO: 27829 - DNA, 30 bp, Homo sapiens
  chr14:100890348-100890378
  hypo
ggaggcagatgacacgtgttgcccctcaga

SEQ ID NO: 27830 - DNA, 30 bp, Homo sapiens
  chr14:101002155-101002185
  hypo
ggaacctccagacacgaacctgggtgaggt

SEQ ID NO: 27831 - DNA, 30 bp, Homo sapiens
  chr14:101004364-101004394
  hypo
ccgagccaccagtccgcggaaaggcctgct

SEQ ID NO: 27832 - DNA, 226 bp, Homo sapiens
  chr14:101133986-101134212
  hypo
ggcagaacatggatgtccatacggttattaagaaggggtggctgggcaccctgcccgaaatgtcctcggtcacccactcacgttccaggaggcaactgggccccgggaagcgaattctccaggcctcctgaggagcattcattagccacgcacacagatggagagcagcggcgcccgggaggccggaagcggcccctcgctgctcgccagtggatcaaatgttccc

SEQ ID NO: 27833 - DNA, 31 bp, Homo sapiens
  chr14:101177221-101177252
  hypo
atgacctctgtgtggtcgtcactgtcttgtg

SEQ ID NO: 27834 - DNA, 30 bp, Homo sapiens; identical to SEQ ID NO: 9961
  chr14:101192401-101192431
  hypo

SEQ ID NO: 27835 - DNA, 242 bp, Homo sapiens
  chr14:101250130-101250372
  hypo
tcgaggcttccagagcgggccagccggcagccccaacgtgtgaggctgtgcacctgctggggagggtttttttgatggcgacggcgtgaggtgagcgggtttgctctgggcggtcgaggattagcgccgactgagagggtcaggtgcaccggggctttgttcagacctgtttgccttttgtcccccgcctgcagaaagcccaggctgcatgatgtcatttcggatgcattaagctggaacag

SEQ ID NO: 27836 - DNA, 30 bp, Homo sapiens
  chr14:101337576-101337606
  hypo
cccgccccacacagacgtgtcacactaggc

SEQ ID NO: 27837 - DNA, 150 bp, Homo sapiens
  chr14:101348431-101348581
  hypo
gccggtttggtcgtcgatttggatcagggaggcgtgcagggccgtgccggtgacgccggtttccaagtagaatgggttctggggcttggggtggtggaggagaggcgccttgcggaaagccctcttcaggcactcgaaggcctcttgctc

SEQ ID NO: 27838 - DNA, 30 bp, Homo sapiens
  chr14:101349298-101349328
  hypo
ctcgtaaaaggtctcgctgtgatcactgtc

SEQ ID NO: 27839 - DNA, 30 bp, Homo sapiens
  chr14:101349617-101349647
  hypo
accacagagaagttcggtgaaggtacgatg

SEQ ID NO: 27840 - DNA, 345 bp, Homo sapiens
  chr14:101489862-101490207
  hypo
tgatgcaaaatggcataatctcgctcctcttaaatcaagttctgccttgggaaatcgcgccatccctggggaggagaccttgattcttcccggaatcagtgccattccatggtgctcaatgacgtggttgactacgctacgcttattcagtagacaccgtgacctgcttcttctcagcgtcaaatgcagcctagaagaagcgccctcaggcaacttcgtggacatgagccttcttccagccaccaccaccaccatcgtgcggtacttgaagaaatggtttaccgtcccacatacattttgaatatgtatgtgggatggtaaaccgcttcttggtatccagcccag

SEQ ID NO: 27841 - DNA, 30 bp, Homo sapiens
  chr14:101491654-101491684
  hypo
gcagtgcaggtcaccgggtggttggctgca

SEQ ID NO: 27842 - DNA, 275 bp, Homo sapiens
  chr14:101579007-101579282
  hypo
cccaggaactgcctgggaacacggcctggagggagggcccccgggcgtttgtgccttgaagtggcgcagtccctgtggcccatgcacacccgcatgcttagaggatgtgcaggcaccggacatgccccacgctgggttctgaggccgcaacagtaaagcgggcaccgtccctgccttggtgggctctggggctagtggatccggctgacagtgcaggcagctgtggccccctcagggtggcgcagggacctggcgatagggtaaggaaagttctg

SEQ ID NO: 27843 - DNA, 31 bp, Homo sapiens
  chr14:101638867-101638898
  hypo
cagcaggaacatcaaccggtgagagagggag

SEQ ID NO: 27844 - DNA, 30 bp, Homo sapiens; identical to SEQ ID NO: 9963
  chr14:101656894-101656924
  hypo

SEQ ID NO: 27845 - DNA, 31 bp, Homo sapiens
  chr14:101985982-101986013
  hypo
agaggaaggagggcggcgagggaggcgcgga

SEQ ID NO: 27846 - DNA, 118 bp, Homo sapiens
  chr14:102094116-102094234
  hypo
gcctgctgcaacctgcgctggggttgaggcaggaaccaagcttggggccaaccgactgcgtgggacgtggctcccggatctgcccctcaccagctgaggacaccggagcgtctctctc

SEQ ID NO: 27847 - DNA, 167 bp, Homo sapiens
  chr14:102293899-102294066
  hypo
gctgttgctttctctcgcgaagcttctaccattttctgctgattcttaaaatagatttggatcttgtcaattttggtcgtcaaaaagattgaacttttacaggatgaaatccattattttcctaaattatctcgttttgggaaatcagttctcggccataagtgcag

SEQ ID NO: 27848 - DNA, 25 bp, Homo sapiens
  chr14:102300430-102300455
  hypo
ccaccacacccggcctgaatcagtt

SEQ ID NO: 27849 - DNA, 31 bp, Homo sapiens
  chr14:102303817-102303848
  hypo
agcttacagaggaaaccgatgtgatttccaa

SEQ ID NO: 27850 - DNA, 113 bp, Homo sapiens
  chr14:102325126-102325239
  hypo
tacaaagaatgacaagactcccgctggcctggttcaggtcaaatgcccgcccttgaaccgagtgtgctcccgactgcttgaaaccgcctctcgtttgtatttcacagtagcag

SEQ ID NO: 27851 - DNA, 82 bp, Homo sapiens
  chr14:102343691-102343773
  hypo
tgtgctgcctttgttgggcagcgtgattctgcgtctgtgcctctgggtgtgcgctggatccgtaggtctcatttgagagatc

SEQ ID NO: 27852 - DNA, 31 bp, Homo sapiens
  chr14:102349235-102349266
  hypo
gtgggacactcctaggcgacaggctgcaaat

SEQ ID NO: 27853 - DNA, 378 bp, Homo sapiens
  chr14:102355901-102356279
  hypo
gctggcacagagggtagggtgcgtgtcctggggctcccctagaagcaggcgcagtggacagagatgtctcagaggaagggagctgggtctgtcgcagatgggtgcttcagaaagatcgcacctgagacagcacggaggatgcgtgtgggtgtcagtggggaactgggcaggtagaataagaggagttcaggaatcacttctaccctttgcaggaactgtgctaaatattgcgggctttaaaattaagtaagacattggcctatgttgaaatacagcaaaaacgtaagatggattaatgaacgagtaaaagatggatgaacagatgtgcgtgtgatcaagcagatggagcacattgctcgtggtcgaatctggtggttg

SEQ ID NO: 27854 - DNA, 211 bp, Homo sapiens
  chr14:102360719-102360930
  hypo
agggctttgtctgtaccgtgggtccttgtcttgctgtgggaaggtgtttaacgatgattctagaagaagcacagcagcatttttatgttgaaatgttaatgctctttctccttttactttttagctggcatactgtgtagtgcagtttttagaaaaggacagcaccctcacggaaccagtaagtactgatgctagcgcgtcttgtaagatg

SEQ ID NO: 27855 - DNA, 31 bp, Homo sapiens
  chr14:102365883-102365914
  hypo
ggcccgtgtgtgaatccgatcccagaaatga

SEQ ID NO: 27856 - DNA, 31 bp, Homo sapiens
  chr14:102372315-102372346
  hypo
actagaatgtaagctccgtggagtcaaggat

SEQ ID NO: 27857 - DNA, 30 bp, Homo sapiens
  chr14:102384062-102384092
  hypo
agggccctggggggcggcaggggagatgag

SEQ ID NO: 27858 - DNA, 24 bp, Homo sapiens
  chr14:102418939-102418963
  hypo
cgcgcctggcccaccacagtttta

SEQ ID NO: 27859 - DNA, 132 bp, Homo sapiens
  chr14:102467326-102467458
  hypo
aaaagcttccctgcccggttgcgacagtatgcgtcctatgagtttgttcagaggcttctgaaaggttacatgaaggtaggtggccagtatcgcacggtgatgagtgtccattagaaacgcacctgcacagat

SEQ ID NO: 27860 - DNA, 537 bp, Homo sapiens
  chr14:102493476-102494013
  hypo
gccttaacattgatcagttctcgtaatgtttcagaatattccgtcaacctcaaggccacttgcttctgattggtgttagtggagcaggaaaaactaccctgtctcgtttcgtcgcctggatgaacggtttgagtgtgtaccagattaaggtgcgtctggtcggtggcctcttaatcccagcaacagatgtgtgtgcagagctcagtgagtaggaatggacctaacttgcctctgcttctgtaggtccataggaagtacacaggggaagactttgatgaagatctacggacagtgttgagacgttctggctgtaaaaatgaaaagatagcatttataatggatgaatctaatgtgttagattctggattcctggagcgaatgaatacccttctggccaatggagaggtaattaggtgacgtgttgcgttgcattacgtgttaccgggggaccagtaagtcagcactgtgctgtttcccaggtgcctggtctctttgaaggagacgagtatgccaccttgatgacgcagtgcaaagagg

SEQ ID NO: 27861 - DNA, 30 bp, Homo sapiens
  chr14:102500669-102500699
  hypo
agatattgccaggacggaatacctttccaa

SEQ ID NO: 27862 - DNA, 30 bp, Homo sapiens
  chr14:102504836-102504866
  hypo
accgtgaagtgcggcgaacaggggggagag

SEQ ID NO: 27863 - DNA, 30 bp, Homo sapiens
  chr14:102516414-102516444
  hypo
acttcaaggggccacgtgcaacaacaacaa

SEQ ID NO: 27864 - DNA, 30 bp, Homo sapiens
  chr14:102516841-102516871
  hypo
caaaggaggatcctcgcagcttctacgagc

SEQ ID NO: 27865 - DNA, 191 bp, Homo sapiens
  chr14:102635325-102635516
  hypo
taatgtgtttctatagcgcttagaataagatctgaattgcttttgatacagtgcttttcccctccccgattccccagtgtgatttgctgccacctcctcctcatttattccatccattgcattccatgaagagcagctgcacccctccccgtcccacccgtggagccaatggtacacgctctgcttagaat

SEQ ID NO: 27866 - DNA, 293 bp, Homo sapiens
  chr14:102650991-102651284
  hypo
cactgtgaaatttttacttaacgcatgttacgcactttgtgactgtgtgtctcttctcattttgggatgacatgaaggtgatgttccacacgtcttacatcttgctatttgctgacgtttgacttattgtcttgcctgcctcccctctgtctaattctctgtgccgcctctcaaagccttgctgcggctaaacgcagccccttgaacgtggttggccggggctcattccaggtcagagcccatcagaagcgcgctagagacaatgcaccaacggttggtctttagtgaagggg

SEQ ID NO: 27867 - DNA, 29 bp, Homo sapiens
  chr14:102653307-102653336
  hypo
ccaagaaaacctgcggaacagtctttgca

SEQ ID NO: 27868 - DNA, 272 bp, Homo sapiens
  chr14:102681973-102682245
  hypo
gctttcagtaggagctcttttcctggctagagttcattgtctgcctactcctcatcttgaatagtgtttgcttaaggctttgtgctggcgtgaggttgtcctgctgtagacaccaggcccgtcgtcggtgcagagcgcttcctacacagggcagtgggggacgttccatttgggatgagaagaactcatgatttacattgtcttactatgaaataccatccctcactcttgacagacgacgtagctgatctgagcagcgccctggcacccgc

SEQ ID NO: 27869 - DNA, 30 bp, Homo sapiens
  chr14:102685384-102685414
  hypo
ccgggagtttgacacggatgaccatttggg

SEQ ID NO: 27870 - DNA, 31 bp, Homo sapiens
  chr14:102686190-102686221
  hypo
aggacaggtttgagggcggttgattcaagat

SEQ ID NO: 27871 - DNA, 30 bp, Homo sapiens
  chr14:102695500-102695530
  hypo
cggccagcgcgaaacggacgcaggcgcatc

SEQ ID NO: 27872 - DNA, 234 bp, Homo sapiens
  chr14:102792999-102793233
  hypo
atagggaaggggggactggcccgacattttaaacttaacccaggccacggccagttggaccccgagatggtgctgtctgagaaagccagtggaagcaccctccgggggtgcacggaggaaaggacgctcagcctgacctccctggggctgtccatgccagcggatccatgtgagggaggggcccgctcctgcttggtgacagagtcagcacgcggtggcctgcaggtaatgttt

SEQ ID NO: 27873 - DNA, 30 bp, Homo sapiens
  chr14:102931263-102931293
  hypo
tactctcttgagttacggtgttctcaagcc

SEQ ID NO: 27874 - DNA, 536 bp, Homo sapiens
  chr14:102939284-102939820
  hypo
agctctgctgccaggcgctcgccttgtgccaggctaatgcctgaagcacatctttccctcagtcctcacaacaacctgggaagtgactgcgtctttccccatttgacagaggagaaaaccctagctcagaggttcagaaagttgcctgaggcctcatagcgggcaggcggcaggggtgggacatagacccaggtgtgtgacacccgcctctgcctctcctgtggctctgaggtccaaggcctgggccaggaccaactgcaggatggcagcaagcaccaggttgtggcgacatgtcataggcttagtggcctcacacgtcgtattttaggacaaagcctacacatgcgaatctttaaatcgcagagggtcctgcaaatgagcccaggagtgaggggagatgggggttcactctgaggactggaacgtcagaagagttggttgaatctgaggattggagaacaagcggggtttatgtattttgattatgttctacatctttccactttgttttatttgttcttcgacttgagcttctt

SEQ ID NO: 27875 - DNA, 76 bp, Homo sapiens
  chr14:102966380-102966456
  hypo
ggactgtagtgcaattaaacccgcgtctaggtgatgcttttaaagttgtagcttcgtgctttgtacagttttcttt

SEQ ID NO: 27876 - DNA, 265 bp, Homo sapiens
  chr14:102973467-102973732
  hypo
gcccagcagctcctggcgggccgagccggcggcacccacgggggtgtacagcgccaggaggtccagcagcagcaggcggcgctggcgcggctccccgggagctgaggcgggggctccggcggcggagggagtggccccggcgtcgcggcccagctggcgcagcagcagctcgagaggcgtgaggccgccgccgtcccgcagaccgggcgaggcgccgtggcccagcagcaggaagaggcactcggggcgcgccagctcacaggcc

SEQ ID NO: 27877 - DNA, 236 bp, Homo sapiens; identical to SEQ ID NO: 9973
  chr14:102975690-102975926
  hypo

SEQ ID NO: 27878 - DNA, 30 bp, Homo sapiens
  chr14:103024332-103024362
  hypo
cggggtctcctgcccggccataataaacag

SEQ ID NO: 27879 - DNA, 30 bp, Homo sapiens
  chr14:103046529-103046559
  hypo
cggaggagtcccgcgcgctgcctgtcacag

SEQ ID NO: 27880 - DNA, 37 bp, Homo sapiens
  chr14:103109323-103109360
  hypo
aaatggaagagattggctgggcgcagtggctcacgcc

SEQ ID NO: 27881 - DNA, 121 bp, Homo sapiens
  chr14:103144543-103144664
  hypo
agagagagggagacgagagggagagggagagggagagctgtttcacagtttttgatgattgtgaataacgctgcctatgtgtgcaggtgcttttttttgtttgtttgttttgaggtggtgt

SEQ ID NO: 27882 - DNA, 31 bp, Homo sapiens; identical to SEQ ID NO: 9976
  chr14:103242510-103242541
  hypo

SEQ ID NO: 27883 - DNA, 30 bp, Homo sapiens
  chr14:103242914-103242944
  hypo
tgcgcaggccccagcggcctggtggagggt

SEQ ID NO: 27884 - DNA, 31 bp, Homo sapiens; identical to SEQ ID NO: 9977
  chr14:103263057-103263088
  hypo

SEQ ID NO: 27885 - DNA, 30 bp, Homo sapiens
  chr14:103345559-103345589
  hypo
cagctcagccagggcgtgggccatcatcca

SEQ ID NO: 27886 - DNA, 178 bp, Homo sapiens
  chr14:103364138-103364316
  hypo
tgtgtgagctttccagtgacacgcgctcacccgctgggtttcactgtggaaatccacacgcacctccagaagaacaaaccagtgaacctttgctcccctgaatagaggcgatgatgtaaaggggactgatgaaatgtcgcttctcctgtcttctgtcgtcacaggtgtctgtggggtg

SEQ ID NO: 27887 - DNA, 385 bp, Homo sapiens
  chr14:103369446-103369831
  hypo
tcctggagtcagagccgcgggtggcaggcctcatacaggggcctctgactgttctgctcctagcctgtctgtatttgatggaaggtggtgcagcattttccgagtcctaactgtgttttgctttttaacacctttggtttggaagcgagtgatagacagccaagcagagaaactgaaggagcttgacaaggagatccggcccttccggcagaactgggaggaagcagacagcatgaagagcagcgtggagtccctccagaaccgcgtgaccgagctggagagcgtggacaagagcgcggggcaagtggctcggaacacaggtgaggcaggggccggggccgggccagcagtgtgcatctgggccccgggcgagtgctggggcggg

SEQ ID NO: 27888 - DNA, 793 bp, Homo sapiens; identical to SEQ ID NO: 9978
  chr14:103394664-103395457
  hypo

SEQ ID NO: 27889 - DNA, 137 bp, Homo sapiens
  chr14:103407160-103407297
  hypo
gaccctagacccctaggaacccgtgctatgggggcgtgggaagcccctctgcagcccggtctgagggcatatgcaagcgaggctaagggcgtcctgcagggagctctggggtccgcgctgtgctcctcacctgctca

SEQ ID NO: 27890 - DNA, 141 bp, Homo sapiens
  chr14:103408572-103408713
  hypo
tgtctgctgtggtgtggccatcgggatggagccgggacacactgcagtaagcccgtgggtggagctggccgtgcacctcacaggcctggtgtctagccacgacgccctgggtatgatgccgtctcagcaaggctgacaatg

SEQ ID NO: 27891 - DNA, 30 bp, Homo sapiens
  chr14:103410146-103410176
  hypo
aaccaaagcaaaatcgaacacatgctgact

SEQ ID NO: 27892 - DNA, 30 bp, Homo sapiens
  chr14:103411444-103411474
  hypo
cccttctcgctccacggccatcacatgcag

SEQ ID NO: 27893 - DNA, 31 bp, Homo sapiens
  chr14:103419854-103419885
  hypo
aagcacaggcagaggccgtgtctacattaac

SEQ ID NO: 27894 - DNA, 200 bp, Homo sapiens
  chr14:103421193-103421393
  hypo
tccactcccagctggccggcctgccctgaggacccctgcacttggcttcctcagctgagtggtgattgcgtgggcaggtggagtctgacaagtcacagtcaccccgctgaggtgagaatttgcctggagacacctctaatgcacagccctgagcatacccgccccctcctgcagcctccttgccccggtcactgaaaggg

SEQ ID NO: 27895 - DNA, 297 bp, Homo sapiens
  chr14:103423608-103423905
  hypo
gaggcatgaagatgccgcctctgtctccatctctgctgcccactctccacagctgtgactcacacactcatggacagtactggctgtaaactcacttgctaccgggccctctactctgttaatgttacagaaagctaccgctttcctggccgcctccattcagtgatcaagcaccatctctggttctctggaatccacttattcctccccacagcagtgcccggctccgcagcaacgagagaggcaatgacttgtgcagaaacaggcttatcaaagatctggcgggcacttaccggt

SEQ ID NO: 27896 - DNA, 80 bp, Homo sapiens; identical to SEQ ID NO: 9979
  chr14:103430221-103430301
  hypo

SEQ ID NO: 27897 - DNA, 49 bp, Homo sapiens
  chr14:103433340-103433389
  hypo
cagggagcggattcacggccgctaatggggccgcgcacgtaccactgaa

SEQ ID NO: 27898 - DNA, 269 bp, Homo sapiens
  chr14:103433868-103434137
  hypo
gcgtgaatgcactcacgcaagcctagacggtgcggctgccgcacaccaggccctgtggtacagcctgtcaattccaggccccaagcctgcataccatgttgctgtgcgggacgctgccggcggctgtagcacaatgctaagtatctgtgtatctcaacacagaagaggtagagtaaagtacagtattatgatcgtacgggacgcctgttgtacacacagtctatcattgatggaagcatcgttatatggcacattactgcactgtaaaa

SEQ ID NO: 27899 - DNA, 18 bp, Homo sapiens
  chr14:103437783-103437801
  hypo
cactcacctaagcggcgg

SEQ ID NO: 27900 - DNA, 17 bp, Homo sapiens
  chr14:103437920-103437937
  hypo
cccggcccgtgatttgc

SEQ ID NO: 27901 - DNA, 31 bp, Homo sapiens
  chr14:103442295-103442326
  hypo
gctgtgctccaggtcccgctgcacatcctca

SEQ ID NO: 27902 - DNA, 214 bp, Homo sapiens
  chr14:103444035-103444249
  hypo
accctgccaatgctggcggcctattggtcaggggttggcaaactacggcctctgggagaaatctcacccccctggcctctgggagaaatcctgcccgaggcctgtttctgcaccatcacgagcatgaatggttttaacatttttaaagggttgtaaaaagaagaacatacaacaaaggccatgaaacctgaattctttacgacctggatatctg

SEQ ID NO: 27903 - DNA, 72 bp, Homo sapiens
  chr14:103453553-103453625
  hypo
cagttacagagcagcacgtgctggagcaggaacataaacacaggtctgtcccactaacgcctgtttctaaac

SEQ ID NO: 27904 - DNA, 43 bp, Homo sapiens
  chr14:103459763-103459806
  hypo
gacatctaacagactctcccacgtccaccagtttttctgcatt

SEQ ID NO: 27905 - DNA, 96 bp, Homo sapiens
  chr14:103460402-103460498
  hypo
acacagaagagagtaaggaggcgccgagacacgccacaacaggtgttctatggaccgagttagcaggaatgcaacgaccagagtccaggctaaaca

SEQ ID NO: 27906 - DNA, 67 bp, Homo sapiens
  chr14:103468235-103468302
  hypo
atggtctctgaggaaagctaacgcgggagctcgtgaggcagacggcggaggcccactccagaatgag

SEQ ID NO: 27907 - DNA, 29 bp, Homo sapiens
  chr14:103492713-103492742
  hypo
gaggttccgtctcaaaaacaaaacaaaac

SEQ ID NO: 27908 - DNA, 890 bp, Homo sapiens; identical to SEQ ID NO: 9980
  chr14:103523110-103524000
  hypo

SEQ ID NO: 27909 - DNA, 199 bp, Homo sapiens; identical to SEQ ID NO: 9981
  chr14:103524323-103524522
  hypo

SEQ ID NO: 27910 - DNA, 78 bp, Homo sapiens; identical to SEQ ID NO: 9982
  chr14:103541956-103542034
  hypo

SEQ ID NO: 27911 - DNA, 30 bp, Homo sapiens
  chr14:103591734-103591764
  hypo
ctgggctctgggaccgggtggcctgagttc

SEQ ID NO: 27912 - DNA, 36 bp, Homo sapiens; identical to SEQ ID NO: 9983
  chr14:103593973-103594009
  hypo

SEQ ID NO: 27913 - DNA, 30 bp, Homo sapiens
  chr14:103698759-103698789
  hypo
ttatccccctcccccggccaggattaggcg

SEQ ID NO: 27914 - DNA, 30 bp, Homo sapiens
  chr14:103777894-103777924
  hypo
cccaagaagtcccccgctgtctgggccacc

SEQ ID NO: 27915 - DNA, 143 bp, Homo sapiens
  chr14:103977416-103977559
  hypo
ctgaggttcttatttgcgtttccagctccctgggtattcattcatacctggtttctggctgtggtgaaatgtcttctgaccaagtgggttgataaacagggggcttcgctggagcgggggcagggggcgcggtcactgaacag

SEQ ID NO: 27916 - DNA, 152 bp, Homo sapiens
  chr14:103977770-103977922
  hypo
gggacgctcacagcccgcccccaggacctgtggggggagttcagctgcttcggctgcttctgctgctccgcgtgcacatgggcctccttaccaccctggcagtctcctcctcttggaagttttaactattcaagactcaatggccaggcgcg

SEQ ID NO: 27917 - DNA, 342 bp, Homo sapiens; identical to SEQ ID NO: 9987
  chr14:103989186-103989528
  hypo

SEQ ID NO: 27918 - DNA, 182 bp, Homo sapiens; identical to SEQ ID NO: 9988
  chr14:103989537-103989719
  hypo

SEQ ID NO: 27919 - DNA, 114 bp, Homo sapiens
  chr14:104000990-104001104
  hypo
ccacaggtctacaacgtgcgcactgtcagcctgccaccgcccgacctgggcacaggcacagatggccctgccggctccgacaccagccccttccgcagcggcacgcccatgaag

SEQ ID NO: 27920 - DNA, 30 bp, Homo sapiens
  chr14:104006540-104006570
  hypo
ccacccctgctgagccgaaactccaaggca

SEQ ID NO: 27921 - DNA, 243 bp, Homo sapiens
  chr14:104017482-104017725
  hypo
ggggatggggggggggcatcacggggcacacacaagctgtcggaagggccgatgtccacaagggacgagagtcaggggcgcggctgtgggggtggaggcggcctggaagagcaggcatggcacagcggccgctggctcatgtggactggcgaggcactgtcctgctggggccgtcccaaagggaagcatggcccgtcactccccaggctaaaaaccatccacggctgcccctcctcatggctg

SEQ ID NO: 27922 - DNA, 128 bp, Homo sapiens
  chr14:104047701-104047829
  hypo
agtggatctgatcaccgagacggctgctgagtaactaacgagtggggcgcgtctacactgtggaggtgctggacagagggaggagtcgcctcctgggctggtcggagtaggaccttgggaggtttcat

SEQ ID NO: 27923 - DNA, 564 bp, Homo sapiens
  chr14:104047888-104048452
  hypo
ccatttaatattttcagaccccactttacctcgggtaactgaaaccatggaaagaaaaaccatggatggaggggacagctgtgctgccgccatctcccttacacagttgagtaaaccgaggcacagaagaaaatgaagtagccccagatgacgtaggaaatggcagaactgaagggaaaagcagagcagggggctgtagagttaaactgttcttcattccggtggcactagacctgcccgggcggccagaggacacgtggctcctgtcctgtctgccgtgtggctaggggacagccgtgcttgtgctgtgccgtctgagtgtttgtttctgtctgtgggaataaaggggttgccagacaccctccctgctctgtggagggagggtggaatcatgcctttggccactttgcccactcccccttgggccggagcatcagcattagctgtgccacagggtggtatgcgctctgctgaaggtggcaccttcagggaaaggcagtctgccggggaggctagcgagcaccctgggtaggagctgagcgtggcctccgcgcctcctcatgg

SEQ ID NO: 27924 - DNA, 408 bp, Homo sapiens
  chr14:104048658-104049066
  hypo
cagccctgccactccctgtaacgggctgtgggtcctgccctgtggccttcctacctctcttgcgtgtgggtgagcctgagcgtggccaccgccctgggagtgccacagaggcaagcggcactggtcctcatgtgtaaacagccccaccagcacgcggggctggagtagtcaggccgggacctgtcccaggaatgggcaggctgttaacctaggatgcattcaagttaggacacatttcattcccgtgtagcggtggctcccagttcctccgcagaacctgcaggagtgtgcgtgatgaaacccgtcactcgttgtgtatggtagacatacctgcctgggtcgtaatcacttgtgaagaaaatgaattatgctgtgacctttagatacgattcacataccataaaattc

SEQ ID NO: 27925 - DNA, 30 bp, Homo sapiens
  chr14:104061814-104061844
  hypo
tcgtggatggctgagcgtgaggctgagcca

SEQ ID NO: 27926 - DNA, 20 bp, Homo sapiens
  chr14:104116033-104116053
  hypo
tgttttttttttttttcgag

SEQ ID NO: 27927 - DNA, 30 bp, Homo sapiens
  chr14:104152223-104152253
  hypo
tactgtgtaatacacgagtttaaaaattaa

SEQ ID NO: 27928 - DNA, 91 bp, Homo sapiens
  chr14:104159176-104159267
  hypo
ctctgttaacatgatgactagcgtgctgtcagtttgacactaaaacctgaagcactcggtgcagttgctcgggcctcacacagacacatca

SEQ ID NO: 27929 - DNA, 303 bp, Homo sapiens
  chr14:104159975-104160278
  hypo
cctgtcttgggagtgtgagaccgccccgccctgccacgcccctcaccgccctgcccggaggcgccagccgcactccttggcttcctttcctagatagtgacgtccaccaaccttggaggtgccttttcaaaacacccgggaggccgtgcctcagcattctgttactcggcctgcagccccagtgccaggagccaccccgaccgcgacccggccaggctggctcagggaggccgaggtggcgctgaggtggcttcagcacgctggggattggctcctgctcacggatgctgttgcatttcctgc

SEQ ID NO: 27930 - DNA, 30 bp, Homo sapiens
  chr14:104164387-104164417
  hypo
tgacgagcctgtcacgtgccagccctgcgc

SEQ ID NO: 27931 - DNA, 161 bp, Homo sapiens
  chr14:104165037-104165198
  hypo
tcccagctgtgccacggcccaggcagacgcgttttaaaggcccgagccccgtgtgtcggggcttctcaggcagggctgttgtgcagccgccaccgtgtcagtgggactgggtcccaggtgtccctcgcaccccttcggcactgatcgtgtaggaacaggag

SEQ ID NO: 27932 - DNA, 30 bp, Homo sapiens
  chr14:104193784-104193814
  hypo
ggcgccccgaggcgcgagggcgtcctaagc

SEQ ID NO: 27933 - DNA, 95 bp, Homo sapiens
  chr14:104194546-104194641
  hypo
cgccggcgctcgggcgtttgcaaccactgtggctcctcggaggggccggagacctttgcccaatagcacgatgcagacccggttttgagccatct

SEQ ID NO: 27934 - DNA, 31 bp, Homo sapiens
  chr14:104195284-104195315
  hypo
tgaaactatgacttgtcgtctttccaataac

SEQ ID NO: 27935 - DNA, 486 bp, Homo sapiens
  chr14:104202355-104202841
  hypo
ggcacatagccctcccggtctccaaggcgagcccaccaccactcagtctcgctttcgtccttgcgcctcaggatggtgagggcgtccccttcgtggaaggacagctcgtcactgttctgggcctcgtagtcccacagagcatacgccacacctttgttcatcacacccagcttttcctgcacccctggagccagagagcaatggtcaggcctcagcagagggtggcctgcagcaagggaccctgctcgaggaacaggacacagtcgtgctgctgccgaggctgctctcagcaggccccacagaggccagcgagggagatgagacactattgaagactagggcccccacccgatacctcccctgcccggcccagctgctgctcctgctgccggccctttctaagtcctgcaggacagacaggacaaacgagctcctgagccccagggcaagagtgtgctgttcttaaggtgacgcttagcaatcaca

SEQ ID NO: 27936 - DNA, 122 bp, Homo sapiens
  chr14:104204086-104204208
  hypo
gcagcagtttcaatgtcgcttatggttgaggcaaaaatggcggcaccactctccaccagctgtttgcagaggtgaacgctgttacaagaggcagcgcagtgcagcggcgtcctggaatagag

SEQ ID NO: 27937 - DNA, 3 bp, Homo sapiens
  chr14:104231445-104231448
  hypo
tgc

SEQ ID NO: 27938 - DNA, 83 bp, Homo sapiens
  chr14:104335354-104335437
  hypo
tgggcaagctggggctcagggcggtcagggctggcctaaagacatagcgaagtcggccgggcgcggtggctcacgcctgtaat

SEQ ID NO: 27939 - DNA, 68 bp, Homo sapiens
  chr14:104335676-104335744
  hypo
cgagactccgtctcaaaaaaaaaaaaaagacggcaaactggggcagcgttgggtggcaacaagccaaa

SEQ ID NO: 27940 - DNA, 71 bp, Homo sapiens
  chr14:104349435-104349506
  hypo
attgcgcttgtcgaggcgacacagacagacctgatgcagcccctgccgctgctctgcgacccagttccctg

SEQ ID NO: 27941 - DNA, 130 bp, Homo sapiens
  chr14:104353833-104353963
  hypo
tgccagggccatgagacgaaagctcagagctcctggtgggagctcggtctcccgccccatccagctggagggtggatggtgccttctcacctctgccccctcatctacccagacacgctgtgccctcctc

SEQ ID NO: 27942 - DNA, 130 bp, Homo sapiens
  chr14:104394172-104394302
  hypo
cctcacctcagccatcagggccgcctgccctcccctataaccctgggtggtcctccgtctggcgcattcccccgtatcctgcaggggtctgcctggcgttactttctccgagaccttcctgaccttcttc

SEQ ID NO: 27943 - DNA, 272 bp, Homo sapiens
  chr14:104395315-104395587
  hypo
gcactcaggttttcaggataacggagcggagggcagaggtcccataggccccttccctcccagagtttcccctgtgagcatctgcgtaaggtgtgggtatttgtgacagtcggcgaacctgcatcgctgcgtcttcgtcacccggaggccatcgttacaggagggttcacgcctcgtactggacgttctgtgggtttggacaaacgcctaacgtcacgcattacagagttcactgacctacagatcttctcggccccactgttcctgcctcc

SEQ ID NO: 27944 - DNA, 30 bp, Homo sapiens
  chr14:104547817-104547847
  hypo
ctcctgggccccacgcggagttgttgtcag

SEQ ID NO: 27945 - DNA, 30 bp, Homo sapiens
  chr14:104548474-104548504
  hypo
tccaccttgctccaccgtggccagcttctg

SEQ ID NO: 27946 - DNA, 30 bp, Homo sapiens; identical to SEQ ID NO: 9992
  chr14:104604724-104604754
  hypo

SEQ ID NO: 27947 - DNA, 30 bp, Homo sapiens; identical to SEQ ID NO: 9993
  chr14:104605280-104605310
  hypo

SEQ ID NO: 27948 - DNA, 697 bp, Homo sapiens
  chr14:104618083-104618780
  hypo
ttgttagccgcaggccggggcgcttaatgacggctggggaaggtggacagttaacaaggacattgtgagcctcacgatgaagcccgatcattattttcctgctgggcttgtgtgggtgaaagtgtttgggcttattaatctgttacggatggtgcggtggccaggcgggagctcgcagcgtcatggacggtgagagtgctggtgggctctgggtgccggccctccctccccaggcactgaccctgcctttgtcccttgctgtcctcaggatccttgcctctctgccctgcttctcgacaagctaccagcacctggggccctgccagcctgtcgcccagaggccgagcgccgctgtgacgtctgcgccacacacctgcagcagctcacacgggaggccatgcacctgctgcaggcccctgccagccatgaggaccttgacgccccccatggaggccccagcctcgcaccccccagcaccacgaccagctcgagggacacgccaggaccagcgggtcctgcagggaggcagccaggacgagctgggccagacaggaccaaggggctggcctggtcccccgggcccagtgtccaggtgtctgtagcacctgcgggtcttggaggggcgctgagcacggtcaccatccaggcccagcagtgcctggagggcatgtggagtgtctcgcgggtcaacagcttc

SEQ ID NO: 27949 - DNA, 30 bp, Homo sapiens
  chr14:104621161-104621191
  hypo
gctggaggtgttgacggtggccctgaggag

SEQ ID NO: 27950 - DNA, 68 bp, Homo sapiens
  chr14:104623598-104623666
  hypo
gcgccacacatcaccgtacgtggggcaattagtgttcctgccaaatagttatcgtggtttcttctcta

SEQ ID NO: 27951 - DNA, 30 bp, Homo sapiens
  chr14:104624723-104624753
  hypo
cattgggggctgcccgggggaggcgcaggc

SEQ ID NO: 27952 - DNA, 30 bp, Homo sapiens
  chr14:104630658-104630688
  hypo
ttcaccacacccttcgccgggtggcatcct

SEQ ID NO: 27953 - DNA, 30 bp, Homo sapiens
  chr14:104637046-104637076
  hypo
ccgcctcctggcatcgacgcaccagaccca

SEQ ID NO: 27954 - DNA, 601 bp, Homo sapiens
  chr14:104639201-104639802
  hypo
ccaaagaggcccctgagatctcggtgcccctggttggcccccggggacgccagtagccataaaggctccttgcgtggtgtgtggtggggcctgacgcctgcgtggcccccaggcaagtcgtacaccatgatcgggaaggacagctcaccccagagcctgggcatcgtgccctgcgccatctcctggctcttcaggctcatcgaggagcgcagggagaggacgggcacccgcttctccgtccgggtctcagccgtggaggtgtgcgggcgcgaccagagcctgcgggacctgctggccgaggtggcccctggcagcctccaggacacccagtctccgggagtgtacctgcgggaggaccccgtgtgtggggcgcaggtgcgcctgcctactgtcccaccttgggggaggggggctgcacttggccctgagccactgaagacgccgctgcctctgcctttcctgcagctccagaaccaaagcgagctgcgggcacccacggccgagaaggcggctttctacctggatgcggccctggcggcccgcagcaccagccgagcgggctgtggcgaggacgcccgacgcagctcccacatgttgttca

SEQ ID NO: 27955 - DNA, 699 bp, Homo sapiens
  chr14:104641145-104641844
  hypo
tcttcccctgagactcagttccgctcccagcgtttggtgggacatggttggtggtgcctgctgtagttttcatcacagtgaccgcagcattggccctgtgctctggggagggtcggggaagcgggggcgtgtaggggagactgggctcggcagctccacttttcttcccccagtacgcctccagctcctctggcggggagagctcctgtgaggaaggccgggcccgtcggcccccgcacctgcggcccttccacccacgcactgtggccctggaccccgaccgcacgcctccctgcctgcccggtgaccccgattactcctccagcagcgagcagtcctgtgacacggtcatctacgtggggcccggtggggcggcgctgtcagaccgggagctcaccgacaacgaaggtccgcctgacttcgtgcccatcatccctgccctgagccgccaccggccctccaagggtccccgagacgcagaccacttccgctgcagcaccttcgcggagctgcaggagcggctggaatgcatggacggcaacgagggtccctcaggaggtccaggtggcaccgacggagctcaggccagccccgcccgagggggccggaagccctcgccaccagaggctgcatcccccaggaaggccgtgggcaccccgatggctgccagcacccctcgaggcagttctggtccagaca

SEQ ID NO: 27956 - DNA, 1071 bp, Homo sapiens
  chr14:104643152-104644223
  hypo
agaagggtctggctcccaaggcgggcttcctcccgaggcccagtggggcggcccccccggccccacccacgcggaagtccagcctggagcagaggagcagcccggcctcggcccctccgcatgctgtgaacccggcgcgggtcggggctgctgctgtccttcgaggggaggaggagcccagacccagcagccgggctgaccactctgtccccagggccacgtccagcctgaaggcccgggccagcaaggtagaagcagcacaccgtcttgccggacacgcgtctctggagcggtacgaaggcctggcgcacagcagcagcaagggccgggaagcccctgggcggcctccccgggctgtacccaagctgggtgtgccaccctccagccccacacacggtccagctcccgcctgtaggagcggcgcagccaaggctgtgggggcccccaagccccctgttggtggaggcaagggccgtggcctagtggctggtgggtcgcgggctctggggccttcggtgaagctgtctacggcctctgtgacgggcaggagccctggcggccctgtggccggtcccagagcagccccacgggccgggcccagtgtcggggcgaaggctggccggggtaccgtcatgggcacaaagcaggcgctccgggctgctcacagccgcgtccatgagctgtcagccagtggagccccgggccgaggtggctcctcgtggggctcggcggactcagacagcggccatgacagcggcgtgaacgtgggggaggagcggccacccacgggcccggccctgccctccccctacagcaaggtgaccgccccacggcggccccagcgctacagcagcggccatggcagcgacaacagcagcgtgctgagtggagagctgccgcccgccatgggccgcaccgcccttttccaccacagcggtggcagcagtggctatgagagcctgcggcgcgacagcgaggccaccggcagcgcctcctccgcccctgactccatgagcgagagtggggctgcctccccaggcgcccgcacccgcagcctcaagtcccccaaga

SEQ ID NO: 27957 - DNA, 30 bp, Homo sapiens
  chr14:104645539-104645569
  hypo
catgcctgagcccccgcccgccctgcctcc

SEQ ID NO: 27958 - DNA, 437 bp, Homo sapiens
  chr14:104645936-104646373
  hypo
cctccccagttgaggtggacccggagctggagcccgagtcggccgagtacctggcggccctggagcgagccacggcggccctggagcagtgcgtgaacctgtgcaaggcgcacgtcatgatggtcacctgcttcgacatcagcgttgcagccagtgctgccatcccggggccgcaggaggtggacgtctgaggctgggcgccggacaagaggagggggcgtgcagcgggctggaggacgggacgtgggacggagcgaggatgtggtgggggctgcggggggaggatgcggaggggtttctgtgcaggacgggagtctcagagaggagacggagtgtgggggagggagggccggccacgcggtggacagagcgagggtgccagggtgaccagaagaccgtcaccacccgacagcaacgcaagtgcctttgaccttgat

SEQ ID NO: 27959 - DNA, 31 bp, Homo sapiens
  chr14:104733598-104733629
  hypo
gaggtgcacacacacttcacacgtgcacaca

SEQ ID NO: 27960 - DNA, 91 bp, Homo sapiens
  chr14:104733748-104733839
  hypo
cacacacacgtgcacacacactcccacgcccacacatgcccacatgcccacaagcccacttccccgagacggtagccatgggttcatctgg

SEQ ID NO: 27961 - DNA, 246 bp, Homo sapiens
  chr14:104800546-104800792
  hypo
aggacctcagcctgtatgtgccgggggatgttcgtgcccaacagaggccacttgtctctgggccggggaggcaccgggtggccgtgcctgtcagggcctccttagacagtgccctctcgggccagccggcggctgcccaggtcgggaacagatatgtcgccggcgacaccattatctcccgggcgaacggcgacgtctccgcagccaggcagagcccaggctgccgtgtaattggaccattcagaa

SEQ ID NO: 27962 - DNA, 30 bp, Homo sapiens
  chr14:104854696-104854726
  hypo
ctcggggcggccctcgccccgtcggcgact

SEQ ID NO: 27963 - DNA, 231 bp, Homo sapiens
  chr14:104896009-104896240
  hypo
ctctgtaacttagcacgcgtgctcgtccagcggcctttgctctgtgtgtgactgtccgtgttgctgctcaggttgccctgcgtttaggcagcaccctatccgttcatccgtcccactgcgggcgcagcaccctagccagtcattcgtcccactgcgggcgcagcaccatatccattcatccgtcccactgaggaggcagcaccctatccattcatccgtcccgctgcggga

SEQ ID NO: 27964 - DNA, 180 bp, Homo sapiens
  chr14:104897580-104897760
  hypo
atatccattcatccgtcccactgcgggcgcagcaccatatctgttcattcatctcactgcggaggcagcaccatatccattcactaattccactgcggtggcagcaccctatccattcatcgtcccactgcgggctcatctgggtcttcgtggagccacggtcctgcttcagtagatcca

SEQ ID NO: 27965 - DNA, 30 bp, Homo sapiens
  chr14:105102962-105102992
  hypo
gcaggaacggtggtcgtgtgggaaaggata

SEQ ID NO: 27966 - DNA, 30 bp, Homo sapiens
  chr14:105103479-105103509
  hypo
cacccactgaggaacgggcaccacccgtcg

SEQ ID NO: 27967 - DNA, 115 bp, Homo sapiens
  chr14:105153067-105153182
  hypo
ccttctgggcctgcaagtggccgcctgctgcatgcagggctgtcctgactgcacggcggcgccaacatcaggctgggaggatttctctcagaacgcccacacctgcctgcctgtt

SEQ ID NO: 27968 - DNA, 31 bp, Homo sapiens
  chr14:105175828-105175859
  hypo
tacctctgccctgaaccgtgagccacaggga

SEQ ID NO: 27969 - DNA, 30 bp, Homo sapiens
  chr14:105181887-105181917
  hypo
tcctgcaggcaggacgcaacctcagtgctg

SEQ ID NO: 27970 - DNA, 30 bp, Homo sapiens; identical to SEQ ID NO: 9996
  chr14:105190143-105190173
  hypo

SEQ ID NO: 27971 - DNA, 36 bp, Homo sapiens; identical to SEQ ID NO: 9999
  chr14:105196123-105196159
  hypo

SEQ ID NO: 27972 - DNA, 30 bp, Homo sapiens; identical to SEQ ID NO: 10000
  chr14:105196508-105196538
  hypo

SEQ ID NO: 27973 - DNA, 145 bp, Homo sapiens
  chr14:105204810-105204955
  hypo
gacgcggtgccctgagcggttgttggctggagccttcctgagggtttctcccacggaggggactggcaggggtgggttcccaacatagctggcccagctcatcacccgccggctctacccgcgcagaaagcgagtgagctgggca

SEQ ID NO: 27974 - DNA, 31 bp, Homo sapiens
  chr14:105208946-105208977
  hypo
gctgggaaagccaacacggggaggggcggac

SEQ ID NO: 27975 - DNA, 45 bp, Homo sapiens
  chr14:105223768-105223813
  hypo
accacatgttacatctcgagtcctttctctcgagcctttcttcag

SEQ ID NO: 27976 - DNA, 95 bp, Homo sapiens
  chr14:105236574-105236669
  hypo
ctctcaaatgcacccgagaaataaaaaccattaaatacagatcatggcacgaggccgcctctccatccctccaagctatcgtccagcgcagtcca

SEQ ID NO: 27977 - DNA, 30 bp, Homo sapiens
  chr14:105244256-105244286
  hypo
gctcctggatggtccgatctgccccagtat

SEQ ID NO: 27978 - DNA, 59 bp, Homo sapiens
  chr14:105245407-105245466
  hypo
catgctgggaggcccacgtgtccccagcctcccacctagcagggcgcctgggtctccat

SEQ ID NO: 27979 - DNA, 30 bp, Homo sapiens; identical to SEQ ID NO: 10001
  chr14:105246536-105246566
  hypo

SEQ ID NO: 27980 - DNA, 30 bp, Homo sapiens
  chr14:105248619-105248649
  hypo
gccactccccgggacgctaactgagcggga

SEQ ID NO: 27981 - DNA, 214 bp, Homo sapiens
  chr14:105268589-105268803
  hypo
cgagcggacacactcgggtgagaagccctatacgtgtgtgcagtgtggcaaaagttttcagtactcccacaacctgagccggcacaccgtagtgcacactcgagagaagccgcatgcctgccggtggtgtgagcgccgtttcacgcagtccggggacctctaccgccacgtccgcaagtttcactgtggcctcgtcaagtcccttctggtgtga

SEQ ID NO: 27982 - DNA, 30 bp, Homo sapiens
  chr14:105271515-105271545
  hypo
ccctggcgggagcacggccttcctttccag

SEQ ID NO: 27983 - DNA, 30 bp, Homo sapiens
  chr14:105287865-105287895
  hypo
ttgccggcctgcaacgcaggagcgggtcgg

SEQ ID NO: 27984 - DNA, 328 bp, Homo sapiens; identical to SEQ ID NO: 10003
  chr14:105330980-105331308
  hypo

SEQ ID NO: 27985 - DNA, 31 bp, Homo sapiens; identical to SEQ ID NO: 10004
  chr14:105331605-105331636
  hypo

SEQ ID NO: 27986 - DNA, 41 bp, Homo sapiens
  chr14:105350205-105350246
  hypo
gaccccctggccaaggcggcctcggccgctggggtgccctt

SEQ ID NO: 27987 - DNA, 319 bp, Homo sapiens
  chr14:105457658-105457977
  hypo
cccgggaacactgtttttagagttcttaacagccatacgcctcttggcttgtgcgcgtctcggcttgcgggtaaaggccaggcgccccgctgcgtgcctcgggccgtgcctcatgatctcctcagaaggctctcaaggtcaccttttaacaagtgcatctgttttccagtaacgaatccagaaaactctggagagcccttcagagcatacacaccacgtctacttctcagcgcctctggagcgagtcccgttgccaggagaacttctttcttgttctcggaatagatgctgcgcagaaggtaggcggtttgggttgaca

SEQ ID NO: 27988 - DNA, 116 bp, Homo sapiens
  chr14:105458242-105458358
  hypo
cactcatgccactgccgccgccacgcacatgccaccacgcacacgccgccacgcacacgccgccacacacacgcctcacacgccgccatgcacacacctcacgccaccacatgccg

SEQ ID NO: 27989 - DNA, 191 bp, Homo sapiens
  chr14:105469724-105469915
  hypo
gcccacaaatcctgttggcaacggtggggacgcacctcccctaccttaacccatagcagctacagggtatcttcccgtgtaaactgttgccaagcggacactgacaattctggcatgttctggactctactatgtacctcaatttttaaaagttaaaaaggaaataaaggggccgggcgtggtggctcacg

SEQ ID NO: 27990 - DNA, 21 bp, Homo sapiens
  chr14:105470154-105470175
  hypo
gacagcaagactccatctcaa

SEQ ID NO: 27991 - DNA, 31 bp, Homo sapiens
  chr14:105477331-105477362
  hypo
aacagcctctgcctggcgctccacagggggg

SEQ ID NO: 27992 - DNA, 30 bp, Homo sapiens
  chr14:105477630-105477660
  hypo
gccctcgagcccttcgcaggggcccggcct

SEQ ID NO: 27993 - DNA, 453 bp, Homo sapiens; identical to SEQ ID NO: 10005
  chr14:105512034-105512487
  hypo

SEQ ID NO: 27994 - DNA, 462 bp, Homo sapiens
  chr14:105517611-105518073
  hypo
tgtacagcctttcctccaagccgcacatggcgttcctgtctcctctgtagtaggaaaaggcagcggctttgacgaggagaaccaggtggtacggggcgaagcagactaggaagatgacaaccaccgcgatggccgagtgcttcaccttggccttctgggcagcgcttaagcccatgctctgcttgatgctcctgaaaatccggtggttggtgaaggcgatgatggagagagggatggcaaagccaacggtgaacctggcgtagtagtacccggcaatcctgctgtccatctgcagcatgtcaaagcaggtctccttgtcttccgtctggaacaccgggtagtgaacgatcccgacgaggatgaagatgcaggcggagatgaggatggcggtcctccggcggcggcggccccgactctccagcgcgtacaccacggccacgaagcggtcgcaggagatgcagc

SEQ ID NO: 27995 - DNA, 31 bp, Homo sapiens
  chr14:105533294-105533325
  hypo
actgggtggtctgtcacgttcaccaggcctc

SEQ ID NO: 27996 - DNA, 174 bp, Homo sapiens
  chr14:105538392-105538566
  hypo
aaaaccatccatccacactcccgccgtccatccacacgcccgcctgcccgtccacacgcccgcccgcccgtccacacgcccgcccgtccgtccacatgtctgaccgtccgtccacatgcccgccgtccatccacatggccgccatcgactgacgtcagcagacctcagtattcc

SEQ ID NO: 27997 - DNA, 142 bp, Homo sapiens
  chr14:105546719-105546861
  hypo
ccatctgtataccttctgtggcgctctgtttgcgtggctgtgcaatgggatggcattgcgtttaatctacactcgcctaacgagaaattacgtggcgcgtcttttcatgttcgtatctgccgtctgtataccttctgtgact

SEQ ID NO: 27998 - DNA, 31 bp, Homo sapiens
  chr14:105603443-105603474
  hypo
gaaagccattttgtgccgcactttgatcacg

SEQ ID NO: 27999 - DNA, 40 bp, Homo sapiens
  chr14:105612251-105612291
  hypo
tgggcgctcagggcctcgggctggccggccagcagacaag

SEQ ID NO: 28000 - DNA, 30 bp, Homo sapiens
  chr14:105612772-105612802
  hypo
cacccaggagcttccgtgtgggaacggagt

SEQ ID NO: 28001 - DNA, 30 bp, Homo sapiens
  chr14:105613768-105613798
  hypo
atcaggtggccccccgtggtatgccaagtc

SEQ ID NO: 28002 - DNA, 30 bp, Homo sapiens
  chr14:105615444-105615474
  hypo
tcaggagtcaggcccgcccctgccccacca

SEQ ID NO: 28003 - DNA, 53 bp, Homo sapiens
  chr14:105639400-105639453
  hypo
gagacaccaaagatgacgccgagggtcttggggatgtccgggtcgtctgcaaa

SEQ ID NO: 28004 - DNA, 651 bp, Homo sapiens
  chr14:105687738-105688389
  hypo
tcccagtgagggtgacgagactcactgcattctggcgtcggcacacacccaattcttcacgccaggaccactgacgcccacacagccccattggggggactggtggtgccaccacccaagcccaccgcccgagaccaccacacctcccgacagaggatggcagcatccggctctccccatgagaggcacacgcctgaaagatctcccgatgacctcagcgtcccccagggccccatcagaactcactggggtcgctgctctgagaggagatgcattcgcggatggagtctgagatgcccaggctggctgcagtggggagggggtccagcagggaccccagggccggaggtctgccgccccactcggggcttcctgctgcttccgagctgccgggggcaccaccaaggagctcccggtataagtctttgttcaggtggctggccgcggcttccagctcctcgtcctctgtgtcctcctcgccacacaagctggacgcggtgtcctcggtggagcctaggtgtacacaatccacctgttaaccaggcagagggccagggtgcccgcttttgtgacaaaaaacaatgctaccaagctgccaggtaacccatagaacggctgtcagtgcacggtgcctggcggtcaggtgccaaa

SEQ ID NO: 28005 - DNA, 99 bp, Homo sapiens
  chr14:105688873-105688972
  hypo
gaaaagaaaaccaggccgcacttcccagacagggggaacacgctcccttgcacttccacgcatggtgctaaccctttggagacaacctgatcagttctt

SEQ ID NO: 28006 - DNA, 443 bp, Homo sapiens
  chr14:105689522-105689965
  hypo
gtctcaaaaacaacaaaaaaagacatacacacttgcctttcacataacccagcaatttcactcctcagcaattgacccaaaaggaaatcaacgtccacacaaggacttgtacacgagtgttcacgagcgcatctgaaacagcctcaaacgtgcaatgtcctctaacagatgaatggctacacaccctcagcgtgctgaaggactaccgactgccacacaatacaaacgaacaaaccattgatgcgtgactcaacacacaccctcagcgtgctgaaggactaccgactgccacgccacaacacaaatgagcaaaccattgatgcgtgactcaacataattacactgtgaaaaaagccgaagggaaaaacatatactatgtgatcctactcctacggaattctacagaatacaactaatttatcgtgaaaaaagtagctcactgg

SEQ ID NO: 28007 - DNA, 31 bp, Homo sapiens
  chr14:105691546-105691577
  hypo
tgttctcaggccctcccgtggctcctactaa

SEQ ID NO: 28008 - DNA, 114 bp, Homo sapiens; identical to SEQ ID NO: 10007
  chr14:105714302-105714416
  hypo

SEQ ID NO: 28009 - DNA, 31 bp, Homo sapiens
  chr14:105729868-105729899
  hypo
cacctgggtcctgccacgatccttcagccgg

SEQ ID NO: 28010 - DNA, 30 bp, Homo sapiens
  chr14:105739109-105739139
  hypo
ggccatcttccggccgcgggtcaggtgcct

SEQ ID NO: 28011 - DNA, 30 bp, Homo sapiens
  chr14:105778026-105778056
  hypo
gctctaagggtgaccgtgggaactgtccac

SEQ ID NO: 28012 - DNA, 136 bp, Homo sapiens; identical to SEQ ID NO: 10010
  chr14:105781849-105781985
  hypo

SEQ ID NO: 28013 - DNA, 30 bp, Homo sapiens
  chr14:105792838-105792868
  hypo
aaggagagggatggcggctcaggcttcagg

SEQ ID NO: 28014 - DNA, 30 bp, Homo sapiens
  chr14:105793864-105793894
  hypo
cagcaggtgtctgccgctagcgctcggagc

SEQ ID NO: 28015 - DNA, 30 bp, Homo sapiens
  chr14:105794170-105794200
  hypo
gagccttggctcaccggcccaggccacccg

SEQ ID NO: 28016 - DNA, 95 bp, Homo sapiens
  chr14:105796584-105796679
  hypo
cgagaagcctggggtccgtgtgtgggacggaatggggacaggagcctccgagaagcctggggtccgtgtgtgggaaggaacggggacaggagcct

SEQ ID NO: 28017 - DNA, 9 bp, Homo sapiens
  chr14:105802372-105802381
  hypo
agcagggca

SEQ ID NO: 28018 - DNA, 30 bp, Homo sapiens; identical to SEQ ID NO: 10011
  chr14:106326603-106326633
  hypo

SEQ ID NO: 28019 - DNA, 30 bp, Homo sapiens; identical to SEQ ID NO: 10012
  chr14:106326872-106326902
  hypo

SEQ ID NO: 28020 - DNA, 31 bp, Homo sapiens
  chr15:22547260-22547291
  hypo
atccgcgggagcggtgcgggagacgtccgcg

SEQ ID NO: 28021 - DNA, 80 bp, Homo sapiens; identical to SEQ ID NO: 10014
  chr15:22892362-22892442
  hypo

SEQ ID NO: 28022 - DNA, 39 bp, Homo sapiens
  chr15:22929894-22929933
  hypo
ggtgagcacccacctcgcgcactgcgggccctcccgaga

SEQ ID NO: 28023 - DNA, 30 bp, Homo sapiens
  chr15:22945062-22945092
  hypo
ggaggcccagaagacggacgcggagtaccg

SEQ ID NO: 28024 - DNA, 30 bp, Homo sapiens
  chr15:22956997-22957027
  hypo
ccttgaccggccaccggtgggtgcgctctc

SEQ ID NO: 28025 - DNA, 143 bp, Homo sapiens
  chr15:22966141-22966284
  hypo
tccaatcccctttagacgtattacactaaaaaagaaaatgtaagtgcacagcagtgtccctacagacagtggaggcacgtcagacagacacccacggaccatggaaactgtaacttcatctttcacagtgagctaaaagaaat

SEQ ID NO: 28026 - DNA, 30 bp, Homo sapiens
  chr15:22968265-22968295
  hypo
gagacagacctgtggcggcctttttctacg

SEQ ID NO: 28027 - DNA, 30 bp, Homo sapiens
  chr15:22968628-22968658
  hypo
gctgtgctccggccccggctgccacatcgg

SEQ ID NO: 28028 - DNA, 104 bp, Homo sapiens
  chr15:22979737-22979841
  hypo
ggcgtcgccgttctcgtcacaggcagctgccccaccgtcctcgccgtgtctggaagcgcagcagagcccacgagctacctgaggattgcgttgggctcgaggcg

SEQ ID NO: 28029 - DNA, 36 bp, Homo sapiens
  chr15:23077085-23077121
  hypo
tccagcctgggcgacggaaaaagaccctgtcttaaa

SEQ ID NO: 28030 - DNA, 24 bp, Homo sapiens
  chr15:23084568-23084592
  hypo
tgagatggagtcttgctctgccgc

SEQ ID NO: 28031 - DNA, 96 bp, Homo sapiens
  chr15:23084831-23084927
  hypo
agccaccgcgcccggccgcaagatgttcttctactccggtttgtgtggtgttttcctcatgcttacgctagggccgtggattggggaggtgaggtg

SEQ ID NO: 28032 - DNA, 28 bp, Homo sapiens
  chr15:23217789-23217817
  hypo
caggctgagccaccgcgccctgccctgg

SEQ ID NO: 28033 - DNA, 30 bp, Homo sapiens
  chr15:25779326-25779356
  hypo
cagtgtctcgtaaggcgctattaggttaat

SEQ ID NO: 28034 - DNA, 302 bp, Homo sapiens
  chr15:25963360-25963662
  hypo
gcatgctggccctcttggcctcggcccggctgcccgtgcgccggtgggacttggtgctctgggttctgtgcaccacccggacactctggtggctgccgatgctgccgcgctgggacaccgagccccctctgggcaccacctcctcctcctccgagtctgcctcttggtacctggccagacgctgcgctgcggggagagggcgcagggtgaggcatcatgggggaaggctgggcggagcagaaagaaaccattcagtgtgttttaggttccgcgaggcttccggcagggcagccccacaggat

SEQ ID NO: 28035 - DNA, 30 bp, Homo sapiens
  chr15:25971133-25971163
  hypo
ggacacaccagagcacgtcgcagttcatct

SEQ ID NO: 28036 - DNA, 245 bp, Homo sapiens
  chr15:26026130-26026375
  hypo
atgcctgcaaggccctggaaacgtgggtcacttacaagctccgagaagccgcggaccacctgccgccgcttcaggttggtctctccatccaggttggcggtctcgatgtggcatagcccgtcggggtcactggaggagagcagcagaatgtccgcagggaagatttcgttgcagcgaagacgcacaaagtctcccacgtggatttctttccagaatcggttcacgtatttcttttcttccctaga

SEQ ID NO: 28037 - DNA, 30 bp, Homo sapiens
  chr15:26328926-26328956
  hypo
ctgctgtgcatacacggaacacgaagaaat

SEQ ID NO: 28038 - DNA, 405 bp, Homo sapiens
  chr15:27128172-27128577
  hypo
aagtcctccaaatttaccaaacgcactgcaaaagcccccggttgcagagggtgaccctggttactggactgagagcacgagagtgtgccagacgcgcagggtgggtcggtgcagcccagggacctgtgtctgtctttcagagcgcatcactcaggtgaggaccgacatctacgtcaccagcttcggcccggtgtccgacacggaaatggtaggtcccggggcatggctgggcagacaattcttactccgcgccgcaggcccccgcccaggccccgtgccctctgactgcctcgtgccttcctttccactaggagtacaccatagacgtgtttttccgacaaagctggaaagatgaaaggcttcggtttaaggggcccatgcagcgcctccctctcaacaacctcc

SEQ ID NO: 28039 - DNA, 30 bp, Homo sapiens
  chr15:27597394-27597424
  hypo
taatctccgtctcgcgctcactgttcacag

SEQ ID NO: 28040 - DNA, 31 bp, Homo sapiens
  chr15:28356880-28356911
  hypo
tctcatctcacgaggacgtttccccatctta

SEQ ID NO: 28041 - DNA, 31 bp, Homo sapiens
  chr15:28362499-28362530
  hypo
accccattgggcatgtcgccagtgatgtgcc

SEQ ID NO: 28042 - DNA, 31 bp, Homo sapiens
  chr15:28365195-28365226
  hypo
cgcgggggttagacaacgcagaagccatcag

SEQ ID NO: 28043 - DNA, 31 bp, Homo sapiens
  chr15:28390067-28390098
  hypo
ccaagctctcccaagccgaagtgcacagtga

SEQ ID NO: 28044 - DNA, 217 bp, Homo sapiens
  chr15:28517076-28517293
  hypo
accaacaaagcaggccgctattttcgttgttcttttctggtatttatttaaaagtgaatgtttcaagcttggttttgtgctgacaaggaagtcagtgctcactgatccgagtcttctccacaaacaagtgacctcccacacctgtctcatctgactcgctgctattaccaccaaacacacacacgccagagaaaaacactgccgttgacatgcatgc

SEQ ID NO: 28045 - DNA, 30 bp, Homo sapiens
  chr15:28519576-28519606
  hypo
gaggtccgcatcctcgcctgggcgcacaca

SEQ ID NO: 28046 - DNA, 87 bp, Homo sapiens
  chr15:28900533-28900620
  hypo
ctatgtgctcctctgacgtgccgttactcagaggtgagtggccgtctcctttccctgtgccctggtgaagagcggtgcagcagcttc

SEQ ID NO: 28047 - DNA, 45 bp, Homo sapiens
  chr15:29101262-29101307
  hypo
ttttttgtaatcccagatactcgggagactgaggcaggagaatcg

SEQ ID NO: 28048 - DNA, 33 bp, Homo sapiens
  chr15:29101366-29101399
  hypo
gggcgacagaacgaaactgtgtctcataaaaca

SEQ ID NO: 28049 - DNA, 31 bp, Homo sapiens; identical to SEQ ID NO: 10032
  chr15:29107370-29107401
  hypo

SEQ ID NO: 28050 - DNA, 87 bp, Homo sapiens
  chr15:29111212-29111299
  hypo
tgtacctgatatatagcagcccgtcagtatttgttgaaggaaagaaatatgccaccctggccgggcgccttggctcacacctgtaat

SEQ ID NO: 28051 - DNA, 198 bp, Homo sapiens; identical to SEQ ID NO: 10033
  chr15:29130849-29131047
  hypo

SEQ ID NO: 28052 - DNA, 243 bp, Homo sapiens
  chr15:29236504-29236747
  hypo
cttgccatcctctattttgtacgctcagtcaccccagaaaattgctccggcccttggatttacctccgtgtcactgtccatccggtaccctctgcctgggatgcctcctgggtctccatcacccgcctcactcgtttttcctctgcacatggcatctacttccgcccttccgcaggacaccttcccaggctgggtctggaccaccctgcggactcgctcctcgcaatactggccacatgccct

SEQ ID NO: 28053 - DNA, 39 bp, Homo sapiens
  chr15:29302742-29302781
  hypo
gagccaccacacccggccgggagttctttatatagttag

SEQ ID NO: 28054 - DNA, 489 bp, Homo sapiens
  chr15:29346369-29346858
  hypo
gagggcatcacctactacatccgctactgccctgaggacgacagctacctagagggcatggactgcaacggggaggagtacctggcccacagtgcacaccctgtggacactgatgagtgccaggaggcggtggaggagtggacggactcggcgggcccgcacccccacggccacgaggctgaaggcagccaggactacccagacggccaactgcccattccggaggatgagccctccgtccttgaggcccatgaccaggaagaagatggtcactactgtgccagcaaagagggctaccaggactactaccccgaggaggccaacgggaacaccggcgcctccccctaccgcctgaggcgtggggatggggacctggaggaccaggaggaggacattgaccagatcgtggcagagatcaagatgagtctgagcatgaccagcatcaccagcgccagtgaggccagccccgagcatgggcctgagccaggg

SEQ ID NO: 28055 - DNA, 157 bp, Homo sapiens
  chr15:29398811-29398968
  hypo
gcagctggagaagcacaagggcgagatcctgggcgtggtggtggtggagtcgggctggggctccatcctgcccacggtgatcctggccaacatgatgaatggcggcccggctgcccgctcggggaagctgagcatcggggaccagatcatgtccatc

SEQ ID NO: 28056 - DNA, 31 bp, Homo sapiens
  chr15:29404344-29404375
  hypo
gcctggggcagccactcggcaccttgtatcc

SEQ ID NO: 28057 - DNA, 526 bp, Homo sapiens
  chr15:29410105-29410631
  hypo
tgtctgccccctctttaaaatcgatctacacacatccacgcacatgcgaccccgaggaaacgaaacccactctagaaaacgcgaccttggccgcacctaaagcagccagccgtgagtgcagaccccttggccagcgtggcgcagtggccctgagcagtagtggcatgtgtgtagatcaagtcggatctagtccagctcggttcattagcgatccatgtaatctgacgtcatcttgtctcgaagtctctttttttggcccaggccttgaagaatacactgtgacttaagaagccttaccacgcagtaactaaagctttaggatgactgtattcgaggagtgccgtgtgttgcatgcagctacccgtaggaagacttcgcgcatatcactaataaacctgaagtcgtgatgaaaagccgtgtgtgtgactggtctgttacctcagcggcgggtgcccgcctgtcctttcattcacagcttggatgcggctctgcaaattcactatgcggtggcagccacagctgctct

SEQ ID NO: 28058 - DNA, 282 bp, Homo sapiens
  chr15:29415481-29415763
  hypo
ttctgccaagaacatctgtggcgccaggcgttggtgtccacggtcagaaatgtggctccttcatacctggtccagaacgtcagcgccgaagacggcctcctcctcgaggcgctcctcgttggtgacagccaagcgcatggcacccaccatgtgctgtgcctcggtggggagggcacagtgtgagtgttccaaaaacttggccaccaaaaccctggcatccgcataggccttgctgtccactaaagagcgtggccgctctttggaggtcgctgggaagggctc

SEQ ID NO: 28059 - DNA, 95 bp, Homo sapiens
  chr15:29417873-29417968
  hypo
gactgggtgtgagttctccagcgccgggggtgcccaagactcccggggagctactgtgaaatgcaaattcctgcgctgctggccacagggacctg

SEQ ID NO: 28060 - DNA, 31 bp, Homo sapiens
  chr15:29418631-29418662
  hypo
atgggctggaacctggcgtagcagtgccctc

SEQ ID NO: 28061 - DNA, 61 bp, Homo sapiens
  chr15:29428199-29428260
  hypo
cctaccagcacaaagctcagacgcacctgggctgtgactcgtggctgcagaaatggaactg

SEQ ID NO: 28062 - DNA, 105 bp, Homo sapiens
  chr15:29448968-29449073
  hypo
agtggaaacatgagatgcctgcgcgtgggccagggactgtgggagagaagcagtcttaacgaacacctcagcaggccaggcgcagtggctcatgcgaggcgggag

SEQ ID NO: 28063 - DNA, 30 bp, Homo sapiens
  chr15:29637535-29637565
  hypo
gtgagcagctcagccgagtggggctagcgg

SEQ ID NO: 28064 - DNA, 594 bp, Homo sapiens; identical to SEQ ID NO: 10040
  chr15:30113708-30114302
  hypo

SEQ ID NO: 28065 - DNA, 537 bp, Homo sapiens; identical to SEQ ID NO: 10041
  chr15:30114349-30114886
  hypo

SEQ ID NO: 28066 - DNA, 31 bp, Homo sapiens
  chr15:31115691-31115722
  hypo
agtaaaaatgaggaaacgcctcagtgcgtgc

SEQ ID NO: 28067 - DNA, 67 bp, Homo sapiens
  chr15:31188954-31189021
  hypo
gcctgagcctccatgccaggccgatctattcctttctgattaataaattacgccgggcgcggtggct

SEQ ID NO: 28068 - DNA, 56 bp, Homo sapiens
  chr15:31194967-31195023
  hypo
atcaataattacacaacgctagccactgctgcaggcagcagcgattttatagtaaa

SEQ ID NO: 28069 - DNA, 35 bp, Homo sapiens
  chr15:31289999-31290034
  hypo
ttttaaaacatatctgcaggccgggcgcggtggct

SEQ ID NO: 28070 - DNA, 34 bp, Homo sapiens
  chr15:31290273-31290307
  hypo
aaaacgagactccgtctcaaaaaaaaaacaaaaa

SEQ ID NO: 28071 - DNA, 30 bp, Homo sapiens
  chr15:31358308-31358338
  hypo
tttccagcagccttcgcagcttcacctcgg

SEQ ID NO: 28072 - DNA, 158 bp, Homo sapiens
  chr15:31395007-31395165
  hypo
ggtgagtggctcccacgtgctttgctggagcgcgcacagcccctgggcgcacaatgaccgcagcagcctccctggcctggctcccgagtcttctttcttgaactggtgttggctcctgaggcctgagagagtcacggcttcagcgggaacccttccgg

SEQ ID NO: 28073 - DNA, 241 bp, Homo sapiens
  chr15:31533431-31533672
  hypo
aacatccttacaccccgtgcgcaccctcatacgtctatccactacctcttccctggggcctttctgtccctgaacttctggtctcctcccaggctcctgaccataagcccagccactccccactgcccataaatccacggatgtttttaccttgggccttggaaacatgaagtgaatgaccaggtgcgccacagaatgctctgcccattaggaagatgttcatcgtcggcagatggtgact

SEQ ID NO: 28074 - DNA, 15 bp, Homo sapiens
  chr15:31620728-31620743
  hypo
aaaggaatgccctgg

SEQ ID NO: 28075 - DNA, 173 bp, Homo sapiens; identical to SEQ ID NO: 10044
  chr15:31620800-31620973
  hypo

SEQ ID NO: 28076 - DNA, 30 bp, Homo sapiens
  chr15:31695412-31695442
  hypo
cttttgctctggtccggataactctgggca

SEQ ID NO: 28077 - DNA, 123 bp, Homo sapiens
  chr15:31851282-31851405
  hypo
gcatctccagggggaactgctcgttgttgcattcacttgccacgtgggaccgggccagggagacgatggctgagctggcgtgggaaatcccccgggaaagccgcttttctgcagggggagaag

SEQ ID NO: 28078 - DNA, 333 bp, Homo sapiens; identical to SEQ ID NO: 10046
  chr15:32162834-32163167
  hypo

SEQ ID NO: 28079 - DNA, 395 bp, Homo sapiens; identical to SEQ ID NO: 10048
  chr15:33010280-33010675
  hypo

SEQ ID NO: 28080 - DNA, 36 bp, Homo sapiens
  chr15:33549939-33549975
  hypo
aaaaagagttcccaggctgggcgtggtggctcacgc

SEQ ID NO: 28081 - DNA, 35 bp, Homo sapiens
  chr15:33550214-33550249
  hypo
cagagcgagactccgtctcaaaaaaaaaaaaaaga

SEQ ID NO: 28082 - DNA, 813 bp, Homo sapiens; identical to SEQ ID NO: 10051
  chr15:33602795-33603608
  hypo

SEQ ID NO: 28083 - DNA, 18 bp, Homo sapiens
  chr15:33603879-33603897
  hypo
cgccggcaactgctgctg

SEQ ID NO: 28084 - DNA, 30 bp, Homo sapiens
  chr15:33691031-33691061
  hypo
gactcgttcacatggcgagctgagcatgtc

SEQ ID NO: 28085 - DNA, 27 bp, Homo sapiens
  chr15:33691827-33691854
  hypo
gactccgtttcaaaaataaaaaaggaa

SEQ ID NO: 28086 - DNA, 28 bp, Homo sapiens
  chr15:33849587-33849615
  hypo
ttttttattgattttttgagacggagtc

SEQ ID NO: 28087 - DNA, 126 bp, Homo sapiens
  chr15:33954375-33954501
  hypo
tgtgagcaggaggacctgatgcggttccattaccacacgctgaggctctacagcgcggtgtgcgccctgggaaacagccgcgtggcctacgccctgtgcagccacgtggacctctcccagctcttc

SEQ ID NO: 28088 - DNA, 31 bp, Homo sapiens
  chr15:34395705-34395736
  hypo
ggtattgtgtcttcctcgataactttaatat

SEQ ID NO: 28089 - DNA, 30 bp, Homo sapiens
  chr15:34396313-34396343
  hypo
ataccagcaacgtccgggaaacagaatcca

SEQ ID NO: 28090 - DNA, 81 bp, Homo sapiens
  chr15:34467904-34467985
  hypo
gaactggatccctcacgcattactacgggaatgtaaaaatacattcaaactttggaaaatgtattttccaaatattacttg

SEQ ID NO: 28091 - DNA, 83 bp, Homo sapiens
  chr15:34546025-34546108
  hypo
catactttaaagtattcgcactagggagttgaaggaggtggtgaatgatgagagagtacttaatgggtacaaagtacattatt

SEQ ID NO: 28092 - DNA, 22 bp, Homo sapiens
  chr15:34546167-34546189
  hypo
agcacgtcgggaggccaaggtg

SEQ ID NO: 28093 - DNA, 30 bp, Homo sapiens
  chr15:34635788-34635818
  hypo
cgtaaagcgaaagagcgtaaagttatttta

SEQ ID NO: 28094 - DNA, 34 bp, Homo sapiens
  chr15:34636147-34636181
  hypo
gggcgcggtggctcacgcctgtaatcccaacact

SEQ ID NO: 28095 - DNA, 10 bp, Homo sapiens
  chr15:34728778-34728788
  hypo
aggcccctcc

SEQ ID NO: 28096 - DNA, 845 bp, Homo sapiens; identical to SEQ ID NO: 10055
  chr15:34728813-34729658
  hypo

SEQ ID NO: 28097 - DNA, 236 bp, Homo sapiens; identical to SEQ ID NO: 10056
  chr15:34729900-34730136
  hypo

SEQ ID NO: 28098 - DNA, 30 bp, Homo sapiens; identical to SEQ ID NO: 10058
  chr15:34903026-34903056
  hypo

SEQ ID NO: 28099 - DNA, 30 bp, Homo sapiens; identical to SEQ ID NO: 10061
  chr15:35047008-35047038
  hypo

SEQ ID NO: 28100 - DNA, 111 bp, Homo sapiens
  chr15:35310631-35310742
  hypo
agccactgcacccagcgtttaaagggaattctgatgtttgtttccatagacagtttttttcttagtaaggaatggatgtaggcacggtgcggtagctcacgcctgtaatcc

SEQ ID NO: 28101 - DNA, 118 bp, Homo sapiens
  chr15:35385330-35385448
  hypo
gtggcggtggcccaggcggcggcggcggacgggagcgtgacaggaggcggttgagagatcgtgaaagatctgggcgattctgagccatgccatttttaccttacgtctgctagaaagt

SEQ ID NO: 28102 - DNA, 51 bp, Homo sapiens
  chr15:35414091-35414142
  hypo
cagcggggcatcctgtcggtcttggtcatgagtcgccgggacagcagtttc

SEQ ID NO: 28103 - DNA, 78 bp, Homo sapiens
  chr15:35529458-35529536
  hypo
ctaaaacgcgcggccgtgttattgattgaattccagcggcgcgggagcctctgcagagaacgcgagagatgaagatgg

SEQ ID NO: 28104 - DNA, 30 bp, Homo sapiens; identical to SEQ ID NO: 10064
  chr15:36053807-36053837
  hypo

SEQ ID NO: 28105 - DNA, 15 bp, Homo sapiens
  chr15:37212638-37212653
  hypo
cgcccggtctatact

SEQ ID NO: 28106 - DNA, 31 bp, Homo sapiens; identical to SEQ ID NO: 10067
  chr15:37393697-37393728
  hypo

SEQ ID NO: 28107 - DNA, 35 bp, Homo sapiens; identical to SEQ ID NO: 10071
  chr15:38365201-38365236
  hypo

SEQ ID NO: 28108 - DNA, 37 bp, Homo sapiens
  chr15:39415442-39415479
  hypo
acagtgtcttcttggccgggcgcggtggctcacgcct

SEQ ID NO: 28109 - DNA, 31 bp, Homo sapiens
  chr15:39742874-39742905
  hypo
ctccaaatgcgagcctcgaagacggcatgaa

SEQ ID NO: 28110 - DNA, 31 bp, Homo sapiens
  chr15:39853006-39853037
  hypo
cgggtgtggtggctcacgcctgtaatcccac

SEQ ID NO: 28111 - DNA, 137 bp, Homo sapiens
  chr15:39881426-39881563
  hypo
ttcaaccacaatggagagcaccggtgtgagaacacggaccccggctacaactgcctgccctgccccccacgcttcaccggctcacagcccttcggccagggtgtcgaacatgccacggccaacaaacaggtacagtc

SEQ ID NO: 28112 - DNA, 37 bp, Homo sapiens
  chr15:39971425-39971462
  hypo
ccaagaagtccaaaaacgctaacggctaaggaataag

SEQ ID NO: 28113 - DNA, 319 bp, Homo sapiens; identical to SEQ ID NO: 10074
  chr15:40074996-40075315
  hypo

SEQ ID NO: 28114 - DNA, 294 bp, Homo sapiens
  chr15:40423134-40423428
  hypo
aattatattaattatcgattgttaataataattattaatattattcctgatatccagggggtcgaggatgacattgcttcctatacctcagaacacgtacacccccatgtgatgttgttcctaataaccagggggtagaggatgacgttactccaaatatcgccgtgggtgtacatcccttctgcgatcttgttgctaatacccaggcggggagaagacgatattaatcccaatattgcagaaggtgtagacctcccctgatattcaggggaaagagcacgatattgctcccaa

SEQ ID NO: 28115 - DNA, 30 bp, Homo sapiens
  chr15:40532165-40532195
  hypo
ggccctgagatgggcgtcagggagagggga

SEQ ID NO: 28116 - DNA, 135 bp, Homo sapiens
  chr15:40532790-40532925
  hypo
tgcctgaagggagtgccgcttcctgggctagagacaagcaccagcctgcagtggagaacgcaggaccccgctgcccagaaggagcagccacggtaaggtccccactgccgctgcgtgctccggattcctgggcta

SEQ ID NO: 28117 - DNA, 30 bp, Homo sapiens; identical to SEQ ID NO: 10077
  chr15:40559565-40559595
  hypo

SEQ ID NO: 28118 - DNA, 30 bp, Homo sapiens
  chr15:40577310-40577340
  hypo
cagctcccaggctccggggatgtccacctt

SEQ ID NO: 28119 - DNA, 492 bp, Homo sapiens
  chr15:40631662-40632154
  hypo
tgggcctccacctccttgctacgagccctgtctcccagggtgaggcttacaccgggaacctggctgatggtaacggtgaggccatcaggctggaggagtgctggtgtggtcacagccatccccccctgctctgcctgccgacggtcctcctggatctcctgtgggagggctgggggtcagcacacgccatggccccccaggtgcacagagacatagatgctgataggcctacacagagagacaccagtgggacaccagggggcagaggcgccacatcacacatccccaggaccctcaccaagcctctaagagggaccatgcccaccctacccctggccccagccccagaggcgcattgctgagcctgcagggagaccaccacgtgtggggcacagggagcggcagccaagtggtttctcctggccctgtggcagcccactcacctggtacctgcggagcaaggcctggttcttcttgcgcagggcaactatc

SEQ ID NO: 28120 - DNA, 34 bp, Homo sapiens
  chr15:40782123-40782157
  hypo
ggcggaccgccatcgccggcgctggaaactgctt

SEQ ID NO: 28121 - DNA, 25 bp, Homo sapiens
  chr15:40843287-40843312
  hypo
aaaatccatcctggcagggcacggt

SEQ ID NO: 28122 - DNA, 21 bp, Homo sapiens
  chr15:40848757-40848778
  hypo
caggtgcagtggctcccgctt

SEQ ID NO: 28123 - DNA, 20 bp, Homo sapiens
  chr15:40849017-40849037
  hypo
cagagcgagattccatctca

SEQ ID NO: 28124 - DNA, 22 bp, Homo sapiens
  chr15:40850999-40851021
  hypo
tctttctttttttttttgagac

SEQ ID NO: 28125 - DNA, 70 bp, Homo sapiens
  chr15:41044230-41044300
  hypo
cagctcctccacctcccgccgcagcgccacaaggctggtcagcacaaagtccaggcggtccagcaccttc

SEQ ID NO: 28126 - DNA, 57 bp, Homo sapiens; identical to SEQ ID NO: 10081
  chr15:41046992-41047049
  hypo

SEQ ID NO: 28127 - DNA, 26 bp, Homo sapiens
  chr15:41055007-41055033
  hypo
tctagaaaaccaatcacaggccggat

SEQ ID NO: 28128 - DNA, 126 bp, Homo sapiens
  chr15:41059414-41059540
  hypo
tctttgcagttatgaatactacgtcgatgaccctccccgcatagtcctggacaagctggaacgcaggggcttccgtgtgctgagcatgacgggggtgggccagacgctggtgtggtgtctgcacaa

SEQ ID NO: 28129 - DNA, 151 bp, Homo sapiens
  chr15:41082364-41082515
  hypo
tctgtgttacagatggggctgcgagactctctggggcccacagacccgtctcctgttgctctaattggtcctgaagtgtgggtcacggaaaaagttctcaaagaggagtagaaaattcaggtgtgggccgggcgcagaggctcacgcctgt

SEQ ID NO: 28130 - DNA, 30 bp, Homo sapiens
  chr15:41120696-41120726
  hypo
atcttggaggagtccgggtgggacttggac

SEQ ID NO: 28131 - DNA, 173 bp, Homo sapiens
  chr15:41121305-41121478
  hypo
ctgtggtcagattccgcagaagcagggtccctggctggcagggattcttactcagagcgtagcactactgggggcagagccccagctggtagatagagttggaggtcagttattgatggctcccgtaggaccagtgcccccagtgtctgggtgtgtccgaatgtaaactgcta

SEQ ID NO: 28132 - DNA, 30 bp, Homo sapiens; identical to SEQ ID NO: 10082
  chr15:41137004-41137034
  hypo

SEQ ID NO: 28133 - DNA, 433 bp, Homo sapiens
  chr15:41165166-41165599
  hypo
ctgccagtagctgccgcaaaggcccgggtgccccaggtctcagaagtctttggcctcctgcctactacttgctatgcagccatagctgctcaaacgaagcagaagaacttcttccagcggcagcgggagagggtgcgcacacctttggcattcagtttcttctccagccgggctttgtgctcaatggcactgagaatagccgagtcaaatacttccttcaagttcttctgcgtcaaggctgagcactcaaggtagcagcaggctcggatcttctcggccagaccctgagcctggggttggggcacggggccctcccggcccccctggtccagctgaattagtacgttgacatcgtccctcaggtcggcctgggtgcccaccagcagcacaggcgcctgggggttgtgcgtgcggatctcgggcagccatttct

SEQ ID NO: 28134 - DNA, 30 bp, Homo sapiens
  chr15:41304855-41304885
  hypo
ccttggcttctgcccgtggcaaactaaaaa

SEQ ID NO: 28135 - DNA, 34 bp, Homo sapiens
  chr15:41622888-41622922
  hypo
ccacgcccggcccgtaatcagtatttgtaaatga

SEQ ID NO: 28136 - DNA, 92 bp, Homo sapiens
  chr15:41732306-41732398
  hypo
gctgaatagtatttaccggtgccctgcatgtgcatattggagtgattgccttctgatcaactgtagtgataatttctttctttttttttttt

SEQ ID NO: 28137 - DNA, 29 bp, Homo sapiens
  chr15:42076231-42076260
  hypo
acctctacgctactgctttggagaaaagc

SEQ ID NO: 28138 - DNA, 38 bp, Homo sapiens
  chr15:42117756-42117794
  hypo
aagcagccttcccagccgctcctcgtggggggcctgta

SEQ ID NO: 28139 - DNA, 30 bp, Homo sapiens
  chr15:42129449-42129479
  hypo
ctggctgctggccccgggtccagcatggct

SEQ ID NO: 28140 - DNA, 103 bp, Homo sapiens
  chr15:42153324-42153427
  hypo
ctaggcatttgggaagcgaggagggcaggggtgaggtggcaagaatgggtcaggcccacacaggcactctagaagctccttggtgttcgcggtggggcctgcc

SEQ ID NO: 28141 - DNA, 31 bp, Homo sapiens
  chr15:42160260-42160291
  hypo
acctgcctcctgggccgcgaggatctcctcc

SEQ ID NO: 28142 - DNA, 31 bp, Homo sapiens
  chr15:42160910-42160941
  hypo
acctgggtcagggcctcgggtgaggcacatg

SEQ ID NO: 28143 - DNA, 31 bp, Homo sapiens
  chr15:42167446-42167477
  hypo
agtggtgctgaccacccgctgggcacacagg

SEQ ID NO: 28144 - DNA, 75 bp, Homo sapiens
  chr15:42193097-42193172
  hypo
agtgtagaagagctcgtcgtagacgggcttgtctttggccacgacccactcctcctcgtcggcgccctccttggc

SEQ ID NO: 28145 - DNA, 30 bp, Homo sapiens
  chr15:42289870-42289900
  hypo
tgaacaaggccccacggtatggactcttct

SEQ ID NO: 28146 - DNA, 51 bp, Homo sapiens
  chr15:42362996-42363047
  hypo
gtgttgatgaagtaggcggcgtccaccaggcagagccggggctccttgggg

SEQ ID NO: 28147 - DNA, 30 bp, Homo sapiens
  chr15:42387272-42387302
  hypo
ccctcacctccatgcggcgggccctaagaa

SEQ ID NO: 28148 - DNA, 31 bp, Homo sapiens
  chr15:42388237-42388268
  hypo
tacgcccgccgggatccgctgggggaaccta

SEQ ID NO: 28149 - DNA, 151 bp, Homo sapiens
  chr15:42434651-42434802
  hypo
cccaccctcagaacagcgtcccatcaccatcccagggctctgtgggtcagtcccaggcctggagcttcccttacctggggccaggtgtgtgcggaaggtacggttaaccagggggaagtgcagcacaatgggggagcgggggtcctcagcc

SEQ ID NO: 28150 - DNA, 121 bp, Homo sapiens
  chr15:42451756-42451877
  hypo
gctgttcttgccccccgcgtcccctctgctgtgcctaaacacctctcaggaacacttggcagcacgccattgtcagttccaggtccactcatcccctgcgtgttgccgggacccaccttcc

SEQ ID NO: 28151 - DNA, 69 bp, Homo sapiens
  chr15:42452452-42452521
  hypo
cagttaccatggagacgtaaaacactacacagaatgcgagccatcgggtccatgcggccagaagcttga

SEQ ID NO: 28152 - DNA, 121 bp, Homo sapiens
  chr15:42562565-42562686
  hypo
tcaaaaaacaacaacaaaaaataaagtgcctcaaatcctccaaaaacaatgaaatataaacacttcaaaatacgcagttagggctgggcatagagactcatgcctgtaatcccagctactc

SEQ ID NO: 28153 - DNA, 31 bp, Homo sapiens
  chr15:42717196-42717227
  hypo
ttcaaagatctcaagtcgtttgttgttctgg

SEQ ID NO: 28154 - DNA, 45 bp, Homo sapiens
  chr15:42784384-42784429
  hypo
aggtgtgagccaccgcgcccggccgcctatatttattattaaact

SEQ ID NO: 28155 - DNA, 31 bp, Homo sapiens
  chr15:43020577-43020608
  hypo
gcaccgtttgccctcccgccccaccccaggt

SEQ ID NO: 28156 - DNA, 31 bp, Homo sapiens; identical to SEQ ID NO: 10096
  chr15:43312163-43312194
  hypo

SEQ ID NO: 28157 - DNA, 30 bp, Homo sapiens
  chr15:43406103-43406133
  hypo
ctgccaggccgggcccggtggctcacgcct

SEQ ID NO: 28158 - DNA, 105 bp, Homo sapiens
  chr15:43467794-43467899
  hypo
tgtattttaaaagcacgttaatttggaaagtttagggaagcctttcagttggagtaagaggttagctgtgcgttaagaactgtagaaatagggaaagcgctggca

SEQ ID NO: 28159 - DNA, 20 bp, Homo sapiens
  chr15:43511836-43511856
  hypo
gtctctacagaataaaaaga

SEQ ID NO: 28160 - DNA, 31 bp, Homo sapiens; identical to SEQ ID NO: 10100
  chr15:43584165-43584196
  hypo

SEQ ID NO: 28161 - DNA, 112 bp, Homo sapiens
  chr15:44037225-44037337
  hypo
actcctgatagtgtgtcgcagcacagcttggctcaagccttgcaaatgctcgatgagagagaaagtatcgatgagacgtgaacgaatggcatcagctcggggaagctgcatc

SEQ ID NO: 28162 - DNA, 30 bp, Homo sapiens
  chr15:44121425-44121455
  hypo
cctaccaggagcgccgtgctccattcaaag

SEQ ID NO: 28163 - DNA, 31 bp, Homo sapiens
  chr15:44191954-44191985
  hypo
ctcttcagcctctctgcgtccaatgatggac

SEQ ID NO: 28164 - DNA, 927 bp, Homo sapiens; identical to SEQ ID NO: 10105
  chr15:44486763-44487690
  hypo

SEQ ID NO: 28165 - DNA, 31 bp, Homo sapiens
  chr15:45439951-45439982
  hypo
ccagaagtgcccaggccgaggtcaggaagca

SEQ ID NO: 28166 - DNA, 550 bp, Homo sapiens
  chr15:45444091-45444641
  hypo
tgctgttcactgaggcgcaccgagagaagttccaacgcagctgtctccaccagacggtgcaacagttcaagcgcttcattgagaactaccggcgccacatcggctgcgtggccgtgttctacgccatcgctggggggcttttcctggagagggcctactgtgagtgactttacttaccacgagccctgtccctaggcttgcaatgagtgatcgccctgggggtggggcctgcgataagtgccagccctgggtagggtaagtggagcctgtctgagtgaagactgtgcgggggaggcctgttgtgagtggcagccggccagggcctaccgcccctaaccagctctctgtcctctgcactgaccctcgcttgcctgcctgggccccctccacagactacgcctttgccgcacatcacacgggcatcacagacaccacccgcgtgggaatcatcctgtcgcggggcacagcagccagcatctctttcatgttctcctacatcttgctcaccatgtgccgcaacctcatcaccttcctgcgagaaaccttcctc

SEQ ID NO: 28167 - DNA, 165 bp, Homo sapiens
  chr15:45471639-45471804
  hypo
actttggcccttcacttcctacgctgcccctttctcccacacaagtgggctcacggccactcctctatgcctgctgccattcatcgcacagtgaactgcaaaccacacactccgaagaggcactcaaggtgctcagggcggggcgcagctgaggacaatagaacc

SEQ ID NO: 28168 - DNA, 263 bp, Homo sapiens; identical to SEQ ID NO: 10110
  chr15:45479774-45480037
  hypo

SEQ ID NO: 28169 - DNA, 650 bp, Homo sapiens; identical to SEQ ID NO: 10114
  chr15:45670188-45670838
  hypo

SEQ ID NO: 28170 - DNA, 117 bp, Homo sapiens; identical to SEQ ID NO: 10115
  chr15:45670932-45671049
  hypo

SEQ ID NO: 28171 - DNA, 515 bp, Homo sapiens; identical to SEQ ID NO: 10116
  chr15:45722444-45722959
  hypo

SEQ ID NO: 28172 - DNA, 833 bp, Homo sapiens; identical to SEQ ID NO: 10125
  chr15:48936812-48937645
  hypo

SEQ ID NO: 28173 - DNA, 888 bp, Homo sapiens; identical to SEQ ID NO: 10126
  chr15:48937709-48938597
  hypo

SEQ ID NO: 28174 - DNA, 25 bp, Homo sapiens
  chr15:49084196-49084221
  hypo
actcttttttttgaaacggagtttc

SEQ ID NO: 28175 - DNA, 247 bp, Homo sapiens
  chr15:49268663-49268910
  hypo
ggtcagtgtttctatcgagagctgagtcctctggccaggacctacgagcagggggacgccagtacaaattactggagccagccgtccggaaggcgcctatgcacacgtgttgtacagcaatgcgaacttgccctggttggggagaagtagcgggtgggaggtgggcaagtttcttcccagcaactatccgctgtccacactccgctactgcctcttccccagagagagaggccgccctgtattctgg

SEQ ID NO: 28176 - DNA, 140 bp, Homo sapiens
  chr15:49658850-49658990
  hypo
tggcaggggacagccgccgctgcggccccatcggactggtgggtggcgggtggggtggcgcggcgcggctcactaggtggggtaggctgggagtcccgccactgcgctgcctccgtggcgggggcggccgggctaggctg

SEQ ID NO: 28177 - DNA, 308 bp, Homo sapiens
  chr15:49698667-49698975
  hypo
tgcactgcaggcaggcgtgatcactcagggtgggggagggtctgctgttctccatgcttagcttcactcccacagcagcagctttggcgggagggtggggtgctggccggggtggggctggctagctggctaagtgccggccaaggctccaactgcaatgatggttagtggtggggagtgccgtgggggagcggagtgcacttctgacccagcagtggcagggcagggtgcatacacagagacgtgcacacacacacacactggcagggcaaggaaagcaaaacccacccatacgcatgtgtgccggt

SEQ ID NO: 28178 - DNA, 218 bp, Homo sapiens
  chr15:49997485-49997703
  hypo
ttatcattctgatagtcgtgatataatgtgtcactttgtttaatctgccattgttgaagttcaatatcttttcaagagcttactggctatttggatttcctcttccttcatccattttcaattggattgttttcttattgaccggcccgggttctttctgtgttccacgtacctattagtcccactttgaggcttgtagtttccgtctgtttatggtg

SEQ ID NO: 28179 - DNA, 17 bp, Homo sapiens
  chr15:50657055-50657072
  hypo
ctcggcctcccaaagtg

SEQ ID NO: 28180 - DNA, 31 bp, Homo sapiens
  chr15:50709664-50709695
  hypo
agccaggcctgatgcacgtgtaggagctgta

SEQ ID NO: 28181 - DNA, 30 bp, Homo sapiens
  chr15:50793954-50793984
  hypo
cagcaaaccacggcccgtgggtcaactcca

SEQ ID NO: 28182 - DNA, 24 bp, Homo sapiens
  chr15:50798860-50798884
  hypo
aaatatccagttctagccaggcgc

SEQ ID NO: 28183 - DNA, 30 bp, Homo sapiens
  chr15:50834686-50834716
  hypo
tttttttttttttcttggagacggagtctt

SEQ ID NO: 28184 - DNA, 38 bp, Homo sapiens
  chr15:51016479-51016517
  hypo
aaaatgaagaaggagccggcgcggtggctcacgcctgt

SEQ ID NO: 28185 - DNA, 30 bp, Homo sapiens
  chr15:51176916-51176946
  hypo
tacagggctgggcgcggtggagtatagcct

SEQ ID NO: 28186 - DNA, 85 bp, Homo sapiens
  chr15:51202496-51202581
  hypo
gttgcacggattgtgtagtataccgattcacagctacaaggagtttatatcttaaaaagagcacgtgttaatgtcattatttgtt

SEQ ID NO: 28187 - DNA, 144 bp, Homo sapiens
  chr15:51476313-51476457
  hypo
gcttccttagcctctgagtttcggccccgacgttggcacatccagctgtgtgcatacctcgctgcccagctcctgcacctcctcccagctaagtcgggaaggcccagcctggtgaggacactcggtatgaaacagagatggctt

SEQ ID NO: 28188 - DNA, 42 bp, Homo sapiens
  chr15:52000752-52000794
  hypo
gtttgaaaacaactgccttgccgggcgcggaggctcacgcct

SEQ ID NO: 28189 - DNA, 30 bp, Homo sapiens
  chr15:52001033-52001063
  hypo
tgacagaacgagactccatctaaaaaaaaa

SEQ ID NO: 28190 - DNA, 24 bp, Homo sapiens
  chr15:52324098-52324122
  hypo
aataattttttttttttgaggcgg

SEQ ID NO: 28191 - DNA, 181 bp, Homo sapiens; identical to SEQ ID NO: 10133
  chr15:52404391-52404572
  hypo

SEQ ID NO: 28192 - DNA, 31 bp, Homo sapiens
  chr15:52426276-52426307
  hypo
aagtcacctccctgggcgtctgcctcaacac

SEQ ID NO: 28193 - DNA, 68 bp, Homo sapiens; identical to SEQ ID NO: 10135
  chr15:52587793-52587861
  hypo

SEQ ID NO: 28194 - DNA, 33 bp, Homo sapiens
  chr15:52967805-52967838
  hypo
atagaaaacttagtgttaggccgggcgcggtgg

SEQ ID NO: 28195 - DNA, 31 bp, Homo sapiens
  chr15:55508246-55508277
  hypo
ttaacctctgtgcctccgctgcttcatctgt

SEQ ID NO: 28196 - DNA, 30 bp, Homo sapiens
  chr15:55545630-55545660
  hypo
cgagactccgtctcaaaggaaaaaaaaaaa

SEQ ID NO: 28197 - DNA, 90 bp, Homo sapiens; identical to SEQ ID NO: 10158
  chr15:55699899-55699989
  hypo

SEQ ID NO: 28198 - DNA, 162 bp, Homo sapiens
  chr15:55806738-55806900
  hypo
gaattccacctgaagatcctcaaaaggagctactccgtaagcttataggccgggcagaacagtggggccttgccttgcgttctgctgtctgcaagtaacgcaccgttgtgctactgctttggcaagggctggcaagtgtagaagtaccggcctaacaacttt

SEQ ID NO: 28199 - DNA, 961 bp, Homo sapiens; identical to SEQ ID NO: 10159
  chr15:55879821-55880782
  hypo

SEQ ID NO: 28200 - DNA, 168 bp, Homo sapiens; identical to SEQ ID NO: 10160
  chr15:55880890-55881058
  hypo

SEQ ID NO: 28201 - DNA, 30 bp, Homo sapiens
  chr15:55881584-55881614
  hypo
acagacaggagtctcgtccttccggagaca

SEQ ID NO: 28202 - DNA, 157 bp, Homo sapiens; identical to SEQ ID NO: 10161
  chr15:56034565-56034722
  hypo

SEQ ID NO: 28203 - DNA, 374 bp, Homo sapiens; identical to SEQ ID NO: 10162
  chr15:56034885-56035259
  hypo

SEQ ID NO: 28204 - DNA, 453 bp, Homo sapiens; identical to SEQ ID NO: 10163
  chr15:56285898-56286351
  hypo

SEQ ID NO: 28205 - DNA, 30 bp, Homo sapiens; identical to SEQ ID NO: 10165
  chr15:57599111-57599141
  hypo

SEQ ID NO: 28206 - DNA, 30 bp, Homo sapiens
  chr15:57618690-57618720
  hypo
ctccacctcggtcccggtccctactgattc

SEQ ID NO: 28207 - DNA, 53 bp, Homo sapiens
  chr15:57620576-57620629
  hypo
aaagcatttccaaagacaggacgccacttggcgtggaaagcctttggaagcta

SEQ ID NO: 28208 - DNA, 31 bp, Homo sapiens
  chr15:57625821-57625852
  hypo
ggctgtggctactaaacgtgtgaattgtggt

SEQ ID NO: 28209 - DNA, 130 bp, Homo sapiens
  chr15:57792922-57793052
  hypo
tgtaacaaagtgaggccgactttagccaggacagactttttagcaatgcaaaggtagacagcatcctatgaatgaatgaatcggctaactgaatgcttattttaggaacagagggcgctaacattttatt

SEQ ID NO: 28210 - DNA, 31 bp, Homo sapiens
  chr15:57905026-57905057
  hypo
taatccagagattctgcgtatgtgttgggag

SEQ ID NO: 28211 - DNA, 216 bp, Homo sapiens
  chr15:57993431-57993647
  hypo
tccctgacaccccacaacatccgataatcactgatctgctttctatcactatagatgcgttcgtattttttacaattttatataaatggagtcatacggtgtgtaattttttcctggcctctttctcagtatactcgagattcatcagagttgttgcatgtaccagagtattcgatcatatgcacagactacaacgtgtttatccacttacctact

SEQ ID NO: 28212 - DNA, 24 bp, Homo sapiens
  chr15:58504154-58504178
  hypo
caccacagccggcccaggctagct

SEQ ID NO: 28213 - DNA, 155 bp, Homo sapiens
  chr15:58839521-58839676
  hypo
gtcttggaagctcagttttctcgtcgaaaacagcggcctcaaggagctgcagtgaagatgcaggcagtggaggagcggagggcacgcagcatacacagcctcctagtaggtgcccaaggaatgcagccgctagcgtccaaggactgcagtgacta

SEQ ID NO: 28214 - DNA, 28 bp, Homo sapiens
  chr15:59066351-59066379
  hypo
agtgtttgggttcccactgtgcgtgagg

SEQ ID NO: 28215 - DNA, 27 bp, Homo sapiens
  chr15:59158445-59158472
  hypo
ggtgtgagccaccgcgcccggccccag

SEQ ID NO: 28216 - DNA, 28 bp, Homo sapiens
  chr15:59158769-59158797
  hypo
tgaaaagaggccgggcgcggtggctcac

SEQ ID NO: 28217 - DNA, 87 bp, Homo sapiens
  chr15:59580023-59580110
  hypo
atgctccctgagctgccgggatagactctggccacctgcaaccctcaactagaaggagtggatcagaaaatgcgtgaatgaatgatt

SEQ ID NO: 28218 - DNA, 49 bp, Homo sapiens; identical to SEQ ID NO: 10174
  chr15:59664056-59664105
  hypo

SEQ ID NO: 28219 - DNA, 80 bp, Homo sapiens; identical to SEQ ID NO: 10175
  chr15:59664618-59664698
  hypo

SEQ ID NO: 28220 - DNA, 165 bp, Homo sapiens
  chr15:59685906-59686071
  hypo
ctacattctgcagcatctctctctctcgccgagaagcccttgaatgtggatatcgtaaatcacacaagttcacaaaacaagagtcaatcctagcttgagtttacaagaagataaattggcatccatgtatgatagccagataaaatattgcgcacctgtattttt

SEQ ID NO: 28221 - DNA, 31 bp, Homo sapiens
  chr15:59847661-59847692
  hypo
cagcagcaaacaaaaccgaccatccctgccc

SEQ ID NO: 28222 - DNA, 30 bp, Homo sapiens; identical to SEQ ID NO: 10177
  chr15:59915561-59915591
  hypo

SEQ ID NO: 28223 - DNA, 358 bp, Homo sapiens; identical to SEQ ID NO: 10180
  chr15:60289304-60289662
  hypo

SEQ ID NO: 28224 - DNA, 39 bp, Homo sapiens; identical to SEQ ID NO: 10186
  chr15:60690304-60690343
  hypo

SEQ ID NO: 28225 - DNA, 43 bp, Homo sapiens
  chr15:61932066-61932109
  hypo
gagctctcagggtgtaattagcggcaatgactcttaatacctg

SEQ ID NO: 28226 - DNA, 710 bp, Homo sapiens; identical to SEQ ID NO: 10195
  chr15:62456255-62456965
  hypo

SEQ ID NO: 28227 - DNA, 334 bp, Homo sapiens; identical to SEQ ID NO: 10196
  chr15:62457008-62457342
  hypo

SEQ ID NO: 28228 - DNA, 30 bp, Homo sapiens
  chr15:62635671-62635701
  hypo
ggagagaaggaccgccggcccttccacaca

SEQ ID NO: 28229 - DNA, 48 bp, Homo sapiens
  chr15:62754139-62754187
  hypo
tgtacttttaactaggctgggcgtggtggctcacgcctgtaatcccag

SEQ ID NO: 28230 - DNA, 100 bp, Homo sapiens
  chr15:62776551-62776651
  hypo
taagttcaactgaaacggaggtcattcattttgtgaattatcttcagagatccgctggtccaaggaccatggttttttttttcttttttttgagacggag

SEQ ID NO: 28231 - DNA, 39 bp, Homo sapiens
  chr15:62776890-62776929
  hypo
tgggattacaggcgtgagccaccacgcctggctggaccg

SEQ ID NO: 28232 - DNA, 33 bp, Homo sapiens
  chr15:62791805-62791838
  hypo
ttctttgtttttgagacggagttttgctcttgt

SEQ ID NO: 28233 - DNA, 28 bp, Homo sapiens
  chr15:62792077-62792105
  hypo
aggcataagccaccgctcctggctgcaa

SEQ ID NO: 28234 - DNA, 181 bp, Homo sapiens
  chr15:62799428-62799609
  hypo
ctgtttttaatgagatcgtgcttcgaggttggtttctcaagacgaagttatcagtcagcacaatttgggaaaggtgggggtattctgctatggaataccaaagtctggtaactggtcatctcattgagacccccgtgtgatgcttgagttgcccacctcccgcaaccgagtccccatcaag

SEQ ID NO: 28235 - DNA, 74 bp, Homo sapiens
  chr15:62828094-62828168
  hypo
atgtgtgtgtatgaaccgttctcacttttgacaaatgcgcaaagtcttgtgactgctaccgctctcaacatttc

SEQ ID NO: 28236 - DNA, 41 bp, Homo sapiens
  chr15:62880085-62880126
  hypo
cttttttttttggagacggagtctcactctgcagtccaggc

SEQ ID NO: 28237 - DNA, 30 bp, Homo sapiens
  chr15:62884053-62884083
  hypo
cctgaccagaggaccgtctgagaatccagg

SEQ ID NO: 28238 - DNA, 53 bp, Homo sapiens
  chr15:62898022-62898075
  hypo
ctccccaagctgcaagcgaactacccttcccatcttcacgaaatgtctcttca

SEQ ID NO: 28239 - DNA, 31 bp, Homo sapiens
  chr15:62930017-62930048
  hypo
tttatggaagcaaagccggatgctgggctga

SEQ ID NO: 28240 - DNA, 30 bp, Homo sapiens
  chr15:62937894-62937924
  hypo
cacctcccttcttccgtgggaagaagctgg

SEQ ID NO: 28241 - DNA, 98 bp, Homo sapiens
  chr15:62959084-62959182
  hypo
gcttgttacaagatgccgggcctcacccccagagcctcttatccagcaggtgtgggatgaagcctgaacactggcatttctttttctttttctttttt

SEQ ID NO: 28242 - DNA, 115 bp, Homo sapiens
  chr15:62968193-62968308
  hypo
gacccctttggcctctcgcctggggccgtggagaaagctctaacttatagtcagtcttcttgtgttgctttctgcaaatggaagcaaaccagccgtgttgcggctgcatccaggg

SEQ ID NO: 28243 - DNA, 31 bp, Homo sapiens
  chr15:62970008-62970039
  hypo
ttttttttttttgagacggagattcacccag

SEQ ID NO: 28244 - DNA, 31 bp, Homo sapiens
  chr15:62993167-62993198
  hypo
aacttaagggccctgtcggtgctggcctcat

SEQ ID NO: 28245 - DNA, 264 bp, Homo sapiens
  chr15:63000748-63001012
  hypo
gaagcagggaagctggtggaccgctcggtggagaactgtgtccgtgcctgccaggcggccactaccgatagtgagctcctgaagcaggtcagcgcagcggccagcgtggtcagccaggccctccatgatctcctgcagcatgtgcggcagtttgccagccgaggcgagcccatcggccgctacgaccaggctactgacaccatcatgtgtgtcaccgagagcatcttcagctccatgggtgacgctggtaaggcactgtgctgt

SEQ ID NO: 28246 - DNA, 27 bp, Homo sapiens
  chr15:63022558-63022585
  hypo
tattttcatctccgcaatacagtctca

SEQ ID NO: 28247 - DNA, 45 bp, Homo sapiens
  chr15:63029314-63029359
  hypo
tcatggtcatcattaacgtggacatgtggtcgggctgtctcctgg

SEQ ID NO: 28248 - DNA, 94 bp, Homo sapiens
  chr15:63059822-63059916
  hypo
ccactgcgcccggctggcatatttcatttcttagctgagtttctttatacggcaattagaaaagggcttgtccgtctgtctgaagaggtttgca

SEQ ID NO: 28249 - DNA, 30 bp, Homo sapiens
  chr15:63060247-63060277
  hypo
tctatccagaagagccgtggactgggagtt

SEQ ID NO: 28250 - DNA, 128 bp, Homo sapiens
  chr15:63060545-63060673
  hypo
gcactccttgactgtcgcgctgatccctgctttcgtaatcacattgtcacctgctcttcggtgtctcttctgtctcttagatggacacttgttattggatttagagcccgtcccggtaactcaggaca

SEQ ID NO: 28251 - DNA, 30 bp, Homo sapiens
  chr15:63062616-63062646
  hypo
tctcccaagttgggcgaatcataaacagag

SEQ ID NO: 28252 - DNA, 195 bp, Homo sapiens
  chr15:63066064-63066259
  hypo
tagatatgttttttaaaaaagcggcagcccagaacctggtgttaatgaattacctgcttaccgaggcgtttgcagtgtagcctctccctcactccattgagctcttctgcggtattctctaccccgcagagctcccttctccactcatccccaccccgcccaattcccttctgcggcatccttgatgggccacca

SEQ ID NO: 28253 - DNA, 160 bp, Homo sapiens
  chr15:63069019-63069179
  hypo
gatgacatcatggtgacgctgaacgaagctgccagtgaagtggggctggttgggggcatggtggacgccattgcagaagccatgagcaaggtgggcatgggctctagggctctctactcccttatctccctcacccatgggcctcgcgtgcttttctcta

SEQ ID NO: 28254 - DNA, 103 bp, Homo sapiens
  chr15:63075668-63075771
  hypo
ctggctccaagctgcacagcccgaacgctgagcatgtgcccactgggcccggccagaatctgtggcctgagcggggccctgcgagggctctggccttttgtgt

SEQ ID NO: 28255 - DNA, 31 bp, Homo sapiens
  chr15:63077574-63077605
  hypo
ggaaaagtgggctgggcgtgatggctcacgc

SEQ ID NO: 28256 - DNA, 31 bp, Homo sapiens
  chr15:63084864-63084895
  hypo
tgcaggacctgggccacggctgtatcttcct

SEQ ID NO: 28257 - DNA, 403 bp, Homo sapiens
  chr15:63087070-63087473
  hypo
atgtttgaagaaatctacctacgaaacgttgtcagattcttctttgggtcgtagtcaagggtagtgggtgtgtgcacgcagaggttaatacaaagactcaaagagcctccagccactagcctgacacatgcgatttacattgggtgcattgggccatcctgagggcaagaacggtgtgctgtggcgtcccgggaggcagggctgtctctggaagaggagagcagggggaggtgtccggggctcagctgttttgcaggctgcttgaggcacaggatgatacatccgtgcttggtggcttttccttcttccttcactttggcatctgacggggcaactagttcggtggctgcgggagaggggcaggagtcgttgcaggcagagcgcagacccagggtggagaggt

SEQ ID NO: 28258 - DNA, 117 bp, Homo sapiens
  chr15:63088378-63088495
  hypo
cattacagccgccaccgctgtgtctgggatcattgccgacctggacaccaccattatgtttgcaacagcggggacgctgaatgcagagaacagtgagaccttcgcagaccacaggta

SEQ ID NO: 28259 - DNA, 34 bp, Homo sapiens
  chr15:63089566-63089600
  hypo
cagccagcctgggctccgacgaccccgagaccca

SEQ ID NO: 28260 - DNA, 143 bp, Homo sapiens
  chr15:63090194-63090337
  hypo
tgcagggaggaaagccgcgggcatcatgttgccaggatggagtgtttcaacccaccagagacagagttaagaaagagggaagactgggaactggttattggcctgttccggtaaccatcgagtgccatcgaggacattggtgt

SEQ ID NO: 28261 - DNA, 138 bp, Homo sapiens
  chr15:63116004-63116142
  hypo
agtattgttaatggcgccgtttccacatctgcaggcagacttgtgctccaaagacagttatcggagttgctgcaaaagtgaccaccccctgcagccgtaaccttcaatactgtgcctagtctcgagctcagtcaaacc

SEQ ID NO: 28262 - DNA, 173 bp, Homo sapiens
  chr15:63129978-63130151
  hypo
aaatattaattggttcgcgtcccaccctgtgcaagccctcatagtttgcattggtcactttagttcacagaccagatggggcagttaactttgaatgagaagaactctcaactttctgatggcgaaccctcaagcacaagccttcgactctgagggggcgctggacaagaaat

SEQ ID NO: 28263 - DNA, 54 bp, Homo sapiens; identical to SEQ ID NO: 10197
  chr15:63130455-63130509
  hypo

SEQ ID NO: 28264 - DNA, 894 bp, Homo sapiens
  chr15:63132518-63133412
  hypo
caaacagtgacagaggctggtcgccagagctaagaaagctgttccggatgtgctgcagtgtcccacggtcgcgggagccgtggagctcacatgagcagtggggtgggtcggagggttttctacaaagtgttaggtccatccagcttgttgctttctttctagatcatcgccgcccaggaagaaatgctaaagaaagagcgagaactggaagaagcaaggaaaaaactggcccaaatccgccagcagcagtataagtttttacccaccgagctgagggaagatgagggctaaaggtgcgagcccagatggcgagccccaggggatggccctggctgaactggacagacagtgttcctgagaggctgggcacttagctggaaaccgcccacctccctcccgggtgagcctggagccctgcgtgcttgttctcacatctctgtcccgtcggcactggctgcatgatcgtgatgtcacacggtacaatgtcctacccacaactcctctgccgcctcccctcatgcctcaccgtgtctcaggagagaggggtgcacgtttcatggactgttaccaacaaagaaaagtcagtattatgttgttctcagacactttggcttttgttggtccttctcttaggcctgctcctggacctctttatgatattgtgatagggaaaaaaatcattgacgtcatagaatattcttcttcctctcaggagaagacggaagctggagttggacatggttcataaaagccagaaacacaaacccgtgtggactccgggagggtgactcaggtcctccttccatgtcttgagcactggctcacccagggggtgaaaaattcccgcccctgtttgcacgctttcttgcctccgtgtgtaagctccttgtacaa

SEQ ID NO: 28265 - DNA, 90 bp, Homo sapiens
  chr15:63245890-63245980
  hypo
aggccaggcccaacaacgccggccctacggcggcaaaggttcccacctgactccatgcggagaccctatgggtgtcgaccacagcattcc

SEQ ID NO: 28266 - DNA, 31 bp, Homo sapiens
  chr15:63321692-63321723
  hypo
gtgtagtgatgtctcccgcttggatttgccg

SEQ ID NO: 28267 - DNA, 175 bp, Homo sapiens
  chr15:63753464-63753639
  hypo
ggaagaggggcccagccccagcgggtcaggggccggactaggctagcgaggcccaagtgcggtggccccatgcagagatcctggctcggtgcaaaggagatgccgctcccaccgtctgcaggaggcaagggctccccttccccggccaggagccgggtgcaagaggagcctgggg

SEQ ID NO: 28268 - DNA, 46 bp, Homo sapiens
  chr15:63772604-63772650
  hypo
ctgtctcaaaaaaaagaactggaacgtcagaattggaattttccaa

SEQ ID NO: 28269 - DNA, 858 bp, Homo sapiens; identical to SEQ ID NO: 10203
  chr15:63795379-63796237
  hypo

SEQ ID NO: 28270 - DNA, 124 bp, Homo sapiens
  chr15:63889876-63890000
  hypo
ttccagagaagcatctgcagccggcacgagagcctggtcaatgatttcctcctccgggtgtgcgacaggtaggccaccttgcctcctgagcagtgctggccccgctagctctggcttccctctt

SEQ ID NO: 28271 - DNA, 59 bp, Homo sapiens
  chr15:63901442-63901501
  hypo
gaggtaggcagactgtcgtaaggctgtggagagagacccagagccgtgactggggacat

SEQ ID NO: 28272 - DNA, 30 bp, Homo sapiens
  chr15:63920918-63920948
  hypo
gtggcagcggccagccgagatctgccgaac

SEQ ID NO: 28273 - DNA, 31 bp, Homo sapiens
  chr15:64443255-64443286
  hypo
gatgagcaaaggtctacggagctcctgaaat

SEQ ID NO: 28274 - DNA, 30 bp, Homo sapiens
  chr15:64451476-64451506
  hypo
gagactcatgcaggcgtccgggggtctttc

SEQ ID NO: 28275 - DNA, 216 bp, Homo sapiens
  chr15:64674707-64674923
  hypo
tgaaacgaaacgaaacgaaaagaccctgccaaatgtggtaagaccacatcgctgtcacacagtgagcataactctaggataaagggtcataatttttttctatctttatgcttaccttctaattactcacaacacccctggggagtgattttcactctctaaataccatacataaaacagaatcggtcaggcatggtggctcacacctgtaatcct

SEQ ID NO: 28276 - DNA, 29 bp, Homo sapiens
  chr15:64675162-64675191
  hypo
cctgggcgacagggcgagtctccgtctct

SEQ ID NO: 28277 - DNA, 23 bp, Homo sapiens
  chr15:64675582-64675605
  hypo
tgagatggagtctcacttcttcg

SEQ ID NO: 28278 - DNA, 8 bp, Homo sapiens
  chr15:64682783-64682791
  hypo
cagtatca

SEQ ID NO: 28279 - DNA, 30 bp, Homo sapiens
  chr15:64683140-64683170
  hypo
gtcggcatgtattacgctaagatactattt

SEQ ID NO: 28280 - DNA, 89 bp, Homo sapiens
  chr15:64865095-64865184
  hypo
gtcttgagaaaaaaaagaaaagaaaagaaagtctcctttccaaaaggttgtggctccacgcgggacacgtagttcggctagaaaagcat

SEQ ID NO: 28281 - DNA, 241 bp, Homo sapiens
  chr15:65119039-65119280
  hypo
gtggcctcccgaagtcctaggattacaggcatgagcccggaccttatttttcaaatgagaaaaaagcaaggcttccagagattttactgaaggtcacatagctgatatggagagcaaaaccaaacattgaacccagattacctgctcgcttaatcactccatggggcttagctactacaccacactgctcccagtctgttagcggtagagggtgatgactgaaagttgtccaggttcttgg

SEQ ID NO: 28282 - DNA, 64 bp, Homo sapiens
  chr15:65119639-65119703
  hypo
cagaacgagaacttgtctcaaaacaaacaacaacaacaaaaaacaaaaacgaaagtacactcca

SEQ ID NO: 28283 - DNA, 30 bp, Homo sapiens
  chr15:65214150-65214180
  hypo
ggttcggccacttacgaatcctccagatct

SEQ ID NO: 28284 - DNA, 30 bp, Homo sapiens; identical to SEQ ID NO: 10209
  chr15:65360351-65360381
  hypo

SEQ ID NO: 28285 - DNA, 22 bp, Homo sapiens
  chr15:65478870-65478892
  hypo
cgtctcaaaaaaaaaaaaaaaa

SEQ ID NO: 28286 - DNA, 1278 bp, Homo sapiens; identical to SEQ ID NO: 10210
  chr15:65669326-65670604
  hypo

SEQ ID NO: 28287 - DNA, 17 bp, Homo sapiens
  chr15:65849519-65849536
  hypo
aagagtacatacggccg

SEQ ID NO: 28288 - DNA, 92 bp, Homo sapiens
  chr15:65862036-65862128
  hypo
ccccgtctcgataaaaaagaaaagccatggaattattaacacatgatagtagttatttataggggtcccacgtttgtagtgctctatttctt

SEQ ID NO: 28289 - DNA, 44 bp, Homo sapiens
  chr15:65901232-65901276
  hypo
tgttcttttttgtttttgagacggagtcttgcgacatctgtcgc

SEQ ID NO: 28290 - DNA, 28 bp, Homo sapiens
  chr15:66645659-66645687
  hypo
aaaaaaaaaatctgggctgggcgcggtg

SEQ ID NO: 28291 - DNA, 30 bp, Homo sapiens
  chr15:66649764-66649794
  hypo
aacatagacactggccaggtgcggtgtggc

SEQ ID NO: 28292 - DNA, 82 bp, Homo sapiens
  chr15:66929156-66929238
  hypo
ttcagtctgacatgggcgccaccgagccatggaaatgcacttttaattacagcgtggatgtagccggctggacccgagtgtt

SEQ ID NO: 28293 - DNA, 31 bp, Homo sapiens
  chr15:66946040-66946071
  hypo
gccctggcatctctctcggggggccctgcca

SEQ ID NO: 28294 - DNA, 500 bp, Homo sapiens; identical to SEQ ID NO: 10220
  chr15:66995364-66995864
  hypo

SEQ ID NO: 28295 - DNA, 31 bp, Homo sapiens
  chr15:67011850-67011881
  hypo
agtgtcctgggatgtacgtcatccccaaaca

SEQ ID NO: 28296 - DNA, 49 bp, Homo sapiens
  chr15:67049580-67049629
  hypo
agggtacgggaggaggcgtggtgtgcagccccgacgtctccctctgaag

SEQ ID NO: 28297 - DNA, 138 bp, Homo sapiens
  chr15:67073526-67073664
  hypo
gaacgcgcagcaagatcggcttcggcatcctgctcagcaaggagcccgacggcgtgtgggcctacaaccgcggcgagcaccccatcttcgtcaactccccgacgctggacgcgcccggcggccgcgccctggtcgtgc

SEQ ID NO: 28298 - DNA, 110 bp, Homo sapiens
  chr15:67137844-67137954
  hypo
gagggggacagatgagcgcgtgggcagggatgagactggagaagggaggggccgcacagtgggggggtgggcggatgggggaccctcaaggcaccgagctgccccactta

SEQ ID NO: 28299 - DNA, 30 bp, Homo sapiens
  chr15:67457569-67457599
  hypo
tgctctgtctcccccggacagttctacctc

SEQ ID NO: 28300 - DNA, 30 bp, Homo sapiens
  chr15:67458650-67458680
  hypo
gctgagtgaggacacgtcccttagagacaa

SEQ ID NO: 28301 - DNA, 30 bp, Homo sapiens
  chr15:67489023-67489053
  hypo
ccagagcagcttgacgcatttcttttcctt

SEQ ID NO: 28302 - DNA, 91 bp, Homo sapiens
  chr15:67545399-67545490
  hypo
atgtttactatgtgccagactcggggataagcacaatcttgcgaaaattatccctattttatagatagaaggtgaaggggccgggcgcggt

SEQ ID NO: 28303 - DNA, 694 bp, Homo sapiens; identical to SEQ ID NO: 10224
  chr15:68115505-68116199
  hypo

SEQ ID NO: 28304 - DNA, 30 bp, Homo sapiens; identical to SEQ ID NO: 10225
  chr15:68116455-68116485
  hypo

SEQ ID NO: 28305 - DNA, 31 bp, Homo sapiens
  chr15:68502908-68502939
  hypo
tcccagctgcagccttcggagccctcctccc

SEQ ID NO: 28306 - DNA, 44 bp, Homo sapiens
  chr15:68506852-68506896
  hypo
taattcttcctgtgatcgctggaccttctcggcagccttgggac

SEQ ID NO: 28307 - DNA, 30 bp, Homo sapiens
  chr15:68594511-68594541
  hypo
cagccaggccggtgcgtccatgtctagggg

SEQ ID NO: 28308 - DNA, 30 bp, Homo sapiens
  chr15:68624698-68624728
  hypo
ccttgcctcgctcacggccctcgttgaagt

SEQ ID NO: 28309 - DNA, 87 bp, Homo sapiens
  chr15:68893779-68893866
  hypo
aggcctcagcctgcacggagcttacagtcaagagtggtgtgaggtggggattgcggccatgagcgtgcagtgcgaggagggctagga

SEQ ID NO: 28310 - DNA, 259 bp, Homo sapiens
  chr15:69002973-69003232
  hypo
gatctcagaaagcctggtgtccgaggaaaggggcacctctcatcaagggacttcttggccgtgtccacccagcctggaccctcatctccctctgcaggtgcggatctgggagatccccgagggcgggctgaagcggaacatgacggaggcgctcctggagctgcacgggcacagccggcgtgtggggctggtcgagtggcaccccaccaccaacaacatcctgttcagcgctggctacgactacaaggtatgcagtggg

SEQ ID NO: 28311 - DNA, 31 bp, Homo sapiens
  chr15:69004017-69004048
  hypo
tgagccccgctctggccgtgttctgcaggtg

SEQ ID NO: 28312 - DNA, 31 bp, Homo sapiens
  chr15:69076662-69076693
  hypo
tctgcaaagccaaggacgagccccaaggcct

SEQ ID NO: 28313 - DNA, 31 bp, Homo sapiens
  chr15:69240580-69240611
  hypo
aacaaccaaacccactcgctgcagttttgga

SEQ ID NO: 28314 - DNA, 30 bp, Homo sapiens
  chr15:69320686-69320716
  hypo
caggtgtatgacatcgatggtaagggctct

SEQ ID NO: 28315 - DNA, 142 bp, Homo sapiens
  chr15:69322603-69322745
  hypo
aattagttaacttacgcgcgacggggagccatcaaagtgtgttgagcaagggattcgcagggatggacctgcattctgaaaagcttttcttcagcaatgttcattttgctgccctggtgccagagggcggaaaacaggtagc

SEQ ID NO: 28316 - DNA, 181 bp, Homo sapiens
  chr15:69322966-69323147
  hypo
aggaaagcagaacaggcggtgtgactggagagtggtataatatactctaattgattctgcatcgtaatgtgatttgggccggaatgatgatcacaacaccaatgagaatttccatgtatatgcaatttccttctcccagatactgcgttaggtgttttaccattatcgagtttccttgagc

SEQ ID NO: 28317 - DNA, 31 bp, Homo sapiens; identical to SEQ ID NO: 10239
  chr15:69351241-69351272
  hypo

SEQ ID NO: 28318 - DNA, 175 bp, Homo sapiens
  chr15:69387166-69387341
  hypo
aatcttgtgctgagcccggagcacaatgggagcgggctggcggggtgggttcacagctggactgggagcagcagacatacaggccgtaggcacagacatataaagacagtcatgcagattgcaggatgcctgagagcacagactctcacatgcacaaatacgtgcatgatcgcca

SEQ ID NO: 28319 - DNA, 40 bp, Homo sapiens
  chr15:69461180-69461220
  hypo
gttttttaaaaaatttgataggactcgaagaaaaaatata

SEQ ID NO: 28320 - DNA, 200 bp, Homo sapiens
  chr15:69590166-69590366
  hypo
cgcacgcacacacacacgcacatgcatacacacccttacaagatgcacagccaccaaaaagcctaataaagcaaggtgcccaagaccacggttcaggatccgtaaaaatggccggagataattgactgcaacctattcactgcaaatggggcaacttgggcccacaaagggccagagacttgacccgagtcacagagtag

SEQ ID NO: 28321 - DNA, 21 bp, Homo sapiens
  chr15:69694938-69694959
  hypo
accaccgcgcctggcctaaac

SEQ ID NO: 28322 - DNA, 79 bp, Homo sapiens
  chr15:69715404-69715483
  hypo
tgggattatagctgtgagccaccatgcccggctgggatcatttacttttaaaatggacttataacgtatacaattgaac

SEQ ID NO: 28323 - DNA, 142 bp, Homo sapiens
  chr15:69883339-69883481
  hypo
gaggcagtgtgtggtacccagcggagtgtgtgatgggtgatgggcatgggcggaacactcacacagaagtggcagcgtgccacaggggtggctgcaggggtggccatgcctggggaaacgcgactgcctggtttgtcagtgg

SEQ ID NO: 28324 - DNA, 30 bp, Homo sapiens
  chr15:70126640-70126670
  hypo
ctgttccatccctacgctgtgcatatgaac

SEQ ID NO: 28325 - DNA, 30 bp, Homo sapiens
  chr15:70340692-70340722
  hypo
agagagactctggacgccccacgcgcccag

SEQ ID NO: 28326 - DNA, 117 bp, Homo sapiens
  chr15:70342263-70342380
  hypo
agtccagactgtgacggggcacgtgccctctcagccggccggagcgcagccctgaacgctcggctgcctgcggcccatcctccgccatcctcggggcccctcgcctgggggtctccc

SEQ ID NO: 28327 - DNA, 227 bp, Homo sapiens
  chr15:70352912-70353139
  hypo
cttccatgctgtagtccgcagagccccggtgcttctcactggcccggaggctttccgagggtgacacagagttattctggaaggaaaaagagggttcggggttaaaactttctgctgcgtgtaacaattcacacatccgcacacagctaagtgcaggtgacacggaggtcaggggagggaagagaagctgaactcctctctgccctgcagatcgtggctccatcaga

SEQ ID NO: 28328 - DNA, 88 bp, Homo sapiens
  chr15:70355591-70355679
  hypo
gtccaatccaggcctccgcctatctaggcaaactgcctctccgaaaaaatgccactgttagaggatcagtaccgaggcagtgaacatg

SEQ ID NO: 28329 - DNA, 77 bp, Homo sapiens; identical to SEQ ID NO: 10243
  chr15:70391278-70391355
  hypo

SEQ ID NO: 28330 - DNA, 31 bp, Homo sapiens
  chr15:70539034-70539065
  hypo
gagccagctcctcagccgcatgaccttaggt

SEQ ID NO: 28331 - DNA, 100 bp, Homo sapiens
  chr15:71047984-71048084
  hypo
agcgacaagagggagacttattctcaaaaataaaaaaaaaaaagaatgaatgaaaaccttcctttaccacaatccccaagctgcacgccctctaactccc

SEQ ID NO: 28332 - DNA, 36 bp, Homo sapiens
  chr15:71124500-71124536
  hypo
gggagagcaggggactcgtaccggggcttttctcct

SEQ ID NO: 28333 - DNA, 36 bp, Homo sapiens; identical to SEQ ID NO: 10246
  chr15:71184310-71184346
  hypo

SEQ ID NO: 28334 - DNA, 30 bp, Homo sapiens; identical to SEQ ID NO: 10248
  chr15:71407655-71407685
  hypo

SEQ ID NO: 28335 - DNA, 32 bp, Homo sapiens
  chr15:71466446-71466478
  hypo
tgtgccttaaaaagacactatcgagcagaaat

SEQ ID NO: 28336 - DNA, 232 bp, Homo sapiens
  chr15:72040755-72040987
  hypo
tcagtgctcggtgccctgcggcgtgggacagaggacccgtgatgtgaagtgtgtgagcaacattggggatgtggttgacgatgaggaatgcaacatgaagctccggccgaatgacattgagaactgcgacatgggaccctgtgccaagagctggttcctcaccgagtggagcgaaagggtgagtgtgatggcgggcagagcgccggggaccgaggtctgccaggtgcctcca

SEQ ID NO: 28337 - DNA, 30 bp, Homo sapiens
  chr15:72118829-72118859
  hypo
ttgactattgtggacgaggtgatgaaacgc

SEQ ID NO: 28338 - DNA, 46 bp, Homo sapiens
  chr15:72411789-72411835
  hypo
ttaagatggaggtcatttagccgggcgcggtggctcacgcctgtaa

SEQ ID NO: 28339 - DNA, 102 bp, Homo sapiens
  chr15:72412074-72412176
  hypo
cgagactccgtccccgcccccagaaaaaaaagatggaggtcatttaactacagagaggcttggagatggaatgagaaacttgagcggcgttatgtttggaat

SEQ ID NO: 28340 - DNA, 107 bp, Homo sapiens
  chr15:72462624-72462731
  hypo
gagagggaggaccctgagactcgcttatgccgagaacaaaagtgtccaaagtacccgcgcagcatgactgtaaaccatcaggttccgggaaagtaggctgagcacag

SEQ ID NO: 28341 - DNA, 42 bp, Homo sapiens
  chr15:72471182-72471224
  hypo
gggattacagttgtgagccacccggcccggctgtcttgcact

SEQ ID NO: 28342 - DNA, 30 bp, Homo sapiens
  chr15:72491017-72491047
  hypo
ccccataagggatacgctaatgcaggaaga

SEQ ID NO: 28343 - DNA, 648 bp, Homo sapiens; identical to SEQ ID NO: 10253
  chr15:72523105-72523753
  hypo

SEQ ID NO: 28344 - DNA, 38 bp, Homo sapiens; identical to SEQ ID NO: 10255
  chr15:72565001-72565039
  hypo

SEQ ID NO: 28345 - DNA, 30 bp, Homo sapiens
  chr15:72581707-72581737
  hypo
ggccgtacctgccgcgggcaacagaggcgc

SEQ ID NO: 28346 - DNA, 31 bp, Homo sapiens
  chr15:72773266-72773297
  hypo
cattaagtgttttattcgtttaacatcattt

SEQ ID NO: 28347 - DNA, 31 bp, Homo sapiens; identical to SEQ ID NO: 10258
  chr15:72827182-72827213
  hypo

SEQ ID NO: 28348 - DNA, 30 bp, Homo sapiens; identical to SEQ ID NO: 10259
  chr15:72827251-72827281
  hypo

SEQ ID NO: 28349 - DNA, 201 bp, Homo sapiens
  chr15:72992554-72992755
  hypo
aggcatgagccactgcacccggcctgaacatttatttactggttttttttgtgtgtgcatgtgtgtgcaagttttcacttgaataagtgcctagggagtggaattgcttggtcatatgtgaactgtttgttttaactttataataaactgccgaagtattttccaaagtggttgtacagttttacccgaccgccagcaacg

SEQ ID NO: 28350 - DNA, 52 bp, Homo sapiens
  chr15:73735439-73735491
  hypo
gggtgggccctggggcgctccgcttactgattggttcgatgccagattggca

SEQ ID NO: 28351 - DNA, 28 bp, Homo sapiens
  chr15:73806804-73806832
  hypo
ctcccccgccacagcacagtttctaacc

SEQ ID NO: 28352 - DNA, 259 bp, Homo sapiens
  chr15:73889425-73889684
  hypo
cattcctcttggggtcgttgctggccctgcactcgtaagtcccagagtcctccaaggtgagccgggttattctcagcacactcacgccgtttgacccgtaggcggtgtttacggtgacacggcgcttccgagcaccgtcccacagctgtctgaaagactctgcccggttgacttctgcgtaccaccactggatctctggcgtggggctcccgaccacgtcacagtacagctcaaaggcgtcccccgtgagcttagtttc

SEQ ID NO: 28353 - DNA, 31 bp, Homo sapiens
  chr15:73996272-73996303
  hypo
gcagcttcacctgcttcgtgagcatccggga

SEQ ID NO: 28354 - DNA, 30 bp, Homo sapiens; identical to SEQ ID NO: 10266
  chr15:74045609-74045639
  hypo

SEQ ID NO: 28355 - DNA, 30 bp, Homo sapiens
  chr15:74222801-74222831
  hypo
ctgctaggccagaccgtggaaaatcccagc

SEQ ID NO: 28356 - DNA, 30 bp, Homo sapiens
  chr15:74315316-74315346
  hypo
gatagtgcctttggcgcggttcacgcgcag

SEQ ID NO: 28357 - DNA, 30 bp, Homo sapiens
  chr15:74332762-74332792
  hypo
tctctatgctcccccgacacccagttatcc

SEQ ID NO: 28358 - DNA, 31 bp, Homo sapiens
  chr15:74636045-74636076
  hypo
gcgcccattgacatagcgtgggacaaaggag

SEQ ID NO: 28359 - DNA, 163 bp, Homo sapiens
  chr15:74679804-74679967
  hypo
ccaggagggctgcccactgcccgcagggcccccggtcagggcgggagggctcggcaccgagaggtccaccgagccagaccaggcagagagagcacatggaccggcggagaccaaggtcccagagaggtggggaacaggaggcgccccctcccctgccacatga

SEQ ID NO: 28360 - DNA, 30 bp, Homo sapiens
  chr15:74704408-74704438
  hypo
gctttcctctaggccggggaggggtgggaa

SEQ ID NO: 28361 - DNA, 421 bp, Homo sapiens
  chr15:75091393-75091814
  hypo
gaggaggtgcagggtgcgggtgcgggacctcacagagcagggctgggggcagaggcaggagggtggcaaagaagggacagggagcagaagaagagggcctcaaatgcctgactgagcgagtgcgagccacgggtgccaagcagagggaaccccttcagaaaggggagccagggtcagtacctttgggccaccatgacctccagccctgctgctccccagttggttccacggcaagatcacacgggagcaggctgagcggcttctgtacccgccggagacaggcctgttcctggtgcgggagagcaccaactaccccggagactacacgctgtgcgtgagctgcgacggcaaggtggagcactaccgcatcatgtaccatgccagcaagctcagcatcgacgaggaggtgtactttgagaac

SEQ ID NO: 28362 - DNA, 31 bp, Homo sapiens
  chr15:75094849-75094880
  hypo
tgtgacggctggcctccgcctgggtcatggg

SEQ ID NO: 28363 - DNA, 30 bp, Homo sapiens
  chr15:75118006-75118036
  hypo
gtcagtatcctctccgtctgggtgcccagc

SEQ ID NO: 28364 - DNA, 53 bp, Homo sapiens
  chr15:75158751-75158804
  hypo
aaaaatactctgttttctggccgggcgtggtggctcacacctgtaatcctagc

SEQ ID NO: 28365 - DNA, 43 bp, Homo sapiens
  chr15:75158923-75158966
  hypo
acgcctgtaatcccagctactcgggagtgtgactctgtctcaa

SEQ ID NO: 28366 - DNA, 25 bp, Homo sapiens
  chr15:75205463-75205488
  hypo
tgccgtctcaaacaaaacaaacaaa

SEQ ID NO: 28367 - DNA, 31 bp, Homo sapiens
  chr15:75221152-75221183
  hypo
tttggttgtcatgatacgaatgtgtgcatac

SEQ ID NO: 28368 - DNA, 70 bp, Homo sapiens
  chr15:75614950-75615020
  hypo
ttcgcggcagaggccggcggcgcggtcctgggtggcgggcggcgtgggggcaggcgagcggagcccccgg

SEQ ID NO: 28369 - DNA, 37 bp, Homo sapiens; identical to SEQ ID NO: 10285
  chr15:75640774-75640811
  hypo

SEQ ID NO: 28370 - DNA, 30 bp, Homo sapiens
  chr15:75648612-75648642
  hypo
ccccgtccccagcacgtcccaccccttgcc

SEQ ID NO: 28371 - DNA, 30 bp, Homo sapiens
  chr15:75664834-75664864
  hypo
atgcgttagtataaccgagggaatgtgtta

SEQ ID NO: 28372 - DNA, 197 bp, Homo sapiens
  chr15:75672984-75673181
  hypo
ggtttctgtgctagatgttcacgaagctcaggcgaggtagtatctgaattcatgtatcgctccacgtagtctgaccagcgctaagatggcaaacacaaaatacaggtggaaggaaatcacaaaaacagctcctaatgcattgggcactctagtaaattctatgattacaatgccccgaattcataaatttcaagatc

SEQ ID NO: 28373 - DNA, 37 bp, Homo sapiens
  chr15:75726681-75726718
  hypo
cactagtaataaaaaacgtgtaaagtaggccgggcgc

SEQ ID NO: 28374 - DNA, 31 bp, Homo sapiens; identical to SEQ ID NO: 10287
  chr15:75745114-75745145
  hypo

SEQ ID NO: 28375 - DNA, 44 bp, Homo sapiens
  chr15:75981459-75981503
  hypo
ctggcctgcagtccatcgctgacccggaacgtcaagtcctgtgc

SEQ ID NO: 28376 - DNA, 187 bp, Homo sapiens
  chr15:76083846-76084033
  hypo
ccagccctggtacctgcgtcgggctgggacgctctgcacttacagccaggagtcatccatgggcccccgtgggcatgctgaccatggttgttttgatgtcgccgatgatgttgggcgcctccctcagcacatggtgcatgcacagcgtctcgttgcaccattttgcctgctccgtggaatcctccat

SEQ ID NO: 28377 - DNA, 17 bp, Homo sapiens
  chr15:76155787-76155804
  hypo
gtttttctttttttttt

SEQ ID NO: 28378 - DNA, 30 bp, Homo sapiens
  chr15:77323550-77323580
  hypo
accattctccgcaacgccctgtgggtgcac

SEQ ID NO: 28379 - DNA, 35 bp, Homo sapiens
  chr15:77333013-77333048
  hypo
gacagggcaagactctgtctcggggaaaaaaaaaa

SEQ ID NO: 28380 - DNA, 20 bp, Homo sapiens
  chr15:77729918-77729938
  hypo
tttttgttttttgagacgga

SEQ ID NO: 28381 - DNA, 31 bp, Homo sapiens
  chr15:77841399-77841430
  hypo
tgaaacggagccaatgcgttctgcttcctaa

SEQ ID NO: 28382 - DNA, 30 bp, Homo sapiens
  chr15:77908120-77908150
  hypo
gggcagcccgtggccgagcctgacagcact

SEQ ID NO: 28383 - DNA, 31 bp, Homo sapiens
  chr15:78090760-78090791
  hypo
tgccattccgggcccccggctgccatgctcc

SEQ ID NO: 28384 - DNA, 212 bp, Homo sapiens; identical to SEQ ID NO: 10298
  chr15:78111656-78111868
  hypo

SEQ ID NO: 28385 - DNA, 131 bp, Homo sapiens; identical to SEQ ID NO: 10299
  chr15:78111916-78112047
  hypo

SEQ ID NO: 28386 - DNA, 42 bp, Homo sapiens
  chr15:78193857-78193899
  hypo
gccctgaggcctggagcgatgccttctcgctggatgtggcct

SEQ ID NO: 28387 - DNA, 31 bp, Homo sapiens
  chr15:78268479-78268510
  hypo
agtgccgcctccagtacggggcctactctgc

SEQ ID NO: 28388 - DNA, 80 bp, Homo sapiens
  chr15:78450090-78450170
  hypo
tgttgttaatctccaccgattgtcactttaacagtgtgtgtctcagtgtttgctactgccattatttctttctttctttt

SEQ ID NO: 28389 - DNA, 19 bp, Homo sapiens
  chr15:78450289-78450308
  hypo
ccaccgcacctggctggct

SEQ ID NO: 28390 - DNA, 179 bp, Homo sapiens
  chr15:78463269-78463448
  hypo
agtcagttggcatgtgggtggcggagtgcctggtaatggaataatagggtcggcgatgcccgccaagattccagagtaagtcaggtcgctaggtgagttgtgactgattgcttttcctgcagcgcacgtgagcagtatcagccatctctctcctacccgctccacagcctactgctggc

SEQ ID NO: 28391 - DNA, 167 bp, Homo sapiens
  chr15:78501820-78501987
  hypo
ccgggcagacagaggcgtgtgaatgctgcagaactcgtcctactgactttggatccttggttacagctctctgggatagccaggtagaagctgcctccactttgggccgcaatgttaccaaatggcccctgagctctgggttcaggcagcgacggcaaacgagggac

SEQ ID NO: 28392 - DNA, 22 bp, Homo sapiens
  chr15:78509925-78509947
  hypo
gagatggagtcttcactctgtc

SEQ ID NO: 28393 - DNA, 82 bp, Homo sapiens
  chr15:78510186-78510268
  hypo
cgtgagccaccgcacccggcctggaaaatgttttatataaaccatgcgcatatattaaatcgtaatccaggtgttttcatat

SEQ ID NO: 28394 - DNA, 36 bp, Homo sapiens
  chr15:78566601-78566637
  hypo
tccacatccagcagatcgggccgggcatggtacagc

SEQ ID NO: 28395 - DNA, 16 bp, Homo sapiens
  chr15:78571016-78571032
  hypo
ggagtctcgctctgtc

SEQ ID NO: 28396 - DNA, 26 bp, Homo sapiens
  chr15:78596057-78596083
  hypo
gccaccgcgcccggccactgtttaca

SEQ ID NO: 28397 - DNA, 31 bp, Homo sapiens
  chr15:78605856-78605887
  hypo
accggggaggcagaggcggggtgggtgctgg

SEQ ID NO: 28398 - DNA, 31 bp, Homo sapiens
  chr15:78615520-78615551
  hypo
gattgagcacccgtgacgagctggcattgtg

SEQ ID NO: 28399 - DNA, 30 bp, Homo sapiens
  chr15:78679678-78679708
  hypo
tcatcggcatgcagcgtgtgttttattatc

SEQ ID NO: 28400 - DNA, 189 bp, Homo sapiens
  chr15:78699263-78699452
  hypo
tcgctcagcttgctcacgtacccctgaccactccacgcctgactccagtctctcttggaggtgtgagatccaggccagtagtgtgagctgagtgcaacctgccagcaaccaacctgagtgggtggaacgagcccagcagcccaagcaaaacttgggcaaaggcaccatcggccacggctctctggccag

SEQ ID NO: 28401 - DNA, 31 bp, Homo sapiens
  chr15:78832918-78832949
  hypo
ccgctttcccattgggcgggggtcgtgaacg

SEQ ID NO: 28402 - DNA, 3 bp, Homo sapiens
  chr15:78913466-78913469
  hypo
cgg

SEQ ID NO: 28403 - DNA, 16 bp, Homo sapiens
  chr15:78913480-78913496
  hypo
cgaccagatctgagca

SEQ ID NO: 28404 - DNA, 72 bp, Homo sapiens
  chr15:79031605-79031677
  hypo
agagcacgggcatgtcgcagcagctgtgggagggccggggaggggagcgcgcaggtgcgggtgtagcaaagg

SEQ ID NO: 28405 - DNA, 30 bp, Homo sapiens; identical to SEQ ID NO: 10305
  chr15:79125413-79125443
  hypo

SEQ ID NO: 28406 - DNA, 27 bp, Homo sapiens
  chr15:79152040-79152067
  hypo
agccaccgcgcccggcctttgtttttt

SEQ ID NO: 28407 - DNA, 31 bp, Homo sapiens
  chr15:79202795-79202826
  hypo
tacattcacataaccacgggaagttggtcac

SEQ ID NO: 28408 - DNA, 22 bp, Homo sapiens
  chr15:79208316-79208338
  hypo
acaaaatcgtgaaggcggccaa

SEQ ID NO: 28409 - DNA, 31 bp, Homo sapiens; identical to SEQ ID NO: 10306
  chr15:79237307-79237338
  hypo

SEQ ID NO: 28410 - DNA, 31 bp, Homo sapiens
  chr15:79240714-79240745
  hypo
agcataggagaagagtcggagagagggggca

SEQ ID NO: 28411 - DNA, 43 bp, Homo sapiens
  chr15:79309572-79309615
  hypo
ccaaagcaaaactaaatcttccgtgtgcataattgaggctggg

SEQ ID NO: 28412 - DNA, 1285 bp, Homo sapiens; identical to SEQ ID NO: 10307
  chr15:79382098-79383383
  hypo

SEQ ID NO: 28413 - DNA, 30 bp, Homo sapiens; identical to SEQ ID NO: 10310
  chr15:79551660-79551690
  hypo

SEQ ID NO: 28414 - DNA, 144 bp, Homo sapiens; identical to SEQ ID NO: 10313
  chr15:79723975-79724119
  hypo

SEQ ID NO: 28415 - DNA, 209 bp, Homo sapiens; identical to SEQ ID NO: 10314
  chr15:79724351-79724560
  hypo

SEQ ID NO: 28416 - DNA, 81 bp, Homo sapiens; identical to SEQ ID NO: 10315
  chr15:79724606-79724687
  hypo

SEQ ID NO: 28417 - DNA, 91 bp, Homo sapiens; identical to SEQ ID NO: 10316
  chr15:79724701-79724792
  hypo

SEQ ID NO: 28418 - DNA, 743 bp, Homo sapiens; identical to SEQ ID NO: 10317
  chr15:79724863-79725606
  hypo

SEQ ID NO: 28419 - DNA, 1217 bp, Homo sapiens; identical to SEQ ID NO: 10318
  chr15:80215296-80216513
  hypo

SEQ ID NO: 28420 - DNA, 25 bp, Homo sapiens
  chr15:80416209-80416234
  hypo
cccccacacccggtctcaagaatta

SEQ ID NO: 28421 - DNA, 37 bp, Homo sapiens
  chr15:80451293-80451330
  hypo
aaattaaaaaacctctcggctcacgcctgtaacccca

SEQ ID NO: 28422 - DNA, 31 bp, Homo sapiens
  chr15:80471842-80471873
  hypo
ctgggacaggcatgggcgtgcattgcatctg

SEQ ID NO: 28423 - DNA, 30 bp, Homo sapiens
  chr15:80478607-80478637
  hypo
ctggggtcctccctcgggctgtaggcctgg

SEQ ID NO: 28424 - DNA, 30 bp, Homo sapiens; identical to SEQ ID NO: 10322
  chr15:80654042-80654072
  hypo

SEQ ID NO: 28425 - DNA, 177 bp, Homo sapiens
  chr15:81041838-81042015
  hypo
ctctgatttctccaggtatggcgtgagtcccgagaacattatcctctatggtcagagcattgggactgtccccacggtagacttggcctcgaggtatgaatgcgcagcggtaattctccattcccctctgatgtctggtttgcgtgtggcttttccggataccaggaaaacatactg

SEQ ID NO: 28426 - DNA, 30 bp, Homo sapiens
  chr15:81192769-81192799
  hypo
tgtgcttgtttccgcgttagccccacccca

SEQ ID NO: 28427 - DNA, 30 bp, Homo sapiens
  chr15:81245851-81245881
  hypo
cagtgggcaccttccgttcctgtccgcagg

SEQ ID NO: 28428 - DNA, 50 bp, Homo sapiens; identical to SEQ ID NO: 10326
  chr15:81294176-81294226
  hypo

SEQ ID NO: 28429 - DNA, 30 bp, Homo sapiens
  chr15:81489145-81489175
  hypo
atcaagccttttcacgtggagcagtcagat

SEQ ID NO: 28430 - DNA, 30 bp, Homo sapiens
  chr15:81605217-81605247
  hypo
gacagtcagggaaacgtggtctctgagagt

SEQ ID NO: 28431 - DNA, 572 bp, Homo sapiens; identical to SEQ ID NO: 10331
  chr15:82339663-82340235
  hypo

SEQ ID NO: 28432 - DNA, 30 bp, Homo sapiens
  chr15:82379868-82379898
  hypo
gttgctactgttcccgagactgtgtgttgc

SEQ ID NO: 28433 - DNA, 844 bp, Homo sapiens; identical to SEQ ID NO: 10332
  chr15:83316231-83317075
  hypo

SEQ ID NO: 28434 - DNA, 849 bp, Homo sapiens; identical to SEQ ID NO: 10335
  chr15:83378239-83379088
  hypo

SEQ ID NO: 28435 - DNA, 121 bp, Homo sapiens
  chr15:83572357-83572478
  hypo
cgaaactcctctaaacacacacacacacacggcaacaagagcgaaactcctctaaacacacacacacacacacgccacaccccacatcaagtaaaaagctgaacaagactgggcgcagtgg

SEQ ID NO: 28436 - DNA, 71 bp, Homo sapiens; identical to SEQ ID NO: 10337
  chr15:83654897-83654968
  hypo

SEQ ID NO: 28437 - DNA, 86 bp, Homo sapiens; identical to SEQ ID NO: 10338
  chr15:83775915-83776001
  hypo

SEQ ID NO: 28438 - DNA, 115 bp, Homo sapiens; identical to SEQ ID NO: 10339
  chr15:83776022-83776137
  hypo

SEQ ID NO: 28439 - DNA, 149 bp, Homo sapiens; identical to SEQ ID NO: 10340
  chr15:83776157-83776306
  hypo

SEQ ID NO: 28440 - DNA, 384 bp, Homo sapiens; identical to SEQ ID NO: 10341
  chr15:83776332-83776716
  hypo

SEQ ID NO: 28441 - DNA, 48 bp, Homo sapiens; identical to SEQ ID NO: 10342
  chr15:83776768-83776816
  hypo

SEQ ID NO: 28442 - DNA, 42 bp, Homo sapiens
  chr15:83827861-83827903
  hypo
ggattacaggcataagccaccgtgcccagcctattatttcta

SEQ ID NO: 28443 - DNA, 47 bp, Homo sapiens; identical to SEQ ID NO: 10353
  chr15:84748572-84748619
  hypo

SEQ ID NO: 28444 - DNA, 627 bp, Homo sapiens; identical to SEQ ID NO: 10354
  chr15:84748678-84749305
  hypo

SEQ ID NO: 28445 - DNA, 139 bp, Homo sapiens; identical to SEQ ID NO: 10355
  chr15:85200377-85200516
  hypo

SEQ ID NO: 28446 - DNA, 30 bp, Homo sapiens
  chr15:85383109-85383139
  hypo
gaagcacgagaaggcggtgcctggggaggt

SEQ ID NO: 28447 - DNA, 90 bp, Homo sapiens
  chr15:85478274-85478364
  hypo
agaagcagccagcactggggccgccatctccgtgaaggtggtcgccaacatcgctgccaacctgattgcgttcctggctgtgctggactt

SEQ ID NO: 28448 - DNA, 30 bp, Homo sapiens
  chr15:85680329-85680359
  hypo
aaataaaagaatatcggagaactgatattc

SEQ ID NO: 28449 - DNA, 30 bp, Homo sapiens
  chr15:85681158-85681188
  hypo
aagctttgttccttcggtcatttggaattc

SEQ ID NO: 28450 - DNA, 152 bp, Homo sapiens
  chr15:85695658-85695810
  hypo
gtaagtaaagtgttttcgtgagttttgtgagctattctagcaaattatcgaatctgaggagggggttgtgggaagcctctgactttattccagtcattcagaaatataggagacccaggtgggcacggtggctcacgcctataatcccagca

SEQ ID NO: 28451 - DNA, 25 bp, Homo sapiens
  chr15:86096036-86096061
  hypo
gttttttcaccgtgttagccaggat

SEQ ID NO: 28452 - DNA, 264 bp, Homo sapiens; identical to SEQ ID NO: 10360
  chr15:88798724-88798988
  hypo

SEQ ID NO: 28453 - DNA, 1265 bp, Homo sapiens; identical to SEQ ID NO: 10361
  chr15:88799036-88800301
  hypo

SEQ ID NO: 28454 - DNA, 515 bp, Homo sapiens; identical to SEQ ID NO: 10362
  chr15:88800412-88800927
  hypo

SEQ ID NO: 28455 - DNA, 30 bp, Homo sapiens
  chr15:89180784-89180814
  hypo
caggaaaggggaaacggtaagaattagagg

SEQ ID NO: 28456 - DNA, 30 bp, Homo sapiens; identical to SEQ ID NO: 10368
  chr15:89248459-89248489
  hypo

SEQ ID NO: 28457 - DNA, 329 bp, Homo sapiens; identical to SEQ ID NO: 10369
  chr15:89345997-89346326
  hypo

SEQ ID NO: 28458 - DNA, 447 bp, Homo sapiens; identical to SEQ ID NO: 10370
  chr15:89346346-89346793
  hypo

SEQ ID NO: 28459 - DNA, 24 bp, Homo sapiens
  chr15:89346881-89346905
  hypo
cggacaggacgccggcaggaggag

SEQ ID NO: 28460 - DNA, 30 bp, Homo sapiens; identical to SEQ ID NO: 10372
  chr15:89347104-89347134
  hypo

SEQ ID NO: 28461 - DNA, 31 bp, Homo sapiens
  chr15:89404139-89404170
  hypo
gaaatgacacaaacaacggtaatcacccagc

SEQ ID NO: 28462 - DNA, 31 bp, Homo sapiens
  chr15:89538331-89538362
  hypo
accaagtttacagcaccgagctgggtgcagt

SEQ ID NO: 28463 - DNA, 30 bp, Homo sapiens
  chr15:89703308-89703338
  hypo
aaagcgctagtgtttcgttaggtgctattg

SEQ ID NO: 28464 - DNA, 41 bp, Homo sapiens
  chr15:89809025-89809066
  hypo
cacaggcgtgagccaccgtgcctggccggattttttgtttt

SEQ ID NO: 28465 - DNA, 30 bp, Homo sapiens; identical to SEQ ID NO: 10375
  chr15:89905746-89905776
  hypo

SEQ ID NO: 28466 - DNA, 69 bp, Homo sapiens
  chr15:90171831-90171900
  hypo
cacacaggctcgagcgtttccaggtcaagggtaacggagcgtggaccaagtcccgcgtctcctcccggg

SEQ ID NO: 28467 - DNA, 30 bp, Homo sapiens
  chr15:90174811-90174841
  hypo
tgtcgatctccccgcggatctgctgctggc

SEQ ID NO: 28468 - DNA, 30 bp, Homo sapiens
  chr15:90176972-90177002
  hypo
tctcctcgcgaagccgcctctgcagctgtc

SEQ ID NO: 28469 - DNA, 46 bp, Homo sapiens
  chr15:90192978-90193024
  hypo
cccgcgctcatcttcccggagctggatgtcacggctggcagtgccc

SEQ ID NO: 28470 - DNA, 33 bp, Homo sapiens
  chr15:90296996-90297029
  hypo
taagccaagatcgctccattgcactgcagcctg

SEQ ID NO: 28471 - DNA, 137 bp, Homo sapiens
  chr15:90451517-90451654
  hypo
acgacatgaggaagcccgtgttcaccttcctggtggcgctgaagttgggctcgatttcatttcccttggcgtcgaatttacggcgatggatgtgactgggccggatatacagcacgtagtagcgctcctggggccag

SEQ ID NO: 28472 - DNA, 129 bp, Homo sapiens; identical to SEQ ID NO: 10390
  chr15:90456073-90456202
  hypo

SEQ ID NO: 28473 - DNA, 30 bp, Homo sapiens
  chr15:90501249-90501279
  hypo
agtaatttgaaggaacgcattactggtgca

SEQ ID NO: 28474 - DNA, 30 bp, Homo sapiens
  chr15:90501728-90501758
  hypo
ctcattgtcgcagcgcgactgcaacaggca

SEQ ID NO: 28475 - DNA, 37 bp, Homo sapiens
  chr15:90548959-90548996
  hypo
gtgagccactgcacccggcctaaaacaataggttttg

SEQ ID NO: 28476 - DNA, 30 bp, Homo sapiens
  chr15:90586506-90586536
  hypo
atagaggagacctgcgggcacccagggggc

SEQ ID NO: 28477 - DNA, 106 bp, Homo sapiens
  chr15:90606045-90606151
  hypo
agccccttctgcatacacacacgcgcgcacgcgcacacacacacagcctgcctggccgccccagtgaacaagacaacatggacacggggcctgcccccataagcct

SEQ ID NO: 28478 - DNA, 30 bp, Homo sapiens
  chr15:90611743-90611773
  hypo
aacgtgcgacccttcgtgtgcactgaatgc

SEQ ID NO: 28479 - DNA, 30 bp, Homo sapiens; identical to SEQ ID NO: 10391
  chr15:90627537-90627567
  hypo

SEQ ID NO: 28480 - DNA, 69 bp, Homo sapiens; identical to SEQ ID NO: 10392
  chr15:90628226-90628295
  hypo

SEQ ID NO: 28481 - DNA, 30 bp, Homo sapiens; identical to SEQ ID NO: 10393
  chr15:90630474-90630504
  hypo

SEQ ID NO: 28482 - DNA, 370 bp, Homo sapiens; identical to SEQ ID NO: 10394
  chr15:90631579-90631949
  hypo

SEQ ID NO: 28483 - DNA, 30 bp, Homo sapiens; identical to SEQ ID NO: 10395
  chr15:90633802-90633832
  hypo

SEQ ID NO: 28484 - DNA, 82 bp, Homo sapiens; identical to SEQ ID NO: 10396
  chr15:90634776-90634858
  hypo

SEQ ID NO: 28485 - DNA, 30 bp, Homo sapiens; identical to SEQ ID NO: 10397
  chr15:90645565-90645595
  hypo

SEQ ID NO: 28486 - DNA, 25 bp, Homo sapiens
  chr15:90724716-90724741
  hypo
agcaagactccgtctcaaaaaaaaa

SEQ ID NO: 28487 - DNA, 37 bp, Homo sapiens
  chr15:90729567-90729604
  hypo
ttggccaggcatggtggctcacgcctgtaatcccagc

SEQ ID NO: 28488 - DNA, 30 bp, Homo sapiens
  chr15:90746123-90746153
  hypo
aggcagggccctagcggcttcaagtaaccc

SEQ ID NO: 28489 - DNA, 160 bp, Homo sapiens
  chr15:90753905-90754065
  hypo
agaaggcatgtgagggagacacggagtgatgcttgagactgggggcacaggtacctagaggacggggtggcgtggcccgtgtctggggtctgtcagcgaggcgatccctgggctcttggcagggctggcactgctgaacgtggggctggctgaggcccaa

SEQ ID NO: 28490 - DNA, 566 bp, Homo sapiens
  chr15:90755552-90756118
  hypo
aagcccctggctgaagcctgtcggggtggagggagagggttcaccctgaatgggaaaaccggccgcagcctcggcgtgccctgctttcttcatactggactaacccactggatagatggatttagaggatgtccgagcagcacaggcagcccaggagagcgagcgagacactctttgacacaagggagagcataaaagcttaagactgaccccaaggtgcgccagcccctcgcaggaagtaaagtgcagaaacacctccacccctgcacaaagagcacctaggagtgagtgcgcaagcgtggacaagccctgcggtaccgtgtacacacacacacacacacacacaccacaggcaagctcaggcagggtccttcacagacgtctgcagtcactctggaggtgacccaagcacctgggcccttagacagtaacaccactcacaccgagcacagaccagctcgcgcccacaacacgagcctgtgacacgcaagtctctgtttctgagctgatgccgtctggctttggccatgagaccctcgtgtgaccaggtgcgtgcctaagttaga

SEQ ID NO: 28491 - DNA, 152 bp, Homo sapiens
  chr15:90761174-90761326
  hypo
gcataagcttctgagattacccggcctgggtttgaatcccagcactacacttacatcgctacgaccttcgacaagtagattcacctgtctaagccttagtgggcccacctgtaaaatggggataatgatccggtctcactgggcttacagtg

SEQ ID NO: 28492 - DNA, 158 bp, Homo sapiens; identical to SEQ ID NO: 10398
  chr15:90792608-90792766
  hypo

SEQ ID NO: 28493 - DNA, 30 bp, Homo sapiens
  chr15:90818578-90818608
  hypo
agtacgcgtggggtcgagcagcgctgccat

SEQ ID NO: 28494 - DNA, 30 bp, Homo sapiens
  chr15:90892481-90892511
  hypo
ctgaccgctggccacgtcccgctccctccg

SEQ ID NO: 28495 - DNA, 359 bp, Homo sapiens
  chr15:90904012-90904371
  hypo
ggcccttcaaatgcccggagtgcgggaagggcttcagagatagttctcattttgtagctcacatgagcactcattcaggagagaggcctttcagttgtcctgactgccacaaaagcttcagtcagagctcacatttggtcacgcaccaaagaacacacacaggtgagagaccttttaagtgcgaaaactgtgggaaaggattcgccgacagctccgccctcattaagcaccaacgaatccacaccggagaaagaccctacaaatgtggagagtgtgggaagagcttcaatcagagctcccactttattacccatcagcgaatccacttaggagacaggccctatcgatgtcctgagtgt

SEQ ID NO: 28496 - DNA, 27 bp, Homo sapiens
  chr15:90919630-90919657
  hypo
ggcctgagccaccgcacccgacccatc

SEQ ID NO: 28497 - DNA, 121 bp, Homo sapiens
  chr15:91072202-91072323
  hypo
ttcgagaccagcctgggcaaaatagcgagacccacccccgccccccattgctacaaaaacatttacaaactagccgggcgtggtgacccccgcctgtggtcccagctggtcgggaggctga

SEQ ID NO: 28498 - DNA, 38 bp, Homo sapiens
  chr15:91072382-91072420
  hypo
tacactccagaccgggcgacagagaaagacatccattc

SEQ ID NO: 28499 - DNA, 31 bp, Homo sapiens
  chr15:91192933-91192964
  hypo
gcctggcaaaggaacacgtgttttttttttc

SEQ ID NO: 28500 - DNA, 41 bp, Homo sapiens
  chr15:91311951-91311992
  hypo
ttgtttttgtttttgttttttcgagaccgagtttcggtatt

SEQ ID NO: 28501 - DNA, 18 bp, Homo sapiens
  chr15:91312231-91312249
  hypo
aggcgtgagccaccgcac

SEQ ID NO: 28502 - DNA, 30 bp, Homo sapiens
  chr15:91312476-91312506
  hypo
tatatccggaaataccgataaatacatact

SEQ ID NO: 28503 - DNA, 30 bp, Homo sapiens
  chr15:91312888-91312918
  hypo
cctgtggcgctttaacgccaccaccccacc

SEQ ID NO: 28504 - DNA, 31 bp, Homo sapiens; identical to SEQ ID NO: 10400
  chr15:91414432-91414463
  hypo

SEQ ID NO: 28505 - DNA, 31 bp, Homo sapiens
  chr15:91419630-91419661
  hypo
tctcaggagcccctctcgcctcctgctccac

SEQ ID NO: 28506 - DNA, 30 bp, Homo sapiens
  chr15:91421366-91421396
  hypo
cgcatgctggatggcgaggtgacagatgca

SEQ ID NO: 28507 - DNA, 30 bp, Homo sapiens
  chr15:91423322-91423352
  hypo
gagacatcgggaaacggctcgaggtgcgga

SEQ ID NO: 28508 - DNA, 50 bp, Homo sapiens
  chr15:91425021-91425071
  hypo
tggcaggaggagtgcccgtctgactcagaagaggacgagggccggggcga

SEQ ID NO: 28509 - DNA, 31 bp, Homo sapiens
  chr15:91448167-91448198
  hypo
ctttgccattaagccccgctgaaatcctcag

SEQ ID NO: 28510 - DNA, 30 bp, Homo sapiens
  chr15:91450699-91450729
  hypo
atcacagaggccaacgtggcagagaggtat

SEQ ID NO: 28511 - DNA, 30 bp, Homo sapiens
  chr15:91454676-91454706
  hypo
actctccccgcgtgcgtgtcctttcggagg

SEQ ID NO: 28512 - DNA, 418 bp, Homo sapiens
  chr15:91503629-91504047
  hypo
tcatagctgtccagcccttcccggcattactggatctccccatgggctcagatgcagtcaaggccagctgtggatcccggcacacagctgtggtgacacgtgagtggggctgggaggcactctgctccactcgagctggtgcctacggaagggggtgtggtcgacggaaaaacttctgtcttaaggcttctgtggctcatacagagcagctaccttgctcagtggataagccccaacccccttgttgtttcacagtagttccccagcctgtcaggcccagaagtttcttccttctggtgggaggctgatgctttctgtcctccctgcacggccacagacacattccctgcccgccgccgcctctgacagcagggactgtccagtctggcatggaagactgcggcgctcggtagcatgg

SEQ ID NO: 28513 - DNA, 30 bp, Homo sapiens
  chr15:91542179-91542209
  hypo
atgtcaacactggccgggaaaaacatcagg

SEQ ID NO: 28514 - DNA, 31 bp, Homo sapiens
  chr15:92006983-92007014
  hypo
cttgtacagatatcttcgtatacatgtttga

SEQ ID NO: 28515 - DNA, 18 bp, Homo sapiens
  chr15:92238882-92238900
  hypo
actcgttggtgctgtcct

SEQ ID NO: 28516 - DNA, 444 bp, Homo sapiens; identical to SEQ ID NO: 10404
  chr15:92459206-92459650
  hypo

SEQ ID NO: 28517 - DNA, 575 bp, Homo sapiens; identical to SEQ ID NO: 10405
  chr15:92936725-92937300
  hypo

SEQ ID NO: 28518 - DNA, 30 bp, Homo sapiens; identical to SEQ ID NO: 10406
  chr15:92938000-92938030
  hypo

SEQ ID NO: 28519 - DNA, 31 bp, Homo sapiens
  chr15:93153519-93153550
  hypo
ggctctgctcaaatgacgcaaggacagtcac

SEQ ID NO: 28520 - DNA, 31 bp, Homo sapiens
  chr15:93206673-93206704
  hypo
ccagcgagcaaccccacggagtgttccagcc

SEQ ID NO: 28521 - DNA, 29 bp, Homo sapiens
  chr15:93338401-93338430
  hypo
aaaaacaggtggctggctgggcgcggtgc

SEQ ID NO: 28522 - DNA, 15 bp, Homo sapiens
  chr15:93350448-93350463
  hypo
ttttttattgagagg

SEQ ID NO: 28523 - DNA, 25 bp, Homo sapiens
  chr15:93364650-93364675
  hypo
tctcgggggaaaaaaaaaaaaaaaa

SEQ ID NO: 28524 - DNA, 32 bp, Homo sapiens
  chr15:93368948-93368980
  hypo
agcgcccagccgcaaagctatccatttttatg

SEQ ID NO: 28525 - DNA, 29 bp, Homo sapiens
  chr15:93372503-93372532
  hypo
acctggccgggactctgtcttaaaaaaca

SEQ ID NO: 28526 - DNA, 29 bp, Homo sapiens
  chr15:93460771-93460800
  hypo
cagagcgcgacttggtctcaaaaaacaaa

SEQ ID NO: 28527 - DNA, 95 bp, Homo sapiens
  chr15:93504238-93504333
  hypo
ccactgtgcctggccgcatttgtgttttttattttaattaggattttagtctatagctttttgttttgttttgatgtttacgttgctttggtttt

SEQ ID NO: 28528 - DNA, 138 bp, Homo sapiens
  chr15:93546306-93546444
  hypo
tttacagccttggcaacgtagggagacctcgtctctacaaaataaaaacaagcaaaaatctagctgggcattgcggcatgtgcctacgggcccagttgcatgggaggcagaggtgagaggattgcttaggcccaggag

SEQ ID NO: 28529 - DNA, 82 bp, Homo sapiens
  chr15:93567907-93567989
  hypo
ttataactggaatgttcggaaaacataaaggacagctcgtaaaggagagagtaagagtcaccaaacacgtggatatttttgg

SEQ ID NO: 28530 - DNA, 221 bp, Homo sapiens
  chr15:93588122-93588343
  hypo
ggccatggtggacacgccaggagatctgcaccccgtgggcggtcccagcccacacatggggaagccgagaggacggagcccgcgcctccctccacatctacgcgtctagcagaacacagggagcagggccaggagcgggacgagggcgcccaggaggggccggggggccaggggcagccccgcagccgccctgcctggcaggtcccgagtcctatcataca

SEQ ID NO: 28531 - DNA, 89 bp, Homo sapiens
  chr15:93595487-93595576
  hypo
cgcaggcgtggctgcgaggtggggccatccttggagcagttgtgctggctcatgaggtcctctatgccatggacggccgagtggtaggc

SEQ ID NO: 28532 - DNA, 38 bp, Homo sapiens
  chr15:93642691-93642729
  hypo
gtgatttttttttttctgagacggagtctcgctctgtt

SEQ ID NO: 28533 - DNA, 33 bp, Homo sapiens
  chr15:94014474-94014507
  hypo
gtgagccaccgcgcctggccctatatctttttt

SEQ ID NO: 28534 - DNA, 270 bp, Homo sapiens
  chr15:94048776-94049046
  hypo
ggaagcctctgtggccagcagcgcctccgcctgggttttacttgcgtccactgggcttgttctgcccacttggcccggcaggctgagctgggctcatgctactgcccagatcccacgcctgccaagggcgagccaggtgcggagcagcaaggggtgtgtgagtgagcgagcatggagtctggccactgtgtgtagccatgcgtgctggctgcagcagggtgggccactccaggcgccggcacaagcgccggctccagccctgtgtgaacc

SEQ ID NO: 28535 - DNA, 44 bp, Homo sapiens
  chr15:94794562-94794606
  hypo
taaaatacacataacctaatacgcattttgttttttttttttga

SEQ ID NO: 28536 - DNA, 31 bp, Homo sapiens
  chr15:94871784-94871815
  hypo
tgtattcccacatgtccgtgatttactcatg

SEQ ID NO: 28537 - DNA, 30 bp, Homo sapiens; identical to SEQ ID NO: 10416
  chr15:96284567-96284597
  hypo

SEQ ID NO: 28538 - DNA, 31 bp, Homo sapiens; identical to SEQ ID NO: 10419
  chr15:96873708-96873739
  hypo

SEQ ID NO: 28539 - DNA, 82 bp, Homo sapiens; identical to SEQ ID NO: 10420
  chr15:96873910-96873992
  hypo

SEQ ID NO: 28540 - DNA, 137 bp, Homo sapiens
  chr15:98448106-98448243
  hypo
aaactggaaacaatccgaatgtttataaatgggaaaatggacggacgaactgtggtatattcataccatgggattgctttcagcaagtaaaaggaatgagctgctggccgggcgcggtggttcacgcctgtaatctc

SEQ ID NO: 28541 - DNA, 50 bp, Homo sapiens; identical to SEQ ID NO: 10427
  chr15:98503768-98503818
  hypo

SEQ ID NO: 28542 - DNA, 19 bp, Homo sapiens
  chr15:98503857-98503876
  hypo
gcagctgaccaatggccgc

SEQ ID NO: 28543 - DNA, 31 bp, Homo sapiens
  chr15:98512522-98512553
  hypo
acatggaatgggaaaacgctaaaaatcccac

SEQ ID NO: 28544 - DNA, 23 bp, Homo sapiens
  chr15:98971127-98971150
  hypo
aaagctagacattttttttttcg

SEQ ID NO: 28545 - DNA, 20 bp, Homo sapiens
  chr15:99153343-99153363
  hypo
tttgtttttgagacagtgtc

SEQ ID NO: 28546 - DNA, 20 bp, Homo sapiens
  chr15:99168894-99168914
  hypo
tcccagacctcagagtcctc

SEQ ID NO: 28547 - DNA, 19 bp, Homo sapiens
  chr15:99169213-99169232
  hypo
ctctaaataaataaataca

SEQ ID NO: 28548 - DNA, 168 bp, Homo sapiens; identical to SEQ ID NO: 10431
  chr15:99191461-99191629
  hypo

SEQ ID NO: 28549 - DNA, 1390 bp, Homo sapiens; identical to SEQ ID NO: 10432
  chr15:99192803-99194193
  hypo

SEQ ID NO: 28550 - DNA, 31 bp, Homo sapiens
  chr15:99222035-99222066
  hypo
gagccaccatgcctggcgtaaaaagatggtt

SEQ ID NO: 28551 - DNA, 38 bp, Homo sapiens
  chr15:99244846-99244884
  hypo
catgagccgccgcacccggccaacctatcccatatttt

SEQ ID NO: 28552 - DNA, 133 bp, Homo sapiens
  chr15:99250370-99250503
  hypo
gatacttggctgctgagctgtcgttcaggccttggcaactgacgctctgcagaacggaccaggagtgtgcggtggtggagtccggctggcctgggttgcagatttaactttcgcctctgcctctgtgtgcctc

SEQ ID NO: 28553 - DNA, 225 bp, Homo sapiens
  chr15:99256134-99256359
  hypo
ggccatctagtgtgcactttggactgatgagctcccctacctgaaatcctgtagcaagtccctataggataggcatgtggtacagtgtgaagctcctgagtggtcaacagctaccccgtgacaacatgccacactccatgtgccactccctcccgcctgcctgctgtgtccttggccccagtggtgctctcccgtgctgaccagccggcacggctcacctggccg

SEQ ID NO: 28554 - DNA, 162 bp, Homo sapiens
  chr15:99276211-99276373
  hypo
ggagcacccctcacgcgagcccatttttcaaggatacatgtttgtcttttagattctataaggagtagctgctacacagaaagatgtctacgtgtgggtgaacacctggcgtatcccatgcagggaggcttcagcagaccttggtggcgatggaaccaccac

SEQ ID NO: 28555 - DNA, 19 bp, Homo sapiens
  chr15:99295591-99295610
  hypo
aaagaatagagtgtttatt

SEQ ID NO: 28556 - DNA, 19 bp, Homo sapiens
  chr15:99295909-99295928
  hypo
ctcaaagaaaaaaaaaaag

SEQ ID NO: 28557 - DNA, 30 bp, Homo sapiens
  chr15:99340610-99340640
  hypo
gcatggcgagtggaccgttacctgtgcata

SEQ ID NO: 28558 - DNA, 121 bp, Homo sapiens
  chr15:99354750-99354871
  hypo
tccatctcaaaaaaaaaaaaaaagttatttctctatgtaaacaaagaaaactctccttccttataacttgtatgtgttgggtctatttgtattctgtgaaccataagaaataagtcaacta

SEQ ID NO: 28559 - DNA, 160 bp, Homo sapiens
  chr15:99371125-99371285
  hypo
ggtattctgcagtggagaatgggagttggaaagaaatgttttctcccacacctgtcccgctcctgtctactgaaagctgattaatcagtcagatagtgagttcctattggtagtacgcctccaaaatttggaagaggggaggtggcgtgatgtgaaaaag

SEQ ID NO: 28560 - DNA, 495 bp, Homo sapiens
  chr15:99434482-99434977
  hypo
gctggccaggcccagagaaggcggtgcctcccctgcccggtctcatctccgtctctcctctctctccacagtgtgcccaagcacgtgtgggaagcgggcgtgcaccgagaacaatgagtgctgccaccccgagtgcctgggcagctgcagcgcgcctgacaacgacacggcctgtgtagcttgccgccactactactatgccggtgtctgtgtgcctgcctgcccgcccaacacctacaggtttgagggctggcgctgtgtggaccgtgacttctgcgccaacatcctcagcgccgagagcagcgactccgaggggtttgtgatccacgacggcgagtgcatgcaggagtgcccctcgggcttcatccgcaacggcagccagaggtcagtcgcggccacacgtgtggtcactacccgccccacctcacccgccaccctagcacacaaaggtagactctgtcggttgtttcatccgggtgcagccctcaggaagtt

SEQ ID NO: 28561 - DNA, 50 bp, Homo sapiens
  chr15:99440243-99440293
  hypo
caacatggtgtgtaagcctcacgcatgacgtctcttctttgagtttccct

SEQ ID NO: 28562 - DNA, 131 bp, Homo sapiens
  chr15:99451865-99451996
  hypo
gactgtggccaagggcaggtgcgctaacatcgatttctgtgcttctaggaattactccttctacgtcctcgacaaccagaacttgcagcaactgtgggactgggaccaccgcaacctgaccatcaaagcag

SEQ ID NO: 28563 - DNA, 30 bp, Homo sapiens
  chr15:99456401-99456431
  hypo
ctggactcagtacgccgtttacgtcaaggc

SEQ ID NO: 28564 - DNA, 42 bp, Homo sapiens
  chr15:99461819-99461861
  hypo
accagagcagccaggcgcggtggctcacgcctgtaatcccag

SEQ ID NO: 28565 - DNA, 30 bp, Homo sapiens
  chr15:99491944-99491974
  hypo
cttcctgggccctccgtgctcttctgagtt

SEQ ID NO: 28566 - DNA, 146 bp, Homo sapiens
  chr15:99497233-99497379
  hypo
agggagagacacattcagccccgcaggtcctctgggaatccggtgagcgtcggcaccgggctggggccgtgctgattcccggcagcgtgtgggaatgtgcgggtgcctcgtggcctgctgacatcgcacacaggtcacagcctgtc

SEQ ID NO: 28567 - DNA, 178 bp, Homo sapiens
  chr15:99506041-99506219
  hypo
tcctactctggaaactgatctcggagttaaggcgaattgttcaagaacacaaactacatcgcactcgtcagttgtcagttctggggcatgactttagcgttttgtttctgcgagaacataacgatcactcatttttatgtcccacgtgtgtgtgtccgcatctttctggtcaacattg

SEQ ID NO: 28568 - DNA, 30 bp, Homo sapiens
  chr15:99512751-99512781
  hypo
gccaggtaggcacacgccgccctcgggcca

SEQ ID NO: 28569 - DNA, 31 bp, Homo sapiens
  chr15:99947375-99947406
  hypo
aggcccgtccccacctcgtgcccatcatggt

SEQ ID NO: 28570 - DNA, 39 bp, Homo sapiens; identical to SEQ ID NO: 10433
  chr15:99955138-99955177
  hypo

SEQ ID NO: 28571 - DNA, 183 bp, Homo sapiens
  chr15:99966815-99966998
  hypo
aggtgtgcccgaggccgcgccccgcagcagagctgggattagaatctagctgttttggagccatcgtcttttccgtgatgttctgaggggcctctctgtttcttttgaggagtttcatgctgattattgagacaaggtggttcaggcaagaccgctctcgagcatggacgcaggcacgtaaaa

SEQ ID NO: 28572 - DNA, 31 bp, Homo sapiens
  chr15:99975076-99975107
  hypo
cgtccctgcgccctcacgcctcacctgggag

SEQ ID NO: 28573 - DNA, 31 bp, Homo sapiens; identical to SEQ ID NO: 10435
  chr15:100273945-100273976
  hypo

SEQ ID NO: 28574 - DNA, 195 bp, Homo sapiens
  chr15:100649030-100649225
  hypo
caccaggcaacactggcggcaggaggcggcatcactgggtgccttcctaagaaaatccactcccctaggcctcctgagacctctgctctaccccactccctgtctggggagagtgagtctcctctccaaagccccaccaaggaccgaaggagaagtacgtcacctggcacttgccgtgcacgcagagatcagtct

SEQ ID NO: 28575 - DNA, 205 bp, Homo sapiens
  chr15:100726605-100726810
  hypo
aaatgaaatgcaatcacgcattgctgcatttggccacttttcaaggtgaccaacaacttcatggactctgaattgccgcatacccttttccctcccatcttggcgccatctcaatgtctgatgagcatactacctatctccacagccaggtcatgactacagcagtcaaacaagcagtgattccagcgcccggggcaggcaggaa

SEQ ID NO: 28576 - DNA, 103 bp, Homo sapiens
  chr15:100791526-100791629
  hypo
caaagtatcaaatgagcggtgctatggattgacttgtgtccccacaaaattcttatgtagaaaccctaactcccaatgtgactataggtagagagaggacctt

SEQ ID NO: 28577 - DNA, 592 bp, Homo sapiens; identical to SEQ ID NO: 10436
  chr15:100881251-100881843
  hypo

SEQ ID NO: 28578 - DNA, 492 bp, Homo sapiens; identical to SEQ ID NO: 10437
  chr15:100881966-100882458
  hypo

SEQ ID NO: 28579 - DNA, 238 bp, Homo sapiens
  chr15:101099269-101099507
  hypo
cccatgcgtgccctcgcctcccagcgcgcggcccggcgcagctgacaacgcccccgggtgggagcagctgccggcctcgtcggggggtgggcactgagtgccgcgcagcagcggggaagatggggcccgtggcccaggctgtgggggcagggagggggccctgcgcattcccagtctcgcgcccgccgcctcctccagcttggtagccgccagcgtgctctacggtgtttttgtttgt

SEQ ID NO: 28580 - DNA, 30 bp, Homo sapiens
  chr15:101189043-101189073
  hypo
agagcacttgttaacgtttggaggcacagt

SEQ ID NO: 28581 - DNA, 184 bp, Homo sapiens
  chr15:101267009-101267193
  hypo
tcactgcgtggagcagcggctttgctgggcttccttctaccatccccattaccctgatttcattcttatcccattcctttcctcctgggaaggcctggaatgatgatatgtcccagtgccatagagtagcacggataccagcacacacacagagtactcggcatgaacccggctctgttccact

SEQ ID NO: 28582 - DNA, 35 bp, Homo sapiens; identical to SEQ ID NO: 10439
  chr15:101459154-101459189
  hypo

SEQ ID NO: 28583 - DNA, 117 bp, Homo sapiens
  chr15:101464784-101464901
  hypo
tggcagtgacaacagcgggacctgcctttgaagatcggctgctgcaagggttgatggctggcatgtcgcaaagaccccccagcatgtactggtgtgtggggccggaggagtcagctg

SEQ ID NO: 28584 - DNA, 122 bp, Homo sapiens
  chr15:101469410-101469532
  hypo
cttgggaagacttctggattgcggagggtgggtggaacttgagcagacatcacccaggcagtggctcgcccccccagctctctgtgagtggccgtcgcttcggtcctgaaagccctgccaca

SEQ ID NO: 28585 - DNA, 30 bp, Homo sapiens
  chr15:101606252-101606282
  hypo
ttctccaccgactgcgaggactcagacatg

SEQ ID NO: 28586 - DNA, 30 bp, Homo sapiens
  chr15:101713830-101713860
  hypo
tggccctcacatcccggagtggagggaatg

SEQ ID NO: 28587 - DNA, 31 bp, Homo sapiens; identical to SEQ ID NO: 10440
  chr15:101835747-101835778
  hypo

SEQ ID NO: 28588 - DNA, 31 bp, Homo sapiens
  chr15:101850401-101850432
  hypo
gtgcttctccaagacccggtgtgtcagcccc

SEQ ID NO: 28589 - DNA, 31 bp, Homo sapiens
  chr15:101862832-101862863
  hypo
aagaaaagagaagggacgacactgacaggaa

SEQ ID NO: 28590 - DNA, 31 bp, Homo sapiens
  chr15:101911510-101911541
  hypo
tggcatttggccagctcgtttctcagttgcc

SEQ ID NO: 28591 - DNA, 289 bp, Homo sapiens
  chr15:101938604-101938893
  hypo
acacctttttaatgccatactcgaaagcctgcttagccagtcggccgggcccgtccaccgtcttgccgtcgtcgtccggcccccagctggcactgtaaatgtcgatgtagttgggtctgatgcccagcgactttgcctcgaccacatctgtgacatcgccgtccagcatgcggatgcctgaaagcacagaggaggctcggtgtcggcgcccaggctccgggcacacagcgacgggaacccgggcccaggaggctcggatgaggacaccgcatcacagagtccctcccca

SEQ ID NO: 28592 - DNA, 169 bp, Homo sapiens
  chr15:101974858-101975027
  hypo
ctgctcattgtaagtctctgacggcaagtgaggtgctctcaggccaatggaaccgaacactgtacaacagatgactgaccaggcgtgggggcttctccgtggagacgggatgcaggcagacagcgcggtggcagaggctgattctcccggcactgtgtcccttcctctg

SEQ ID NO: 28593 - DNA, 173 bp, Homo sapiens
  chr15:102004884-102005057
  hypo
ctggagggatctactgcgtgacaccctgttaagccacctggcctatactccctggggaggcctggagctggtctcctcaccaaggggttaggaaaatgcctgggggagggtcagcgtcctcctaaagaagtccatggaggctgtccgctctatcccgccggtgacaagggatg

SEQ ID NO: 28594 - DNA, 30 bp, Homo sapiens
  chr15:102022227-102022257
  hypo
ggacagagggagaaacggcggctggtgggg

SEQ ID NO: 28595 - DNA, 31 bp, Homo sapiens
  chr15:102031395-102031426
  hypo
gtgggagaacaggaggcgtggtgggaggccc

SEQ ID NO: 28596 - DNA, 372 bp, Homo sapiens
  chr15:102043026-102043398
  hypo
tccacctcctgggcctcactccgccctatacacgcgcacacttaatgacatctctgatcatgtcttcaggacgcataccctctttgacttgaaaaagtaacaactgtttgtggccttctcacaggccgaaaagaacaagcggggtccagtggagaaaggtgaggcatgggaaggcctggcccgagcactgtgacttcagcgaggcaccctccacccctctcagctttcctggtctgaaagtagaatttcgccagagggtgagccgacaggtagagctgtttccacctgcgtgtgctgcctgtgagctggggaactgcccacactgggaggggttgggaagcgtaggagggcacctgtcgcagacgttgagga

SEQ ID NO: 28597 - DNA, 20 bp, Homo sapiens
  chr15:102043700-102043720
  hypo
acaaagaatacgggccgggc

SEQ ID NO: 28598 - DNA, 31 bp, Homo sapiens
  chr15:102076806-102076837
  hypo
agagctgtgggagcagcgtggggacagaccc

SEQ ID NO: 28599 - DNA, 336 bp, Homo sapiens
  chr15:102077051-102077387
  hypo
aacagagcagaaatggtgactcgcggccacacccggggctcttagtcttggaggcctgtccccgccccatctgctgctgcccacagggaaccctcctagagccgtcacggggcataaggcccagggggcctcgcgagctgatctttcctgtgcggagccaaggatgcagcagagggtgtgctcacggcgaggtgtccctctccggaggcagctcttcagggtttggcagaggagaggagcgcagtgaccacccagcactgccctaaggtttgcaggcacccgggagggacaatggctccatggcgggcggaggccgagaagcacttggcaagctag

SEQ ID NO: 28600 - DNA, 30 bp, Homo sapiens
  chr15:102251249-102251279
  hypo
tgacacatccctgtccggcactcaactatg

SEQ ID NO: 28601 - DNA, 30 bp, Homo sapiens; identical to SEQ ID NO: 10441
  chr15:102515284-102515314
  hypo

SEQ ID NO: 28602 - DNA, 31 bp, Homo sapiens
  chr16:84432-84463
  hypo
ggcacacacaggcaaacgtgtctacaggcac

SEQ ID NO: 28603 - DNA, 3 bp, Homo sapiens
  chr16:94324-94327
  hypo
aca

SEQ ID NO: 28604 - DNA, 30 bp, Homo sapiens
  chr16:101671-101701
  hypo
aagtaactgaatagcgcaaacctgggctgc

SEQ ID NO: 28605 - DNA, 119 bp, Homo sapiens
  chr16:111054-111173
  hypo
tctgaggtctgaagagcgaacaccgggcagacgaaggcgggagtcccgggcggggaaacgcaccgagcactcctcctccgaggtctgcacgcagcccgacctgtcgttgcgcacgcagc

SEQ ID NO: 28606 - DNA, 30 bp, Homo sapiens
  chr16:112429-112459
  hypo
gctaccccttccatcgcccacagaggtgaa

SEQ ID NO: 28607 - DNA, 55 bp, Homo sapiens
  chr16:112972-113027
  hypo
tcatcagcgctgcggccgcccggaagctcatcttggccaccgactctcgcttgcg

SEQ ID NO: 28608 - DNA, 30 bp, Homo sapiens
  chr16:113696-113726
  hypo
ttcagcttcccgtagcgctggctgcagtga

SEQ ID NO: 28609 - DNA, 146 bp, Homo sapiens
  chr16:114336-114482
  hypo
agggaccaagagagagactggcgctgtgggaaggccctgcgggcagcccggggacccaagaggggcagagtgtggacacgcccgaagcgtacttgtcggctgctaagaggcaagagcatccgggcggtggagacagagaaggagag

SEQ ID NO: 28610 - DNA, 30 bp, Homo sapiens
  chr16:114972-115002
  hypo
cgctgcaggctgctcgtgctgtccctgcgg

SEQ ID NO: 28611 - DNA, 30 bp, Homo sapiens
  chr16:117919-117949
  hypo
ccgagagctgtgagcgtgtacggggaacct

SEQ ID NO: 28612 - DNA, 30 bp, Homo sapiens
  chr16:136641-136671
  hypo
ggggtggggagacgcgagcgcccacctgcg

SEQ ID NO: 28613 - DNA, 207 bp, Homo sapiens
  chr16:142583-142790
  hypo
tgtgactcacctcctgcacagcgggggccaggggattcctaaattctgacaaggagaccggcaaggagaacttggcaagaacggacggcaggtcatgagatgggaactggtgggagaactgctcggccagcggggagtacctgcaggcaggtgagcatgccagtgagtgcagcagacccccccaccgtgttctcaacactggcctca

SEQ ID NO: 28614 - DNA, 121 bp, Homo sapiens
  chr16:189553-189674
  hypo
caggagatctttgagaccttgggcgaggcagtgacactaaaggcaggagcgactacagaagaataaattaaacttcatcagattaaaaactttactgcggccgggcgcggtggctcacgcc

SEQ ID NO: 28615 - DNA, 113 bp, Homo sapiens; identical to SEQ ID NO: 10443
  chr16:215759-215872
  hypo

SEQ ID NO: 28616 - DNA, 534 bp, Homo sapiens; identical to SEQ ID NO: 10444
  chr16:215912-216446
  hypo

SEQ ID NO: 28617 - DNA, 273 bp, Homo sapiens; identical to SEQ ID NO: 10445
  chr16:216505-216778
  hypo

SEQ ID NO: 28618 - DNA, 2 bp, Homo sapiens
  chr16:232163-232165
  hypo
ca

SEQ ID NO: 28619 - DNA, 31 bp, Homo sapiens
  chr16:267427-267458
  hypo
gggcgcagtggctcacgcctgtaatctcaac

SEQ ID NO: 28620 - DNA, 24 bp, Homo sapiens
  chr16:280205-280229
  hypo
tttgagacggagtttcgcccaggc

SEQ ID NO: 28621 - DNA, 37 bp, Homo sapiens
  chr16:299612-299649
  hypo
agtccacatcgaggacgtcctccgggcactcccacga

SEQ ID NO: 28622 - DNA, 102 bp, Homo sapiens
  chr16:299876-299978
  hypo
ttctggttcttactccgtttttttctttcctttgccaaaggaatctatgttttatttatttattatttaaaaaaaatttttctttttagacggagtctcgct

SEQ ID NO: 28623 - DNA, 29 bp, Homo sapiens
  chr16:300217-300246
  hypo
ccgcgcccggccaggaatctatgttttaa

SEQ ID NO: 28624 - DNA, 355 bp, Homo sapiens
  chr16:311205-311560
  hypo
cgagcacaggagtgccgccctcccctcctgttggcatctgctctgagtgtgcagtgagccgtgggctcacgagggtgatgcctcaacaggagcctgcctgtcacaggccttgcagttgccgggctgctgttgaaggggactcagggccacgttccgtgaccgtgtgcttgattctaggggaaaccctgtggaaccacagcagcagcttcagcgggaatgcgtccatcctgagccctctgctgcaggtgcctgatgtggacggcgatggggccccagacctgctggttctcacccaggagcgggaggaggtacatcccagcctggctctgctcccaagtcacgaggccacctgcca

SEQ ID NO: 28625 - DNA, 31 bp, Homo sapiens
  chr16:339929-339960
  hypo
atctcaggaagacctacggcccccaaacctt

SEQ ID NO: 28626 - DNA, 30 bp, Homo sapiens
  chr16:354254-354284
  hypo
aaacagcacgacaccgacgcggagcgcgac

SEQ ID NO: 28627 - DNA, 21 bp, Homo sapiens
  chr16:356102-356123
  hypo
accggcaggcacatgcgtaca

SEQ ID NO: 28628 - DNA, 334 bp, Homo sapiens
  chr16:356182-356516
  hypo
acacacaggcacgctcacttttctgaaccagttagagtgtatttaacaaaagcaaggtcgctctcatacctaaccacagtacaaatatggatggttaaaaaaactgaccctgatacaataacatcacgtggcagatcttattccaattttgccagctgctccaataacatccttcatagcaaaacatgttttaaaatccaggccgccagtgtctaagccgcggagggatgcagccagggacagctcccctgtgacaagcaagcagggtggcagatgggaggtgggaccctccgtgtgtgtggccttcctgccctcccgccgtgggctctggcgc

SEQ ID NO: 28629 - DNA, 183 bp, Homo sapiens
  chr16:360131-360314
  hypo
atagagctcctggccccgaccgccggtcagcaggcaatgatgaggacacctgtgagccaccaccactgagacacgtgcacacaggtgatgcaggcacccatgtgtgcacaggggaacatgtacacacaaaggttcacacgtgatggtaaagcccaggtgcccagccacgcgtcttcctagctg

SEQ ID NO: 28630 - DNA, 144 bp, Homo sapiens
  chr16:364474-364618
  hypo
caaggtgtctgggaccggacttacacactgctgtccgtgagggactgggtatccggggcgggacttacacgctgctgtccgtgagggacagggtgtctgcatcgctggacaggctctgctgctcgctgtcgttggcactggtgg

SEQ ID NO: 28631 - DNA, 82 bp, Homo sapiens
  chr16:364963-365045
  hypo
tttgggtttgttttccgtgcacggtactagaaatgggacgcagatgttctgctcattctgcagtgcgcgtcgggagaggaca

SEQ ID NO: 28632 - DNA, 225 bp, Homo sapiens
  chr16:410252-410477
  hypo
actgcctaggaaccctgaggccgcggccaagttctgagcgtgtgactgtgtgtgctgggccccaggcccctttgtcgccgcggcgtctgtcgtggcaaacaaaagtgaaccggattagccacagtggattaaaagatttacgtctcagagtttacctaataacctaacaatcgtgtcaacgggagctttgaacccccagggcgcgcctgccaggccaactgagag

SEQ ID NO: 28633 - DNA, 493 bp, Homo sapiens
  chr16:410874-411367
  hypo
gtccattgacaagctcttaatcgcagctgcccttgcagggcctgtccctgaagtcccgagtaatgggatttggcgcttctgatccatcgggctggccgcttcccgtgtcataggtggacattttttttctttatatcgcttctgtttcttttttttttttctcctcgaaaaaatgctgcttaaacggcaccgacttgacatggcttgtctcctaaccttggagtggcggccgggacgccggcctggatcagtcgggggtctttgatgccgcctccatgtgaaacctgacgtggaagacccaccggggcggttttggggtccgaggtccgtcaggattcatcctgcctcaccctgctccctttgtctcttcccctgacccttcctcgggacacccggagagggtctgagggtgagggtgcgggcgctgcgtgtgggcttgcactcgagggtggggtgggccgagggcagggccgcagccgcgagaacaatgggc

SEQ ID NO: 28634 - DNA, 174 bp, Homo sapiens
  chr16:429268-429442
  hypo
agcaggctctcctgccagcctcgtgaccctcccatagaggcaccagaagaaacgatacacctgccaatagcagcctgtcggcaaatccaggccaagctccaggggaacctggcgtggcgactgggcaggggctggccaggctccacccacgacgcactccaggctttccaggtg

SEQ ID NO: 28635 - DNA, 30 bp, Homo sapiens
  chr16:460501-460531
  hypo
ctccccctgacggccgcccgctccctgccc

SEQ ID NO: 28636 - DNA, 1 bp, Homo sapiens
  chr16:505064-505065
  hypo
a

SEQ ID NO: 28637 - DNA, 30 bp, Homo sapiens
  chr16:521260-521290
  hypo
gtggcctgttgagcacgaggtcttctccct

SEQ ID NO: 28638 - DNA, 4 bp, Homo sapiens
  chr16:521899-521903
  hypo
tggt

SEQ ID NO: 28639 - DNA, 228 bp, Homo sapiens
  chr16:521925-522153
  hypo
ccggtctggagggttagattccaggagagccacgtggctgcagcagaaaatgcatgaagttgaacttgagcccttgggggccgccgggaaggtggaggtggcagccgccagtcctggtcagcctgctgccgagcaagggtaccagaagtggggctgagctgctggccggtagggcctgggcttctcatgtcagtcctctgagccctgactcctcgaaagctgaggctg

SEQ ID NO: 28640 - DNA, 30 bp, Homo sapiens
  chr16:522594-522624
  hypo
gcccttggtctgcaacgtccggggaactgt

SEQ ID NO: 28641 - DNA, 115 bp, Homo sapiens
  chr16:524278-524393
  hypo
atttctctttactgggagcatcgcagtgctcacaccggggtggtcgggtaaaatgtgcagttagtcatggccgagctagtgggtctgctggctcgcactgttttcccagggatcc

SEQ ID NO: 28642 - DNA, 30 bp, Homo sapiens
  chr16:532482-532512
  hypo
tcccagcttgtgcccgctgactgctggcgc

SEQ ID NO: 28643 - DNA, 30 bp, Homo sapiens
  chr16:533213-533243
  hypo
gtggacctgctttccgtgttgcccctgcta

SEQ ID NO: 28644 - DNA, 164 bp, Homo sapiens
  chr16:534202-534366
  hypo
aagaacaaaacactcccgcacccagggtcctcccaggcccctgacagcagccagctctccaccggccctgcatcttccttaagttcccccacacagggaggtccttcctgtgcctggcttcttccacttgctgttgcgcttgtggatttagccatttttttttt

SEQ ID NO: 28645 - DNA, 30 bp, Homo sapiens
  chr16:537657-537687
  hypo
acagaaggttctcccgaggactcctgcggg

SEQ ID NO: 28646 - DNA, 30 bp, Homo sapiens
  chr16:569152-569182
  hypo
ctcagggcccaggccgctggaagacactgg

SEQ ID NO: 28647 - DNA, 224 bp, Homo sapiens
  chr16:571889-572113
  hypo
caggagggggcctgtgcttctcggggtctgcaccccaggcacagcggtgtcaccccgcaggaccgcgggcctgccccaacccccagcattcccgggtgggcccagaccccatcaccaagactggccacccgctgcgtgtgtgtgcgcgcgcgtgtacgtgtggccccacatccgccgccttccacgctaggatgtaagaggtcgcctcctattgtacatttggg

SEQ ID NO: 28648 - DNA, 40 bp, Homo sapiens; identical to SEQ ID NO: 10448
  chr16:577639-577679
  hypo

SEQ ID NO: 28649 - DNA, 30 bp, Homo sapiens
  chr16:585156-585186
  hypo
gcctcaggagcatgcgttccgtccccacgg

SEQ ID NO: 28650 - DNA, 73 bp, Homo sapiens
  chr16:587257-587330
  hypo
aagaaaggttttctgagtgagcgcaggggagcaggaggctggtgagcagctcgcttcctgccctgggtgcagc

SEQ ID NO: 28651 - DNA, 166 bp, Homo sapiens
  chr16:588069-588235
  hypo
ctttccacctgtcttacgtggataccaggagatccgccacgactcccgtggccccgtccacactgcgcggcgctctccggcgtggccgccaggtgccccttcgagggcaggtgtgagtacagggtggtccctgtggagaagcgcctgcaggcgagtgagccaggct

SEQ ID NO: 28652 - DNA, 68 bp, Homo sapiens
  chr16:588486-588554
  hypo
tgcttcaaccctcccacgaccccagcaccttcagagaaaacggaccctcgtgccgagtgaagtggttc

SEQ ID NO: 28653 - DNA, 384 bp, Homo sapiens
  chr16:594313-594697
  hypo
gctgccccggccggacggggcatctgtgtttctcggtgtggcctcagggctctggtggctttgaccgaggccccgggggacagaatgcagcttcctgctcctcacttttcctaagaaaggggccgcctcccaggactggggctgcgccagtcacaggcccgcggcctccacgctccgggtgctgctgtcccggctgcttcagggcgggctctgtcttgcacgcagcgagcggcttcatcacctcccttttgaattggagctgagtgtcggcaacgcccagataactggggcgcgcgggtcttttgtgctggatttttctgtacagttgcctcgatcttccatccagcttggcctctgtgcagtaaggagcggcccgtcgcctcc

SEQ ID NO: 28654 - DNA, 30 bp, Homo sapiens
  chr16:612291-612321
  hypo
gggccatgctgggacgtccactccccacag

SEQ ID NO: 28655 - DNA, 136 bp, Homo sapiens
  chr16:613511-613647
  hypo
actgggcgtgccgccgtggctccaccacgcctaggccccacgcacccaccccagaccgccctggggagtccgaccccggcaggcaaccccagggagcacggcccacaggtgctgcccccgcgcctgacctcgtggt

SEQ ID NO: 28656 - DNA, 251 bp, Homo sapiens
  chr16:614837-615088
  hypo
ccagggtggagcagcgcctgggacagttggggcccgcggggggcctggccccgagacccctgcgggagcagctgggcaagatccgcctggagctgctcaccattcaccaggcgctggagcaggccgtgaggccgccagacgcacccctcgacctctctgtgaaacgtgcgcccgccaaggggccccaggctcttggagaggcgtgggggcggcccgagctgggtcccgtgttgaccgggggcacccccgag

SEQ ID NO: 28657 - DNA, 30 bp, Homo sapiens
  chr16:623990-624020
  hypo
tctgtgcaacatcccgcagcccacggtggg

SEQ ID NO: 28658 - DNA, 30 bp, Homo sapiens
  chr16:644066-644096
  hypo
tccccaagcccagccgctcccgctctgcag

SEQ ID NO: 28659 - DNA, 243 bp, Homo sapiens
  chr16:666663-666906
  hypo
gccctccctaacaccaaccttggcagttcctgggctgcagtaagccgagacttggaaatacattcgccttggagaattcaacttcaaaatgcatacgaagtaggtcagggtggaaataaaggcactgccctttctccaggcacgctggagtccacgccctgcctttgcccaatgccctctgagggagaggccctgtgccttgcacccagcgcgggccacaggcggaggccccattccaggcaa

SEQ ID NO: 28660 - DNA, 157 bp, Homo sapiens
  chr16:667407-667564
  hypo
agaatggattttactccaacaggaaaaagacagtctgggacactgtgtccctagagatcgcggctcccctcctgccccggaaaacctgattccgtggtggctgtgagccccttccctccccttctgtcggcttcaccttaaaaagcatttcccagcg

SEQ ID NO: 28661 - DNA, 329 bp, Homo sapiens
  chr16:667966-668295
  hypo
cttgctcactccccaggtgggcgggggccccttctgctgcctgcctggctcagcggcacggcgccaggctgctgtgacctgtgcagacaaagccgcttagcacagcctcattggcacctgtcctggccgccccgctcccctcaggacatccaggtgggtcggcagaggagggaaggaggtgagcctctcacagggaccacagtcccggcccctcccctccccgtatgtttcagggacacgtcgggccagggccggttctgcaccatcttcaggtcctactccaggggcgctcaggtaagaccagcaccgctctttccattgcttttcaa

SEQ ID NO: 28662 - DNA, 30 bp, Homo sapiens
  chr16:670785-670815
  hypo
tcccagccccccgccgacgggctccaccgc

SEQ ID NO: 28663 - DNA, 523 bp, Homo sapiens
  chr16:671149-671672
  hypo
gtgccaggtgcttccttgccccgggagaagcacctgagtctccaggcgggcctctgaccgccgtgactgagcatttgggccaccccgggagcccagccctgtcctgtgtctctcctgcctggtgagcagcggtgaggtgcgggtgcatccagccgaggtgcagagcccaggtttgcagcagggtttctcccgccgcccctgatgagacacagactagcaaggactgtctgtcccagccgggatttgtcactctgcctccctccgttagagagtggagaggcctggaaggtccccgcggcctgggtcttgcagatggcaccagcaaaggccaccggccactccccgctgccgtcacctgtcacacagcagcagtcccgcggctcttcccgcgaggcccttcacgtgccgccgaaggccgggctccctagacttcatggtcgtgtttgcatattctgttgctgtgatctgagacggcccctctcagaagcgggtgccacaacccgctggtgggatgagtgggtca

SEQ ID NO: 28664 - DNA, 96 bp, Homo sapiens
  chr16:677346-677442
  hypo
agcctgcaggacctctgctgccgggccatcgtctcctgcacccccgtgcacctcatcgacaagcttccactgcccgtcaccatcaagagccacctc

SEQ ID NO: 28665 - DNA, 245 bp, Homo sapiens
  chr16:677966-678211
  hypo
cagggaagcctgggtgtggcccggtggtggtgcactggtgacttcatggccacgccagctgcggggacgcacttgggactcctcgagaggggactcgcggccgcgatggcaaggcatcctgtgaattcatgcgctgcgagtggcggggctgcccagaggccgggggagcagacagggccggtgctccctctggaagcttgggtgaccggggccctggctcccacgggatggagggtgtggtcctg

SEQ ID NO: 28666 - DNA, 30 bp, Homo sapiens
  chr16:704961-704991
  hypo
gggccttgcagaatcgaggtggccccgact

SEQ ID NO: 28667 - DNA, 16 bp, Homo sapiens
  chr16:714969-714985
  hypo
cgcccggctgaactga

SEQ ID NO: 28668 - DNA, 30 bp, Homo sapiens
  chr16:717541-717571
  hypo
acggccgcccgcaacgagatccttgtgtgg

SEQ ID NO: 28669 - DNA, 51 bp, Homo sapiens; identical to SEQ ID NO: 10451
  chr16:717959-718010
  hypo

SEQ ID NO: 28670 - DNA, 30 bp, Homo sapiens
  chr16:720868-720898
  hypo
caacaacgttctctcggaagcagaaatcct

SEQ ID NO: 28671 - DNA, 437 bp, Homo sapiens
  chr16:726553-726990
  hypo
gcaggcagctcctcacggcggtgggtggggggcttgtggatgcggggagctgggtgagcctcacaggcaggggtgccatggggaggtccgtggcccacactcaggcccctgcccccagatcagcagcaagcgctccagcagtttcaagcgggccattgctaacggacagcgggcactgccccgggacgggccgctggatgagccaggcctaggtgtctacaagcggtttgtgcgttacgtggcctacgagatcctgccttgtgaggtggaccgccgctggtacttctaccgtcaccgcagctgcccaccccccgtgttcatggcctcggtcactcttgcccaggtgggccccccggccgctgccccgggagcctcccgcgctcctggccatgaccagcctaacactcgtgtccccagatcatcgtgttcctgtgtta

SEQ ID NO: 28672 - DNA, 58 bp, Homo sapiens
  chr16:728062-728120
  hypo
gaggctgcacaggccagggctcgggcatgtggtggccgcccaccaggggccttcacgt

SEQ ID NO: 28673 - DNA, 954 bp, Homo sapiens
  chr16:734979-735933
  hypo
ccactgccccacctgtcgcagacccagccccggctgctcatgggccgcttgcagtggctgcagttgacgtgcagggtggtggaggcctggttgaggcagctgacggcgcggctggtgctcagcttgaccacctcgttggacacgttccagaggcggaagcgctgcagcaggtcgatgtaggaagtgtaccagtgctcctgggggagggagcgcccggcagtcaggatctgggtgccaggggcggcgctgcaggggggaggccccgcccaccacacacctgggtctgctcgtcgatgtccttgcgcacccgttcacccaggacgatgagcacagacacagccatctgcacgtcgccctgctcagcgtagaagtgcagcatgtcgcgcaccagcacgccgaagaagtcgggcggcaggcggctgtcgtagagcgcgtgtgagacagacaggagcgagaaggaggagtccacgggggccagggaggccacatccgcctcgctgccgctcacgtgcggggagtcggccttgtcctgcaggtgctcgggcccgggaggcgtgtccacgatctcgtggcgcagcggaaaggcctcctgcggcagcacgcactcagggtcctcggctggaaggcagggaccagcggaggctctgagtctgtcctccatccgcctctgaaccccaccctgcccggacccccactcacggtgcgcgtgttccggatccagcaggtacagctcgtcctcctcaccttccacgtcacccagcaggtagtcggcaggtacgtcgctgccctcggtttcctcgttatctgcccgacaatggggcgggcattcagggtcgtctgggacacccccacccctctcccatcagcacccctacccaccccagcctaccctcattggtgatgagtgtggccgaggagtcgagcagaactgtgtcgctccgtgcatctcctttg

SEQ ID NO: 28674 - DNA, 138 bp, Homo sapiens
  chr16:736746-736884
  hypo
gttgcggccaagctctcgagccacctttgcgttgtggtcacagagctcggccagtggccggccagccagcgcataacgctcagctgtgtccacaaaccagcgcatgccgccgccacctggctccgtctcaaagacact

SEQ ID NO: 28675 - DNA, 25 bp, Homo sapiens
  chr16:740888-740913
  hypo
gtgagccaccgcgcctggcctgttt

SEQ ID NO: 28676 - DNA, 174 bp, Homo sapiens
  chr16:741375-741549
  hypo
gtttactggttgttgtcggtcacatacgagtgtgaattccaccaaggcaggaatcacattctggctcaatccccaccgaatgcccagtgcctgacacacctgttcaaccagttgctctcgttcttttttttaaaaaactttttgagacggagtttcgctcttgttgcccaggct

SEQ ID NO: 28677 - DNA, 30 bp, Homo sapiens
  chr16:747172-747202
  hypo
cctgccggggtgcacgggcccccagccagg

SEQ ID NO: 28678 - DNA, 61 bp, Homo sapiens; identical to SEQ ID NO: 10454
  chr16:765257-765318
  hypo

SEQ ID NO: 28679 - DNA, 419 bp, Homo sapiens
  chr16:767126-767545
  hypo
atcactgtggtggccgcccgtgtcctccgccagacaccgccgctgttccaggcggggcgatccggggaccaggggctgacctccattcgtaccccactgcgctgtggcgtccacccgggcccaggcaccttcctcttcatgggctggagccgctttggggaggcccggctgggctgtgccccacgattccaggagttccgccgtgcctacgaggctgcccgtgctgcccacctccacccctgcgaggtggcgctgcactgaggggctgggtgctggggaggggctggtaggagggagggtgggcccactgctttggaggtgatgggactatcaataagaactctgttcacgcaagctgctgtggacctggtctcctgtgtccagcccagccttgggcctgcctcgcagctgtgaggatg

SEQ ID NO: 28680 - DNA, 241 bp, Homo sapiens
  chr16:771851-772092
  hypo
aacccctggctggtggcgctggcgcggctgcacgcctggagggccggctgtgccggcagcgtctgctatcgccgcaaggatctctggaaggtaacctggggatccctggccacccgctgacagcccaaggtgcggctgacacctgcgagggctgggggccgggactcggaagctgcgatgacccggtgcccaccaggcctctccccggccggggcgacttctcttccggcaggtgagcctg

SEQ ID NO: 28681 - DNA, 30 bp, Homo sapiens
  chr16:780243-780273
  hypo
ccaactggaggtgacgaggcggctgcgggt

SEQ ID NO: 28682 - DNA, 200 bp, Homo sapiens
  chr16:809296-809496
  hypo
ccaggctggccacagcgcgttttcatcattgtccgcagcttgcagtcggctggttcagagcttagccgggcacatgggcccctctgaggctcctgttcagggctcagccgtgtctacggggccctccgagctcttcctggaccctcctcggctccttcagttcagggctcagctgggcacgtgggcgcctccttggctcc

SEQ ID NO: 28683 - DNA, 227 bp, Homo sapiens
  chr16:809834-810061
  hypo
ttcttgacatttgtaagttgacgcttacacctggcagccttgctgaattctgtgtgcgtgaaggtccgattccaccgcgagtcacgatagaaaacccactctgtggagagaccagagatgaccgccgcgcacacctccgttcagcacacaaacctttgcaggtgttcatagcggaggcagattccgtactggggataagagctcacgacatgctgggaggggtttca

SEQ ID NO: 28684 - DNA, 30 bp, Homo sapiens
  chr16:844996-845026
  hypo
ttgtggagggtctgcgaagcctcgtggggc

SEQ ID NO: 28685 - DNA, 149 bp, Homo sapiens
  chr16:845949-846098
  hypo
agcacacagctgtacagcacccgtgaaaagcaacagctggccagcctggtgggcacgatgctcgcttacagcctgacctaccgccaggagcgcacgcccgatggccagtacatctacaggctggagccgtgagtcccccagtgcctggg

SEQ ID NO: 28686 - DNA, 537 bp, Homo sapiens
  chr16:894629-895166
  hypo
cagtagaccctgtgccgccagtgtccgtcgccttccacacgtggccgcagttctgtgcatggggccgcccgccatcctgccgcctctgacctgggctgtgggctcgtgacacgtgtctgagctttccagtcgtggccgtgacgctctgtgcggaggctccgtccgcgtgctgcctccgtcccctctgccctggacggccactcactacctttgtctctcaccctgggggtttcatgaccccggagcctccacgtcctggtacagagcctgcctctccgggactgggcttcggccgagcagacaccgcctagctgctctttgaccagcgttctctgctctgcgtctggctggcatcggcggcttgctgagtccagcctggcatctcgctggcatcggcggctcgctgggtccagcctggcgctgacacgtttctgtgctcatttcattttacaaatcaactccccaaggtgaggtgggctcgtgccagcaggtgggagccggtcgtgcacgtctgcccagctccgtgctgagtgagga

SEQ ID NO: 28687 - DNA, 187 bp, Homo sapiens
  chr16:899043-899230
  hypo
gggtcacgtggttcccgtttctagctctcccaggtctacgtgcagacgtggagttgcggggtcacgtggtccccgtttctagctctcccgggtctccgtgcagacgtggagttgcggggtcacgtggtcgccgtttctagctctcccgggtctacgtgcagacgtggagttgcggggtcatgtggtc

SEQ ID NO: 28688 - DNA, 30 bp, Homo sapiens
  chr16:903877-903907
  hypo
tggggggatgaaaccgggccaagaacacat

SEQ ID NO: 28689 - DNA, 30 bp, Homo sapiens
  chr16:920033-920063
  hypo
tgcaggatcacctccgcccgctccttggtg

SEQ ID NO: 28690 - DNA, 40 bp, Homo sapiens
  chr16:943522-943562
  hypo
acaaagggagccgaggcgcaggccccgtgtgtctcccaca

SEQ ID NO: 28691 - DNA, 353 bp, Homo sapiens
  chr16:945416-945769
  hypo
caacagaaaaccaaccacacacgggagggccttcggggcggccgtgggcccctagccggggccaggcaggacgggagccgccgggttctctggctacatgtgaccgagaaggcagcaggctctgctgctgtctgtgcaggacgacctgggcaggggaggggcgtgtccaattccaacgtgtttggaacatggggctcgcgagactggcgggggagtgggagagccaggagaggctgcaccgcgccctgaaggacggcacgtggctcaagtgaccgatgccgagagggacacgaatgagaaacggcaggggagtgggaccaagagcccagcccggccctacaggaacaccaagc

SEQ ID NO: 28692 - DNA, 208 bp, Homo sapiens
  chr16:947036-947244
  hypo
gacccaaagggagccggggacccacactgcccgtgccaccctcccgctctgctcggaatgccagaactttccaggcccatcgacgatgttcccgccttgcaacgtgtggctgcagcagctcttctcctgatgcctgtgtgtcctgggacacacttccccaaatctgccatctggaaactcgaagtgtcttgacggtcgtatgcggaga

SEQ ID NO: 28693 - DNA, 30 bp, Homo sapiens
  chr16:949644-949674
  hypo
tcaggtcttgatgtcggcagcaccgctcca

SEQ ID NO: 28694 - DNA, 356 bp, Homo sapiens
  chr16:962796-963152
  hypo
cttgaggaattccagcagctgcgcggcgtgcacaagggctgccattgttctccgcctcagcgtggcggacaacgcgtccccaggaaagtcaataagcagcacgctgccagggcggcctcagcgccaaggtcagggccagggctctccagacagctctcacccagcaaacaccagcgctgcctgaagcgagccccaggcacccgaacgaggcggcaacacgcagggccacagcacacgctgccactgccggggagaggagccgtcctcgcccccgcctcagtgcctttcccgttgcgcagctgcacgcgctgcctgctgggcgccagcatctgcacgccctgctcttccccagggac

SEQ ID NO: 28695 - DNA, 30 bp, Homo sapiens
  chr16:981127-981157
  hypo
aaaaaggtctgggaccgcccagtggggaag

SEQ ID NO: 28696 - DNA, 918 bp, Homo sapiens
  chr16:981462-982380
  hypo
ggacacagacgcacacgcggctcggatgagctgaggaacgcacgcacaaactgcattctcccaggccgtcccgaacgaggccacaggaaaggagcctccccagaggtctcagatcaggaagcctgaccttccagtgcctttggtctaggtgttctgaggcccagcacccggagtcatacctcagtaactggcagctctatgttctccaagatcagggaagggaagacagttcaaagacgcatggctgctcggaaggcagggagagcactgccgaagctactacgagtcttctgaatttctgcgcgacagtccaaagtgacgtgctgagccgctgcagggtcagacacaacatgaaactcaggctcacgagggctctcaggcggaaaacattaacattaatgagtcaacaattcgcttctgagtccctacaattaccacctgctaccgaagaatcagttagaatgtatgacgctcacctgaaaacacccagggagacacaaacgcagaagactgacttccctgggctgggagcgcaagcgcagcccccgacggcggccacacaggctcacgtcccaccccccatgcagaccccgttgcttttgcttcagcaagtggttggggacgcgggaggctggctccagagtcacccggctcctcgactgcctctgccgctccagcactgcctctgggagtccactgccccaggcacttcccccccaccctacttagagtagagcctgtgttccccaggaggcctcacaggcgggggcacggggagggtgggctccaggccctctcatcctcagcgatgggtcctgtggccctggtgctgagacacggcagcaccgtggcctcgcaggcccatctctcacagggaacacacaagcctcagccgctgccccccgagcctgccccggc

SEQ ID NO: 28697 - DNA, 30 bp, Homo sapiens
  chr16:1017793-1017823
  hypo
ggcctacggacaatcgctgcacagccgggc

SEQ ID NO: 28698 - DNA, 30 bp, Homo sapiens
  chr16:1021765-1021795
  hypo
gaggaaagaaagggcgtgaggctagagtag

SEQ ID NO: 28699 - DNA, 30 bp, Homo sapiens
  chr16:1022396-1022426
  hypo
atcgcaggaggcatcggccctggctggcgc

SEQ ID NO: 28700 - DNA, 31 bp, Homo sapiens
  chr16:1038887-1038918
  hypo
aggttatcggtgtgggcgtgagttcacagct

SEQ ID NO: 28701 - DNA, 30 bp, Homo sapiens
  chr16:1053700-1053730
  hypo
gaaagccctcggcacgcggtcgtggcggca

SEQ ID NO: 28702 - DNA, 30 bp, Homo sapiens
  chr16:1056977-1057007
  hypo
ggatccggccaccccgtctgtcctgtccgc

SEQ ID NO: 28703 - DNA, 30 bp, Homo sapiens
  chr16:1081653-1081683
  hypo
ggctctgcctctgccggttactgcctctac

SEQ ID NO: 28704 - DNA, 31 bp, Homo sapiens
  chr16:1147812-1147843
  hypo
ttgggtcccttgggttcgggtggcccgggat

SEQ ID NO: 28705 - DNA, 30 bp, Homo sapiens
  chr16:1173375-1173405
  hypo
ctccggcctcccgcgcgccttcacctccgg

SEQ ID NO: 28706 - DNA, 30 bp, Homo sapiens
  chr16:1198573-1198603
  hypo
gcccctgcctctcccgtcttccacacagac

SEQ ID NO: 28707 - DNA, 39 bp, Homo sapiens
  chr16:1199882-1199921
  hypo
atcaccgctctcaggacgatttcccgtctcgtctcactg

SEQ ID NO: 28708 - DNA, 155 bp, Homo sapiens; identical to SEQ ID NO: 10459
  chr16:1203807-1203962
  hypo

SEQ ID NO: 28709 - DNA, 108 bp, Homo sapiens; identical to SEQ ID NO: 10460
  chr16:1204002-1204110
  hypo

SEQ ID NO: 28710 - DNA, 120 bp, Homo sapiens; identical to SEQ ID NO: 10461
  chr16:1204128-1204248
  hypo

SEQ ID NO: 28711 - DNA, 30 bp, Homo sapiens
  chr16:1227387-1227417
  hypo
cggtgcggggacggcgtctgaccgaggccc

SEQ ID NO: 28712 - DNA, 30 bp, Homo sapiens
  chr16:1236136-1236166
  hypo
gggcgggtgactagacggtcggcgtgcgta

SEQ ID NO: 28713 - DNA, 132 bp, Homo sapiens
  chr16:1236419-1236551
  hypo
gtgcagaaagccggacgatgccgcggcgtggggtgaacgtcaaagggtcactgtggactctgcccacgtcctgagtgccctcgtcttgtccctctccacggcgttctcatcctccggcgattccctgggaac

SEQ ID NO: 28714 - DNA, 30 bp, Homo sapiens
  chr16:1237028-1237058
  hypo
tgttgcttcctctgcggcagaggcgatgga

SEQ ID NO: 28715 - DNA, 30 bp, Homo sapiens
  chr16:1246018-1246048
  hypo
gcctagtaagtgaccggccccgactgggct

SEQ ID NO: 28716 - DNA, 174 bp, Homo sapiens
  chr16:1248821-1248995
  hypo
caccatgcagataacgcaccatgtggctccaccgccccacgtggctctgcccaccgtgcagtcacccgccccgccactgctgtccccgtcatggctccgtccaccatgctgtctcccgcccccaccccccatcatggctccgcccagctggcagtcaccgccccacatggctcc

SEQ ID NO: 28717 - DNA, 156 bp, Homo sapiens
  chr16:1250479-1250635
  hypo
actacaacgtgtgccgctcgggtgactccaacccccacaacggtgccatcaacttcgacaacatcggctacgcctggattgccatcttccaggtgggcggcaagatggtgggacggggaccctggggcacggcaggggagcgggtgcaggactcgc

SEQ ID NO: 28718 - DNA, 30 bp, Homo sapiens
  chr16:1251772-1251802
  hypo
gtccaacgacagcacgctggccagcttctc

SEQ ID NO: 28719 - DNA, 30 bp, Homo sapiens
  chr16:1259307-1259337
  hypo
tgccgcgatcgcgacgggcaggtggtggcc

SEQ ID NO: 28720 - DNA, 30 bp, Homo sapiens
  chr16:1260002-1260032
  hypo
aggctctgagaagccgccgcctcatcccac

SEQ ID NO: 28721 - DNA, 30 bp, Homo sapiens
  chr16:1260641-1260671
  hypo
gatggtgaaggtaccgcggggcccggggac

SEQ ID NO: 28722 - DNA, 30 bp, Homo sapiens
  chr16:1263751-1263781
  hypo
ccggcgctcatggccgccctccccgcagag

SEQ ID NO: 28723 - DNA, 100 bp, Homo sapiens
  chr16:1265181-1265281
  hypo
caacgctgctgagccgaggcggggaccccagacgtgtgcgctgagcctccggccacacaggtggaaccagctggacctggccatcgtgctgctgtcactc

SEQ ID NO: 28724 - DNA, 30 bp, Homo sapiens
  chr16:1265542-1265572
  hypo
gctacgggcatgcgcgccctgctggacact

SEQ ID NO: 28725 - DNA, 815 bp, Homo sapiens
  chr16:1267844-1268659
  hypo
gtggaggctgggtgcatgtcccgcctccacccggagcgggctcggctgaccgggcggggtctccctccccgcagagtgcagtgaagacaacccctgcgagggcctgagcaggcacgccaccttcagcaacttcggcatggccttcctcacgctgttccgcgtgtccacgggggacaactggaacgggatcatgaaggtacccgccgcggccatgcctctggcacctggcagccccagcggtttttcaggctctcccaggaacgggtcggatccgtccttgcagggcagggggaaggggacggcactgccagggtggcacccgcgggtgggtgtggaccccggcccacagctgtcccccaccgcaggacacgctgcgcgagtgctcccgtgaggacaagcactgcctgagctacctgccggccctgtcgcccgtctacttcgtgaccttcgtgctggtggcccagttcgtgctggtgaacgtggtggtggccgtgctcatgaagcacctggaggagagcaacaaggaggcacgggaggatgcggagctggacgccgagatcgagctggagatggcgcagggccccgggagtgcacgccgggtggacgcggacaggcctcccttgccccaggagagtccgggcgccagggacgccccaaacctggttgcacgcaaggtgtccgtgtccaggatgctctcgctgcccaacgacagctacatgttcaggcccgtggtgcctgcctcggcgccccacccccgcccgctgcaggaggtggagatggagacctatggggccggcacccccttgggtatggta

SEQ ID NO: 28726 - DNA, 758 bp, Homo sapiens
  chr16:1270044-1270802
  hypo
cagagcctggtgagaaaaccccggtgaggccggtgacccaggggggctccctgcagtccccaccacgctccccacggcccgccagcgtccgcactcgtaagcataccttcggacagcgctgcgtctccagccggccggcggccccaggcggagaggaggccgaggcctcggacccagccgacgaggaggtcagccacatcaccagctccgcctgcccctggcagcccacagccgagccccatggccccgaagcctctccggtggccggcggcgagcgggacctgcgcaggctctacagcgtggatgctcagggcttcctggacaagccgggccgggcagacgagcagtggcggccctcggcggagctgggcagcggggagcctggggaggcgaaggcctggggccctgaggccgagcccgctctgggtgcgcgcagaaagaagaagatgagccccccctgcatctcggtggaaccccctgcggaggacgagggctctgcgcggccctccgcggcagagggcggcagcaccacactgaggcgcaggaccccgtcctgtgaggccacgcctcacagggactccctggagcccacagagggctcaggcgccgggggggaccctgcagccaagggggagcgctggggccaggcctcctgccgggctgagcacctgaccgtccccagctttgcctttgagccgctggacctcggggtccccagtggagaccctttcttggacggtagccacagtgtgacccca

SEQ ID NO: 28727 - DNA, 30 bp, Homo sapiens
  chr16:1273469-1273499
  hypo
tgacccgccgcacacgtgcaccctccgcag

SEQ ID NO: 28728 - DNA, 31 bp, Homo sapiens
  chr16:1323384-1323415
  hypo
taacagtttaacgagacgatactgcaaactg

SEQ ID NO: 28729 - DNA, 30 bp, Homo sapiens
  chr16:1330528-1330558
  hypo
ggggccgggggcagcggcgctgtggggagg

SEQ ID NO: 28730 - DNA, 30 bp, Homo sapiens
  chr16:1362611-1362641
  hypo
tgcggcggctccgacgcaggtggagctgct

SEQ ID NO: 28731 - DNA, 30 bp, Homo sapiens
  chr16:1368105-1368135
  hypo
ccagccagcaaatgcggcagggatgcctgg

SEQ ID NO: 28732 - DNA, 30 bp, Homo sapiens
  chr16:1369352-1369382
  hypo
tgtgggacggtctgcggtggtgtcttcgcg

SEQ ID NO: 28733 - DNA, 30 bp, Homo sapiens; identical to SEQ ID NO: 10463
  chr16:1384640-1384670
  hypo

SEQ ID NO: 28734 - DNA, 825 bp, Homo sapiens
  chr16:1397416-1398241
  hypo
agttcaaactgcagccccacacgggctgtgtccttgagcatgaggtggccccacgggcagtcaggtctccaagtgccagcgctgaccaccagcacccaggggcccctcctgatgcgcttccccctgcagaggctgaaggaggagctgcggctgcacaaatgttccacccgcgagtgcatcgagcagttctacctggacaagctcaaacaggtagggaggcgccagggacagggtgctgcctccgaggctcccagagcccagctgcgctcacccgcctttccgcagaggaccctggagcagaaccggtttggacgcctgagcgtccgttgccattacgaggcggctgagcagcggctggccgtggaggtgctgcacgccgcggacctgctccccctggacgccaacggtgagttgcagcggggacgggtcgggtggtggtgggatgggggcaggggggctcacgactgtgctcctgcaggcttaagtgacccctttgtgatcgtggagctgggcccaccgcatctctttccactggtccgcagccagaggacccaggtgaagacccggacgctgcaccctgtatacgacgaactcttctacttgtgagtgtcctaagccccagccccagccccaggctccaggctgccggagcgagactcccgactggcctctgtccgcagttccgtgcctgccgaggcgtgccgccgccgcgcggcctgtgtgttgttcaccgtcatggaccacgactggctgtccaccaacgacttcgctggggaggcggccctcggcctaggtggcgtcactggtgtcgcccggccccaggtg

SEQ ID NO: 28735 - DNA, 30 bp, Homo sapiens
  chr16:1399386-1399416
  hypo
tctctagattttctcgtcacccagcctcaa

SEQ ID NO: 28736 - DNA, 30 bp, Homo sapiens
  chr16:1413144-1413174
  hypo
tggctggtaggacccgcagggaccagctga

SEQ ID NO: 28737 - DNA, 57 bp, Homo sapiens
  chr16:1414644-1414701
  hypo
gggaccacagcagagccgggacctggggggggtcgcttcccccgtgtgctccaggcc

SEQ ID NO: 28738 - DNA, 51 bp, Homo sapiens
  chr16:1417674-1417725
  hypo
ggactcctcccactgccggatcttcctcttggcctcgtccagctgccgcct

SEQ ID NO: 28739 - DNA, 112 bp, Homo sapiens
  chr16:1424510-1424622
  hypo
accgtgggggtcggcgcgccgggaacctccacagcctggccagcccctgcctggtgctcggttcagacaagctggggcccagcagaagcaaagaggcggtcactgccccacc

SEQ ID NO: 28740 - DNA, 165 bp, Homo sapiens
  chr16:1425526-1425691
  hypo
agagaacctgaacccctggggcgtccgggacggcacacggcgcatgcgggagtggcctccactcccacggagacaccgttccaatgaagcttttagggactttcgaaggtcttatccagaaactagagtaacaggttgggggtcggggcagccaggccaagaccc

SEQ ID NO: 28741 - DNA, 97 bp, Homo sapiens
  chr16:1428624-1428721
  hypo
ctcaactcagagggcgtcagccaccacctacctcagccaagtcacctgtgctgaagcccgggaagctgcctggagaggggacgttcagggagcgtgt

SEQ ID NO: 28742 - DNA, 244 bp, Homo sapiens; identical to SEQ ID NO: 10465
  chr16:1429036-1429280
  hypo

SEQ ID NO: 28743 - DNA, 73 bp, Homo sapiens
  chr16:1462653-1462726
  hypo
aaaattaaaataaatacgtaaacatcaagagacgaaacatcccagatatattctacagcgtgaatattctaac

SEQ ID NO: 28744 - DNA, 29 bp, Homo sapiens
  chr16:1465340-1465369
  hypo
tggtaggaggccgggcgcggtgtctcacg

SEQ ID NO: 28745 - DNA, 121 bp, Homo sapiens
  chr16:1472167-1472288
  hypo
aaagcacaacaacaacaaaaacctaagctcaaagatcagtgcctgaaatatttagcagagcgtgcactggatggatcagctggtaccacccagaccggtcatctggcccaaccggttctgc

SEQ ID NO: 28746 - DNA, 49 bp, Homo sapiens
  chr16:1487581-1487630
  hypo
cagctcgggcctcacgggctgcagatgctgggccgaggctgctcagcgg

SEQ ID NO: 28747 - DNA, 30 bp, Homo sapiens
  chr16:1493622-1493652
  hypo
ggctccgcgtggcgcgctcacagcgctgct

SEQ ID NO: 28748 - DNA, 30 bp, Homo sapiens
  chr16:1497751-1497781
  hypo
agggtgggaggctgcgctggaatgctgtgt

SEQ ID NO: 28749 - DNA, 30 bp, Homo sapiens
  chr16:1510875-1510905
  hypo
caggccacgaggcccgtgaggatcccaatg

SEQ ID NO: 28750 - DNA, 256 bp, Homo sapiens
  chr16:1511178-1511434
  hypo
gttatgctgggcaccgcatctggcggccgtaagagcagccttcttggttacggtgaccgtgaccctcccactgtctctagaaaccagacgaaccacaggcctcagaggcggagtcagaggaggagggaggaggtgcgtcacctcaccccggcagaagagcagccccaggcccggccggcaccaggccccgcaccgtggggccctgcagggagcggcgtccagctcaccgtgtgattgatccgccgctcctcctcca

SEQ ID NO: 28751 - DNA, 79 bp, Homo sapiens
  chr16:1523751-1523830
  hypo
gattaagacccatcaacaaaacggtccattaactcaaaagtaacacaatacggccaggcgcagtggctcacgcctgtaa

SEQ ID NO: 28752 - DNA, 30 bp, Homo sapiens
  chr16:1557590-1557620
  hypo
cttgccggcagctacgtgcgccaggggctg

SEQ ID NO: 28753 - DNA, 73 bp, Homo sapiens
  chr16:1560936-1561009
  hypo
caggcccctcaggggtcgtcatctgcctcttccaccacctcctcgtccagctccctggcgtcctccatgctgt

SEQ ID NO: 28754 - DNA, 321 bp, Homo sapiens
  chr16:1580444-1580765
  hypo
tttaaaaaatctcccgattgtgcacaccctctcccgaggcccaggtgtggggctggacagggctgggacctgcctctacctgccccgcgtggctcctttcctctcccttgtcctgaaaacaactggttccttccgtccacatccaattgcggtggaaaatcacaaacaagcacaggaatgtggcagctgacttgggtcccagacgggctcccctgtgctctgaacgccccgtctctcccacgcggaggccacccgtggggagcgggagagagcccgcccgtggggagcgggagagagcccgcaggccggccctggttttgc

SEQ ID NO: 28755 - DNA, 48 bp, Homo sapiens
  chr16:1613976-1614024
  hypo
aatacaacaggcagagcgtaccgcagggccagcgcgcccatcttgggg

SEQ ID NO: 28756 - DNA, 384 bp, Homo sapiens
  chr16:1652261-1652645
  hypo
caactgaatttggcaacagcacggttcccatattttgatctttcatactctcgagcatggtcagaaagggtcaaggtctgaaaacagcgtcttgcgcgtgttgactcaccctgtccccagacagcaggcagtttccactggggctccaacggagcacggtgatgtcggctgtgtgtgtcaggggcatcgtgtgctgctccttgtcctgcttgttaaacaccgtcacttctccagtctcccagcccacagccagcaccagccgcgtcgggtgccagcacagggaagcaacccggaacggcctctcgacgtgtgtatctggcacgcactccccctgcattggatgagaggcaaattcccacagttcagagagggacagctactttt

SEQ ID NO: 28757 - DNA, 135 bp, Homo sapiens; identical to SEQ ID NO: 10466
  chr16:1660659-1660794
  hypo

SEQ ID NO: 28758 - DNA, 197 bp, Homo sapiens
  chr16:1668008-1668205
  hypo
tctaatacaccacccacgtgaccctgggacgcactggagatttcggcttagagccgcagaaaccatctgaaagacataagtcaggagacagagtcctgatacctttccctatttggccagttcatgatccagctagccctgggcaaactagtccatcttttggataaaataaacacctgcctcagaatcgcttgaac

SEQ ID NO: 28759 - DNA, 30 bp, Homo sapiens
  chr16:1676661-1676691
  hypo
cgcccagtgaatgcccgtgctccctgctgg

SEQ ID NO: 28760 - DNA, 151 bp, Homo sapiens
  chr16:1677032-1677183
  hypo
ccagattctgttgtcgtaagtaacgctgtggtgaacatcggtgtgcacgcttcatactttagactgcttctttggcatacagtattagaattaggttcgtgatcggtgagccttgttctttttttttttttggagatggaatctcactctg

SEQ ID NO: 28761 - DNA, 64 bp, Homo sapiens
  chr16:1682397-1682461
  hypo
cccacaggcagggccggcttctgctcagagcgcagcttccagcaagcccgccggacctgctttc

SEQ ID NO: 28762 - DNA, 17 bp, Homo sapiens
  chr16:1698314-1698331
  hypo
tagaattgacttgagcc

SEQ ID NO: 28763 - DNA, 129 bp, Homo sapiens
  chr16:1701257-1701386
  hypo
cggtggactgagatcacggagagctggactgaggtcacacacaggttatggagaggtcgactgagaggtcacacagaggtcatctaggggtggatttaggtcacgcacaggtcacggaaaggtggactg

SEQ ID NO: 28764 - DNA, 209 bp, Homo sapiens
  chr16:1704650-1704859
  hypo
ttctccattctcaccctcccacggccgccggcacctcccagtccgccttgtgtctcagtggacttgcctgctctgaacgtttcatagaaacggaatcacacgcagaggcctccgggcctggcatctttcactgggcgtgatgcttttgaggttcacccatcatagcgcatcagtacttcattccttccgctcatgtacttctccctcag

SEQ ID NO: 28765 - DNA, 30 bp, Homo sapiens
  chr16:1705652-1705682
  hypo
gctccccacataggcgtggtgcgtgtcagg

SEQ ID NO: 28766 - DNA, 530 bp, Homo sapiens
  chr16:1730230-1730760
  hypo
cccagttgtgtgcatttagtacgtttcctttttgtttgtgctgcctggcactggctgcccggtaaatgatggtgtttattatcaccctgagcgacgccgatgtttttatattgactttcacgctccagaagttagctgcacagggccgcactaaagtcatactcacactaccctgggggactggtttctggacaaggtgttgagaaagggagaaaactcttccttttaggatggtgaggaaggaaagccggtctgaactggatgatgaggtatcactggaagcttctgcttggggtccaccagacgctgcacatttgccactcatctgaacggggtcgagtcgcagggcgggcgccttgtaagcgtcacatttagttttgctgtgaagcgagtcaggtggtggctgtaagattacctagccaggttttcctctcctgagacctcacatctctcctttccttgctgagggattgtcttgtgttaaaggggtttcgtaaaagcgttatgctttagccgcgattaacctgagg

SEQ ID NO: 28767 - DNA, 30 bp, Homo sapiens
  chr16:1732071-1732101
  hypo
tatccaagaaaaatcgcagaattggctggg

SEQ ID NO: 28768 - DNA, 30 bp, Homo sapiens
  chr16:1737935-1737965
  hypo
gagagtgtgtgtgaccgaccacatcatagc

SEQ ID NO: 28769 - DNA, 107 bp, Homo sapiens
  chr16:1738248-1738355
  hypo
ctagtcagtagcagagctagtcggtagcagaactagtccgtagcagagctagtcggtagcagacctagccggtagcagtgctagtcggtggcagagctagcctttga

SEQ ID NO: 28770 - DNA, 322 bp, Homo sapiens
  chr16:1741720-1742042
  hypo
ctggagctcagggctggcactcggggttcctatgagaggaggtctccaaagcactgcgggggtggggtggggtggggtccggtggacgtctggttgctcagtgttctgtgatcgtttctgcagggggtaaaggaagtggtatctttgacgaatcaacccccgtgcagactcgacagcacctgaacccacctggagggaagaccagcgacatttttgggtctccggtcactgccacttcacgcttggcacacccaaacaaacccaaggtatggactgcattcagacgtgacagcgcagcagcgggtatgccaggtgctctttc

SEQ ID NO: 28771 - DNA, 30 bp, Homo sapiens
  chr16:1753651-1753681
  hypo
gtaacctttatcgcacgttatttgctggag

SEQ ID NO: 28772 - DNA, 31 bp, Homo sapiens
  chr16:1762443-1762474
  hypo
cggccactcccaccgccgccactttgccagc

SEQ ID NO: 28773 - DNA, 30 bp, Homo sapiens
  chr16:1790385-1790415
  hypo
agcgtgtgaccgtccgtgtgagcgtgtgca

SEQ ID NO: 28774 - DNA, 100 bp, Homo sapiens
  chr16:1804797-1804897
  hypo
accttgagaaaagacaagcctgtgtaagattcagaagcaccattgaaagacataaaagaagctgtacacgcagagggtgttgccacgtgcccggacctga

SEQ ID NO: 28775 - DNA, 30 bp, Homo sapiens
  chr16:1805217-1805247
  hypo
tatggcatctcaaaccgtggaaaacgggca

SEQ ID NO: 28776 - DNA, 30 bp, Homo sapiens
  chr16:1808215-1808245
  hypo
gacgggggatgccccgagctatcccgtcac

SEQ ID NO: 28777 - DNA, 30 bp, Homo sapiens
  chr16:1812421-1812451
  hypo
accagtacaaggagcggctgatggagctgc

SEQ ID NO: 28778 - DNA, 721 bp, Homo sapiens
  chr16:1813781-1814502
  hypo
caggtgcgggcgggcgctgcggggaccgggcggggccccgcagaggcggggcgggggtaaggggcggggcgctgtggggcggggagagggcggggcagtgctagggggtgggagaggacggcgggtggggcggggcctggcaggttcctagtgagcctcctgggcaggggtctggagggtcggagaaggagccccgcggctcccacgcccccacctgcctccagtcttgaagtggctgtgccgccagaagctggcagccctacctgtctcagatttctggagggatgggtaggagccagggttcgtgcccacggcgcctccctgctccctgcagctgagtcccaacgggggccaggaggacacgcggatgaagaacgtgccggtgccggtgtactgccgccctctggtggagaaggaccccaccatgaaggtgagcccgcgaggaccccgctcaggctggctgggcgagcgggaggctggggagtgccggtgacacccgacctcggccctgcccttgcagctgtggtgtgccgcgggcgtcaacctgagcgggtggaggcccaatgaggacgacgctgggaatggagtcaagccagcgccaggccgcgatcccctgacctgcgaccgcgaaggagacggcgagcccaagagcgcccacacgtctcccgagaagaagaaggtgagcatggccgaggccaccgggcaccctccctggcttagt

SEQ ID NO: 28779 - DNA, 30 bp, Homo sapiens
  chr16:1818413-1818443
  hypo
tgcatgccagtggccgccgcctcccccagg

SEQ ID NO: 28780 - DNA, 47 bp, Homo sapiens
  chr16:1818646-1818693
  hypo
agggctgaggttgggcgcggggggagcctggccgtcactctgctgct

SEQ ID NO: 28781 - DNA, 31 bp, Homo sapiens
  chr16:1818974-1819005
  hypo
agggagtgcggggatgcggatcagctgggag

SEQ ID NO: 28782 - DNA, 30 bp, Homo sapiens
  chr16:1859315-1859345
  hypo
ccctgcgcacggcccgcatggtggtcaccg

SEQ ID NO: 28783 - DNA, 18 bp, Homo sapiens
  chr16:1919743-1919761
  hypo
gcccggcctcagtgggac

SEQ ID NO: 28784 - DNA, 21 bp, Homo sapiens
  chr16:1956107-1956128
  hypo
ccaccgcgcccggcccagaat

SEQ ID NO: 28785 - DNA, 30 bp, Homo sapiens; identical to SEQ ID NO: 10469
  chr16:1968583-1968613
  hypo

SEQ ID NO: 28786 - DNA, 175 bp, Homo sapiens
  chr16:1989402-1989577
  hypo
tctcttctccctccactcacacggaggacaaataacaacaaaaggacgaaaacatcgcaggtttaccacgcaccagatcctgacaggctgctcgctcaaccccacagcacggtgatggccacaagcgtgtgctgttaacagccccatttcaggcgaggcagtggctcaagcctgt

SEQ ID NO: 28787 - DNA, 40 bp, Homo sapiens
  chr16:1997450-1997490
  hypo
cagcagtgacccctgccgccttccacgcatgcattcattc

SEQ ID NO: 28788 - DNA, 30 bp, Homo sapiens
  chr16:2024406-2024436
  hypo
ctcagccctgacaacgaggtatgtggggcg

SEQ ID NO: 28789 - DNA, 550 bp, Homo sapiens
  chr16:2028657-2029207
  hypo
gggaaacccataaaggcgcactgccctagccggtccggcctctctccagtccatcctgaacccctggaaaacccataaaggccgctctcctggccggctctgtctctctggactgcagtccagccccccaccctggccaacaccctacctagccagccagaagggcactggagctgatggtctcggccctgccacgcccatcccgcaccctggcctggcagagatccagcccgcggctccgcacgcttagacggtgggggtcatgcagaacaagctttactcagaggaacagcaaatggccccctcccatccctgctggccagggagatccgccctccccgctcctccccagccctgggatggcgcggtccatcccctcatcgggatcctcgcgctcactgctccgtcgtggggtgcggcacagagtccacgcaccctcgagggcggccctggcgccgtgggcgccgctccagggccctgcgtgtgacggtgcagcagcggctctggatggcgcccggcgaaggtcgggtgggcacggtggggggagggg

SEQ ID NO: 28790 - DNA, 405 bp, Homo sapiens; identical to SEQ ID NO: 10473
  chr16:2041775-2042180
  hypo

SEQ ID NO: 28791 - DNA, 30 bp, Homo sapiens; identical to SEQ ID NO: 10474
  chr16:2042498-2042528
  hypo

SEQ ID NO: 28792 - DNA, 30 bp, Homo sapiens
  chr16:2043000-2043030
  hypo
gacctaccagagcccgcccttcaccgagac

SEQ ID NO: 28793 - DNA, 309 bp, Homo sapiens
  chr16:2049433-2049742
  hypo
ggctccagcctgaccccggcccctcccgacacccagggagcaggcctgagccagcacgcgtacctgggggcggcggcatccggggtgggcaggggccgccgagcgctgggaagtcctcctgtggcgtggggcaggggaaggaccccaggggccttgggagcccagggggttccttgggggcactccgagcaggggccgggccctccatgtgtccattaacgacgacggcaactggcccctcggctctgctggcaggagcttccggggcctgcaaagcccctgggggacaggtagcgggcgggggctgtg

SEQ ID NO: 28794 - DNA, 265 bp, Homo sapiens
  chr16:2105060-2105325
  hypo
tgctgggggtggggaacgcccaggagtctggtgatgtcggcgtctcccagcctcgggttgggccctgagtgtacggcatacacacttctgctgccgcctcggcacagaccctctgtgcagccccaggggcggtagatcctagtgtccgtgcgtagccggcctgccctgggctcccctgagcctcttcgggcccagtgcgtggtctgtctgttgctgccgggggactgatgatggggtttctggcagtgacgggtttggacacact

SEQ ID NO: 28795 - DNA, 225 bp, Homo sapiens
  chr16:2106518-2106743
  hypo
agggtgccatggcagcggggagaggtggcagcgcaggctgaaggaggtgggaaggaagcctgggtgtcctctcctgtggggaggagctggggtaggacgggcgtgagccgtctccctctccaccaggtctccctgcaggtgctggacgccgtggtctgctacaactgcctgccggctgagagcctcccgctgttcatcgttaccctctgtcgcaccatcaacgtc

SEQ ID NO: 28796 - DNA, 111 bp, Homo sapiens
  chr16:2107015-2107126
  hypo
agggcagcagccaggcggggccagcagcgggactggggctgggggcagggcttatgcctgccagcccctgacacgcattgtgtctcgcagctgatgcggaacctccttggc

SEQ ID NO: 28797 - DNA, 54 bp, Homo sapiens
  chr16:2107443-2107497
  hypo
ttagcctgttacaaggcgaggctcggggtcttggcttgacgttgcccttgccct

SEQ ID NO: 28798 - DNA, 426 bp, Homo sapiens
  chr16:2108516-2108942
  hypo
acctgtagctcacagcgtggtcagcagtgatgggctgccgcctgtgcgcaggagtgaacaagagtgttactgctggcctctgttccctgcccttccccagcggtgctcctgccccccccaagcacagggacctctggggctgctgcaggagcctcggcaacctcacacatccatggcggaccctgggacagggccctgctcacattccgtctctctggggaacacttttagagcctacatggaggacgcgcccctgctgagaggagccgtgttttttgtgggcatggctctctggggagcccaccggctctattctctcaggaactcgccgacatctgtgttgccatcattttaccaggtaaggcggtttctgtgtgcagtgagctggcaggaacgggagagctcccctcacgcctgcccacccat

SEQ ID NO: 28799 - DNA, 30 bp, Homo sapiens
  chr16:2113243-2113273
  hypo
gccaggccttgacacgtggccaagtagcaa

SEQ ID NO: 28800 - DNA, 30 bp, Homo sapiens
  chr16:2123200-2123230
  hypo
ttccctgtccaccccggacagcatctctgc

SEQ ID NO: 28801 - DNA, 30 bp, Homo sapiens
  chr16:2125979-2126009
  hypo
aggcctgagcgcctcggttttttgcacttc

SEQ ID NO: 28802 - DNA, 875 bp, Homo sapiens
  chr16:2128635-2129510
  hypo
cccagacctctgtgtgcttgccggaggcagcctgcgggcagaatgcaatctgggcctgtctgtgtggcctccgcctctctgcatgactacaccgtttcgccaggaggccgtaacctagtgctcccgtgggcttcggtgagggggatgtcggtctctagcctcctgagtctgctccgaccagtaggcctggtcttccccacccagcgtctccccgttctctgggacaatgtggtccacgtgattctcaagctgaggctcgctgggccgcccacgccctgttggggtctttccgagcgaggtcctcagccgtgcatgcgttgagctttggcccttggtgataggtggctcggcccgccctacctggcaccctgaccctggtcacggcctctccctccagcaggatacagacgtccctcaccagtgccagcttggggtctgcagatgagaactccgtggcccaggctgacgatagcctgaaaaacctccacctggagctcacggaaacctgtctggacatgatggctcgatacgtcttctccaacttcacggctgtcccgaagaggtccaggcggcactacagggctgggcgggcctgcgggagctccacgggcaagctgggtttcacgctccctgtcttctaggtctcctgtgggcgagttcctcctagcgggtggcaggaccaaaacctggctggttgggaacaagcttgtcactgtgacgacaagcgtgggaaccgggacccggtcgttactaggcctggactcgggggagctgcagtccggcccggagtcgaggtgactgcaccttcctttcctccgcgcctgccagcctcgacaccggctgtcccgagcccaggcccacgtggcaccctcgta

SEQ ID NO: 28803 - DNA, 48 bp, Homo sapiens
  chr16:2135229-2135277
  hypo
gtcacagtcctttgagcggtcggtgcagctcctcgaccagatcccatc

SEQ ID NO: 28804 - DNA, 161 bp, Homo sapiens
  chr16:2135483-2135644
  hypo
agtgctggggaccccggtgcgagtgacaggttagcgtgggagcacccggcacaccaaggagtgggaaggactgggcgggtggcaccggtcgcagggctggggagggcgctgttggtcagtgagctgacagctgagtggtgagggagcgggcagggggagcc

SEQ ID NO: 28805 - DNA, 30 bp, Homo sapiens
  chr16:2139099-2139129
  hypo
tgtgcccccagcaccggcccaaggccaagc

SEQ ID NO: 28806 - DNA, 351 bp, Homo sapiens
  chr16:2141839-2142190
  hypo
ggctcaggcccagctcctgcacgtagcccccgctgtcatacacggcacaggagccccaggaccatgccctgccggagaggggtggcgtgggtgccgcaccccagcccttccggcaccccggagccaggctggtcaggaggccgcggcactcctggagaactactcccttgtccttggcgtagacgcccggggccctcgctctgctcaccccagcagatccggcgctgaataggcccacgtccccgagccattgtgaggactctcccagccaacgtcgtaatcgctggtgctgaagcctcctgcggccgagcacgtgtggaccctggggccgggagggtctgggtagagtgc

SEQ ID NO: 28807 - DNA, 198 bp, Homo sapiens
  chr16:2142476-2142674
  hypo
tcaccttcctgcagccgcacctgccgcagccgtgggggccccagctctgggctggactggttcccgtggacgtagggcagcagcacgtgggccatccatggccagagctcctcagacctgccacagcatcagtcacacgctccagcccctactgccccatgcccgcctcgagtgagcggccaccagagacccagggaa

SEQ ID NO: 28808 - DNA, 30 bp, Homo sapiens
  chr16:2142960-2142990
  hypo
atggccaggaaggcccggctgtgcagctcc

SEQ ID NO: 28809 - DNA, 112 bp, Homo sapiens
  chr16:2146357-2146469
  hypo
ataggagggcatggcagagcccggggtcacacgcgtgggaacacgccgtgggtgcgctccgccgccggctgccatgtgcgtgactatgtgcgtgactacatacaaggtaacc

SEQ ID NO: 28810 - DNA, 30 bp, Homo sapiens
  chr16:2193199-2193229
  hypo
gcacttggtgcagtccggggtagtcagtga

SEQ ID NO: 28811 - DNA, 30 bp, Homo sapiens
  chr16:2213313-2213343
  hypo
tgtggagttgggctccggtgactcaccctg

SEQ ID NO: 28812 - DNA, 259 bp, Homo sapiens
  chr16:2213584-2213843
  hypo
caggcaggggtccctccacctcggggaagagctggatgggctcttcgggagctcagaaaggctaagccttgagggacggtgacgcagagccgcctgcctgcccgggcctctgcatacctgggatcggggtgaaggacctttgcctcctagaggcctgcctgagccggggctggtggtggaaggctgctgcggcggccccacggtgccccacagcaggtctgcacacttgcagcagcccgtctgactcacaggggcctgg

SEQ ID NO: 28813 - DNA, 30 bp, Homo sapiens
  chr16:2223517-2223547
  hypo
acctcatggagttccggcgggacgcatcca

SEQ ID NO: 28814 - DNA, 1393 bp, Homo sapiens
  chr16:2229594-2230987
  hypo
tgggctgccagggcctggcagcggcaccttcttggaggtgggtgtgggcgagccctggagcttgggcacaggctgcgtcaggacgggcttgggagagacaggcggcttggccggcttccgggcttcgccctcgggcgggggcaatgggggtaggtgcgccaggtcggtgggcgggggttcggcaggcgggggcggtggaggcagctccggaggcccagcctgctccgaggccggtcggcggcgcacggtgccagtgccattatggtacacggacagtggcggtggtggctcaggcccggcctcccgctccttggccttgggcctgcgcttgaccgtgtcagactcggtcaggatgaacttgacgttctcctgctggttctgcttggcccggatgcgcctcttgagtgtggcgctggcttccaccttggccaagggcgggccttcgacacccgcctcgcccttggagggaccccgaggccgctgccggccagtgccatcctccacaaaggggcctgggtctgccgactccccaggcccccggcgggcagtggccagaagtccggtgactggcccgctgagcgtgcggcgccggttcaccacctccccgccaggcccgatggcctctttgtgtttcactgaggccagcacggtggccacccggcccggctctgggctggcagggcggggagtggggtggccctcaggaggcctgcgggcagcccggcccccacccccaatggaggacagctccagcatggccgcgatgctcttcacactgccggcactacccgtgtccacgctgccggccaggtcactggcccgccggcactgtgcccggacccccagcaggccatcctcaggctcggcgtcaggcaccggctcatccgccaggttggcactagccagggccgagctggagcgcttgggtgggggcggcgggggccccttctttcggggccgcacggcaaaggactggctgcggttgacgttcttgtcggcacctgcgggcgccctcactgagtggctgcggcccacgcgccgctggaccgtggcataggggccggcagccgcaggcaccagcagctcgtcccgctccggctcgctgtcggacgccgcatagcgattcaggctgtgggcccgcttcttgggccgccccggctccgcgtcggcctcagggggcaggcacagtgtgggcacagccgtcggcacgggtgggggcgcaggccccggggcagccggccccacctcgccctccacgggctggggcagcacgtaggcaaagccgcggtgcgtcggtgactgaggcagggagcggggtgacatggggcgctctgtcggcggcagcagctgcggggtgggcttcaccttggccgtagctggggctggaccatga

SEQ ID NO: 28815 - DNA, 43 bp, Homo sapiens
  chr16:2232745-2232788
  hypo
caccttcttcaggcccggaacccatcccactgcacaggcacct

SEQ ID NO: 28816 - DNA, 102 bp, Homo sapiens
  chr16:2233087-2233189
  hypo
gcacctccgtgttaatgacgattggccatggcgtgtgcaggtatcgctgagaatgggggtgtcagctattggtgagggccacacgtgcggtggagcatgtgt

SEQ ID NO: 28817 - DNA, 31 bp, Homo sapiens
  chr16:2241313-2241344
  hypo
gcagcccctgctgccccggcctcagtcccag

SEQ ID NO: 28818 - DNA, 94 bp, Homo sapiens
  chr16:2260791-2260885
  hypo
gcccaggtttggggcgctcagcacagcagcttgctggttccatcctgcagcccctgctcacaatgtgccgattgtctgcgtcccttgtctgcag

SEQ ID NO: 28819 - DNA, 406 bp, Homo sapiens
  chr16:2278379-2278785
  hypo
cgatgtgcacagatgcggccgctgccaggcagagttcaccgccttggaggattttgttcagcacaagattcagaaggcctgccagcgggcccctccggaggccctgcctgccacccctgccaccacagcgttgctgggccaggaggtgagccctcacccactcccccatcccctcccgggttcacctgacaggtgggggaggtggccgcgcttcaggatggacctgtgcagccggttccgggggccacgtgggcgggcagagggcaggcacctggctgcggtgtgggagggtccgggtgtgtgagcctgtggtgctctggggcgtcctggagggcctgcggtggcccagccttcttggcagcctctggtcgaagcccgtgctgttgggggccgggatctcttcttt

SEQ ID NO: 28820 - DNA, 569 bp, Homo sapiens
  chr16:2280821-2281390
  hypo
ctggccttgacctggcgtttggtttctgggatggtggcgtcacctgggagcatgaactccttaggttctggcggggtctctgggctgggtctctggccagccaggcccctttccacccacctaaactctagcagcctccagccctaggctcagcacccctccctgtgcttcagcagcccctcttggcacccctgccactctggcacccctgggattttcccctttgcgggcatcctgggtactctgtgtgtgcccttggccagtcagcaggcccggtgggcttagtccagggctgctagctctcctgttggcctctagtggagatggcagagggtcctgcctgctggtggccaagggctggggcgtgccaggtcctgtctttgcgggtgcaggggtgcggtcagctgtgtgggcagttggaacccacctccaggccctcctgccgcttcgcggaaaaagttcgcgtctcctctggcctcgcagcagccatgttcccccaggtcctccccatcagaggcctctgtcctttggaagatcactcctggggcatcgagcgtgtaagggctcgg

SEQ ID NO: 28821 - DNA, 83 bp, Homo sapiens
  chr16:2281673-2281756
  hypo
agcctgccttgggacggggctctggccaggcctgcctgccctgctgcagtggcccagcccatctcctccgatggaagagtggc

SEQ ID NO: 28822 - DNA, 34 bp, Homo sapiens
  chr16:2282208-2282242
  hypo
ggcggagctgggagacggtgagatggccgaggcc

SEQ ID NO: 28823 - DNA, 824 bp, Homo sapiens
  chr16:2282326-2283150
  hypo
cgctatgtgtgtgcgctgtgccacaagaccttcaagacggtgagccggcgtgcggggagccagtgtgtgggtggcaggccccctcctgttcccccaggagggccctgagctgccacgccctcccccacagggcagcatcctcaaggcccacatggtcactcacagcagccgcaaggaccacgagtgcaagctctgtggggcctccttccgcaccaagggctcactcatccggcaccaccggcggcacacgggtgagctggccgcacctcgggctggagcccggtagcaccccgatggttggccctggggtgccccagcctcgcattccccagctttgggggatgaggcgggggcccctgcctgccttcgccttgtcaccttgtcgccagcctgctggggctgcccggggctgactaggttctctctgcagatgagcgcccctacaagtgctccaagtgtggaaagagcttccgggagtcgggtgcactgacccggcacctcaagtctctcaccccctgcacagagaaaatccgcttcagtgtgagcaaggacgtggttgtcagcaaagaggacgcacgtgcaggtcagcatggtgcgggcagctgcctggtcctgggggctggctgtggacgcagccgccactggggtgtgtgagggatcttcactccctcactccaccttgaaggttctggagctggagctgccggcttggggacagccacatcatcggtgacaggcgagcctatagagacttcacccgtgattcacctggtgacagatgccaagggcaccgtcatccacgaagtccacgtccagatgcagga

SEQ ID NO: 28824 - DNA, 30 bp, Homo sapiens
  chr16:2294624-2294654
  hypo
ggagcccaggtgcacgacgcacagcagggc

SEQ ID NO: 28825 - DNA, 25 bp, Homo sapiens
  chr16:2310496-2310521
  hypo
aataaaaaaccggcctcctattttg

SEQ ID NO: 28826 - DNA, 95 bp, Homo sapiens
  chr16:2314152-2314247
  hypo
aggctccaggccagcccgccccacctggtactgctgctaccactggaagcgctgcgcctctttcgggttttgtcccggccgcgatccttctcact

SEQ ID NO: 28827 - DNA, 101 bp, Homo sapiens
  chr16:2382595-2382696
  hypo
ctccagcagcttgtactgtagcgtgggcggctcaatcttctccaggggccgcccgttcaccttgatgagaccattgccgcgtttgcagtgtgccacagctg

SEQ ID NO: 28828 - DNA, 377 bp, Homo sapiens
  chr16:2486067-2486444
  hypo
gcaggttacgaaagtcgcctcttgttttagcaaaccctttaatttcagttggcaaagagtgactgagccagagcctcagcacgggggctgtttgggctccctgccctgtgcgccatgagcacgcagacctgcctgtggatgctggccctctccttggccatcctcttagaactctcgagacagagttcagcgtgccctgtaacacagagccaggcttctaaacgggaagcaggtacaggcaggttagaactggcctggtgcctggatcccttcatccccagaggccaggtgctccttgaaagaaacttgcgcagccttttcttctaccagttaactgcttatctgctcagcaccccaaggaacgagcccatgatctg

SEQ ID NO: 28829 - DNA, 100 bp, Homo sapiens
  chr16:2508555-2508655
  hypo
atgctcttgaaccggaaacccagggatgggagatgctcactgagctgctgcttttatgtgtgctggtgctatgtgtgttcatgtccgcggcagctgtctt

SEQ ID NO: 28830 - DNA, 224 bp, Homo sapiens
  chr16:2531016-2531240
  hypo
cctgtcctttgaccacgctgtctctatcccttctgaggctaaggcttcctcacactgcaagatccagccgaggcaggccttggcgctgggaaagcaccgtgtcacagcacctgcaccttgaattggcatcgtcagtacacctgacccgggctggggtggggccatgcctctgtactcctctgcactcaggtacctggcacactggcattcgggaagcatgtctt

SEQ ID NO: 28831 - DNA, 521 bp, Homo sapiens
  chr16:2540426-2540947
  hypo
gttcatggcgagcagcgattcgctcggaccccagaggccacaggaagatggcttcccccacaggaggcaccctcacagggccctgctggcactgtctgccttgggctgcctgaacccggagagagagtgggatagactgttcatggggtgtcacccttatgtcacctgcaccccaccctgtcagtccagagtgaggctcaacccacaggggttgcttgggaactgttgcccgtgaggagttgggtgttattatcggctccgctctgcagacatggcaaccgcaggttagggaagatgcacggcttgtccgcatttcaagcaaacaagtggcagagctggactttgtggccaggcctgtctaactgcaaagctgccccgtttccacagtagcccctgcctcccctctcactccctccccggccaccgcctccggctctgcacctttgtcaggggttgggggactgcagggaacagaggaggccttgtttgctgcgtaggagcaggtgcggcttatgatgtac

SEQ ID NO: 28832 - DNA, 30 bp, Homo sapiens
  chr16:2546459-2546489
  hypo
actgcctgaatgcacgcggcgagggggccg

SEQ ID NO: 28833 - DNA, 55 bp, Homo sapiens
  chr16:2579463-2579518
  hypo
gctctgtcccagacttcgtggtgctcgacgactcccttcacgtccaggccaccta

SEQ ID NO: 28834 - DNA, 30 bp, Homo sapiens
  chr16:2635430-2635460
  hypo
cctccctgcagggccgcaccccctccttca

SEQ ID NO: 28835 - DNA, 42 bp, Homo sapiens
  chr16:2642907-2642949
  hypo
cccttgcctgcctccccgtggtgctggcgtgttctgtcactg

SEQ ID NO: 28836 - DNA, 30 bp, Homo sapiens
  chr16:2645831-2645861
  hypo
gcccagtggataagcggaaggtgagtggtc

SEQ ID NO: 28837 - DNA, 250 bp, Homo sapiens
  chr16:2648041-2648291
  hypo
cccagctccatgcacgtcaacccagtcccgcccagactagtggacagacctggtgtcaccagtttttcctagcatcagtccgaaccatgcgcccgccctgccccaactgtgtgctggtcctgctgtggccgaggggaccgggtgtgtttggctctttatgcccctcccgctgtggtcctggaactcttcaccagggagggagccctgcgggggccgcagctttgtggagggagccgccgtgcttctgtca

SEQ ID NO: 28838 - DNA, 30 bp, Homo sapiens
  chr16:2661607-2661637
  hypo
ttttaactgatggccgtcctcggcccgccc

SEQ ID NO: 28839 - DNA, 31 bp, Homo sapiens
  chr16:2760239-2760270
  hypo
acatgcaggtgccctgcgtgggtgcccgtcc

SEQ ID NO: 28840 - DNA, 434 bp, Homo sapiens
  chr16:2770091-2770525
  hypo
ggaccctgcaccttcacgactcaccaaaacacagcagcagcaggagcggcaccgccgccggccgcctcatgtcctcaggcctggctggggcgcagggccgtggtcggcggtggcagaagcgttggagcacgagcgaggtgcaggctccatgaagtggagttttatgctggagatgagcacaggcccggctatgcggcccaacccgtcggcccggcctgcccagctcctctcctcaggaaggaagcgcccagagccgactcctccgtgacctagccctgaaccccgagaccccagggcagacccctcaccccagcgcagcacggggtgccgttggcctcggttcctggaccctgagctgacccagaccccccagcagaccccgagctgaccgcggtgcacgcgaagtccgtccagcttcattcattattattatt

SEQ ID NO: 28841 - DNA, 30 bp, Homo sapiens
  chr16:2807461-2807491
  hypo
ttgttcttcaggtacgaggaacagcaaatt

SEQ ID NO: 28842 - DNA, 30 bp, Homo sapiens
  chr16:2849075-2849105
  hypo
agcctgctcagccgccgctgggtgctctcg

SEQ ID NO: 28843 - DNA, 232 bp, Homo sapiens
  chr16:2849391-2849623
  hypo
cattgtgaaccctgacgcacttggggttttacgcaatgacattgccctgctgagactggcctcttctgtcacctacaatgcgtacatccagcccatttgcatcgagtcttccaccttcaacttcgtgcaccggccggactgctgggtgaccggctgggggttaatcagccccagtggcagtgaggctggggatagaccgggtggggtgatgggggtgcggggtgagcattac

SEQ ID NO: 28844 - DNA, 31 bp, Homo sapiens; identical to SEQ ID NO: 10486
  chr16:2969679-2969710
  hypo

SEQ ID NO: 28845 - DNA, 30 bp, Homo sapiens
  chr16:2974766-2974796
  hypo
tccaagagcctgaacgggcaagagtgggaa

SEQ ID NO: 28846 - DNA, 30 bp, Homo sapiens
  chr16:2983528-2983558
  hypo
ctgccaacccagcccgaggccccagacgag

SEQ ID NO: 28847 - DNA, 380 bp, Homo sapiens
  chr16:3021541-3021921
  hypo
ctggcctgcaggccctggctgcgcccggctgccctggtgggctacactgtgttgtcgggtgtggccggctggcgtgctctcaccgccccctccaccagtgctcggctccgggcatttggatggcaggctgctgcccgcctactggtatttggggcccggggagtgggtctgggttcaggggctccaggctccctgccctgctacctgcgcatggacgcactggcgctgcttgggggactggtaaatgtagcccgtctgcccgagcgctggggacctggccgctttgactactggggcaactcccaccagatcatgcacctgctgagcgtgggctccatcctgcagctgcacgccggcgtcgtgcccgacctgctctgggc

SEQ ID NO: 28848 - DNA, 49 bp, Homo sapiens
  chr16:3062886-3062935
  hypo
ctgggccttaaaaccccgcctgcagccgagagcccgcagagtccccagg

SEQ ID NO: 28849 - DNA, 31 bp, Homo sapiens; identical to SEQ ID NO: 10490
  chr16:3071261-3071292
  hypo

SEQ ID NO: 28850 - DNA, 1432 bp, Homo sapiens
  chr16:3139012-3140444
  hypo
agggacattcctgcaggcctccgctgtggaggaccccgggtaggtggcgcagggcgcggctggcggaaggcgggccaagctagtacagcgtctcgcgggcgtgggtgcgcaggtggcgcagcaggtgggagttgcggctgaagctgcggccacactgcgtgcaggagtagggcctggcgcccgtgtgcaccagcaggtgtcgcagcagattgcagctgcggctgaagctcttcccgcactccacgcactcctgcgggggctcggcctgctcctgcccgggctccgcatgggtagccaggtgccgccgcagatgcgcgttgcgccggaagctgcgaccgcacgtctgacagctgtagggccgctcgcccgtgtggctgcggcgatggcgggccaggttggagctattgcggaaacggtggccgcaggtgtcgcaggcgtggggcttctcccctgtgtggatgcgctggtggcgcgccaggtgggcgctctggctgaagccctcaccgcactcgctgcagcggcagggcttctcgcccgtgtggctgcgctggtggcgggccagatcctgggtctggccgaaactcttcccgcactgggtgcagtggtggggccgagggccaccgtgggtcagcaggtggcgggcaaggctggcccggcgcacaaagcgcttcccgcactgcggacaggcgtagggcttctcgcccgtgtgcacccgttggtggctgaccagctgcgagctctgcgtgaagctgcggccgcaagcctggcaggagaagggccgctcgcccgtgtgcaccctccggtgggccaccaggtgctcgctgcgccggaaggccttgccgcagtcgctgcacacgaagggcctccggtcggagtcccggcggcggctgccggagccttcggaggaccggcggtccttgtccctggcgtggatccgcaggtggcgcttgaggctggagcggcgctggaagctctggccgcagtgggagcacaggacatcggtcagtggcggcgcttcggccttactctcaggagcgcagggcggcttctggtcctgggcgtgcgccagcaggtgctgcacaaggctggcgcggcgctggaagccgcggccgcactctgcgcacaggaaggcgggttcggaggagtgggtcagcaggtgcttgctcaggtgcgagctctggcggaagcggtggccgcacaggtggcaggcgtgcggccgctcgtccgtgtgagtgcgcatgtgcagcttgagaatggagctgcggccgaagctcttcccgcagcaaaggcacaggaaggagcgcccagccgggtgcgagcgcagctggtgcgccttcaggcgagacagctgcgggaagctcaccccgcagtccgcgcagatgaactgcaactccggattgggctcggggacgccctcagccactttgacctc

SEQ ID NO: 28851 - DNA, 31 bp, Homo sapiens; identical to SEQ ID NO: 10494
  chr16:3156726-3156757
  hypo

SEQ ID NO: 28852 - DNA, 31 bp, Homo sapiens
  chr16:3170601-3170632
  hypo
ctcattgaggcatccccgcatcaccactctt

SEQ ID NO: 28853 - DNA, 31 bp, Homo sapiens
  chr16:3170903-3170934
  hypo
tctcccactcaggcatcggtggctgggtttt

SEQ ID NO: 28854 - DNA, 37 bp, Homo sapiens
  chr16:3189116-3189153
  hypo
ttgggtccaggctggccgcccccgattctgctggaac

SEQ ID NO: 28855 - DNA, 14 bp, Homo sapiens
  chr16:3196516-3196530
  hypo
cgggtgcagtggct

SEQ ID NO: 28856 - DNA, 272 bp, Homo sapiens; identical to SEQ ID NO: 10496
  chr16:3200713-3200985
  hypo

SEQ ID NO: 28857 - DNA, 114 bp, Homo sapiens; identical to SEQ ID NO: 10497
  chr16:3209165-3209279
  hypo

SEQ ID NO: 28858 - DNA, 43 bp, Homo sapiens
  chr16:3211706-3211749
  hypo
aatgtggttggaaatcgcggcggccgggcatggtggctcacgc

SEQ ID NO: 28859 - DNA, 236 bp, Homo sapiens; identical to SEQ ID NO: 10503
  chr16:3232780-3233016
  hypo

SEQ ID NO: 28860 - DNA, 132 bp, Homo sapiens; identical to SEQ ID NO: 10504
  chr16:3233198-3233330
  hypo

SEQ ID NO: 28861 - DNA, 669 bp, Homo sapiens; identical to SEQ ID NO: 10505
  chr16:3233434-3234103
  hypo

SEQ ID NO: 28862 - DNA, 155 bp, Homo sapiens
  chr16:3286293-3286448
  hypo
gcactgatcagggttcggacaacttgtgggcagggatggccttatttctcgatgtaataccagcctccagaaagttgacaaaagtaaaaatataaatgaatgcctcttcttaaagttaattatacctgactaatggctgacgatggcttaaaata

SEQ ID NO: 28863 - DNA, 29 bp, Homo sapiens
  chr16:3315201-3315230
  hypo
tttctttcttcttttttgagacggagtct

SEQ ID NO: 28864 - DNA, 88 bp, Homo sapiens
  chr16:3315529-3315617
  hypo
tcaggagcttcataggcatagacctccctccttccctcctaccccctcccccctctcccaactaatgccagaccggccactacttttt

SEQ ID NO: 28865 - DNA, 28 bp, Homo sapiens
  chr16:3331212-3331240
  hypo
agccagcgcacctagcctaaattcatct

SEQ ID NO: 28866 - DNA, 28 bp, Homo sapiens
  chr16:3492712-3492740
  hypo
actgtggtatgcgcgcctctcagatact

SEQ ID NO: 28867 - DNA, 30 bp, Homo sapiens
  chr16:3516084-3516114
  hypo
actgtgaaacaagacgtagcacatcgccat

SEQ ID NO: 28868 - DNA, 17 bp, Homo sapiens
  chr16:3552152-3552169
  hypo
ttggttacggctgggcg

SEQ ID NO: 28869 - DNA, 38 bp, Homo sapiens
  chr16:3552774-3552812
  hypo
ggttttgttggggagcgcacacacggagatttcggaat

SEQ ID NO: 28870 - DNA, 30 bp, Homo sapiens
  chr16:3610567-3610597
  hypo
gttattccaggagacgtttcataagcacac

SEQ ID NO: 28871 - DNA, 30 bp, Homo sapiens
  chr16:3707024-3707054
  hypo
cctgcatgcggccccgggggacgcagtagc

SEQ ID NO: 28872 - DNA, 329 bp, Homo sapiens
  chr16:3741936-3742265
  hypo
gtgtccccagccgcacgcagttcaccgacgcaggcccagaaaccagacactttcactccaacacaggactggaccgacccaacaccaacacccactgaccccagggaccacataccaggaccctgccttggtcagtagatttgcaatacgtgatggtgtcaaggatatgtggccagccagccacgccgtgtcaaagtctaagcctaaatgaaccgcatctaactgggagcctctcctgttcttcacaaatttgtaacaagtagaaaggaaagacaacagaatatccaggaatcaaggttttaaaaatcagcatatcagccaggggtgcg

SEQ ID NO: 28873 - DNA, 355 bp, Homo sapiens
  chr16:3776073-3776428
  hypo
tcactgtaacagggaccggagctggtgctccaaggtgtctgtccctcagcatttcctcaaacgccacacgggacatgctgcgcggcagcggcaggatttggggggaagtcagaaagcacctcgcgagcctggagcactctctgcctcagattctgggagtcgtgtacggggggggggagccgcctgaacacgggaagaagcgccgcctctgggggtggcagctacgacggacagggaggatggaggagtgggccaaatgcagtttcagaccaactgacgaccctaactgtgtgagcgacaatcacctgtgagcctcgaatgtgtggggccaacgctgagccgcccacctcagtcg

SEQ ID NO: 28874 - DNA, 30 bp, Homo sapiens
  chr16:3777731-3777761
  hypo
acaaacttctctagcgtgtcccccgtggtg

SEQ ID NO: 28875 - DNA, 1035 bp, Homo sapiens; identical to SEQ ID NO: 10511
  chr16:3781527-3782562
  hypo

SEQ ID NO: 28876 - DNA, 925 bp, Homo sapiens
  chr16:3784365-3785290
  hypo
cgacacctcagcatcccgcctcctaacacatgcatgtccccggtgcacagggaaggctgccccagcaggagcccctatcaggcctgtcttctggacaaccccactgctgccatgccacaggcaggtgccccctcctggggtggaactcagctgcgcaaagcctgtctcggacgcggtaacctcccgtgtcacccttaggagatggaactcaagcattaactcaccagacaccagtgagaccagctacactccagcgggagcaagtccgaagacaacaggccaggagctctgcttaggagccacctagggcgtaaacccacgccaccccctgcccgcgcctcctctgtcctgcgaatgacactctggggcgccgtccagcaggtggctgcctctcaaccacctgtgcagtgagcacgagtgtgtgtggcggaagcggcccaggccccacgctccgcctacagcccatccggcacccacctcacagacgtgctctcatatgggacaggcaccagagtggcagtatgtccccagccggctcccggctgcctcacccatggcagcagcccacgcaagagccacctccattcaccgcttttcctcactggtcacaatcgcctgtcccaagttctggggctgcagccttcaacgttcgtcatcgctctccctgcacctacagctacagcccacacccacgccaccatcatctcttccccagacagccgcacaaacccgcacacagcgcgcctcctcccaccgcctggcgggtcctcttccagcaccttcctgtggtgggcgggtctggcccacacgccacctccccaaggctccttccccttcagagctctgccacgctcagagcacaccatgcttgggtctgggttctttttgtttcacatcctaccaggacacagccactcccttgggg

SEQ ID NO: 28877 - DNA, 107 bp, Homo sapiens
  chr16:3785871-3785978
  hypo
cactgctgcccaccaacgccctgtgctgcaggtggtgtcgacgtgcatgtgtgaacggagacaccaccacaggaaggacctaacagtcgacacgcgcctcccagcct

SEQ ID NO: 28878 - DNA, 153 bp, Homo sapiens
  chr16:3802011-3802164
  hypo
agcacagacacagaggtaagacgcagacaccaagacaacacagagcagaaagccaaggcaaagcattgattagcattcggtctcattgcacacatcacaggccatcatcactaacaacgacaggctcggtccggctccaagaggcaaatgttt

SEQ ID NO: 28879 - DNA, 205 bp, Homo sapiens
  chr16:3811571-3811776
  hypo
ctcttgaccaacctccgcagacaccgcctcctctccagggcacgtggctgcttcagacctctgacagcagcctgaggtccgggcaaccaggtaaaaaccccgacgcagcactccccacgcacacggtccccagcacttgaaggtgcaaaggcctggtccagggtgcagacgtgcccttcacagtgggaagcgtcggaaacacaca

SEQ ID NO: 28880 - DNA, 210 bp, Homo sapiens
  chr16:3812493-3812703
  hypo
tcagactcctgtcttcaccagcacctttctgtaagaagatcccatatgtgcagaagtgaagtcaggagtgtatgtgaactgcgccgctcccctcctctggcccgaggacctgctccacgcggcagggctgttgcagcgcaccagcatctcccaaaaacgcggctctcgagcccttggaggctgctgtctcatatcgcagtccccagcccc

SEQ ID NO: 28881 - DNA, 30 bp, Homo sapiens
  chr16:3868173-3868203
  hypo
gaccaatggggggccggggaggaggacggc

SEQ ID NO: 28882 - DNA, 31 bp, Homo sapiens
  chr16:3892676-3892707
  hypo
atgagatggcagtgcacggtggctcatgcct

SEQ ID NO: 28883 - DNA, 30 bp, Homo sapiens
  chr16:3900319-3900349
  hypo
gcggtgttcagtcccgcgtgaccagtcatt

SEQ ID NO: 28884 - DNA, 30 bp, Homo sapiens; identical to SEQ ID NO: 10512
  chr16:3931214-3931244
  hypo

SEQ ID NO: 28885 - DNA, 31 bp, Homo sapiens
  chr16:3997064-3997095
  hypo
gttccatctgcctgtgcggctcccacctcta

SEQ ID NO: 28886 - DNA, 149 bp, Homo sapiens
  chr16:3998688-3998837
  hypo
ttccaaacctatcatgagatacgccagcactgacaagaatcctcactgcggcattgttcatcgcgccccaaactggaaacagctcaatcgatcctcagcggaacggagaaatcatggcctcttcacgcgatgaaatattatgctgcaat

SEQ ID NO: 28887 - DNA, 30 bp, Homo sapiens
  chr16:4164720-4164750
  hypo
aggtaagtgcatgacggtatagagcaaaaa

SEQ ID NO: 28888 - DNA, 203 bp, Homo sapiens; identical to SEQ ID NO: 10513
  chr16:4166050-4166253
  hypo

SEQ ID NO: 28889 - DNA, 298 bp, Homo sapiens; identical to SEQ ID NO: 10514
  chr16:4166682-4166980
  hypo

SEQ ID NO: 28890 - DNA, 30 bp, Homo sapiens; identical to SEQ ID NO: 10515
  chr16:4233231-4233261
  hypo

SEQ ID NO: 28891 - DNA, 81 bp, Homo sapiens; identical to SEQ ID NO: 10516
  chr16:4234097-4234178
  hypo

SEQ ID NO: 28892 - DNA, 201 bp, Homo sapiens
  chr16:4268447-4268648
  hypo
atcagcccttcagaaaccactcgggcctggagaacgcagccagggctgagccacagagatggggcaggagcagttctggcctccaatatacagcggcgctttgctcctctcgcacaagtgaaatcacagctgatgtctccatggctttgaagagcctcacacacaggcccgctggaccacgtgggccctgctcctccatca

SEQ ID NO: 28893 - DNA, 30 bp, Homo sapiens
  chr16:4308055-4308085
  hypo
tcagggaagctccccgtcccccgacggctc

SEQ ID NO: 28894 - DNA, 30 bp, Homo sapiens
  chr16:4312581-4312611
  hypo
ggactggaatcccgcgttgatgctctgcat

SEQ ID NO: 28895 - DNA, 30 bp, Homo sapiens
  chr16:4355449-4355479
  hypo
ctcagcttggaagacgtcagggtgtgaact

SEQ ID NO: 28896 - DNA, 31 bp, Homo sapiens; identical to SEQ ID NO: 10521
  chr16:4366576-4366607
  hypo

SEQ ID NO: 28897 - DNA, 57 bp, Homo sapiens
  chr16:4385340-4385397
  hypo
gcaagagcttctcccgcctggagaacctgaagatccacaaccggtcgcacacaggta

SEQ ID NO: 28898 - DNA, 31 bp, Homo sapiens
  chr16:4411851-4411882
  hypo
aggatcacaggacaggcgggcaggagcctga

SEQ ID NO: 28899 - DNA, 31 bp, Homo sapiens
  chr16:4414526-4414557
  hypo
ttggcacacagccacacggggctaccaggga

SEQ ID NO: 28900 - DNA, 292 bp, Homo sapiens
  chr16:4431009-4431301
  hypo
cacggtgccccgagacgtgccacccgacacggtggggctgtacgtctttgagaacggcatcaccatgctcgacgcaggcagctttgccggcctgccgggcctgcagctcctggacctgtcacagaaccagatcgccagcctgcccagcggggtcttccagccactcgccaacctcagcaacctggacctgacagccaacaggctgcatgaaatcaccaatgagaccttccgtggcctgcggcgcctcgagcgcctctacctgggcaagaaccgcatccgccacatccagcct

SEQ ID NO: 28901 - DNA, 566 bp, Homo sapiens
  chr16:4431613-4432179
  hypo
ctggccggcaacacccgcattgcccagctgcggcccgaggacctggccggcctggctgccctgcaggagctggatgtgagcaacctaagcctgcaggccctgcctggcgacctctcgggcctcttcccccgcctgcggctgctggcagctgcccgcaaccccttcaactgcgtgtgccccctgagctggtttggcccctgggtgcgcgagagccacgtcacactggccagccctgaggagacgcgctgccacttcccgcccaagaacgctggccggctgctcctggagcttgactacgccgactttggctgcccagccaccaccaccacagccacagtgcccaccacgaggcccgtggtgcgggagcccacagccttgtcttctagcttggctcctacctggcttagccccacagagccggccactgaggcccccagcccgccctccactgccccaccgactgtagggcctgtcccccagccccaggactgcccaccgtccacctgcctcaatgggggcacatgccacctggggacacggcaccacctggcgtgcttgtgccccga

SEQ ID NO: 28902 - DNA, 143 bp, Homo sapiens
  chr16:4432550-4432693
  hypo
ccgtccactccaaccacgccccagtcacccaggcccgcgagggcaacctgccgctcctcattgcgcccgccctggccgcggtgctcctggccgcgctggctgcggtgggggcagcctactgtgtgcggcgggggcgggccatg

SEQ ID NO: 28903 - DNA, 31 bp, Homo sapiens
  chr16:4451020-4451051
  hypo
aaaccaagtgaattcccgctccatgtgcagc

SEQ ID NO: 28904 - DNA, 30 bp, Homo sapiens
  chr16:4478612-4478642
  hypo
tgactaaggaactgcggttagctgtcttgt

SEQ ID NO: 28905 - DNA, 174 bp, Homo sapiens
  chr16:4511758-4511932
  hypo
aaggggccgcgaggcgggcaggtcacagcaggttgaagtcccctttgtgctgttccagccactggtccagcgtcagggccttggggttgagtctcagggtcagctcgatgtcacggtcgggtctcagggcatagaaacggaacatgttggccaggtcccgggcaccgggaaagc

SEQ ID NO: 28906 - DNA, 30 bp, Homo sapiens
  chr16:4606403-4606433
  hypo
gtccatgtagctctcggaaccactgaaagc

SEQ ID NO: 28907 - DNA, 31 bp, Homo sapiens
  chr16:4641210-4641241
  hypo
aataaataaataaatacgattgattatgatg

SEQ ID NO: 28908 - DNA, 30 bp, Homo sapiens
  chr16:4655418-4655448
  hypo
gtaagatgcccctgcgaccaagggctccaa

SEQ ID NO: 28909 - DNA, 31 bp, Homo sapiens
  chr16:4656032-4656063
  hypo
gcatgactagatggcacgtaaaaatatatgt

SEQ ID NO: 28910 - DNA, 30 bp, Homo sapiens
  chr16:4689935-4689965
  hypo
ctccgcggctccgacggtgtttgctgcggc

SEQ ID NO: 28911 - DNA, 339 bp, Homo sapiens
  chr16:4704707-4705046
  hypo
tgtgtcctgtgcacagcccctcgcgtgacaggtgctcttgaaaggagcctgagtgctcgagttgaggggctggtggagacgacttatgtggggaggttcttagggacctgccaccaggtgaggccgcccttgggctctggccttgggctccccggcagccagggctcctcctgtggagcagcactttggggaggaacaggttcctttttctagactttgttctttgaggctctaccttgccccggcacttgattatatttctttaatgacactagtaatgcatgcctgtgtgctatgacaggcgtcgaattcttgggcgtaggagcatttggagtgacc

SEQ ID NO: 28912 - DNA, 30 bp, Homo sapiens
  chr16:4723492-4723522
  hypo
cggcagccctcggacgacgagaacagcgac

SEQ ID NO: 28913 - DNA, 31 bp, Homo sapiens
  chr16:4780258-4780289
  hypo
ccagtgcagtcaaccccgggagtaactcaga

SEQ ID NO: 28914 - DNA, 227 bp, Homo sapiens
  chr16:4787780-4788007
  hypo
gccctctcatttgtccacagtcggactatggggaagaggagctgttcatcttccagcgaaaccaaacctccctgattccagacctgtcggaggagctggctgaagatcctgccgatggcgacaagtccagggcctgggtcgctgcagctgaagagtcccttcccgaggtctgtgggacacagaagagtatacgcctgtgtgtgtgcgatgttagtctaaactgactg

SEQ ID NO: 28915 - DNA, 30 bp, Homo sapiens
  chr16:4799188-4799218
  hypo
tccggggcctgtgccgccagaaccgggctc

SEQ ID NO: 28916 - DNA, 30 bp, Homo sapiens
  chr16:4802454-4802484
  hypo
gtgcttgtgcaggtcggtgccccggcggaa

SEQ ID NO: 28917 - DNA, 30 bp, Homo sapiens
  chr16:4802975-4803005
  hypo
gtgccgagagcactcggtaccactccattc

SEQ ID NO: 28918 - DNA, 30 bp, Homo sapiens
  chr16:4845333-4845363
  hypo
ggccctggggagggcggggctggttgccaa

SEQ ID NO: 28919 - DNA, 456 bp, Homo sapiens
  chr16:4845961-4846417
  hypo
cctgctgctgctggtcgtcgcccactgctgctgctgcagctcccccgggccccgcagggaaagccccaggaaggtgagcccctggaaggtgagccctgccggcctctgggacctgcacggaactgtactgggggtggaggcggaaggtgaggggagtggcgggaagggtgctcatccccctagggaacaacgagcgaacctgcttggtcccgctgtgcttctcgtgcaggaaagacccaagggagtggataacttggccctggaaccctgaccctgtgtctcctgcccggtggcagtaacaaagccttctgtctgcccagagcctgagtctgcagtgtcttccagtccccgtctgggtgggtgacgcgggactcgccgccccactcaggtggccacctggcctctccaagccttcagtcagcacgactgtgccaggtcatcctcagtcacctagct

SEQ ID NO: 28920 - DNA, 30 bp, Homo sapiens
  chr16:4846721-4846751
  hypo
aaaaaaaaaaagactcggtggcccaaagtc

SEQ ID NO: 28921 - DNA, 31 bp, Homo sapiens
  chr16:4864722-4864753
  hypo
tgaccaggcctcctggcggcctaccaaggca

SEQ ID NO: 28922 - DNA, 31 bp, Homo sapiens
  chr16:4878735-4878766
  hypo
gtgaacctaggaggcacgtactgttgtaatt

SEQ ID NO: 28923 - DNA, 33 bp, Homo sapiens
  chr16:4887143-4887176
  hypo
tcatacatgtagggcccggtgcggtggctcatg

SEQ ID NO: 28924 - DNA, 99 bp, Homo sapiens
  chr16:4900573-4900672
  hypo
atctcctttaacatcttagtacgtgttgggagatggtcttttgcagcgccagcctgttacactgctaatcgttttgccgcctgattagaattattttaa

SEQ ID NO: 28925 - DNA, 638 bp, Homo sapiens
  chr16:4920095-4920733
  hypo
aacaagacagggtttgactgccgttggctcctagctttcctctccacgtacggtgagctgatgaagacaggagttgcagtgagctgcagccggtggtgactgtgttttgttcttcagcatagaggcgcagactcgggagctgagcagtcaggtccgctctggggtgtatgcctatcttgcgtcattcctgccctgcagcaaggatgccctgctcaagcgtgctcggaaacttcacctctatgaacaggtgggtgactctagagtgaagccctttggctttggggtcctggcggaggggtgactgagtcttaagcaatgatgcgtctgctgccccactgcctccttgtgatcaccccatcatgcgtcctgagcgtaagagcgatgtgtaaacctgccttgaattgtgtcccgctcttcgcaggggggccgtctgaaggagcctctccagaagctcaaggaagccattggcagggcgatgccagagcagatggccaagtaccaggacgaatgccaggcacacacgcaggcaaaggttgccaagtaagtttgtcctggcgcttgcaggtgcaaccctcccgtcttgcctcttcccctcccgtttctcggtgtgtactgccgtttcccaaggagcctcttgg

SEQ ID NO: 28926 - DNA, 43 bp, Homo sapiens
  chr16:4933626-4933669
  hypo
cacggtgggcttcctccggggacagctcgcggcctgtgtcagg

SEQ ID NO: 28927 - DNA, 30 bp, Homo sapiens
  chr16:4934035-4934065
  hypo
cagccggctcacctcgacgtccagctcgcg

SEQ ID NO: 28928 - DNA, 31 bp, Homo sapiens
  chr16:4964117-4964148
  hypo
ggctccaatgaggacacgccatagagagagg

SEQ ID NO: 28929 - DNA, 158 bp, Homo sapiens
  chr16:4971734-4971892
  hypo
tgggattacaggtgtgtaccactgtgcctggccccagcctgcattagaggtggcaactcgaggctgaggacccagtggctcagtaagcccagctgcaaagtggagagctgggactcgaacctaggactgtgtgctgtcctggccgccaggacagcaca

SEQ ID NO: 28930 - DNA, 168 bp, Homo sapiens
  chr16:4980310-4980478
  hypo
ccaactctctgctcaccgtcctgcacgcaggaggtgactggatggggacagggcagggggcagcctgctcaggcctcgcactcctttccactagctggaacccctgccccattcatccccacctccgggctctgctggtcctggggtgtgaagcgcagggcaatgtat

SEQ ID NO: 28931 - DNA, 29 bp, Homo sapiens
  chr16:5004699-5004728
  hypo
tgagccactgtgctcggaccattttgcca

SEQ ID NO: 28932 - DNA, 31 bp, Homo sapiens; identical to SEQ ID NO: 10525
  chr16:5007999-5008030
  hypo

SEQ ID NO: 28933 - DNA, 207 bp, Homo sapiens
  chr16:5628621-5628828
  hypo
tgttctattaatttagcgccaacagctgttagatctaaggccttcaaggttctcggcaaaaatgaaactcatcctcaggaactcctctgtgaagtatcagtaatgaaccatggagggaatgaaggctaaatgaagataaaaatatctccaccgggccagggtgtttttgcgcttcaatcccaaaagtactagcgcatgaaacctcca

SEQ ID NO: 28934 - DNA, 30 bp, Homo sapiens
  chr16:6744841-6744871
  hypo
tctagagtccagccccggagccctgggaac

SEQ ID NO: 28935 - DNA, 31 bp, Homo sapiens
  chr16:7823780-7823811
  hypo
gggacacagatccaaacggtatcagatggta

SEQ ID NO: 28936 - DNA, 253 bp, Homo sapiens
  chr16:8722898-8723151
  hypo
tagcacaggaagaagacgacgtcctgggagaggaagcacaaggcagcccgcacgatatcatcagaataggtaaatagaggtgtgatgtggcccacctgtcaccaaggcaactccgcagtgtcactgctcagggctcagtatgatctgagcgtggactctgcaggcccaggcagcacaggttatgagaaccagctcgggtgagactggggaagctctccacaaccccgtcactcctgcccggctcacaccacca

SEQ ID NO: 28937 - DNA, 428 bp, Homo sapiens; identical to SEQ ID NO: 10533
  chr16:8767885-8768313
  hypo

SEQ ID NO: 28938 - DNA, 30 bp, Homo sapiens
  chr16:8941732-8941762
  hypo
tcggtggccagagccgagggtcctcccaca

SEQ ID NO: 28939 - DNA, 30 bp, Homo sapiens
  chr16:8942325-8942355
  hypo
gggagtttgcacctcggctgggccggattc

SEQ ID NO: 28940 - DNA, 31 bp, Homo sapiens
  chr16:8995325-8995356
  hypo
atttagacagtcaagacggtactgagtgcag

SEQ ID NO: 28941 - DNA, 91 bp, Homo sapiens
  chr16:8996300-8996391
  hypo
ttgcatgggccacaatcgaatttgatcttgtggaaatccctgaaaaaaatattaagagtagattaaaataaaaacacgctcatattttagt

SEQ ID NO: 28942 - DNA, 428 bp, Homo sapiens
  chr16:9005256-9005684
  hypo
gtaacattaagagtgaaagggcgagccacatgctgagtgacaagctctcaatccaacacggaattgtatatccagagtgtatggagagctcgtcctgctccggtcatgaaggaaaaacgcaactgcacaacactgaaaacagcgctgtcacgctccggacacatgcggtacaggacagggatccctgaagggacaaatgagagccccgtgatgggcccagctctgctgaaagtttacaggctgcagcccggagaaggcaaacccagacagagccaagaagtgagaatgagaggagctcaagggagcgggaacctgctgggcagagtagcctaaagcagaatgctgcccagaaagcgagatctggggatgtgcagtttcttccgaagctgtcagtgagaactgatcagtgaactcgaggaaattacctg

SEQ ID NO: 28943 - DNA, 31 bp, Homo sapiens
  chr16:9010028-9010059
  hypo
agtgactcaggaccaacgggacagccaacaa

SEQ ID NO: 28944 - DNA, 31 bp, Homo sapiens
  chr16:9019562-9019593
  hypo
tagtgcactgcacactcgatttcagcctcac

SEQ ID NO: 28945 - DNA, 31 bp, Homo sapiens
  chr16:9020778-9020809
  hypo
acaattacctacagcacgaagttcccactgt

SEQ ID NO: 28946 - DNA, 31 bp, Homo sapiens; identical to SEQ ID NO: 10534
  chr16:9022848-9022879
  hypo

SEQ ID NO: 28947 - DNA, 328 bp, Homo sapiens; identical to SEQ ID NO: 10537
  chr16:9186866-9187194
  hypo

SEQ ID NO: 28948 - DNA, 81 bp, Homo sapiens
  chr16:9222466-9222547
  hypo
gccccaaacatcttcccgtttccacactaccaggtggggtcctggtggtgccctgggcctgcccttcggggctctgttcta

SEQ ID NO: 28949 - DNA, 117 bp, Homo sapiens
  chr16:10631324-10631441
  hypo
gcaagactccatggggcgtggccctgcctgccctgctggttcacttcccactgcactccagccccactgggcagctctccgtccctcctgtcacagggcttccgtcatgctgttccc

SEQ ID NO: 28950 - DNA, 619 bp, Homo sapiens; identical to SEQ ID NO: 10544
  chr16:10674032-10674651
  hypo

SEQ ID NO: 28951 - DNA, 165 bp, Homo sapiens
  chr16:10868651-10868816
  hypo
gagacggggtttctccattccccttacttttaagtgacactgctcagcactcttaagcatgtctcaggagtctaaaccaaagtacctcttggtaccacgcacacaggggacaagcctcgtgtttcggaagtgatgacatcacacgaaagggcctcaccttcacag

SEQ ID NO: 28952 - DNA, 30 bp, Homo sapiens
  chr16:11001017-11001047
  hypo
ctgagcaaggccgacgccctatttgagctg

SEQ ID NO: 28953 - DNA, 115 bp, Homo sapiens; identical to SEQ ID NO: 10545
  chr16:11035551-11035666
  hypo

SEQ ID NO: 28954 - DNA, 30 bp, Homo sapiens
  chr16:11073048-11073078
  hypo
gacagccctagggccgtggaggaagtcagt

SEQ ID NO: 28955 - DNA, 17 bp, Homo sapiens
  chr16:11102884-11102901
  hypo
tataaccatcaccacca

SEQ ID NO: 28956 - DNA, 30 bp, Homo sapiens
  chr16:11103441-11103471
  hypo
gttgtgtgatggcgccgtaccacctacaag

SEQ ID NO: 28957 - DNA, 31 bp, Homo sapiens
  chr16:11114091-11114122
  hypo
tggccgccagcacctccgtgcaggagcagaa

SEQ ID NO: 28958 - DNA, 242 bp, Homo sapiens
  chr16:11118476-11118718
  hypo
ttcccctctggatagcggcttccgcaggcagagcctgtctctcatttgtctgtgtcctcagtgcgtggtgctggaccaggcacacagttgtggcctaaagagctgtgtcaaaggcagctagcaccccatgtgcaggttagagaggggaggtgttcacccttgtgcaccgtgaggctcatacatgcccctcctcttttccagacccttcctggatatggtgtaccacgcgctggacagcccgg

SEQ ID NO: 28959 - DNA, 30 bp, Homo sapiens
  chr16:11132914-11132944
  hypo
caagcgtagaaggtgcgtaatacgggagtg

SEQ ID NO: 28960 - DNA, 292 bp, Homo sapiens
  chr16:11151101-11151393
  hypo
gcttctaacttgagtgactgtcgcctaaactaggcagcttgcacatgcagcaaggaagcaggagggtgaaaaccgagcctttgttccaggccagctcgtgggctcagcacatcaccggtgccatcccgttgtacctgcacggtgggtgccccatttccagaacacaagcctgggcttgggcacgtcacgtgattaccaagccccagcttgagccacagtgtgtctgactacagagccacccaccttcccctgctcattggactgattccccggtgacattgagtttgccaga

SEQ ID NO: 28961 - DNA, 187 bp, Homo sapiens
  chr16:11174342-11174529
  hypo
ttggctaccaggtcagtagcccgtgtctggaacattgggcggtccattcgtttcatatggctgctgctacacatttctacaacacccagttattctcttacagctctggaggttagaagtctgccacgggtctcactgggctaaagtctaggtgttggtccttcccgaaatctctggggagaatctg

SEQ ID NO: 28962 - DNA, 100 bp, Homo sapiens
  chr16:11178649-11178749
  hypo
aaaaagcctgcccttgttcagcgcctctcgaagacactgtggagaaagaggtagccggggctgggtggtgatttacctcgaggaaaattaatatggtgcc

SEQ ID NO: 28963 - DNA, 347 bp, Homo sapiens
  chr16:11192847-11193194
  hypo
tacttgctctgtgacacggagagacagctgtgtgggaatgggctttctgtgtgctctgcagagagcgtggcggctaaggtgaggcatgggagtcataacccccaggctgagtgagccaagagtgcatgtggccagagcgccccattccttccaggtcagggagctccaaggccctgggccaggctgcttcatgccacccgggtttgccaggacaggtcattctcatgcacggctcatcggcagacgtggagcagagctgtttcccacggtcccacacagtggacagggtctcgttttcttccctctaacccttcgctgtccaacacggtagccacttgtggctgtct

SEQ ID NO: 28964 - DNA, 218 bp, Homo sapiens
  chr16:11219552-11219770
  hypo
cagcttccattccactcgaggagcccaggctcaaacccctttctccttggtctcaaccttggcccgaagccctcacttggcttccgcttgtgcgttgagcctcagtgggaactttgatgttccactggtctctgcagcttgaggctgcctgccgcccacttggcgtctcccaagtgatgtgcctggcagggccacagccactacgatgtccccccccc

SEQ ID NO: 28965 - DNA, 30 bp, Homo sapiens
  chr16:11232743-11232773
  hypo
tccaagtgcccttgcgcaagggtttcctca

SEQ ID NO: 28966 - DNA, 105 bp, Homo sapiens
  chr16:11265076-11265181
  hypo
gggaaggggacagccccgaggggtcactgactccctggtcacccagaggctccctccgtgtgcagcacctgcctctgagcctccttcgcacgccagaggcagagc

SEQ ID NO: 28967 - DNA, 30 bp, Homo sapiens
  chr16:11343450-11343480
  hypo
tgacgtcactggcgcggcgcgtggtggcct

SEQ ID NO: 28968 - DNA, 30 bp, Homo sapiens
  chr16:11343686-11343716
  hypo
gcgctgcggggagccgtgcagggctgcggc

SEQ ID NO: 28969 - DNA, 30 bp, Homo sapiens
  chr16:11370334-11370364
  hypo
tctgcaaggctccccgggagcttgtatata

SEQ ID NO: 28970 - DNA, 12 bp, Homo sapiens
  chr16:11500579-11500591
  hypo
gcccggccttcc

SEQ ID NO: 28971 - DNA, 83 bp, Homo sapiens
  chr16:11622038-11622121
  hypo
ggcccattttaaccacttttaagtattcagttgagtggcgtcgtgtccactcatgacattgcgcaaccatcactactgtctag

SEQ ID NO: 28972 - DNA, 31 bp, Homo sapiens
  chr16:11703493-11703524
  hypo
ttcccggctgcgtgaccgtgagcaagttact

SEQ ID NO: 28973 - DNA, 92 bp, Homo sapiens
  chr16:11770916-11771008
  hypo
gcgagtcagggcacgcgtcctggaggctgccagcgtccttgtagcagagcagtttcttgccgcttgggtcttcagcacgccaagccccccac

SEQ ID NO: 28974 - DNA, 138 bp, Homo sapiens
  chr16:11775049-11775187
  hypo
ccacaacaactgaaaacacatcgtggccctgtcaagtgggcccatggaagaataccagacgctggacctgcccccacgttctgcggcacaagcctggtcttgtaaggcagagtaaacgtgaattacttcccagaaaaa

SEQ ID NO: 28975 - DNA, 19 bp, Homo sapiens
  chr16:11784713-11784732
  hypo
ccactgctttctctttaag

SEQ ID NO: 28976 - DNA, 93 bp, Homo sapiens
  chr16:11792616-11792709
  hypo
ccaagggcagcatggagcctccgtgcggcacaggctgtctgttctgctcacctgtatcctccgggcctagacgaacaccaggcacacagcagg

SEQ ID NO: 28977 - DNA, 181 bp, Homo sapiens
  chr16:11831274-11831455
  hypo
taggtgactagaacaaaactccatctaaaaaaaaaaaaaagaaagaaagtaagtaaaggaacaagaaaagaacaaaagccagacggtacaaatggaaaacaaggagcacgaaggtagacttaaacccaactacctcaacaattacgttaaatataaaaggagaggccgggcgcggtggctc

SEQ ID NO: 28978 - DNA, 45 bp, Homo sapiens
  chr16:11853663-11853708
  hypo
cttctttaagaaaaaaggtcccgggccgggcacggtggctcacgc

SEQ ID NO: 28979 - DNA, 51 bp, Homo sapiens
  chr16:11879767-11879818
  hypo
cctggccgttttgtgtttttttaaagtgacgggtaggtatatatattgaca

SEQ ID NO: 28980 - DNA, 40 bp, Homo sapiens
  chr16:11900210-11900250
  hypo
taaaagatactaatcactggccgggcgcggtggctcacgc

SEQ ID NO: 28981 - DNA, 41 bp, Homo sapiens
  chr16:11968753-11968794
  hypo
atattaacagctgggccgggcacggtggctcacgcctgtaa

SEQ ID NO: 28982 - DNA, 90 bp, Homo sapiens
  chr16:11974693-11974783
  hypo
atgttttctctcattccgtaggttgccaaccccatgaattttttattgtaaaagtctggcctcttttttatttgatatttgagacggagt

SEQ ID NO: 28983 - DNA, 181 bp, Homo sapiens
  chr16:12011432-12011613
  hypo
gtgagccaccgcgcccggccgatctgtattttaattttaaacatctgtattgtaaagataaaagagaactcagcctaatgagataggtcaaaaacgaagctgtcaagtatttttcaaaagagtcctaggctacagtaatttgaatttaatattaaactaccaagctttagggattaaaaaa

SEQ ID NO: 28984 - DNA, 208 bp, Homo sapiens
  chr16:12084489-12084697
  hypo
ggcatcccagatgcccgccagtgtaactgagaatgaattctgcagtgacaacaggttgatgatgtccttgttccctgcaagactctgtatgtggggccttggttagagggcaagggaagatgggagcatgattatgatgcgggcctggtctacagcctgctggggaactctcacgtttaaccatctaaccgcacggtggctgtaaggt

SEQ ID NO: 28985 - DNA, 30 bp, Homo sapiens
  chr16:12088022-12088052
  hypo
gtgactgactttcccgtgcacatgaggatt

SEQ ID NO: 28986 - DNA, 167 bp, Homo sapiens
  chr16:12132680-12132847
  hypo
cgacaatggtctggggtatttcgaaatacgttgttggccagctggcccagggtgttgttgtcgccagattccccgtcctggtttcttgagtgaggcggagaatggaaggaaggctgttttgtacagttgtgtggagtagactgatcggatgagcttgggaagtggat

SEQ ID NO: 28987 - DNA, 30 bp, Homo sapiens
  chr16:12136807-12136837
  hypo
gcttctactccctgcgccacatcgcctcag

SEQ ID NO: 28988 - DNA, 30 bp, Homo sapiens
  chr16:12142320-12142350
  hypo
gagtcaacgcagaacgtgacctccttgctg

SEQ ID NO: 28989 - DNA, 31 bp, Homo sapiens
  chr16:12142576-12142607
  hypo
gagtccagtgcacttgcgttttccatttgtg

SEQ ID NO: 28990 - DNA, 300 bp, Homo sapiens
  chr16:12210684-12210984
  hypo
caatacgtgcttcaacgaggacgaaccatggaaacaggcttagtcaatacctgcttcaacgcggacgaaccgtggaaacaggcacggtcaatacgtgcttcaacgaggacgaaccatggaaacaggagtggtcaatacgtgcttcaatgcggatgaaccatggaaacaggcgtggtcaatacgtgcttcagtgcggacgaaccatggaaacaggcgtgttcaatacgtgcttcaatgcggacgaaccatggaaacaggcgtggtcaatacgtgcttcagtgcggacgaaccatggaaaca

SEQ ID NO: 28991 - DNA, 146 bp, Homo sapiens; identical to SEQ ID NO: 10547
  chr16:12211190-12211336
  hypo

SEQ ID NO: 28992 - DNA, 31 bp, Homo sapiens
  chr16:12410419-12410450
  hypo
ctcttcttacccaaatcgggatcttgctctc

SEQ ID NO: 28993 - DNA, 31 bp, Homo sapiens
  chr16:12506196-12506227
  hypo
cacccaaccaccaaggcgtgtgcttcacaaa

SEQ ID NO: 28994 - DNA, 31 bp, Homo sapiens
  chr16:12609441-12609472
  hypo
atcttcaggtgacctccgaagtcacctcctc

SEQ ID NO: 28995 - DNA, 514 bp, Homo sapiens; identical to SEQ ID NO: 10548
  chr16:12897351-12897865
  hypo

SEQ ID NO: 28996 - DNA, 38 bp, Homo sapiens; identical to SEQ ID NO: 10549
  chr16:12995277-12995315
  hypo

SEQ ID NO: 28997 - DNA, 251 bp, Homo sapiens; identical to SEQ ID NO: 10550
  chr16:12995552-12995803
  hypo

SEQ ID NO: 28998 - DNA, 864 bp, Homo sapiens; identical to SEQ ID NO: 10551
  chr16:12996073-12996937
  hypo

SEQ ID NO: 28999 - DNA, 19 bp, Homo sapiens
  chr16:13648595-13648614
  hypo
gcttcggcctcccaaagag

SEQ ID NO: 29000 - DNA, 30 bp, Homo sapiens; identical to SEQ ID NO: 10554
  chr16:14397059-14397089
  hypo

SEQ ID NO: 29001 - DNA, 30 bp, Homo sapiens
  chr16:14729418-14729448
  hypo
tctcagcccgccttcgtcttaccctacacc

SEQ ID NO: 29002 - DNA, 39 bp, Homo sapiens
  chr16:14735317-14735356
  hypo
ggagggtgtgaacccaggaggcggagcttgcagtgagtg

SEQ ID NO: 29003 - DNA, 186 bp, Homo sapiens
  chr16:14761371-14761557
  hypo
aaggacattcagcacgggcagccatgctcttcccagcacccagaaaaggcccagggcccggactcctgggtgtggtcatgagaagcgcctccgattcagcctcttctcttcttgtttcaggaccgtgcctcagaggatgtggagccatttctggaaagtatcaacgcaggggctttttgtggccat

SEQ ID NO: 29004 - DNA, 153 bp, Homo sapiens
  chr16:14763026-14763179
  hypo
gttgcatctggaagttcgaagaaattacttgaaataaaaataaagatttctatatagataaaacctatatgtagagaaaaagcaattgtctagaaaacacaaaacttctgcattgccggatagaatcttctagccatgggccgagcgtggtgg

SEQ ID NO: 29005 - DNA, 30 bp, Homo sapiens
  chr16:15051574-15051604
  hypo
agctccctacaccacgtccgggcttcccgg

SEQ ID NO: 29006 - DNA, 143 bp, Homo sapiens
  chr16:15129341-15129484
  hypo
aagcacaaggtgcaggagtcacgctgcctccaacgccctcgggcagtcgcaccaagcagaggcttccaggtaagtgacgcctctgcaccgagttcaggtaacaggtttcccctgttgactgttacttgcgtttgttttctggg

SEQ ID NO: 29007 - DNA, 315 bp, Homo sapiens
  chr16:15606939-15607254
  hypo
aaacatctcctgccccgagtctcccccactaccgatcaaaggccttgaatagcacatcacttatatctcagccattcaccctagaaacatagcccgaaggaaccctgtagatgtgtgcgaagttttcactttgagaacgttcttcactggaacattcttacggtgaaaataattcttacatttttttcctcatgattacagtggggaaaaaataggaaacaacctacatgtctgtggattgcttaagtgcttcgtgatacagccacaaatagaaaaccgccccgccttccatgctgctgccgaggaagaccatcc

SEQ ID NO: 29008 - DNA, 19 bp, Homo sapiens
  chr16:15607464-15607483
  hypo
gtgtctgcccaggcgcggt

SEQ ID NO: 29009 - DNA, 83 bp, Homo sapiens
  chr16:15607782-15607865
  hypo
acacatattatatatataaaaaaccacatatattcatatatgtatatacacacacatatttatatatccgtatgtatgctcac

SEQ ID NO: 29010 - DNA, 64 bp, Homo sapiens
  chr16:15608919-15608983
  hypo
cagagccagactccgtctaaaaacaaaacaaaacaaagcaaacgaagtaaattactttggaaaa

SEQ ID NO: 29011 - DNA, 92 bp, Homo sapiens
  chr16:15649665-15649757
  hypo
aagctcatgaatcctacgaaagctgaaccaatgcacatgtttatcatcttggaaccatttgatttgaggaaattgtaatagcacatgctggc

SEQ ID NO: 29012 - DNA, 30 bp, Homo sapiens
  chr16:15693279-15693309
  hypo
ggtgagctgtaatacgtgactgcctgagat

SEQ ID NO: 29013 - DNA, 31 bp, Homo sapiens
  chr16:15704351-15704382
  hypo
tactgtactttctacccgtaactggacctgt

SEQ ID NO: 29014 - DNA, 10 bp, Homo sapiens
  chr16:15708035-15708045
  hypo
ttttttttaa

SEQ ID NO: 29015 - DNA, 148 bp, Homo sapiens
  chr16:15723201-15723349
  hypo
gagtttcaacttaagccagaccgcagggggcttgttgggtatcggggacacaggtgactagcaggcaagtgccggaatcaggatacccggggcccactctcttaactgctgcaatcaccaatgacacgtttactttttctaagagctg

SEQ ID NO: 29016 - DNA, 43 bp, Homo sapiens
  chr16:15729536-15729579
  hypo
aagtgagccctttaaacaaaccggaggtaccacattaaggtgc

SEQ ID NO: 29017 - DNA, 8 bp, Homo sapiens
  chr16:15747585-15747593
  hypo
aacaattt

SEQ ID NO: 29018 - DNA, 83 bp, Homo sapiens
  chr16:15799466-15799549
  hypo
agacttttgctccccacgcaagggttggataagaagccataaggatgaacacaactcagtgaccaattctttagtcaaaagga

SEQ ID NO: 29019 - DNA, 300 bp, Homo sapiens
  chr16:15820565-15820865
  hypo
cctctcctccaggaacgcaactagaggaaaggacttgccttgcagcaagagagacctcagcgagccgggaagaggctcctccccacagaactgggcaccacccagcactgcccaccacaccaccgcgccacctcctcacctgcagcttgtggactttgtcattgagctccgcccgggcccgctccccatcgctgcacttggactgcagctcctgcacctgcgcctccagcttcttcttcttatgttccacctcctgcttggcctggcccaggacccgcagctccccggccaggtctgcgt

SEQ ID NO: 29020 - DNA, 31 bp, Homo sapiens
  chr16:16047431-16047462
  hypo
gctgcttggcacacagcgctcagtaaagatc

SEQ ID NO: 29021 - DNA, 31 bp, Homo sapiens
  chr16:16080203-16080234
  hypo
ggccatgaaccagtagcgagcagtctgtggc

SEQ ID NO: 29022 - DNA, 196 bp, Homo sapiens
  chr16:16103292-16103488
  hypo
ctttcttgtgcagtgcgccggagttgcagctagagatgagctgtgagctgagctcttgagtgttcaggcaccggggagcatggtgaccagacaaacagtcctgttggaggtagtggggcgtagcaggctgattacagaccatcacgtgccggcctggatgccagctcaccataccgaggacttgtccttattccag

SEQ ID NO: 29023 - DNA, 30 bp, Homo sapiens
  chr16:16184284-16184314
  hypo
catgagctacttgccgcaggtggacgtcat

SEQ ID NO: 29024 - DNA, 227 bp, Homo sapiens
  chr16:16208593-16208820
  hypo
tgtggagttttaactccgagtgtctgcagggatcgccgtgtttggctactccatggccgtgtccatcggggggatcttggcttcccgctgtctgcacgtggacctgctgcacagcatcctgcggtcacccatgagcttctttgagcggacccccagtgggaacctggtgaaccgcttctccaaggagctggacacagtggactccatgatcccggaggtcatcaaga

SEQ ID NO: 29025 - DNA, 207 bp, Homo sapiens
  chr16:16219543-16219750
  hypo
cctcccataattcatacttgttgaaaataatttgtttcctattatctcagtggaaaaaaagaaaaaggaaagtcaagtacgcccgcttactctagaaatgccacgtgactcttccactcacaggtcaccacgtacttgaactggctggttcggatgtcatctgaaatggaaaccaacatcgtggccgtggagaggctcaaggagtat

SEQ ID NO: 29026 - DNA, 31 bp, Homo sapiens
  chr16:16259431-16259462
  hypo
ctgagttgacctcagccggtcccggaagcct

SEQ ID NO: 29027 - DNA, 154 bp, Homo sapiens
  chr16:16282898-16283052
  hypo
agctgtggtgcctgcacggtccatgtggcccacccgccatgtccgcatgtgcttccctccgtagatcccactcccagtcctgctaacacatgtcctctccgcagtcataagctacataaggctctctctaaagacacagcgcattgctaatggt

SEQ ID NO: 29028 - DNA, 30 bp, Homo sapiens; identical to SEQ ID NO: 10557
  chr16:17481113-17481143
  hypo

SEQ ID NO: 29029 - DNA, 43 bp, Homo sapiens
  chr16:17754965-17755008
  hypo
acccagtaatacagagagtagcgcaggctcttcacaggcattt

SEQ ID NO: 29030 - DNA, 30 bp, Homo sapiens; identical to SEQ ID NO: 10559
  chr16:18178839-18178869
  hypo

SEQ ID NO: 29031 - DNA, 152 bp, Homo sapiens
  chr16:18804299-18804451
  hypo
taaaagcaagaattcaattaacgctgggtaagaaaagtcaaaacactaatgagttgtccatgaagccaactgctaagaacgcgctcaactatacgcgacatgaagacactatgcacgaagccttacttggcgagtctgaatttctattaact

SEQ ID NO: 29032 - DNA, 34 bp, Homo sapiens
  chr16:18950991-18951025
  hypo
agtcaccgtgcccggccctcctgcaactttaaat

SEQ ID NO: 29033 - DNA, 21 bp, Homo sapiens
  chr16:19040620-19040641
  hypo
ccggcacgagatttgcacttc

SEQ ID NO: 29034 - DNA, 43 bp, Homo sapiens
  chr16:19184225-19184268
  hypo
acagtttccattcctttctaccgaaaggagatcccggttttga

SEQ ID NO: 29035 - DNA, 193 bp, Homo sapiens
  chr16:19185384-19185577
  hypo
acaagtgcctttttgctgctccgaacaagaacttcagaaacagggaagcagaaaagcacctccaggctccatcctgtcctccaacgctgtttatgttctctctggcatctttcgttttatttctaatttgctctcctcccgcgcctgcatacaacatctccatctgccagtcgctcagatattttgggaacgc

SEQ ID NO: 29036 - DNA, 30 bp, Homo sapiens
  chr16:19412005-19412035
  hypo
cctggattatccctgcgccataatatgtat

SEQ ID NO: 29037 - DNA, 195 bp, Homo sapiens
  chr16:19708366-19708561
  hypo
aatgaaggcagagcaggtggtcgccagccagtttgcgagtccgtgcccagcaggtgccagcccgcgtgccctgtgccaaagcgcttttctcttgtagcccgcgggcctgggcgcccacagcacaacctgctccctgatgattgggctctttgccgtcggctctgctgcttctgtgactgtcgctgctctaggctg

SEQ ID NO: 29038 - DNA, 225 bp, Homo sapiens
  chr16:19719065-19719290
  hypo
cccccacctccctacacggcgcacatggcgcacctcctcccaccacgctacacagcacactctccccctaccatcctacaaagcgcacctcccctaaccacgctacacagtgcactccccccaccaccctacacatcgcactccccccacctccctacacagcacactcccccacctccctacatagcacttcccccactccctatacagcgcacctccccccac

SEQ ID NO: 29039 - DNA, 186 bp, Homo sapiens
  chr16:19845504-19845690
  hypo
aactaaggagtagctacgagcgatggagcttatgccatgtgccagacactacactaagcaccttatgtttccacgtagtcctcacacatggtatctcagagaggtgagatcatctccatcgtacagatgaggaaaccggggctgggaggatacatggcttgcacaagtccacgcagccagtcaggc

SEQ ID NO: 29040 - DNA, 8 bp, Homo sapiens
  chr16:19848129-19848137
  hypo
ggctgatg

SEQ ID NO: 29041 - DNA, 147 bp, Homo sapiens
  chr16:19883197-19883344
  hypo
cgtcctcctcgaaggccgtctcccgcatcctgggctgcgacgtgtcgaagtagttgggcgtgttctcctgcagggctggcagaagggtgcagtggatctcagggatggcgtggaagatgacgaagacccagccgctggccgccagcg

SEQ ID NO: 29042 - DNA, 30 bp, Homo sapiens
  chr16:19904195-19904225
  hypo
tggtgagtacgaatgcggtgaaaacatgaa

SEQ ID NO: 29043 - DNA, 30 bp, Homo sapiens
  chr16:19904432-19904462
  hypo
gatggcgggagcaggcgtgacagtcccgct

SEQ ID NO: 29044 - DNA, 36 bp, Homo sapiens
  chr16:20754698-20754734
  hypo
tgtttcatgctgctttcgttgcggccttttatccat

SEQ ID NO: 29045 - DNA, 40 bp, Homo sapiens
  chr16:20803221-20803261
  hypo
cctgggtaacagagtgagactgtctcggaaaaaaaaaaaa

SEQ ID NO: 29046 - DNA, 176 bp, Homo sapiens; identical to SEQ ID NO: 10567
  chr16:20817421-20817597
  hypo

SEQ ID NO: 29047 - DNA, 5 bp, Homo sapiens
  chr16:20823533-20823538
  hypo
caaat

SEQ ID NO: 29048 - DNA, 30 bp, Homo sapiens
  chr16:21178769-21178799
  hypo
ggaaacccatctttgcggatttgcctatgg

SEQ ID NO: 29049 - DNA, 18 bp, Homo sapiens
  chr16:21179037-21179055
  hypo
agacttgcggtggggcgc

SEQ ID NO: 29050 - DNA, 49 bp, Homo sapiens
  chr16:21515477-21515526
  hypo
aagaaagagaaaacgcggggcaccatggatggctgactcctgtaatccc

SEQ ID NO: 29051 - DNA, 237 bp, Homo sapiens
  chr16:21569155-21569392
  hypo
taaaattgctatcatcactggcatcgtcatcatctcactacagcagagatccgcagttccccgaaacaaataccacgagtctcaaggtaagacctgcacgtaaggatgtcgaaagataaatatgtcttaagaacatgtccatgagaaggggctttgccagccatgcaagcataaaagaagaaaagtccctcattcatccaaaaacacccgctgagtttctcccgcgtgccgggcacc

SEQ ID NO: 29052 - DNA, 41 bp, Homo sapiens
  chr16:21633193-21633234
  hypo
ctttttttttgggagacggaatctctccctgttgcccaggc

SEQ ID NO: 29053 - DNA, 31 bp, Homo sapiens
  chr16:21635697-21635728
  hypo
cttgtaaaggaaacttcgtatgtgttgagat

SEQ ID NO: 29054 - DNA, 86 bp, Homo sapiens
  chr16:21666710-21666796
  hypo
ctacgttctggatgacgctgtctttgttctcaaaccagtataaacacgtggaggtcgaagtcttcagagtccgcaccctccgggat

SEQ ID NO: 29055 - DNA, 199 bp, Homo sapiens; identical to SEQ ID NO: 10569
  chr16:21831765-21831964
  hypo

SEQ ID NO: 29056 - DNA, 81 bp, Homo sapiens
  chr16:22083798-22083879
  hypo
tgactgctactatgctgagcacgagagagactcagcaaaatatttgtgtattggctgggtgcggtggctcacgcctgtaat

SEQ ID NO: 29057 - DNA, 17 bp, Homo sapiens
  chr16:22084118-22084135
  hypo
ctccatctcaaaaaaaa

SEQ ID NO: 29058 - DNA, 91 bp, Homo sapiens
  chr16:22285048-22285139
  hypo
ggccagaacctcagcccggacaggtactgcagctgtcacccaggaggagctggtaggaacctgggctgcaggtgggcgcttgtcctcggta

SEQ ID NO: 29059 - DNA, 556 bp, Homo sapiens
  chr16:22326001-22326557
  hypo
accggggaacacgggcgtaatggacatggaggtggcgcagggagctcatcctgttctctccgtagcttattaggaccttagaaactcccttccgctctggggaacttagaaaaggcatcctgggcctgtctgctttaaggactctgctggctctggcgcctgggactctaatccccctcaagcctctgggctgggcaggcacgagcaagtataagccgttccctggcgtgtgcaggcagctctgggagggacacggttggaacggaatttaaacgacctgtgctaggaaaggaagggagagtggaaaacccctatacggagttctctggtcttctggcaggggctgagacggcagtccagcaagggtcacaggcctgacggtatgacctcttccccttcccaccgcaggtgcggttctcccggccggagtcagagcaggcccgccagcgccgtgtgcagtcctatgagttcctgcagaagaagcacgcagaggagccctgggtccacctgcattactatggcctgagggtgagcggggcttcgtggggtcctgggg

SEQ ID NO: 29060 - DNA, 30 bp, Homo sapiens
  chr16:22333249-22333279
  hypo
atggctagactgctcgttctgtgccatgga

SEQ ID NO: 29061 - DNA, 193 bp, Homo sapiens
  chr16:22358430-22358623
  hypo
gaggccagttcccagccgctggcaacaggctcagactgggcgttcactccagtcaggtccttggctgcagccctggaggtctgcacagccttgtgtgacagggagtcctgttcctcttggcacttcttcagcaactcttcatacttcaccttcagggcgctgtactgcgtgtccacttcgtgcagaagggaga

SEQ ID NO: 29062 - DNA, 30 bp, Homo sapiens
  chr16:22398760-22398790
  hypo
cagctttcaaaaatcgttaagccatttggg

SEQ ID NO: 29063 - DNA, 147 bp, Homo sapiens; identical to SEQ ID NO: 10577
  chr16:22825885-22826032
  hypo

SEQ ID NO: 29064 - DNA, 30 bp, Homo sapiens; identical to SEQ ID NO: 10579
  chr16:23313465-23313495
  hypo

SEQ ID NO: 29065 - DNA, 30 bp, Homo sapiens
  chr16:23383324-23383354
  hypo
gccacggggcaccccgggcctgtgggacca

SEQ ID NO: 29066 - DNA, 185 bp, Homo sapiens
  chr16:23402108-23402293
  hypo
atgcctgctctgtcacggctgactcaggaagagctgcttcccagcaaaggtgccgccaggcacgtacttactcctttacaagtttatccataaaaccgtgagctccacttgactgtcagccaagagctgcaaagagcgggcccacagtctactaggacatttttgtttggcgagcagtgtttttt

SEQ ID NO: 29067 - DNA, 30 bp, Homo sapiens
  chr16:23420552-23420582
  hypo
agaacgcgctgggccgctccagtgacaaga

SEQ ID NO: 29068 - DNA, 42 bp, Homo sapiens
  chr16:23689210-23689252
  hypo
tttacaatggcggggcgcggtggctcacgcctgtaatcccag

SEQ ID NO: 29069 - DNA, 406 bp, Homo sapiens; identical to SEQ ID NO: 10583
  chr16:23765948-23766354
  hypo

SEQ ID NO: 29070 - DNA, 201 bp, Homo sapiens; identical to SEQ ID NO: 10584
  chr16:23846852-23847053
  hypo

SEQ ID NO: 29071 - DNA, 201 bp, Homo sapiens; identical to SEQ ID NO: 10585
  chr16:23847310-23847511
  hypo

SEQ ID NO: 29072 - DNA, 86 bp, Homo sapiens; identical to SEQ ID NO: 10586
  chr16:23847788-23847874
  hypo

SEQ ID NO: 29073 - DNA, 498 bp, Homo sapiens; identical to SEQ ID NO: 10587
  chr16:23847933-23848431
  hypo

SEQ ID NO: 29074 - DNA, 143 bp, Homo sapiens
  chr16:24118920-24119063
  hypo
gctcctctctgagggggcacacgtgtcctatttggaggcagtagtggcagcgtccttcactcactctgtggcgtactggccaccgtgaacacacgctgtggcaccatgcccctgcccgctgcgccaggcactgacatgtctcc

SEQ ID NO: 29075 - DNA, 45 bp, Homo sapiens; identical to SEQ ID NO: 10589
  chr16:24354627-24354672
  hypo

SEQ ID NO: 29076 - DNA, 30 bp, Homo sapiens
  chr16:24547942-24547972
  hypo
catagaacagcttccgtgggaccaggcaca

SEQ ID NO: 29077 - DNA, 81 bp, Homo sapiens
  chr16:24772183-24772264
  hypo
aaaaccaaccatgatactaacctcaccagtttttccattaacggctttccattctaggatccgatgcgaaatgctgccttg

SEQ ID NO: 29078 - DNA, 21 bp, Homo sapiens
  chr16:24813085-24813106
  hypo
gtgctcagctgctactactct

SEQ ID NO: 29079 - DNA, 762 bp, Homo sapiens
  chr16:24837122-24837884
  hypo
tctcatacctctgttacaaagcgagaaacgccacacccggactggccttttcttcccccttcacggccctcgcttctccctgcaggagctcgggggcgaaacctgtgtatggatttcagtgtatgacttcagatcatgctccaacttgccaggtgtgagctaatgttgtcggacaccttactataagcaaatgttattcagtgcgttcaatgtatattgacttccatactggtttttccaaaaaccaaaggtagctttgaaaaaccatgtctggaaatgtttggagcgttaagctgattgaccttctgaccttggggctttgagtagtatataattcataactgcgttaattgtattgttaaagtgtttgggagttttttgcgcttgttatgtggaaataaagtgtttgatttaaaattttttaaagtggtttggatctttgcctagtccttaaataaatacagctctattccctaagccacccttacttctcggtcttaatcccgactgccagtgcctggatgctgccctttgtctggcacagacctgcagctgaccatgctgggcccatggctcggggctttctagtcacgcagagccaccaagagtcagggtaaactttttaacacaggcacttaacacgttttttctttgttttcttttttccttttctctttctactttcttcctttttcttttttctttctttttctttctttttttttttttctttcgacagggtttcactctggatatcagttc

SEQ ID NO: 29080 - DNA, 154 bp, Homo sapiens
  chr16:25006924-25007078
  hypo
cttgtactgagtaggagccagcggcaatccaccaccagggtgggcaggagagccaagggccagcccaattctaggccatcaggtgtgcgaaccaaactgaaggactgcggaaaacacggaaaggaactctgccggactctgggccttcaaatga

SEQ ID NO: 29081 - DNA, 30 bp, Homo sapiens
  chr16:25266538-25266568
  hypo
agggccgacgttctcgctttcggttcagct

SEQ ID NO: 29082 - DNA, 30 bp, Homo sapiens
  chr16:25531745-25531775
  hypo
tggcctaattcctcacgacttattcttgta

SEQ ID NO: 29083 - DNA, 172 bp, Homo sapiens; identical to SEQ ID NO: 10590
  chr16:25703003-25703175
  hypo

SEQ ID NO: 29084 - DNA, 448 bp, Homo sapiens; identical to SEQ ID NO: 10591
  chr16:25703674-25704122
  hypo

SEQ ID NO: 29085 - DNA, 21 bp, Homo sapiens
  chr16:26176739-26176760
  hypo
aaaattgtgccataggctggg

SEQ ID NO: 29086 - DNA, 144 bp, Homo sapiens; identical to SEQ ID NO: 10593
  chr16:27121250-27121394
  hypo

SEQ ID NO: 29087 - DNA, 259 bp, Homo sapiens; identical to SEQ ID NO: 10595
  chr16:27280120-27280379
  hypo

SEQ ID NO: 29088 - DNA, 185 bp, Homo sapiens
  chr16:27475123-27475308
  hypo
gcagcgtcccaggcccggacaagccccacattgcaggaagccagcgaacacctcattttccacccagaagccccgaccacaagggtggtataaaacccgaggcaaaaacaccccaaagaaaacaaaaacgcccagagaagccacatgagaaggccgctgctgatgacagacgtgcaggaaaggaa

SEQ ID NO: 29089 - DNA, 390 bp, Homo sapiens
  chr16:27475664-27476054
  hypo
gaggctgcgcctggccgctcagctgctcttggcctggggaactgaactcaccgacaccctcttggtcttcctgtgctgctcccgctgcagcggtgtcttcaagagctgggggtggagatggggcctgggcttctgccccatcttcagctccgggcccaaggctgggggccaaatttgagtcctggagcgctggcctcttggcaggggtcatctgggtgccctcggcgtcggtctccccattctcactggcccagctggcgcgcctcttggtgccccgggggctgtgagaaggaggtgcctgcccctcgggggggctgtcctcactggaagacccctccaggggtctggcctgggggtcttctctctggatgtcggcgtcttctctgtctt

SEQ ID NO: 29090 - DNA, 30 bp, Homo sapiens
  chr16:27509978-27510008
  hypo
ggaagcggacctgctcgatggcacttctca

SEQ ID NO: 29091 - DNA, 193 bp, Homo sapiens
  chr16:27510215-27510408
  hypo
tggtacagctactggcggcaaaattcctcaagtgaccaagcgatcaggctctgccatgggtgccggggctgctcggtcccactgagaaatctggcctggacacagagctgtctccctgcaagtcccttactgggccgtcacagcccactggtctctgttgctacctggagggctgctccgtgcccccttccca

SEQ ID NO: 29092 - DNA, 30 bp, Homo sapiens
  chr16:27523535-27523565
  hypo
tgacaacaggagacgcgcctgtctcttcct

SEQ ID NO: 29093 - DNA, 19 bp, Homo sapiens
  chr16:27539545-27539564
  hypo
agatcgcaccactgcacta

SEQ ID NO: 29094 - DNA, 56 bp, Homo sapiens
  chr16:27539975-27540031
  hypo
ccaccttggctagcccggcgttcagcatatactggtacagacgcttaaacgtcctt

SEQ ID NO: 29095 - DNA, 184 bp, Homo sapiens
  chr16:27560715-27560899
  hypo
tatccccaatcctgttcgccattaccccaaaacacacacagggacaaaacgggacatcactagattctccccctccccccgccaactccatcggactccagggccctgccaggcctgagggaccccagattagccttaccgccgtgccccaactcaatcaacaggcctccggtacttgcacagc

SEQ ID NO: 29096 - DNA, 30 bp, Homo sapiens
  chr16:27788240-27788270
  hypo
tctgacaggtgaaccgggtttatgtgattt

SEQ ID NO: 29097 - DNA, 32 bp, Homo sapiens
  chr16:28043758-28043790
  hypo
ttgatgtatgcacgacgcgctcttccaggcgt

SEQ ID NO: 29098 - DNA, 92 bp, Homo sapiens; identical to SEQ ID NO: 10598
  chr16:28074133-28074225
  hypo

SEQ ID NO: 29099 - DNA, 519 bp, Homo sapiens; identical to SEQ ID NO: 10599
  chr16:28074417-28074936
  hypo

SEQ ID NO: 29100 - DNA, 299 bp, Homo sapiens; identical to SEQ ID NO: 10600
  chr16:28074955-28075254
  hypo

SEQ ID NO: 29101 - DNA, 135 bp, Homo sapiens
  chr16:28104121-28104256
  hypo
gggattacaggcgtgaaccactgtgcccaaccaaaacctgagtgtctttaaaaaaaaaatctacctgttgccaaaatgcctgccgcctacgtcaggtctgtggatctctgggacgtttcattgaaatacttaact

SEQ ID NO: 29102 - DNA, 157 bp, Homo sapiens
  chr16:28116152-28116309
  hypo
tgcctgtcactacctgcgcaaaagacatccagcccctggagtcctgtcactgcctgtgcaaaagacatctagcccctggagttggcggttcacaccgcgagttcttcaggagagacatggcccacatttgagagagaatgcacgggtcagtgccaag

SEQ ID NO: 29103 - DNA, 30 bp, Homo sapiens
  chr16:28128324-28128354
  hypo
caactgtgcttaccgcgcgaaggaaaatgt

SEQ ID NO: 29104 - DNA, 165 bp, Homo sapiens
  chr16:28128686-28128851
  hypo
tgtcacgaactgctgcgtgttctgccggtgaacttcactgcaatactgtgctaaccagtgagagtaagcctgcagcgcagccagggactgagcatgcctgcagaaagaaaagaagatgtgattttaaaggttaaggtgaaaatatattagcgttcaactcatttt

SEQ ID NO: 29105 - DNA, 30 bp, Homo sapiens
  chr16:28224647-28224677
  hypo
aggcgtgagccctcccgcctggcttcaagt

SEQ ID NO: 29106 - DNA, 26 bp, Homo sapiens
  chr16:28237436-28237462
  hypo
gtgagccactgcgcccgacctaaggt

SEQ ID NO: 29107 - DNA, 30 bp, Homo sapiens
  chr16:28331856-28331886
  hypo
ccctggagcccgagcgccgcggcccagcca

SEQ ID NO: 29108 - DNA, 30 bp, Homo sapiens
  chr16:28332465-28332495
  hypo
aagccgcacagacccgagaattcggaggcc

SEQ ID NO: 29109 - DNA, 25 bp, Homo sapiens
  chr16:28344914-28344939
  hypo
gaccctgtctcgaaaaaaaaaaaaa

SEQ ID NO: 29110 - DNA, 30 bp, Homo sapiens
  chr16:28583870-28583900
  hypo
tgagccactgcgcccggtagaaggccagtt

SEQ ID NO: 29111 - DNA, 55 bp, Homo sapiens
  chr16:28822845-28822900
  hypo
agatctcgttcttctcgctgtttttttttcttttcttttcttttttgagacaaag

SEQ ID NO: 29112 - DNA, 30 bp, Homo sapiens
  chr16:28877866-28877896
  hypo
agcgcttttccctgcgttcagtgggtcgct

SEQ ID NO: 29113 - DNA, 30 bp, Homo sapiens
  chr16:28887815-28887845
  hypo
gagtccagcggagacggtgggtgctgggcc

SEQ ID NO: 29114 - DNA, 229 bp, Homo sapiens
  chr16:28914707-28914936
  hypo
cagtcattgggctcgacgaaatcctcaagttcgttgctcggaactacctagagggtaaggagtgccctctctgtcccaagccctggccccaccacagccccttccccatgacgccgcccccgccccgccccgtactttgcaggtggtaagtttctcagccctggcaggacctgtgtccgccccgttccccctgcgcctgcaggggccacatctccggggcagccccact

SEQ ID NO: 29115 - DNA, 30 bp, Homo sapiens
  chr16:28915181-28915211
  hypo
cactgctgctgctgcgcttccagtcagggt

SEQ ID NO: 29116 - DNA, 30 bp, Homo sapiens
  chr16:28915806-28915836
  hypo
ttggaggcctgggtcgccgctgtggacaag

SEQ ID NO: 29117 - DNA, 252 bp, Homo sapiens
  chr16:28922333-28922585
  hypo
gggcaagggcatgtcagggggcggcaggtagccagaggccggctggggctgcagcagcggcagggacccacctgcttggcacagtcctcattgctccgtctcaggccctcttggagctcgtcccgctcgcgactgacgctctccaggtccttctgcagctgtcggccctgccacagaccctgccttcagcctgcatctcccaggaacttggcccccctcaccacacttctcgtggcccacctctgcagggag

SEQ ID NO: 29118 - DNA, 30 bp, Homo sapiens
  chr16:28925775-28925805
  hypo
agcgaaggcctcagcggctggacccccatc

SEQ ID NO: 29119 - DNA, 30 bp, Homo sapiens
  chr16:29000905-29000935
  hypo
tctgggtgagtgaccggtgcttgtcggtgc

SEQ ID NO: 29120 - DNA, 114 bp, Homo sapiens
  chr16:29001661-29001775
  hypo
ttcggcctgtgtcccccgaacgctctgcaccttctgacgcagcctgagaatgacctgccctggccccagccctactctgtgtaatagaataaaggcctgcgtgtgtctgtgttg

SEQ ID NO: 29121 - DNA, 30 bp, Homo sapiens; identical to SEQ ID NO: 10605
  chr16:29110443-29110473
  hypo

SEQ ID NO: 29122 - DNA, 30 bp, Homo sapiens
  chr16:29153312-29153342
  hypo
gtggaataatcctccgtggcatgagggggc

SEQ ID NO: 29123 - DNA, 388 bp, Homo sapiens
  chr16:29169988-29170376
  hypo
gctggaggacgtcggcggtgttactgtcacggtcacctggactgggcggttgcaggcggccggatgctggacccgcagcgtgagctccacggccgcagcagggaggcgagagccctcaaccagggacggagccgccctgtccacggagcctccagacccaccagaacgcctgggtcaccgcggctcccgggcgggcctcactgcgctgggacacgtcaggacacgtggcagctcccagcgcggtggaaggcctgagccctgggaacactggctggaaaatggaactcggaggacagagcttgtcgacggcgtctcgtatgaatcctggaggagacgcccgtgtcgagggcaattagaatccaggcgtgagccccggctggctgcgtcc

SEQ ID NO: 29124 - DNA, 30 bp, Homo sapiens
  chr16:29300658-29300688
  hypo
aggccgctgtagtacgccgaggtgagtcct

SEQ ID NO: 29125 - DNA, 30 bp, Homo sapiens
  chr16:29324798-29324828
  hypo
cagcgtgcggggggcgtccaggatctcagc

SEQ ID NO: 29126 - DNA, 31 bp, Homo sapiens
  chr16:29340561-29340592
  hypo
tgagttcttggaaagccgaggccggccggtt

SEQ ID NO: 29127 - DNA, 80 bp, Homo sapiens; identical to SEQ ID NO: 10606
  chr16:29606231-29606311
  hypo

SEQ ID NO: 29128 - DNA, 538 bp, Homo sapiens; identical to SEQ ID NO: 10609
  chr16:29624653-29625191
  hypo

SEQ ID NO: 29129 - DNA, 145 bp, Homo sapiens
  chr16:29755718-29755863
  hypo
gggctcccaaactggacgctggcctctggcctctgctcgggttcagcccagctcaccaggcctgtggcggggggcctcccctcccagggctggggcccccagaaggtgctccgggctgggacctccagtacggtctgggggccca

SEQ ID NO: 29130 - DNA, 31 bp, Homo sapiens; identical to SEQ ID NO: 10612
  chr16:29822267-29822298
  hypo

SEQ ID NO: 29131 - DNA, 50 bp, Homo sapiens; identical to SEQ ID NO: 10613
  chr16:29822622-29822672
  hypo

SEQ ID NO: 29132 - DNA, 220 bp, Homo sapiens
  chr16:29830865-29831085
  hypo
tcttctccaggaagctcagcccggagccagaaacgggaggcccgcctggacaaggtgctgtcggacatgaagagacacaagaagctggaggagcagatccttcgtaccgggagggacctcttcagcctggactcggaggaccccagccccgccagccccccactccgatcctccgggagtagtctcttccctcggcagcggaaatactgattcccactgc

SEQ ID NO: 29133 - DNA, 121 bp, Homo sapiens
  chr16:29835152-29835273
  hypo
actcgtctcagaaaaaaaaaaaaaaaatgagggagaactttttacaatagcaacgggtgaacctcacccagaccaattaaatagaatcaccggagatgggtggctttaaaaaaaggtctcc

SEQ ID NO: 29134 - DNA, 137 bp, Homo sapiens; identical to SEQ ID NO: 10615
  chr16:29836030-29836167
  hypo

SEQ ID NO: 29135 - DNA, 30 bp, Homo sapiens
  chr16:29856179-29856209
  hypo
ctcccaggaagcggcggccaagtaagtgag

SEQ ID NO: 29136 - DNA, 31 bp, Homo sapiens
  chr16:29857108-29857139
  hypo
tggccgctgcccttggcgctcctgttcctgc

SEQ ID NO: 29137 - DNA, 169 bp, Homo sapiens; identical to SEQ ID NO: 10617
  chr16:29910604-29910773
  hypo

SEQ ID NO: 29138 - DNA, 31 bp, Homo sapiens
  chr16:29911101-29911132
  hypo
cctcttcccagggtgccgaggggctgcatag

SEQ ID NO: 29139 - DNA, 403 bp, Homo sapiens
  chr16:29912934-29913337
  hypo
agcagcttccctgccattttgcgggacttcggggctgtgagctgggacttctcagggactacccctccgcctcggggctggtccccacctctggcccccgggtgctaccagctcctgctgtaccaagcaggccggtgccaacccagcaactgccgccggtgcccgggggcctatcgggcactgagggggcttcgaagctttatgagtgccaacaccttcggcaatgccggcttttccgttctcctgcctggggcccggctcgagggccgctgtgggcccaccaatgcccgggtcagatgccatctgggtaagtagctgccgcctactgacaacctccttgcctcgatgatttcccccccagacccttctctccgccagagccgtctgctgtctggttctcatt

SEQ ID NO: 29140 - DNA, 31 bp, Homo sapiens
  chr16:29922300-29922331
  hypo
tggtctgcttcttctccgtagcatagacaat

SEQ ID NO: 29141 - DNA, 30 bp, Homo sapiens
  chr16:29998837-29998867
  hypo
ctcgactctggttgcgggttctgctgcgcc

SEQ ID NO: 29142 - DNA, 281 bp, Homo sapiens
  chr16:30000929-30001210
  hypo
tcaagaagcagttccaggagacgtgtaagatccagactcggcagtacaaggctctgcgagcacacttgctggagaccacgcccaaagctcagcacaagagcctccttaagcggctcaaggaagagcagacccgcaagctggcgatcttggcggagcagtatgaccagtccatctcagagatgctcagctcacaggcggtgaggcctggggtccagggagggagtgcgctagaggccaggctctgtactttgctttagagaaatggacggtgcagggcatgc

SEQ ID NO: 29143 - DNA, 31 bp, Homo sapiens
  chr16:30010434-30010465
  hypo
tagtgttttgtcagaacgcatgatacccatt

SEQ ID NO: 29144 - DNA, 144 bp, Homo sapiens
  chr16:30017453-30017597
  hypo
ggttgggtactggacccggctcgatgggcctgtgccgggacactgctgtccactcaggctgaggacagagccccggccgcagggggcagctcactggtcagggtgtgccagcgctccagggctgcgtccggctgctgcaggcag

SEQ ID NO: 29145 - DNA, 30 bp, Homo sapiens
  chr16:30018534-30018564
  hypo
gcgaaggcttgaggcggcggaggggcacgc

SEQ ID NO: 29146 - DNA, 30 bp, Homo sapiens
  chr16:30061418-30061448
  hypo
ctgcaggccacggacgtgtccaggggcctt

SEQ ID NO: 29147 - DNA, 30 bp, Homo sapiens
  chr16:30100415-30100445
  hypo
gccggccctgccagcggtagcgagccccat

SEQ ID NO: 29148 - DNA, 202 bp, Homo sapiens
  chr16:30116120-30116322
  hypo
cacaacgatgtgatcgaaaggcaaatatttatttttcaggaagagaaacaggagacctcgaggcttctggacttaggaggtccgggcagctggtccatggttgtccaggtagtgccgcagggctgtgggataatccgttatgacgccagtggctcccacgctgaaggctgcttcaaaatccgactcttcattaaggcaccaa

SEQ ID NO: 29149 - DNA, 30 bp, Homo sapiens
  chr16:30124064-30124094
  hypo
gtgtcagctgacagtcgagctccaggaggt

SEQ ID NO: 29150 - DNA, 321 bp, Homo sapiens
  chr16:30124539-30124860
  hypo
cctgccctgccacttcgctctccttctctcttggtccctgccccgtttctagcatgcccccttggacctacccctctgtgctgtccactttggcacctgttctcacccctacccggctcacctcctcggtgggcccccaggcggatgcggaaggtgggagccctgggcgtgtgcagcagatgaggccggcgcaggaagaagatggagagcatggcatagctgcccagggcagggagggcatagtacagcaaaaggctcatgaccgtactcccacagaagctcctgcagccacacgctcagccgtccgcgggactgtgctgc

SEQ ID NO: 29151 - DNA, 125 bp, Homo sapiens
  chr16:30125290-30125415
  hypo
gctctccagagccccgtccccagccctgggcagctgggagtgaagggcaccaggcccctgaaagcccaagtcaagtctgtcctcagagccgcacggggcagggcgggggcgtcgcgaacacagac

SEQ ID NO: 29152 - DNA, 156 bp, Homo sapiens
  chr16:30169919-30170075
  hypo
aaaaagaatttgaaacaaaaacgtgaaacttctgtgattcaaagaacaccgtcaagaaagtgaaaaaacgcctgcctgcccgcctttctttctctctctctctctctttctttctttcaacagtctccctctgttgccgaggctggactatactgc

SEQ ID NO: 29153 - DNA, 401 bp, Homo sapiens
  chr16:30199145-30199546
  hypo
gcaaggtggcctcgtcgggcggggtgggggtgggaggtgggcaggatgggcctggagagggccagggcagtgggcatccgctggtattgaccctccctccacacctgccacctacagggtgacagctcaatccggtactttgagatcacttccgaggcccctttcctgcactatctctccatgttcagttccaaggagtcccagcggggcatgggctacatgcccaaacgtggcctggaggtgaacaagtgtgagatcgccaggtgactgacccccggccctgaccgcagcatgctccttgggcagtgggcagtcccaagcccacccaaccagactgtgggccccgctcaccttccccttcccacaggttctacaagctgcacgagcggaggtgtgagccc

SEQ ID NO: 29154 - DNA, 31 bp, Homo sapiens
  chr16:30381967-30381998
  hypo
atctggaaagaggaaacggagaaagctaggg

SEQ ID NO: 29155 - DNA, 29 bp, Homo sapiens
  chr16:30476455-30476484
  hypo
atcatatagggccaggcgcagtggctcag

SEQ ID NO: 29156 - DNA, 68 bp, Homo sapiens
  chr16:30537608-30537676
  hypo
gcgcaagtccactcctcggacgggcgctccctcctcacctctgaggtacccttcggggctcctcattt

SEQ ID NO: 29157 - DNA, 31 bp, Homo sapiens
  chr16:30562563-30562594
  hypo
aaatggcctggacagacgagggatgggcatg

SEQ ID NO: 29158 - DNA, 183 bp, Homo sapiens
  chr16:30566777-30566960
  hypo
gcccgcagtccgggcacgggtagggcttctcgccggtgtgggtgcgcacgtggcgccgcaggtccgaggggtaggcgaaggcgcggccacagtccgggcaggggaagggggtctcgccgctgtgcacgcgccggtgctggtagagggcagagctctggctgaagcggcggccacagtcggcgc

SEQ ID NO: 29159 - DNA, 31 bp, Homo sapiens
  chr16:30617002-30617033
  hypo
cgggcacagtggatcacgcttgtaatcgtaa

SEQ ID NO: 29160 - DNA, 31 bp, Homo sapiens
  chr16:30628279-30628310
  hypo
caagccaattgggcatcgtttacctggagtt

SEQ ID NO: 29161 - DNA, 30 bp, Homo sapiens
  chr16:30780317-30780347
  hypo
atgtggtgccctcgcgtcggagcgcaggga

SEQ ID NO: 29162 - DNA, 57 bp, Homo sapiens
  chr16:30784031-30784088
  hypo
tgtggagaggttgggccgtgtcacctcctgaagagtgcggtacgccaggttgagacc

SEQ ID NO: 29163 - DNA, 30 bp, Homo sapiens
  chr16:30794190-30794220
  hypo
gtagggcttctcgccggtgtgcgtgcggcg

SEQ ID NO: 29164 - DNA, 30 bp, Homo sapiens
  chr16:30794664-30794694
  hypo
gatgaagctcttcccgcactcggtgcagcg

SEQ ID NO: 29165 - DNA, 31 bp, Homo sapiens
  chr16:30826444-30826475
  hypo
gttcaagaagctgagccgacaaagggcttac

SEQ ID NO: 29166 - DNA, 30 bp, Homo sapiens
  chr16:30835283-30835313
  hypo
gcttggtcccctggcgtgtgtcatcaggcc

SEQ ID NO: 29167 - DNA, 285 bp, Homo sapiens
  chr16:30845822-30846107
  hypo
cccctgcgcttgtccccgccacggcccttgcccgctgtggacccggaggctcagtgccggcaggactcgggactcggcgcctctcccggggtggcaggcgcctcgcatggcacactcagaccgctgggagggtggccgcatgggtgcgtgaggaggtgggcgaggcagcccagtgcacccctcccctaggcctctagcaaggcggcctcaggcactggatgtggtccgagttctgccctaagcccttcccatgcattcgggcgccagtggcgagccagatgggtg

SEQ ID NO: 29168 - DNA, 25 bp, Homo sapiens
  chr16:30853903-30853928
  hypo
ttttaaaacagagtctcgctctgtc

SEQ ID NO: 29169 - DNA, 238 bp, Homo sapiens
  chr16:30907032-30907270
  hypo
acgcacacacatgcacgcgcacatgcacacacgcgcacacctgcacactcacacgcacacaaatccactcgcacacacgcatgctcacacgcacacacgtccgcatgcacgcacacacgcagacacacgcaagcgcacacacacacgggcctcctcgtcttcattcacaaaccccattagcttctgttgtctatgggcttcctcgacagaccgcgagcccctcgcgggggccagaaac

SEQ ID NO: 29170 - DNA, 31 bp, Homo sapiens
  chr16:30941312-30941343
  hypo
tcccctggtgactcctcggggtaggggggtg

SEQ ID NO: 29171 - DNA, 121 bp, Homo sapiens
  chr16:30958388-30958509
  hypo
ggaccactgcctcccgctgttccgccgctgccctcgtctacgccgcctagacctgcgctcctgccgccagctctcacccgaagcttgtgcccggctggcagctgccgggccccctggcccc

SEQ ID NO: 29172 - DNA, 207 bp, Homo sapiens; identical to SEQ ID NO: 10634
  chr16:30959909-30960116
  hypo

SEQ ID NO: 29173 - DNA, 31 bp, Homo sapiens; identical to SEQ ID NO: 10635
  chr16:30964524-30964555
  hypo

SEQ ID NO: 29174 - DNA, 30 bp, Homo sapiens; identical to SEQ ID NO: 10636
  chr16:30964612-30964642
  hypo

SEQ ID NO: 29175 - DNA, 30 bp, Homo sapiens
  chr16:30968146-30968176
  hypo
gcagtgggaccatgacgccaggaggacaca

SEQ ID NO: 29176 - DNA, 149 bp, Homo sapiens
  chr16:30993850-30993999
  hypo
ggtcagtggcagcgacgtgtggctggagggaacagagagcccagaccgcacgggcttgggagcctgtgaatccacttgggcctgtggtgagagaggaggaaagtcccggagctttcttcaggagagggtccttccgcaggagagggtcc

SEQ ID NO: 29177 - DNA, 30 bp, Homo sapiens
  chr16:30994494-30994524
  hypo
ggggcctgacatgggcggcctgccatttgc

SEQ ID NO: 29178 - DNA, 49 bp, Homo sapiens
  chr16:30995183-30995232
  hypo
ccaaggtcatcaccatcgagtcccagaagaagatcgtgatctactccaa

SEQ ID NO: 29179 - DNA, 30 bp, Homo sapiens
  chr16:31053308-31053338
  hypo
tgagccaccgcgcccggcccccgacaccta

SEQ ID NO: 29180 - DNA, 31 bp, Homo sapiens; identical to SEQ ID NO: 10639
  chr16:31075213-31075244
  hypo

SEQ ID NO: 29181 - DNA, 30 bp, Homo sapiens
  chr16:31099848-31099878
  hypo
cacaggccccgccaacgcaaactgcagctg

SEQ ID NO: 29182 - DNA, 228 bp, Homo sapiens; identical to SEQ ID NO: 10641
  chr16:31117072-31117300
  hypo

SEQ ID NO: 29183 - DNA, 320 bp, Homo sapiens
  chr16:31131558-31131878
  hypo
attctatgtacactacgtgggctgtgagtggcttggcacatctgggcgtgggtgcagggagttggctgccctggcagcactcttatggcccatacttacagttaaccggcggctggacgagtgggtagacaagaaccggctggcgctgaccaagacagtgaaggatgctgtacagaagaactcagagaagtacctgagcgagctcgcagagcagcctgagcgcaagatcactcgcaaccaaaagcgcaagcatgatgagatcaaccatgtgcagaaggtccggatcccttcccatccacgggcccaggaggcccagcttc

SEQ ID NO: 29184 - DNA, 426 bp, Homo sapiens
  chr16:31138386-31138812
  hypo
ccttggagaaggagcatgaggcggtaagtggggctgggaagctgcctgcaggtcccccgtctccccttgccgaggagcccctgctgagccgtgcactgtgcctcactcccaccctgcctgcagatcaccaaggtgaagtatgtggacaagatccacatcgggaactacgaaattgatgcctggtatttctcaccattccccgaagactatgggaaacagcccaagctctggctctgcgagtactgcctcaagtacatgaaatatgagaagagctaccgcttccacttggtgaggctgggccggccgggccgagctgggcaggggcccggtgagaggcagaggcaggcatggagactgagggcggctgcgccggcagctccagggaggagacaggcccaaaggagcgagtacagggaagagctgctg

SEQ ID NO: 29185 - DNA, 30 bp, Homo sapiens
  chr16:31142976-31143006
  hypo
ctgggcaggcgggccgggagcagtcttcca

SEQ ID NO: 29186 - DNA, 83 bp, Homo sapiens; identical to SEQ ID NO: 10642
  chr16:31153974-31154057
  hypo

SEQ ID NO: 29187 - DNA, 30 bp, Homo sapiens
  chr16:31203778-31203808
  hypo
atttacagggttttcgaacttggtttgtaa

SEQ ID NO: 29188 - DNA, 30 bp, Homo sapiens
  chr16:31234390-31234420
  hypo
tgcctctggactgccgctgcagtcctctaa

SEQ ID NO: 29189 - DNA, 30 bp, Homo sapiens
  chr16:31236024-31236054
  hypo
caagaatgcccagccgctgctgctcgtggg

SEQ ID NO: 29190 - DNA, 577 bp, Homo sapiens
  chr16:31446853-31447430
  hypo
tcccacctcggtctcttaaagcgctgggattacaggtgtgagtcaccgcccgcagccgcacctgcctaaatcccttaatgtataagggaaaggagcgagaattcaggggaaaaaaaacaaacaaaatagcccccagcacttctgagaaagatctgccatacagaaaagccgtcctgagcgggtctgtgtggagggaggggactgcatctcagatccacagtccaccggcggctgcaacaattccacccagggctgcagcacgctggttcttcagtgtcgggccaggttggacctccggctggaggccttccacaccggaaacactggtagggctcctctccagtgtgggttcgagggcggtggaggagctcggcactgtcgctgaagcctggccctggcctcgccgagcggtccggccgctctgtgctgcgaggccttccgggctggctcagggtagcctggggcctgaaccgcctcccgcgagtcccgtcccgcgctcgcacagcttctgggccccatcgccccctcctgctgagctgccggctgggtggctggcggaacctgggcaacttccagg

SEQ ID NO: 29191 - DNA, 30 bp, Homo sapiens
  chr16:31447987-31448017
  hypo
ggtctctcgccagtcgctgtggacccgcca

SEQ ID NO: 29192 - DNA, 30 bp, Homo sapiens
  chr16:31487138-31487168
  hypo
ggtcaatcctggagcgcagctggaagacgg

SEQ ID NO: 29193 - DNA, 153 bp, Homo sapiens
  chr16:31497940-31498093
  hypo
ggtggggcctgaggtcagatgcggaccagagtaggcagggcttggtgccaaggcccgcttgagggacccacctccagaaggaacggaactgagtataggaccttagacaatcatcctctcctacgatgacgcagaaaaaactggggccggctg

SEQ ID NO: 29194 - DNA, 34 bp, Homo sapiens
  chr16:31500543-31500577
  hypo
gcccagctttcctctgcggcgtgcactacctcta

SEQ ID NO: 29195 - DNA, 30 bp, Homo sapiens
  chr16:31558002-31558032
  hypo
taagttggaaacaacggtaagtggacaata

SEQ ID NO: 29196 - DNA, 30 bp, Homo sapiens
  chr16:31722459-31722489
  hypo
atttgcgtggttgacgttatggctgctggt

SEQ ID NO: 29197 - DNA, 24 bp, Homo sapiens
  chr16:31932457-31932481
  hypo
ggttttttttttgagacggagtct

SEQ ID NO: 29198 - DNA, 478 bp, Homo sapiens
  chr16:46683355-46683833
  hypo
cagtttttcttaaaccgtgagagaggaggagcaggaggagaagagaccagagcccctctcccaggcaccggggctttccttggatgtcctgagactcaagatttctcacctctgcaggtggacctgataatcctacgcagaagaaccgctacagggcagcgagaacgcctgcaatggcagcagacagccgagcctccccagcacggcgtctcccgggacaaatgagcgtccacgtcgcttgacgtcatggtgtgtgcatttgtcctgtgctgggctccctacactgctcgtgatcatcggagctgcctgccacgggtcacatgtccagcactttctctatgagacacgcttctggctccactggctgaattcggctatcagccctcttccgtactcattctgccacgagtttcagaaaagcattccatcaaaccgctgtgtcctggaaaggctgagcgagatccacccacccccatat

SEQ ID NO: 29199 - DNA, 98 bp, Homo sapiens
  chr16:46717907-46718005
  hypo
gattataggcatgagccaccgcacccagcccatttaccaattattaacagctgctgcacacagagtcatgccttatcgctgaagttaacagaataaga

SEQ ID NO: 29200 - DNA, 30 bp, Homo sapiens
  chr16:46726872-46726902
  hypo
taaaaaaaatgactcgtgttaagtgacagc

SEQ ID NO: 29201 - DNA, 30 bp, Homo sapiens
  chr16:46781698-46781728
  hypo
tttgatttctggaacgtggcccccaccaaa

SEQ ID NO: 29202 - DNA, 116 bp, Homo sapiens
  chr16:46934710-46934826
  hypo
ccaacttgccaggcccctaggcgtgaaatgaatgagtgttcccaggcggccccagcctcaagcggagggtcctgcatgcgaatgggtgtgtgaacgtgtgtgggtggctgacagca

SEQ ID NO: 29203 - DNA, 138 bp, Homo sapiens
  chr16:46945508-46945646
  hypo
accctaggatctctgagatatcggtagcctgtgctgccgaggctgagacccactgcctcagaagcatggtgcccaagctgcggggccccacttcagacacttggatgtaattgggccggggtatggtttgagagtttg

SEQ ID NO: 29204 - DNA, 79 bp, Homo sapiens
  chr16:46952489-46952568
  hypo
ctttgaggaccctttggtgaccgtccctgccgtgcccccgcaggtgtaccaggacaacgtgtactctccagattgcaga

SEQ ID NO: 29205 - DNA, 31 bp, Homo sapiens
  chr16:46964712-46964743
  hypo
cctaaaaactttacaacgtttacacagtttt

SEQ ID NO: 29206 - DNA, 35 bp, Homo sapiens
  chr16:46992084-46992119
  hypo
ccaggtgtggtggtacacacccgtagcaagccatg

SEQ ID NO: 29207 - DNA, 45 bp, Homo sapiens
  chr16:47001891-47001936
  hypo
gccgtaagttttaacttataacaatttttacgtggtacagacatt

SEQ ID NO: 29208 - DNA, 810 bp, Homo sapiens; identical to SEQ ID NO: 10649
  chr16:47176766-47177576
  hypo

SEQ ID NO: 29209 - DNA, 118 bp, Homo sapiens; identical to SEQ ID NO: 10650
  chr16:47177628-47177746
  hypo

SEQ ID NO: 29210 - DNA, 624 bp, Homo sapiens; identical to SEQ ID NO: 10651
  chr16:47177805-47178429
  hypo

SEQ ID NO: 29211 - DNA, 41 bp, Homo sapiens
  chr16:47288964-47289005
  hypo
tccagtctgggcaatagaccgagactctgtctcaaaaaagt

SEQ ID NO: 29212 - DNA, 30 bp, Homo sapiens
  chr16:47362864-47362894
  hypo
tctcttcgtcagtacgatcctgcattcaaa

SEQ ID NO: 29213 - DNA, 30 bp, Homo sapiens
  chr16:47497807-47497837
  hypo
agcttagcctgcgacgcttatgattagagc

SEQ ID NO: 29214 - DNA, 31 bp, Homo sapiens
  chr16:47567943-47567974
  hypo
tcagctgtggcttgggcggctgcagtggcat

SEQ ID NO: 29215 - DNA, 190 bp, Homo sapiens
  chr16:48177831-48178021
  hypo
ggtgtcagatgagtcatatgtcgacaatgggggcagggtgtctacggtcagcctttgccggtagcctttcaccatcaccggcgtgagccaggaaaatgtggcgaaggagagtagcccggcatcatccaccgggttgggtgctaacctgcagacaaacaagacactcagcgttccaggcactggggtcatt

SEQ ID NO: 29216 - DNA, 31 bp, Homo sapiens
  chr16:48290943-48290974
  hypo
tttgactgggtgctcacgcctgtagtcccag

SEQ ID NO: 29217 - DNA, 287 bp, Homo sapiens
  chr16:48381470-48381757
  hypo
cttaggtggagaaatcatgttcgtggaggcgagtcgaatggatggcgagggccagttaactctgaccggccagctcggggacgtgatgaaggagtccgcccacctcgctatcagctggctccgcagcaacgcaaagaagtaccagctgaccaatggtaggagcctgcacccggccaggcaggcgtgacccaggaggcggtaccttccatggcggagactggcatgagctcgagactgccagttacacatctagcaaagtacacaccgttttgaacccctgtggaaat

SEQ ID NO: 29218 - DNA, 34 bp, Homo sapiens
  chr16:48530933-48530967
  hypo
tttttgtgaaggaaggcgtcgaaaagatctggct

SEQ ID NO: 29219 - DNA, 157 bp, Homo sapiens
  chr16:48577582-48577739
  hypo
gagtggcagtccccaccgactcagtctagatgaggtgtgggtgggtgcccacacttgtatgcacatgggtatgtgcgagtatgtgtgtacagggagggcatctgtatcgctcaaaagcctcccactggactcggcctgcaggcgagaaatgaggcta

SEQ ID NO: 29220 - DNA, 143 bp, Homo sapiens
  chr16:48641645-48641788
  hypo
tggatagctggggagaatggacgaaggggaatgcgccttagaccagctgtctgcaatccaactgactaaaaaagttaagcccaggaaagcaaacttggttctatatctacaatgctggctttctgatttgttttgttttgttt

SEQ ID NO: 29221 - DNA, 121 bp, Homo sapiens
  chr16:48642027-48642148
  hypo
aaacatacatcctttctttctgacattctccgagcgttttattactattaatggtttttttccgattctcaagaacacggttttcaccgtgtgacacaggacagtctcaatctcctgatct

SEQ ID NO: 29222 - DNA, 23 bp, Homo sapiens
  chr16:48642207-48642230
  hypo
ccggcctacaatgttttaagtta

SEQ ID NO: 29223 - DNA, 30 bp, Homo sapiens; identical to SEQ ID NO: 10656
  chr16:49315521-49315551
  hypo

SEQ ID NO: 29224 - DNA, 174 bp, Homo sapiens; identical to SEQ ID NO: 10657
  chr16:49316038-49316212
  hypo

SEQ ID NO: 29225 - DNA, 30 bp, Homo sapiens
  chr16:49358814-49358844
  hypo
atggcacaggctctgcgggtgtctgactag

SEQ ID NO: 29226 - DNA, 8 bp, Homo sapiens
  chr16:50218667-50218675
  hypo
cacagtct

SEQ ID NO: 29227 - DNA, 31 bp, Homo sapiens
  chr16:50334491-50334522
  hypo
tgagaacattctctcccgtgggctgagcgcc

SEQ ID NO: 29228 - DNA, 135 bp, Homo sapiens
  chr16:50335582-50335717
  hypo
cctggtggctccaggaccccacggtggaggaggcagttccactgccctggccaggtggggcccgccttggcctgtctgctgcccgaccctggcctgcttcagggagtccggcacgtctggccacttctctgtgaa

SEQ ID NO: 29229 - DNA, 31 bp, Homo sapiens
  chr16:50336502-50336533
  hypo
taacttcatttatccacgcagttgaaagttc

SEQ ID NO: 29230 - DNA, 30 bp, Homo sapiens
  chr16:50338365-50338395
  hypo
cgagtcctggggggcggcacggccctttgc

SEQ ID NO: 29231 - DNA, 125 bp, Homo sapiens
  chr16:50633401-50633526
  hypo
catggccaaagtgggggtcatcgcagagcccagcttctagggctgctgggagcacttggtcggtgatgcccctaacgtgcttcatggaacacttggcagatgtcgcacactgactaagactggtt

SEQ ID NO: 29232 - DNA, 67 bp, Homo sapiens; identical to SEQ ID NO: 10661
  chr16:50773733-50773800
  hypo

SEQ ID NO: 29233 - DNA, 58 bp, Homo sapiens
  chr16:50897228-50897286
  hypo
aggcatccatcacgcgggaccagccgggagcggccggtgaggcggcgtgaatgcgccg

SEQ ID NO: 29234 - DNA, 422 bp, Homo sapiens; identical to SEQ ID NO: 10665
  chr16:51185542-51185964
  hypo

SEQ ID NO: 29235 - DNA, 303 bp, Homo sapiens; identical to SEQ ID NO: 10666
  chr16:51186025-51186328
  hypo

SEQ ID NO: 29236 - DNA, 24 bp, Homo sapiens
  chr16:51189282-51189306
  hypo
cggcgccccgggggcgggggacga

SEQ ID NO: 29237 - DNA, 27 bp, Homo sapiens
  chr16:53218078-53218105
  hypo
atctcctgacctcgtgatcctggctaa

SEQ ID NO: 29238 - DNA, 121 bp, Homo sapiens
  chr16:53448475-53448596
  hypo
cgggcctggcccgaaaccgggtctcttaagggaaaaacaaaaaccacaaagattagccgggcgtggtgggccgcacaggtagtcccagctactctgaaggctgattgaggaggattgcttg

SEQ ID NO: 29239 - DNA, 171 bp, Homo sapiens
  chr16:53563490-53563661
  hypo
caactggctgcctttcacctccgcggcacagcaattatgtggtgtaatggaggcagcgcaaataagcagaaagattttattaaaccaaatgagcaaatcatctgcgtattattgcgatttgattgacactgacaagtgtcgagcagacgcggatgtgaatatgatacagaa

SEQ ID NO: 29240 - DNA, 238 bp, Homo sapiens
  chr16:53659273-53659511
  hypo
gcccggccgccaccccgtctgggaactggggggggcgcctcagcctggcggccgccccgtctggggggtggggtggggggtgcctccacccggcagccgccccatctgggggctggggggggcgcgcctccgcccagcggccgccccgtctagggggtgaggggggggcgcctccgcccggcagccaccccgtcttgggggtgggggggcccctctgcccagccgccatgtctgggaa

SEQ ID NO: 29241 - DNA, 83 bp, Homo sapiens
  chr16:53825644-53825727
  hypo
aagttacagagttttatgcaacgtttcaatcaagaaagcatgataataaagcgtgtataggccgggcgcggtggctcacgctt

SEQ ID NO: 29242 - DNA, 30 bp, Homo sapiens
  chr16:53851107-53851137
  hypo
aatgaatgaatgaacgaggatctctgtgtc

SEQ ID NO: 29243 - DNA, 30 bp, Homo sapiens
  chr16:54096325-54096355
  hypo
agggaggacccacacgctggcttcctcagt

SEQ ID NO: 29244 - DNA, 199 bp, Homo sapiens
  chr16:54128644-54128843
  hypo
ctggagtggcctaggacgccaccgaagaggcgtaagatattttgcttcatcaaacgaatactgtgtgtaggtagagcatagaagtttagtctcatgagatgactccattcctaagggaatctagaggctttctgcggagcaccgtgacatagatcatatcatcctcctgcttaaaaccctccggcggttccccatctca

SEQ ID NO: 29245 - DNA, 31 bp, Homo sapiens
  chr16:54201073-54201104
  hypo
catgagccaccgtgcccggtgtgtaatttta

SEQ ID NO: 29246 - DNA, 31 bp, Homo sapiens
  chr16:55053596-55053627
  hypo
caccaaactcacacaccgcactcacatacat

SEQ ID NO: 29247 - DNA, 14 bp, Homo sapiens
  chr16:55357558-55357572
  hypo
aatgggccgccctc

SEQ ID NO: 29248 - DNA, 329 bp, Homo sapiens; identical to SEQ ID NO: 10685
  chr16:55357611-55357940
  hypo

SEQ ID NO: 29249 - DNA, 230 bp, Homo sapiens; identical to SEQ ID NO: 10692
  chr16:55513133-55513363
  hypo

SEQ ID NO: 29250 - DNA, 199 bp, Homo sapiens; identical to SEQ ID NO: 10693
  chr16:55513482-55513681
  hypo

SEQ ID NO: 29251 - DNA, 211 bp, Homo sapiens
  chr16:55739210-55739421
  hypo
tctcaaaaggagttaccgctcagctgggagccagttcctgctatatgatctgttttctagcctcgctaatgtgagactgaagcattcttaccaaagaaatcatttcctagtaaagaagcccattgaactcactttatttgtttatttccttcgaaagccaccgaagagagaaaaacagagaaggtgtgtagtgtggcggaaaaagcacagc

SEQ ID NO: 29252 - DNA, 350 bp, Homo sapiens; identical to SEQ ID NO: 10698
  chr16:56224482-56224832
  hypo

SEQ ID NO: 29253 - DNA, 839 bp, Homo sapiens; identical to SEQ ID NO: 10699
  chr16:56224880-56225719
  hypo

SEQ ID NO: 29254 - DNA, 434 bp, Homo sapiens; identical to SEQ ID NO: 10700
  chr16:56225937-56226371
  hypo

SEQ ID NO: 29255 - DNA, 53 bp, Homo sapiens; identical to SEQ ID NO: 10701
  chr16:56228363-56228416
  hypo

SEQ ID NO: 29256 - DNA, 36 bp, Homo sapiens; identical to SEQ ID NO: 10702
  chr16:56228577-56228613
  hypo

SEQ ID NO: 29257 - DNA, 31 bp, Homo sapiens
  chr16:56370905-56370936
  hypo
tccatcatggacaggccgtgccggcactcca

SEQ ID NO: 29258 - DNA, 31 bp, Homo sapiens
  chr16:56399063-56399094
  hypo
tgccttcagctaagctcgagagggaacttca

SEQ ID NO: 29259 - DNA, 30 bp, Homo sapiens; identical to SEQ ID NO: 10705
  chr16:56666413-56666443
  hypo

SEQ ID NO: 29260 - DNA, 30 bp, Homo sapiens
  chr16:56782268-56782298
  hypo
agcaggcgggagagcgcctgcgttcccgta

SEQ ID NO: 29261 - DNA, 30 bp, Homo sapiens
  chr16:56815811-56815841
  hypo
gtgatgctgtgctccgggggctgcagtgca

SEQ ID NO: 29262 - DNA, 30 bp, Homo sapiens
  chr16:56821256-56821286
  hypo
taaatgactgacaccgtataccagcaggga

SEQ ID NO: 29263 - DNA, 97 bp, Homo sapiens
  chr16:56857045-56857142
  hypo
tcctttcctgggaggcgtcttttgaagggagtgagtgggaaggaaaatgggaggctgtgacgctcaccaagtaacgtaagagcggtggcccctggag

SEQ ID NO: 29264 - DNA, 304 bp, Homo sapiens
  chr16:56857407-56857711
  hypo
ggcaggggtgctcatcggtggatggaactctgaagtctggccagcagagacgcatcttctgcactgagcttaagcctagccgtcacagacagatgacattaacctcatcccccaccacattctgccccctttggaggtcagagtgccacaaagaactagataatttctctggccctgcagcattgtcacatgcagtttcatttatgtgcagagcatttccgacatgtggaccatggtaaaacaaatgacagacgtgttgttgacaccggcaacggatgccctgaagaaccgcagcagcgtggaa

SEQ ID NO: 29265 - DNA, 31 bp, Homo sapiens
  chr16:56925877-56925908
  hypo
aggccaggtggggcatcgggactttcttcct

SEQ ID NO: 29266 - DNA, 117 bp, Homo sapiens
  chr16:56928267-56928384
  hypo
acagagcaccgtgtgcgacttgaattcagtcagccatgttcattatacagatgggtcgactggggtccagcgaggagaggaaggggtttgctaatggcagagcggggcaggaactca

SEQ ID NO: 29267 - DNA, 30 bp, Homo sapiens
  chr16:57006125-57006155
  hypo
tcctgatgctcctccgcattcctgatgctg

SEQ ID NO: 29268 - DNA, 30 bp, Homo sapiens
  chr16:57050328-57050358
  hypo
cacaatcagagcacacgctgatcttccgcc

SEQ ID NO: 29269 - DNA, 30 bp, Homo sapiens
  chr16:57054725-57054755
  hypo
cttcctccccaacacggacctggattccag

SEQ ID NO: 29270 - DNA, 31 bp, Homo sapiens
  chr16:57100435-57100466
  hypo
cactcctcagcatctccgagacccagcagca

SEQ ID NO: 29271 - DNA, 30 bp, Homo sapiens
  chr16:57180833-57180863
  hypo
tctctccactgtaccgctgtactgtaatgc

SEQ ID NO: 29272 - DNA, 46 bp, Homo sapiens; identical to SEQ ID NO: 10717
  chr16:57318552-57318598
  hypo

SEQ ID NO: 29273 - DNA, 32 bp, Homo sapiens
  chr16:57326588-57326620
  hypo
ggattacaggcgtgaaccacctacccagcaag

SEQ ID NO: 29274 - DNA, 288 bp, Homo sapiens
  chr16:57559707-57559995
  hypo
ctaaacactacctgtcatcttcgtgagtctaatgttctgtgattctgagggcgttgtagcacggcctggccctggccctgccccctcccgcctcccacgactcactctcgctccttgagcagcaccttctgggactcatccagccgtagccgcagggcggtcaacttggaggcctcctcctccgtggcagctgtgtcctcccagggtagccggctgcgctcctggcggcctgagctgccccgcgggcccccagcccccaggctgcgcgcctcccagcagtcctcagac

SEQ ID NO: 29275 - DNA, 61 bp, Homo sapiens
  chr16:57697545-57697606
  hypo
cactgcctgtggcccccgagcccggcccagccccaggccagtcagccgcagactttggaaa

SEQ ID NO: 29276 - DNA, 225 bp, Homo sapiens
  chr16:57734045-57734270
  hypo
tctccttgcagaagttcgtgagcacaaccctccggcccacactgatgccctaccccgagctctacaactgggacagctgtgcccagtttgtctccgacttcctcaccatggtgcccctgcctgaccctctcaagccggtaagcaccactcacaggctgcatgcctgagcccaccaggactaagatggtgtgagaaacaaactcacccatccaaacccaaagaatg

SEQ ID NO: 29277 - DNA, 30 bp, Homo sapiens
  chr16:57759977-57760007
  hypo
agaaaatcacagagcggttcttccgcaacc

SEQ ID NO: 29278 - DNA, 1290 bp, Homo sapiens
  chr16:58030229-58031519
  hypo
ctggtgccaggagtacgagcggcacaccctctccctgcctcatacccctgcgtcctcactcccgaggtctcagaacaccgagctgggtggggcccttggtgcaaggcagctgtgaggagctaggctgcgcgaggcctgctgggcccacggcgccgactcaggtcaggctggtaggggccacagccgcagagtcagggcaggcaggcggctacctggtaggcgccctccgctgccgcggcggcggcactgtgctgcgcgctgtgctcctgcaacaaggccacgtctaggaagcgctccccgcaccatacacacttgaactgctgctcgcgggcgtgcacgccctggtgcttgttgagatgctcccgctgcttgaaggccttgtcgcagttggggcacttgtagggcttctcgcctgtgtgtacccgccggtgccgctgcaggtctgacgcgtacttgaagcgtttctcgcagtctgggcacttgagtggcttctcgcgggccggatcgcagcggtgctgcacgaactcggaagaggagaagaagcggcgttcgcaaagcgtgcagcgcaggggcttctctgccgccgcacagtgggccagctggtgcttctgcagggccgacgcgcgcttgtaggccttgttgcacacagggcacttgaagggccgctcggccgcgccgggcaggcacttgtgccgcagcagctcggcagattggtcaaagcctttctggcacacggggcacttgaagagagtctcgagggtgtgcacgtgctggtggtagagcaggtggctgggctgcccaaagcccttctcacataggccgcatttgaagggctcctcggtcttgtgtgtgcgccggtggcgcatcagtgcgtactgctgcttgaagcccatggggcacaggtcgcacttgaagggccgctcggcgctgtgtgtgcgctcatgctgccgcaggtccgagggccgcttgaaggccttctggcactcgccgcagcggaagggccgctccccacttggcgtgcacgggtgctgcagcagctccgacgactccttgaaatgcaactcgcacacgttgcagcggaacaggtggtgctcgcccgagtgcgcgtacatgtggcgcaccaggtgagagcggtgcttgaaggtcttctcgcagactgcgcacttgtagggccgctcggagctgtgcgtgcgcttgtggtgcaccaggtgcgacgactggctgaagcttttgtcacacagcgtgcacttgtagggcttctcaccggtgtggatccgctcatgccgagag

SEQ ID NO: 29279 - DNA, 450 bp, Homo sapiens; identical to SEQ ID NO: 10720
  chr16:58060127-58060577
  hypo

SEQ ID NO: 29280 - DNA, 47 bp, Homo sapiens
  chr16:58076222-58076269
  hypo
acatcagtgctgcctacgagcgccaagacggtcgttttgtctttttc

SEQ ID NO: 29281 - DNA, 30 bp, Homo sapiens
  chr16:58121034-58121064
  hypo
cagcggcagccatgcgtgcacatgcacact

SEQ ID NO: 29282 - DNA, 31 bp, Homo sapiens
  chr16:58192530-58192561
  hypo
actctaccccatccctcgggtccagggtgct

SEQ ID NO: 29283 - DNA, 30 bp, Homo sapiens
  chr16:58314560-58314590
  hypo
aacaggccagggcacgtctcaccaccgaag

SEQ ID NO: 29284 - DNA, 30 bp, Homo sapiens; identical to SEQ ID NO: 10722
  chr16:58426316-58426346
  hypo

SEQ ID NO: 29285 - DNA, 715 bp, Homo sapiens; identical to SEQ ID NO: 10723
  chr16:58497856-58498571
  hypo

SEQ ID NO: 29286 - DNA, 169 bp, Homo sapiens
  chr16:58534052-58534221
  hypo
ccgaccatctcccactcgagctgcccccgccctctggacccgagtgactcaggcctttgtttgtccttcctggtagaggcgggttccctccctcggcaagatgccggagtgctgggatggggtgagtgagggcgctgcgggcatcaaggtgggccgggaggatggtgca

SEQ ID NO: 29287 - DNA, 102 bp, Homo sapiens
  chr16:58558293-58558395
  hypo
tctgcttgacattattcgtgtttgtgagtctgtcacagtgacacgtttctctaaaggctgccgtccttttattgccgagctcttggacgtgatggtattcaa

SEQ ID NO: 29288 - DNA, 31 bp, Homo sapiens; identical to SEQ ID NO: 10725
  chr16:61445875-61445906
  hypo

SEQ ID NO: 29289 - DNA, 31 bp, Homo sapiens
  chr16:61615520-61615551
  hypo
ggttgcagggggccatcgtgtcagcactgcc

SEQ ID NO: 29290 - DNA, 30 bp, Homo sapiens
  chr16:65998387-65998417
  hypo
ggcacaagccctgtgcgctctggggagttt

SEQ ID NO: 29291 - DNA, 98 bp, Homo sapiens
  chr16:66420653-66420751
  hypo
acactcacacacagccactgccgcccattcccagctcacgtcacctcttcttttctagatcaagtcaagcgtgagtcgcaagaatgccaagtacctgc

SEQ ID NO: 29292 - DNA, 66 bp, Homo sapiens
  chr16:66440979-66441045
  hypo
gactctgggccaggaacggagctgcagtccctgagcgccctggtttcaaggcgcctcccaggtcaa

SEQ ID NO: 29293 - DNA, 316 bp, Homo sapiens
  chr16:66600010-66600326
  hypo
gaggaagagatttccgaagtctgcaccccgcgcagagcactactgtaacttccaagggagcgctgggagcagcgggatcgggttttccggcacccgggcctgggtggcagggaagaatgtgccgggatccgcctcagggatctttgaatctctttactgcctggctggccggcagctccgaggtgtggggttgcagagattttgagttctcgggctaggcggtggcattgcaccccctgtggcaatgagggtggctgaagggctcggcttgtcggtggggcagcgagagccgggtgcacgcgccggggaggtagcc

SEQ ID NO: 29294 - DNA, 28 bp, Homo sapiens
  chr16:66638193-66638221
  hypo
gggtggccaagaaagtcgcaagaaaact

SEQ ID NO: 29295 - DNA, 70 bp, Homo sapiens; identical to SEQ ID NO: 10734
  chr16:66638268-66638338
  hypo

SEQ ID NO: 29296 - DNA, 30 bp, Homo sapiens
  chr16:66646880-66646910
  hypo
atgctgctaggtggcgggggtcgggggtct

SEQ ID NO: 29297 - DNA, 173 bp, Homo sapiens
  chr16:66652773-66652946
  hypo
aagggctgggggtgccgctggcttcccagggccaagcgctcagagctgggccggacttgcccatgctggcttcagctcacattgccaaggaagatgtgtattggggctgtgcaggctgccacattcttgctttttctgtagacaaaagtcacctccctcggatggctgtttac

SEQ ID NO: 29298 - DNA, 69 bp, Homo sapiens
  chr16:66781397-66781466
  hypo
gccctcattatataatcgcccatacatcgtaatctttactgtttaaatgagtaaaggcaaatataaaga

SEQ ID NO: 29299 - DNA, 30 bp, Homo sapiens
  chr16:66835399-66835429
  hypo
acaacgcgcgggagcggaggccgtggcgtc

SEQ ID NO: 29300 - DNA, 30 bp, Homo sapiens
  chr16:66919589-66919619
  hypo
aaaatgcagccacgcggctgatcagacatg

SEQ ID NO: 29301 - DNA, 82 bp, Homo sapiens
  chr16:66942965-66943047
  hypo
tgtgcaatcatgtgaccgtagatgctactatcaatgatgatgacaatgactatgatcaaagggcaggcgcataatgactagg

SEQ ID NO: 29302 - DNA, 191 bp, Homo sapiens
  chr16:67006194-67006385
  hypo
ctgccaaaggcagcatcgaatcaggccatgagtgcctaactcccatcccatcctttctctgtagattctggaagccctgtctttttctatgagttccagcatcgacccagttcttttgcgaagatcaaacctgcctgggtgaaggctgatcatggggccgagggtgcttttgtgttcggaggtcccttcct

SEQ ID NO: 29303 - DNA, 145 bp, Homo sapiens
  chr16:67175551-67175696
  hypo
tggtggggcaggcagctccaggcgccagcataggcaccagctccacgtaagggtgaggctagatcacgtgtaccgcaagcggcttccattgcgggcacccatgtctggacaaggagaatgcggtggcacccggaagcttggggac

SEQ ID NO: 29304 - DNA, 633 bp, Homo sapiens; identical to SEQ ID NO: 10737
  chr16:67189017-67189650
  hypo

SEQ ID NO: 29305 - DNA, 31 bp, Homo sapiens; identical to SEQ ID NO: 10739
  chr16:67203649-67203680
  hypo

SEQ ID NO: 29306 - DNA, 182 bp, Homo sapiens
  chr16:67221090-67221272
  hypo
ctgatcccccatgtcccgctgccccaaaggcactgaccccaggtacacatgcagtgcccagtgcagcaaggcgaaggcatccgcagcttctagctcaggccctgcaaggaggttctgcaggctgcggcgcaaaccactatgcagcgtgtgggcccatagctggaccacgttgtactgtggcg

SEQ ID NO: 29307 - DNA, 232 bp, Homo sapiens
  chr16:67270957-67271189
  hypo
ccgccgcccaccagcgcctggggcttcttcgatgtctccatcctccaatttcagggcgttctagcagaggcggaccaggatgtaagaaagtggttaacgtgtatgcaggtggggtggggcgctggggactgcgcttctctcttccctctttccaatccgcctcagagcgtaaggcccggcccacctcgtagagcacaagctgcgtgcgcaggtcgacgtcagtgcccgcagt

SEQ ID NO: 29308 - DNA, 216 bp, Homo sapiens; identical to SEQ ID NO: 10744
  chr16:67280007-67280223
  hypo

SEQ ID NO: 29309 - DNA, 458 bp, Homo sapiens; identical to SEQ ID NO: 10746
  chr16:67281139-67281597
  hypo

SEQ ID NO: 29310 - DNA, 31 bp, Homo sapiens
  chr16:67363908-67363939
  hypo
cccattttttttccctcgcattttcaattgt

SEQ ID NO: 29311 - DNA, 369 bp, Homo sapiens
  chr16:67469688-67470057
  hypo
ccaggagacattagccgcgtgctagagttcaccaaggcccacaccaccagcaccggtcagtggcaagtgtccaccaggcaagggcgtggcaggggagtgggaaggacacggggactggaagtttgctgctgggctgacctaaggcttccctcctctgctctgtgaccccaggcctgtggggcctcgtcaacaacgcaggccacaatgaagtagttgctgatgcggagctgtctccagtggccactttccgtagctgcatggaggtgaatttctttggcgcgctcgagctgaccaagggcctcctgcccctgctgcgcagctcaaggggccgcatcgtgactgtggggagcccagcgggtgagtgccccc

SEQ ID NO: 29312 - DNA, 50 bp, Homo sapiens
  chr16:67470487-67470537
  hypo
cagagtcagtgagaaacgtgggtcagtgggaaaagcgcaagcaattgctg

SEQ ID NO: 29313 - DNA, 123 bp, Homo sapiens
  chr16:67470862-67470985
  hypo
acccaaacctgagccccggcccttccccagcagtggctcggtgagccatgtgcacctatggcccagccactgcagcacaggaggctccgtgagcccttggttcctccccgaaaacccccagca

SEQ ID NO: 29314 - DNA, 80 bp, Homo sapiens
  chr16:67472274-67472354
  hypo
aggagaactgggcagccgctaggacagcgtactacaccccggacaggcaggtgagccacaggcttgtcacagaccacata

SEQ ID NO: 29315 - DNA, 42 bp, Homo sapiens
  chr16:67511576-67511618
  hypo
agttttttttttttctttatacggagtcttgctctatagccc

SEQ ID NO: 29316 - DNA, 30 bp, Homo sapiens
  chr16:67513453-67513483
  hypo
ttattgtattttaacggtaagttttctatt

SEQ ID NO: 29317 - DNA, 65 bp, Homo sapiens
  chr16:67518129-67518194
  hypo
caaagctttcaggccgcctgcctcattagcactaatggctgctcccttccgccctgtgtcgtcag

SEQ ID NO: 29318 - DNA, 120 bp, Homo sapiens; identical to SEQ ID NO: 10752
  chr16:67571883-67572003
  hypo

SEQ ID NO: 29319 - DNA, 30 bp, Homo sapiens; identical to SEQ ID NO: 10753
  chr16:67678741-67678771
  hypo

SEQ ID NO: 29320 - DNA, 31 bp, Homo sapiens
  chr16:67700331-67700362
  hypo
gggccctcgcacatgccgccggcgccgccca

SEQ ID NO: 29321 - DNA, 290 bp, Homo sapiens
  chr16:67709088-67709378
  hypo
aggttctggttggtgtcgggctcctccgtcagcacctccacagcctcccactccccggatcggctcgacctcttgatggcatccaccacgctctgcatgtacagcccatcctcgaaggaggcggccatggagacaggggtgcggtcccaggtgcggcggtcgccctgcccctggaaggactggcgcaaggcctgcaccatgtagaccatgcccttcaggtacagcagcgggacatcctggggcccctgctcaggcagtcctgcgcccactgccagcgagtccctcaagag

SEQ ID NO: 29322 - DNA, 30 bp, Homo sapiens
  chr16:67825195-67825225
  hypo
gtgagccactatgcccggcccagttttacc

SEQ ID NO: 29323 - DNA, 30 bp, Homo sapiens
  chr16:67920021-67920051
  hypo
catgttcgggagcgcggcacaggctccgaa

SEQ ID NO: 29324 - DNA, 141 bp, Homo sapiens
  chr16:67965741-67965882
  hypo
ctgagcagcaacatcgtggcagatgtgaggttgggagctgggtctggctttatgggtcttctcgtccttgagctaaagctccaggcctgaggccaggccagctgtgtagactcagccccctcccacgctccaggcaagaca

SEQ ID NO: 29325 - DNA, 293 bp, Homo sapiens; identical to SEQ ID NO: 10757
  chr16:68118346-68118639
  hypo

SEQ ID NO: 29326 - DNA, 311 bp, Homo sapiens; identical to SEQ ID NO: 10758
  chr16:68118759-68119070
  hypo

SEQ ID NO: 29327 - DNA, 72 bp, Homo sapiens; identical to SEQ ID NO: 10759
  chr16:68269812-68269884
  hypo

SEQ ID NO: 29328 - DNA, 111 bp, Homo sapiens; identical to SEQ ID NO: 10760
  chr16:68269896-68270007
  hypo

SEQ ID NO: 29329 - DNA, 281 bp, Homo sapiens; identical to SEQ ID NO: 10761
  chr16:68270022-68270303
  hypo

SEQ ID NO: 29330 - DNA, 43 bp, Homo sapiens; identical to SEQ ID NO: 10762
  chr16:68271017-68271060
  hypo

SEQ ID NO: 29331 - DNA, 58 bp, Homo sapiens; identical to SEQ ID NO: 10763
  chr16:68298828-68298886
  hypo

SEQ ID NO: 29332 - DNA, 46 bp, Homo sapiens
  chr16:68386059-68386105
  hypo
gactgagtggcctgttgcttccgtgttcctgttaacactcctggac

SEQ ID NO: 29333 - DNA, 131 bp, Homo sapiens
  chr16:68386174-68386305
  hypo
ttcttcactaccagcctgctgccgtggcacaacctctacttctggtacgtgcggaccgctgtggaccagcacctggggccaggtgccatggtgatgccccaggcagcctcgctgcacgctgtggttgtgga

SEQ ID NO: 29334 - DNA, 734 bp, Homo sapiens; identical to SEQ ID NO: 10764
  chr16:68482014-68482748
  hypo

SEQ ID NO: 29335 - DNA, 31 bp, Homo sapiens
  chr16:68721866-68721897
  hypo
ggaaaaactgaggcctcgaggaatcgaacct

SEQ ID NO: 29336 - DNA, 30 bp, Homo sapiens
  chr16:68731681-68731711
  hypo
cctttaaaactatacggaggcacatgtcct

SEQ ID NO: 29337 - DNA, 106 bp, Homo sapiens
  chr16:68737003-68737109
  hypo
accatgccttttccctcgtcactgacccaacgatctttttttcttcccaaagggactaaaggggctacagataggccctgtccccacagtgcgctttcccagtccc

SEQ ID NO: 29338 - DNA, 18 bp, Homo sapiens
  chr16:68761399-68761417
  hypo
atctgtaaaatggtcacg

SEQ ID NO: 29339 - DNA, 23 bp, Homo sapiens
  chr16:68769450-68769473
  hypo
caggactccgtctcaaaaaaaaa

SEQ ID NO: 29340 - DNA, 21 bp, Homo sapiens
  chr16:68780831-68780852
  hypo
acagagcgatactccatctca

SEQ ID NO: 29341 - DNA, 116 bp, Homo sapiens
  chr16:68849365-68849481
  hypo
ctaacacaaaatgtttcgttttgtttttaacttcattgtttctgctctctagggcttggattttgaggccaagcagcagtacattctacacgtagcagtgacgaatgtggtacctt

SEQ ID NO: 29342 - DNA, 19 bp, Homo sapiens
  chr16:68849942-68849961
  hypo
tggagtctcactttgtcgc

SEQ ID NO: 29343 - DNA, 18 bp, Homo sapiens
  chr16:68850200-68850218
  hypo
caccgcacccagcccata

SEQ ID NO: 29344 - DNA, 31 bp, Homo sapiens
  chr16:68856756-68856787
  hypo
ggtaaaaccctgggtgcgatggaagtcactc

SEQ ID NO: 29345 - DNA, 2 bp, Homo sapiens
  chr16:68876852-68876854
  hypo
tt

SEQ ID NO: 29346 - DNA, 30 bp, Homo sapiens
  chr16:68942216-68942246
  hypo
cccatgttcacacccgtccccgtgcccagc

SEQ ID NO: 29347 - DNA, 135 bp, Homo sapiens
  chr16:69129257-69129392
  hypo
aatggacagacactcttcttacgtgctctagagctcaccgcctgactggctggctcttgactggcctctcggtgccagaaatgcacttgtaagtctccgctgaggagaaccctcgggctgtgttctcaaccctgg

SEQ ID NO: 29348 - DNA, 116 bp, Homo sapiens
  chr16:69133562-69133678
  hypo
aatgcaggtatgcatacataacgattgtgtctcctgttcgttacttaacactgcatcgtaggtgtctggagtattcctccattgtcctcatgaacgtgtttttttagtagctgcac

SEQ ID NO: 29349 - DNA, 30 bp, Homo sapiens
  chr16:69136641-69136671
  hypo
ctccgtggagctggcggcgtgagaagggca

SEQ ID NO: 29350 - DNA, 209 bp, Homo sapiens; identical to SEQ ID NO: 10773
  chr16:69140041-69140250
  hypo

SEQ ID NO: 29351 - DNA, 778 bp, Homo sapiens
  chr16:69352179-69352957
  hypo
ctgtgagagccactgcaggtggcctcccagagtatgaggtgtgagtcaccgcacctggcctgggctgctctttaagtccagctgaagcacatttcccttacggccttcaggagagggccgacccggattcccatctgctccgcgaagaaacagggcgggttataggagtgtttgctgggggggtcctgaagtgagctgctgagagcattggcccaaatgtccctgaagtacttgcttgagtcacacggcactgttaagccaggaaggcttcgttccttaaccagtgtgcaggcagcggagcctggacttgctgggagcacctctgtgctccaggctgaagggccagcttgtgactttccgtctcccttcccagcagtgacagtgacagtgaaggggataatccggagaaaaagaaactgcaagaacagctgatgggtaagtggctcgcggccctgtggcagcggcaggggatgagagtgggtccgctgctgggttggctcatgccccttggccgggcccgggcccgggccggcctccctctcgcaggtgccgtcgtgatggagaagcccaacatacggtggaacgacgtggccgggctggagggggccaaggaggccctcaaagaagctgtcattttgccaatcaaattcccacacttgttcacaggtgagagttgagccatttcaaaccccaatgtaaaaattccaggcttccgcagggctggcactccgaggcacccgggagtcagtggcgactcagcccccggggcctgcagagg

SEQ ID NO: 29352 - DNA, 65 bp, Homo sapiens
  chr16:69354848-69354913
  hypo
tggcccatgaaatgcgtccgtttcactcaaatcttcgtgcctccccttccgtgaataccattcca

SEQ ID NO: 29353 - DNA, 31 bp, Homo sapiens
  chr16:69355287-69355318
  hypo
aggcctcctggagagccgagggccagtgcca

SEQ ID NO: 29354 - DNA, 30 bp, Homo sapiens
  chr16:69358565-69358595
  hypo
gtggggcggggtggcgggggagaagcagcc

SEQ ID NO: 29355 - DNA, 35 bp, Homo sapiens; identical to SEQ ID NO: 10774
  chr16:69373089-69373124
  hypo

SEQ ID NO: 29356 - DNA, 186 bp, Homo sapiens
  chr16:69383485-69383671
  hypo
aaatccctgtgggttatgtgccgtggcagcaacatgccggtcatgtgacatccccactgtccgctgaacctgccaagacacattaaataggtagcagaacccctgctacatcacgaggaagccagctgagtggtaagattgacgtcccacggtcatcagcacagcggtctctgtctggggtgggac

SEQ ID NO: 29357 - DNA, 30 bp, Homo sapiens
  chr16:69386176-69386206
  hypo
ccactgacagtcctcgtcctgatgcctttc

SEQ ID NO: 29358 - DNA, 31 bp, Homo sapiens
  chr16:69400784-69400815
  hypo
gaggagttgaggcctgcgctgggctcagtac

SEQ ID NO: 29359 - DNA, 30 bp, Homo sapiens
  chr16:69439230-69439260
  hypo
tgagccaccacgcccggcctactccctgaa

SEQ ID NO: 29360 - DNA, 23 bp, Homo sapiens
  chr16:69485566-69485589
  hypo
aaagttggccgggggcggtgact

SEQ ID NO: 29361 - DNA, 23 bp, Homo sapiens
  chr16:69485828-69485851
  hypo
aagcgagacgccgtctcaaaaaa

SEQ ID NO: 29362 - DNA, 31 bp, Homo sapiens
  chr16:69495174-69495205
  hypo
attcttcagtctcttgcggttactcttcaag

SEQ ID NO: 29363 - DNA, 160 bp, Homo sapiens
  chr16:69557608-69557768
  hypo
ggggcagatcaaagccggatttcccagcacaggtagcaagcatggcaggaatctgggagacctctcacccagtccccaacccacgctcacagatggaaagccacaccattattggtcacacctttgcgcattgccagcacgcaggcgtttgtgacaaatc

SEQ ID NO: 29364 - DNA, 20 bp, Homo sapiens
  chr16:69632633-69632653
  hypo
aatgtcagcgtaggccgggc

SEQ ID NO: 29365 - DNA, 31 bp, Homo sapiens
  chr16:69641962-69641993
  hypo
aaactactttattggccggtcacggtggctc

SEQ ID NO: 29366 - DNA, 30 bp, Homo sapiens
  chr16:69757852-69757882
  hypo
acaagatgcacacacggataacctcttcag

SEQ ID NO: 29367 - DNA, 43 bp, Homo sapiens
  chr16:69761634-69761677
  hypo
agaaaactggtttccaactcccgacctcaggtgatcctaccgc

SEQ ID NO: 29368 - DNA, 31 bp, Homo sapiens
  chr16:69789089-69789120
  hypo
ccaggtgtagtggtgcgcgcctagagtccca

SEQ ID NO: 29369 - DNA, 170 bp, Homo sapiens
  chr16:69825949-69826119
  hypo
ataaccatttaaatagcgtaggtggttctttttcccgtgcatttcatgaagaaagctgatagtgtaacctgtggggtgtgactgcgcggtttccagttcccttgtgcctgcccacagtgtgatcctggtgttttaaggtatatttttaaatgcatcgaggcccttaaacg

SEQ ID NO: 29370 - DNA, 30 bp, Homo sapiens
  chr16:69833186-69833216
  hypo
atgggggcaaaagtacgtatgatgaagggg

SEQ ID NO: 29371 - DNA, 339 bp, Homo sapiens
  chr16:69833661-69834000
  hypo
tgccctgtgcttactcggcactcagtaaacatttactggatgttggaacgtgatggacgcgccatctgaattagccaacgtgcctctacgtcacggacatataaatcctcatctatttattgctgtttgtggtcagtggcatggcccatggcggtggtattggaccctccttcataaggcctctattcagagcagtaccatatgtggcgaatgaatggcatggaaagaaaggctcctttttctcttgatatctggaaagtattttctgaaagtggatgtagcttaagagagaggtgggggcggggagagttgcgtcccagcgagcgtgttacatgattt

SEQ ID NO: 29372 - DNA, 125 bp, Homo sapiens
  chr16:69906917-69907042
  hypo
gggatgtagatgtttcgcttggatgaattgtaggtagaggaatgcaggtgttgaaatttggtaagtgacgctgagatagttttctagtgctcgtgacagcagaggtgtggcgtaaaggccaggag

SEQ ID NO: 29373 - DNA, 208 bp, Homo sapiens
  chr16:69921951-69922159
  hypo
acccacaacagccactgatcccgaagaaccttccgttgttggtgtgacgtccccacctgctgcacccttgagtgtgaccccgaatcccaacacgacttctctccctgccccagccacaccggctgaaggagaggaacccagcacttcgggtacacagcagctcccagcggctgcccaggcccccgacgctctgcctgctgggtgagta

SEQ ID NO: 29374 - DNA, 30 bp, Homo sapiens
  chr16:69922491-69922521
  hypo
tctcttgaattttatcgtatcagcccacgg

SEQ ID NO: 29375 - DNA, 30 bp, Homo sapiens
  chr16:69972986-69973016
  hypo
acctgccgcctgcccgtcgggggatttgcc

SEQ ID NO: 29376 - DNA, 151 bp, Homo sapiens
  chr16:70151412-70151563
  hypo
tccatctcaaaaaaaataaataagatgtcaaagaggctgtgacctgaggagattacctgtatttgggggagaggtggcaggaaccatgccaggagggaacagcatgcacagaacctggagccgaatagaacactcacgcctcacctgatat

SEQ ID NO: 29377 - DNA, 290 bp, Homo sapiens
  chr16:70196487-70196777
  hypo
gccaccacaaagcataaacagcgtgcagaggagagtgtgtacctccctgtgtgtaccagtgtgagggaggatttggggacgggggtagagaagatgtaggtgtttatcttaccctccctgcagcgctggagtggctgggggtaaaagcttcccgcctcctgaaattccgaccggccttctgcctacagctgacctcaggaggaacctgccacctgatgttccacacgggcacgtgtgcactcaggtttgtgtggaaagcaaggggggtcgtgttctcaccctgtggaaac

SEQ ID NO: 29378 - DNA, 30 bp, Homo sapiens
  chr16:70286375-70286405
  hypo
tctatagatgcgagcgtgacgatcaacagc

SEQ ID NO: 29379 - DNA, 30 bp, Homo sapiens
  chr16:70328601-70328631
  hypo
cagagttcctggggcgcgtgcccgagcgct

SEQ ID NO: 29380 - DNA, 31 bp, Homo sapiens
  chr16:70346138-70346169
  hypo
atgatttggaatgcagcgattcccccccaca

SEQ ID NO: 29381 - DNA, 55 bp, Homo sapiens
  chr16:70399210-70399265
  hypo
cttaaaataagattttcggttgattaaaaaaaaaaatccacgcatggctcacaga

SEQ ID NO: 29382 - DNA, 30 bp, Homo sapiens
  chr16:70426253-70426283
  hypo
gcatctctggcactcgggaacacagcattc

SEQ ID NO: 29383 - DNA, 27 bp, Homo sapiens
  chr16:70439952-70439979
  hypo
gactccgtctcaaaaaaaaaaaaagcc

SEQ ID NO: 29384 - DNA, 377 bp, Homo sapiens; identical to SEQ ID NO: 10776
  chr16:70472226-70472603
  hypo

SEQ ID NO: 29385 - DNA, 30 bp, Homo sapiens
  chr16:70507079-70507109
  hypo
agccgtgcctggatcgggctgccacgctgg

SEQ ID NO: 29386 - DNA, 41 bp, Homo sapiens
  chr16:70508777-70508818
  hypo
catcggagccagggcacgccgcatcccggagcctgagctgt

SEQ ID NO: 29387 - DNA, 178 bp, Homo sapiens
  chr16:70595529-70595707
  hypo
caggtattggccatgtcaagccgctcatggttgagctattcttaccaatctcgcttccatctcaccccactgtcttacgagacactggaatttgcatcgggttttgcctcggaacagtgtcccgagggcattgtggccatctccaccaacaccctacggtgagtgagtctcatgtttg

SEQ ID NO: 29388 - DNA, 30 bp, Homo sapiens
  chr16:70680616-70680646
  hypo
ggacttgcggccaccgccccccggctgtcc

SEQ ID NO: 29389 - DNA, 30 bp, Homo sapiens
  chr16:70713552-70713582
  hypo
agcttcagcgtgtccgacgacttctttttg

SEQ ID NO: 29390 - DNA, 30 bp, Homo sapiens
  chr16:70714363-70714393
  hypo
ctcacctgaccctgcgtgctcttagaagga

SEQ ID NO: 29391 - DNA, 30 bp, Homo sapiens
  chr16:70727986-70728016
  hypo
ctctaggatccaggcgactcagggctggga

SEQ ID NO: 29392 - DNA, 30 bp, Homo sapiens
  chr16:70733219-70733249
  hypo
cgggctgtaccctgcggcctggagcacaga

SEQ ID NO: 29393 - DNA, 30 bp, Homo sapiens
  chr16:70783729-70783759
  hypo
tggagcaccaatctcgatgcacaccttggc

SEQ ID NO: 29394 - DNA, 117 bp, Homo sapiens
  chr16:70808261-70808378
  hypo
cattggagggatgtcacggaagtgctgcgcctcagtgcaccctatcgggggaacgtgttgtctgttagcctcattactggtgacgttaacctcatcgcctgacgcacagtgtctgct

SEQ ID NO: 29395 - DNA, 31 bp, Homo sapiens
  chr16:70811507-70811538
  hypo
caggccaagggggagtcggagcaagtgaaga

SEQ ID NO: 29396 - DNA, 46 bp, Homo sapiens
  chr16:71324584-71324630
  hypo
gcacaccagcccgggcgacagtgcgagactccgtctcgggaaaaaa

SEQ ID NO: 29397 - DNA, 132 bp, Homo sapiens; identical to SEQ ID NO: 10779
  chr16:71459956-71460088
  hypo

SEQ ID NO: 29398 - DNA, 88 bp, Homo sapiens; identical to SEQ ID NO: 10780
  chr16:71460270-71460358
  hypo

SEQ ID NO: 29399 - DNA, 31 bp, Homo sapiens
  chr16:71705862-71705893
  hypo
attccaactgacaaaacgggaatcagtgcct

SEQ ID NO: 29400 - DNA, 109 bp, Homo sapiens
  chr16:71715689-71715798
  hypo
tgcatgaagttgtgtcgcaagttgaggtaggtaatatcttgactatagaagagatgctcaggaacctcctcgaggctgtaacacgagagatccacggtactgattcgct

SEQ ID NO: 29401 - DNA, 27 bp, Homo sapiens
  chr16:71716784-71716811
  hypo
gtcattcatggctaggcgtggtggctc

SEQ ID NO: 29402 - DNA, 30 bp, Homo sapiens
  chr16:71748952-71748982
  hypo
cgtgtcaagaataacgaaacagcgggttgc

SEQ ID NO: 29403 - DNA, 138 bp, Homo sapiens
  chr16:71754749-71754887
  hypo
ctccacctcggaaaaaaaaacaaaagacgaaaaaaaaaaaaacaatgtgaaatactcttaggtagaagatgtttctgcattcaaaactttaaaacaatatagactcatatctgggaatacacacgttattaaatattg

SEQ ID NO: 29404 - DNA, 46 bp, Homo sapiens
  chr16:71870743-71870789
  hypo
atccactgagacaaaaaaagtcgttctactttgtaggccgggtgcg

SEQ ID NO: 29405 - DNA, 30 bp, Homo sapiens
  chr16:71894294-71894324
  hypo
tctcattgtcccgccggctcttcttggccg

SEQ ID NO: 29406 - DNA, 31 bp, Homo sapiens
  chr16:72056268-72056299
  hypo
ggagagggatggcttgcggagagtgcacagg

SEQ ID NO: 29407 - DNA, 54 bp, Homo sapiens
  chr16:72460075-72460129
  hypo
agcacagcggatgttttcacacccagcaagacaaaggccgtcgtctccgccatg

SEQ ID NO: 29408 - DNA, 465 bp, Homo sapiens
  chr16:72461317-72461782
  hypo
gtgttctgttggcaccgggcgctgagccaggggcaggcgctggaaacaaaagggagagacaaaaaaataaagtgattcaatgggaatattaattgctgctcttgtggattttacaaaacacataaactgttttctttttctttcttaaaaaaaaatgtggattggcgcgtgtcccttttgcatggaatatacaagtagtatgggatttacagcccagttacgggactcaggattagctgcgctggcatcttttgggcatattcttccttttaatgaatgagctttcgctgttaatgaggaataatcgtttggctaatgagctttgaaacattaagagaaaagaggttttttccgttaatcgctctggtgcgactgcatggatggattacaaaagacagcaataggaacgcagtacaaagggggggacctctcctgcagtgggagaagcaccgagatgggtgatgt

SEQ ID NO: 29409 - DNA, 59 bp, Homo sapiens; identical to SEQ ID NO: 10786
  chr16:72699009-72699068
  hypo

SEQ ID NO: 29410 - DNA, 31 bp, Homo sapiens
  chr16:72893758-72893789
  hypo
tacagaaacaggactccgctccaaggtatca

SEQ ID NO: 29411 - DNA, 38 bp, Homo sapiens
  chr16:72945768-72945806
  hypo
cagggggagagggatgcgggagacgtcacactgccact

SEQ ID NO: 29412 - DNA, 69 bp, Homo sapiens
  chr16:72949365-72949434
  hypo
cacctctcaagactgaggctacgtgcagtggctcacacttgtaaccccggcactcctggatgccaaggc

SEQ ID NO: 29413 - DNA, 76 bp, Homo sapiens
  chr16:72957856-72957932
  hypo
aataataattatcacagatggcgaattcacaagtgggttagccgtcggctgtaacgggctagctagcacttgcccc

SEQ ID NO: 29414 - DNA, 30 bp, Homo sapiens
  chr16:72967611-72967641
  hypo
attttaatagatcacgtgagcagacttcct

SEQ ID NO: 29415 - DNA, 30 bp, Homo sapiens
  chr16:72984457-72984487
  hypo
gcacttgaggtgcacggggttgccgatggc

SEQ ID NO: 29416 - DNA, 54 bp, Homo sapiens
  chr16:72984702-72984756
  hypo
gcatgtccaggttgtccgtcgtgaacttgttgcagacggcgcactggaagagct

SEQ ID NO: 29417 - DNA, 281 bp, Homo sapiens
  chr16:72992146-72992427
  hypo
tccccaaccccaagctcgcagagggagccagcgtgctggtgatggggaacgaagcccccatcgtcaccctctgtgctttcatttggttctggtgctgtggcattgtctttattggcactttcgtcagcgaagtccagcctcctgccgccctctgccacattggccctgacgccctcactgttaaagcttaaacgattcctcctgttcgcaccatcaaagacaacaaaggaagaagcagaattagaactagtagaagctgtgcccctcgacagggtctggag

SEQ ID NO: 29418 - DNA, 328 bp, Homo sapiens
  chr16:72993713-72994041
  hypo
cctctctcaggggtggcggggggcgcgcgctggggcagtggtgctccatgtaggtctggaggctggcaaaggaggccgaacattcgttgcaggtgacctccttgctggcgggctcggaggggggcccggccgacgcggtgctctccgcgaggcgctcattgaagggggccctcaggctgtccaagggcccgtggctctcgcctgtggactgctccatgctactgggtttgtcagggaggtgggtgctgttgagttcagtccattgctggtgctgagggataccgcacccattgtccttccccgagacgacgggcgagtcacagccttc

SEQ ID NO: 29419 - DNA, 87 bp, Homo sapiens
  chr16:73007795-73007882
  hypo
agaaaaaatcaggtatgaactacatgcaagtgaacccctgggttcccgcttcctgggaagggctatcaaagccgggttcactagttt

SEQ ID NO: 29420 - DNA, 31 bp, Homo sapiens
  chr16:73063563-73063594
  hypo
ttgctcacaaggccatcgcccaagtgggaat

SEQ ID NO: 29421 - DNA, 30 bp, Homo sapiens
  chr16:73083848-73083878
  hypo
aggaccgcaagcaacgtggcccacaacgca

SEQ ID NO: 29422 - DNA, 119 bp, Homo sapiens; identical to SEQ ID NO: 10787
  chr16:73091751-73091870
  hypo

SEQ ID NO: 29423 - DNA, 31 bp, Homo sapiens
  chr16:73162952-73162983
  hypo
actgaccccagatgaccggtggagaaactga

SEQ ID NO: 29424 - DNA, 31 bp, Homo sapiens
  chr16:73232149-73232180
  hypo
tgaagaatcatgtcaccgttatcacaaagac

SEQ ID NO: 29425 - DNA, 30 bp, Homo sapiens
  chr16:74483679-74483709
  hypo
gaagatcgctttcccgggggtgatcccaag

SEQ ID NO: 29426 - DNA, 31 bp, Homo sapiens
  chr16:74490226-74490257
  hypo
tttactgttttttagtagagacggggtttca

SEQ ID NO: 29427 - DNA, 90 bp, Homo sapiens
  chr16:74490376-74490466
  hypo
cacttattgctagtctcacaataaggacaagaccagtgcgatatctaaaagaggctggacagccacagcgaggagagtggcatggccttt

SEQ ID NO: 29428 - DNA, 214 bp, Homo sapiens; identical to SEQ ID NO: 10793
  chr16:74659411-74659625
  hypo

SEQ ID NO: 29429 - DNA, 27 bp, Homo sapiens
  chr16:74694099-74694126
  hypo
aaagccctctctgagcggagatcgcac

SEQ ID NO: 29430 - DNA, 33 bp, Homo sapiens
  chr16:74694365-74694398
  hypo
aaaccaaaaaacggacagggtataggcaattgt

SEQ ID NO: 29431 - DNA, 30 bp, Homo sapiens
  chr16:74716546-74716576
  hypo
accggtataggcctcgggctgcccccagga

SEQ ID NO: 29432 - DNA, 30 bp, Homo sapiens
  chr16:74752750-74752780
  hypo
cacatcaaacgtcccgtccctcccaaccca

SEQ ID NO: 29433 - DNA, 31 bp, Homo sapiens
  chr16:74767604-74767635
  hypo
ccaatgagatgggaagcgatgcaagacacat

SEQ ID NO: 29434 - DNA, 30 bp, Homo sapiens
  chr16:74782625-74782655
  hypo
tccaccatagaggccgcgtgaaaggaggca

SEQ ID NO: 29435 - DNA, 38 bp, Homo sapiens
  chr16:74909077-74909115
  hypo
aggacaccgggatgccgctccaccgccgggcggggact

SEQ ID NO: 29436 - DNA, 30 bp, Homo sapiens
  chr16:74911730-74911760
  hypo
ccgcgccccgcctgctgtgtttattttaaa

SEQ ID NO: 29437 - DNA, 128 bp, Homo sapiens
  chr16:74984547-74984675
  hypo
aagagtggatcaaggaaaactcgaaaccaactggaagcctcgactgggaggcggctgtgcccttgggtaatgaactgtgacgcaggagctctgtaaccgctgctgccggagagaaagccaagggccac

SEQ ID NO: 29438 - DNA, 41 bp, Homo sapiens; identical to SEQ ID NO: 10795
  chr16:75018962-75019003
  hypo

SEQ ID NO: 29439 - DNA, 103 bp, Homo sapiens
  chr16:75019625-75019728
  hypo
ccgtctcggaaaaaaaaagaaaaaagaaaaatcaaagctcgtgcaaaccgaagatacctcttctcctgatgcctatcccatcgagatatttaaaagtctgaat

SEQ ID NO: 29440 - DNA, 31 bp, Homo sapiens; identical to SEQ ID NO: 10798
  chr16:75033798-75033829
  hypo

SEQ ID NO: 29441 - DNA, 44 bp, Homo sapiens
  chr16:75057286-75057330
  hypo
gaaagtcacaccaggccggacgcagtggctcacgcctgtaaacc

SEQ ID NO: 29442 - DNA, 5 bp, Homo sapiens
  chr16:75113380-75113385
  hypo
acaaa

SEQ ID NO: 29443 - DNA, 31 bp, Homo sapiens
  chr16:75113749-75113780
  hypo
gcctgtagtgtagctgcgtgccaggacccca

SEQ ID NO: 29444 - DNA, 165 bp, Homo sapiens
  chr16:75127944-75128109
  hypo
gcccagagcaagcacccgccctccttggggaggtgggggctgtgtgctggtggcatgcatagagtgctgggaagctggtcgtctccttgtcacgttcgaactcggacgaacacctgatttagtcctatgagtccacaccagagagcttgacgggggactatgtgt

SEQ ID NO: 29445 - DNA, 235 bp, Homo sapiens
  chr16:75136442-75136677
  hypo
tggaggacttctgggtcgccttttgttcacgtcgcctcttttcacctgcccttcaaatattcatgtcggcctgggtttgtcttctgccttctttggattttggtctgaactttctccctggactgcctctttatcccacatccatgcctggcacccatgtctctgttccaaacctcagctctaggcttcagcagcctcctggaggtctccatcagctggccgggcctcctcccac

SEQ ID NO: 29446 - DNA, 271 bp, Homo sapiens
  chr16:75138820-75139091
  hypo
ccacctcccagaggggcggacccccatctccagccattctgtctcctttggttatgggatgacctctcccccgacctctggctccgagcgggtaagggcagaggccatcagacaggtgtccactgtgccggcgggaaggtgcgagcatcccaagtgcagagcagagtggagttgccagaggtgtgctctggtttgagggctcaggtggtgggagctgatggggagacccgtagagcctcacaggttggaggagcttcggatcccactggga

SEQ ID NO: 29447 - DNA, 540 bp, Homo sapiens
  chr16:75148496-75149036
  hypo
tgtcccgcatggtgccgtagcggaccgcgttggtccccgacgccccggtggccgccatgccacagagagaggcgtccgcgcctgggtctggagggcggcgtacagaaggcagcctcagggaccggaggtcctttccctcgggctgggggaggaaggtcccctgaaccccagacacagccctgctcccacggtgccctcagggtcccaggaaaggttcgcgagtcctacccacgggaaaccagaggccgctgtcccgcaggtgggcgttgagggctttgcgggtgacacctggctccaccaccacagagaagtcctcctggttcagctccaggattcggtccatatgcgtcaggttaacgcagacgccgccctggttggggcaggtgctaagaccactgcagacctgggtctctgacctggccacgtccccggaccacaccccgcgggtgtccccccagcagccagaccagacccccagaggcaggcagcccacgggcgggagcagacccaaggtgccgtgtgtggcgggggaggcagcca

SEQ ID NO: 29448 - DNA, 30 bp, Homo sapiens
  chr16:75269207-75269237
  hypo
gcagcattgcccaccgcgctgcgggcaaac

SEQ ID NO: 29449 - DNA, 30 bp, Homo sapiens
  chr16:75295355-75295385
  hypo
ggccctgcctgccccgtgctggcccgactg

SEQ ID NO: 29450 - DNA, 82 bp, Homo sapiens; identical to SEQ ID NO: 10801
  chr16:75299750-75299832
  hypo

SEQ ID NO: 29451 - DNA, 30 bp, Homo sapiens
  chr16:75300846-75300876
  hypo
gcccatgtggggggcgggcccttctgcctg

SEQ ID NO: 29452 - DNA, 30 bp, Homo sapiens
  chr16:75328778-75328808
  hypo
ctgaagcacaggcgcgcttgctaggagtga

SEQ ID NO: 29453 - DNA, 31 bp, Homo sapiens
  chr16:75464994-75465025
  hypo
taatctgtataacatacggttcagctgtcaa

SEQ ID NO: 29454 - DNA, 77 bp, Homo sapiens
  chr16:75495228-75495305
  hypo
ggcgtgagccacggcaaccggccaatttagtcatttagatgtctacctaaccctccgtaggtaaatggctaaactgc

SEQ ID NO: 29455 - DNA, 31 bp, Homo sapiens
  chr16:75513118-75513149
  hypo
tcgcgcaccaggtgcacgatgcgtaggttga

SEQ ID NO: 29456 - DNA, 26 bp, Homo sapiens
  chr16:75529877-75529903
  hypo
aaataagatatttccggccagggctg

SEQ ID NO: 29457 - DNA, 36 bp, Homo sapiens
  chr16:75549846-75549882
  hypo
caagagctaaactccgtctcaaaaataaataaataa

SEQ ID NO: 29458 - DNA, 139 bp, Homo sapiens
  chr16:75606234-75606373
  hypo
aaggtccagtggaagcgcgtggactccaaagcagatgggtggccaggtgtgctcatcagcccagccaattcatgagtcggtgtagaccccacagcctccatgacctgcccttggttggggcgaacgtaggttctctagg

SEQ ID NO: 29459 - DNA, 89 bp, Homo sapiens
  chr16:75622684-75622773
  hypo
ataggaatctggggggacacaaacattcagaccatagcagctctcatctttcatgaaggaggcacagagccgggcggcaccacctacct

SEQ ID NO: 29460 - DNA, 21 bp, Homo sapiens
  chr16:75658339-75658360
  hypo
gagtctcaatattttaaaaaa

SEQ ID NO: 29461 - DNA, 31 bp, Homo sapiens; identical to SEQ ID NO: 10808
  chr16:76507679-76507710
  hypo

SEQ ID NO: 29462 - DNA, 314 bp, Homo sapiens
  chr16:77227370-77227684
  hypo
cccagcccatcaccaccgccccagtcagaggccctgtcaagcacctctcggctctggagtcctgcagcccctgagaatagtcccacatgtagccctgagagtagctctggaggccagggcggggaccccagtgatgaggagtggcgcagccagcggaagcatgtgtttgtgctgagtgaggctggcaagcccatctactcgcggtatggtagtgtggaggcgctgtcggctaccatgggtgtaatgaccgccctggtgtcctttgtgcagagtgcgggagatgccatccgtgccatctacgctggtgagcaaac

SEQ ID NO: 29463 - DNA, 581 bp, Homo sapiens
  chr16:77228258-77228839
  hypo
agggcccactgttgctcgtggccatgtcacggacttctcagtcagcagcccagctgcggggggagctgctagctgtgcacgcacagatcgtgagcacacttacacgtgcaagtgtcgcccgcatcttcgcacacaagcagaactatgacctccgccgcctgctggctggttcagagcgcacactggaccgacttctggacagtatggagcaggacccaggagccctgctcctgggtgccgtgcgctgtgtgccccttgcccgcccgctgcgagacgcactaggtgcgctcctccgacgttgcacagcgcctggcctggcgctgtcagtgctggcagtaggcggtcgacttataacagcagcccaggagcgaaatgtgctggccgagtgccggctggacccagctgacctgcagttgctgctcgactgggtgggtgcaccagcctttgcggcgggtgaggcttgggcacctgtgtgcctgccccgcttcaaccctgatggttttttctacgcctacgtggcccgcctggatgctatgcctgtctgcctgctgctgcttggcacccaacgtgaagccttccat

SEQ ID NO: 29464 - DNA, 44 bp, Homo sapiens
  chr16:77229452-77229496
  hypo
cagcagagaggaggagcggcagcggctgtcggacctgtaccacc

SEQ ID NO: 29465 - DNA, 30 bp, Homo sapiens
  chr16:77232997-77233027
  hypo
acatagcacatgcacgtctgtcccagactt

SEQ ID NO: 29466 - DNA, 801 bp, Homo sapiens; identical to SEQ ID NO: 10809
  chr16:77246211-77247012
  hypo

SEQ ID NO: 29467 - DNA, 413 bp, Homo sapiens; identical to SEQ ID NO: 10810
  chr16:77247376-77247789
  hypo

SEQ ID NO: 29468 - DNA, 30 bp, Homo sapiens
  chr16:77248178-77248208
  hypo
aaacgttgggtctcacgtttgttgccatta

SEQ ID NO: 29469 - DNA, 202 bp, Homo sapiens; identical to SEQ ID NO: 10811
  chr16:77468255-77468457
  hypo

SEQ ID NO: 29470 - DNA, 21 bp, Homo sapiens
  chr16:77469028-77469049
  hypo
gggctcgtccgagcccccggg

SEQ ID NO: 29471 - DNA, 30 bp, Homo sapiens
  chr16:77752391-77752421
  hypo
ttacaaatatcagagcgaaatttcccttgt

SEQ ID NO: 29472 - DNA, 138 bp, Homo sapiens
  chr16:77752741-77752879
  hypo
ttataaatatcacagcgatatttcgctgatatcacagtgtgtaaccactgggtattgtaaatatcacagtgatgtttcaccaatatcacaacgtgttactagtggatattggaaatatcacagcgatgttttgccaat

SEQ ID NO: 29473 - DNA, 641 bp, Homo sapiens
  chr16:77753303-77753944
  hypo
ttataaatataacaccgatatttccttaatatcatgatgtgtaaacactagatattataaatattgcatcgatatttcattaatatcatggcgtgtaaacactatgtgtgaacactggatattagaaatatcacaacatttcattaatatcacggtgtgcaaacactgtgtgtaaacaatggatattatgaaaatcacagcgatatttcattaatgtcacagtgtgtaagcactgtgtgcaaacactggatattatgaatatcatagcgatattttattaatatcgcagtgtgtaagcactgtgtggaaacactggatattatgaatatcacagcgatatttcgttaatgtcacagtgcgtaagcactgtgtgtaaatactggatattatgaatatcacagtgatatttcattaacgtaacagcgtgtaagcactgtgtaaacactggatattatgagtgtcacagtgatatttcattaatttcacacgggatattataaaaatcacaacgatatttaacatcatagtgtgtaaacactttgtgtaaacatcgggtattataaatatcacagcgatgtttcatcggtatcacagtttgtaaaccttggatattataaacatcacagcgatatttcatttat

SEQ ID NO: 29474 - DNA, 31 bp, Homo sapiens
  chr16:77762012-77762043
  hypo
cctcacacaagcagggcgctggtaggagatt

SEQ ID NO: 29475 - DNA, 1093 bp, Homo sapiens; identical to SEQ ID NO: 10814
  chr16:77822153-77823246
  hypo

SEQ ID NO: 29476 - DNA, 34 bp, Homo sapiens
  chr16:78159168-78159202
  hypo
tcatacaggtcttgggcggcgggtgcctgcagga

SEQ ID NO: 29477 - DNA, 30 bp, Homo sapiens; identical to SEQ ID NO: 10816
  chr16:79048507-79048537
  hypo

SEQ ID NO: 29478 - DNA, 104 bp, Homo sapiens; identical to SEQ ID NO: 10822
  chr16:79636190-79636294
  hypo

SEQ ID NO: 29479 - DNA, 153 bp, Homo sapiens
  chr16:80641601-80641754
  hypo
cagctttctctagtcatcttccggatgggttcaatactttttatccttattggccgctgcttctcgtttctttgaaagctatagatgttttgcgtttttgtggtgtttaggactttctttgaaagcagtgacgctaccctagagtatccatct

SEQ ID NO: 29480 - DNA, 42 bp, Homo sapiens
  chr16:80654736-80654778
  hypo
gccgctgcagaacacgctccccactgcgctgaggagcagcag

SEQ ID NO: 29481 - DNA, 65 bp, Homo sapiens; identical to SEQ ID NO: 10824
  chr16:80837506-80837571
  hypo

SEQ ID NO: 29482 - DNA, 26 bp, Homo sapiens
  chr16:81177463-81177489
  hypo
ctcccggtcaagagtcactttttaaa

SEQ ID NO: 29483 - DNA, 185 bp, Homo sapiens
  chr16:81315525-81315710
  hypo
atataagcccgtgaggcgagaattgtgttgctgtgctcacagcgtatcagcagcacatgacacaaaggctggcatagagaggtctgtgttccatacgccaaagtgcagaatgaatggacttgtccaaggagactcagctagagagtgggacagagtgcatttcaactgagcgcattggctgggca

SEQ ID NO: 29484 - DNA, 165 bp, Homo sapiens
  chr16:81323360-81323525
  hypo
tgtaggtgagattatcgcatctctacagatgaagagactgaggctccgagaggtcaagggactggcccagccaagggtagaaccaggttttctggtttgttcattcgtttgtttgttcgtttgttttgaggccgtgtttcactccgtcacccaggctggaatgca

SEQ ID NO: 29485 - DNA, 31 bp, Homo sapiens
  chr16:81453687-81453718
  hypo
ttctcaccgttttggtcgaaggtgtgggcag

SEQ ID NO: 29486 - DNA, 163 bp, Homo sapiens
  chr16:81492952-81493115
  hypo
ctgtgctgtgaccctgcgctgtgaccccgtgccgtgaccctgctccgtgacctcgctccgtgacctcaggcaccattatttggaatgggctctcagcccctgtcctaaccccagccaccaagctcccaacccaagcaagatggaaacccgccgttgggaggat

SEQ ID NO: 29487 - DNA, 129 bp, Homo sapiens
  chr16:81505738-81505867
  hypo
caggtacatcctcacccgccatctttgaaatctcacttattgcatttgtgtttctgatgtatatgtaactttgggcaagttgtgtgacgtctctgcctcagtttcctcgtctataagatgagattagca

SEQ ID NO: 29488 - DNA, 185 bp, Homo sapiens
  chr16:81533314-81533499
  hypo
gtggaggagactcagcttccccgtccagtcctttacccctcctttacccagcagcgccctctgaatctgaaacagttttgggggcggcagctccggtcctgcccagcaactcgcagttgttgcctgtggcattcagattcaagtctgggcttgtcagcccgggcgagactctcctattttggccc

SEQ ID NO: 29489 - DNA, 153 bp, Homo sapiens
  chr16:81557394-81557547
  hypo
ccaccaggtaaccctgaacctcgctcagacacagcttcctttagctaggagcctggatgtaacacccagctcatcccttggctccctccaaacgtcaaggcgtcttgaactaaaagccagcgcctgcacaccggcagaactttgcagctcctg

SEQ ID NO: 29490 - DNA, 836 bp, Homo sapiens
  chr16:81563918-81564754
  hypo
aaatcccagtaaaggtggatccggatccctcagggacctaggtgcagttcctgttcctcccgtctcgcctctgttgcgctgcaaggtggggtgtgtagtgagtatcactgtaacctgtacttttctaaagtcaaacagatttctcttggtgggaggacgtgtcttttgtgggatcggtgtagcccgtctgagtcagtgactcacctggcacccctggcagctgactttcctggcagttcactcgagtctcttgcctctgctcacaaaagcctgcgcctttattcagctttcctcaccgcttcccaaggcagagcagagcctctcccgcccgcctcccacatctctcccttagctgggtgcccgcgtggctgctacctccgaggcttctgtgtcaccgggtagtggaaatgtcaccgagtgtcagagcttcgagcctcctccagatccatccaaggtggcatcactaagtggcatttgtgtgctaggcacgtaccctcttttacatacattatcttcgatcagttcagcttcttctgcataaaaaagaaatttctctaccgtcccagggagaataattggaaaagcgagccctgagtactcagcccacccgcccttctcctgctgaactgtcgaacgtagccaccagctagcctgagcttgttctgatgtcttctgggatcgtcattgttatgggttgaactgtagccttcaaaaggcacgtttacgctgtagtctctgtacctgtgagcatgaccttctttggaaatagggactttgcagatgcgaccaagttaagatcatgctggaggtcatgcgggaggtcatgctggaggaga

SEQ ID NO: 29491 - DNA, 578 bp, Homo sapiens
  chr16:81565631-81566209
  hypo
aggcactaagtcgggcgctttattctgtagttctcctagcaatctggtgagctccactctacagataaggaaatcgaggccaaggacagctaaagaagcgaggtgcgcaaggtgcccaggtccgaagtgtttccgctgctttcagactgcagtcccagggctcaggagtccatgctttctgcgtatcttcacgctggccacggatcacctcatcattagatgtcgaagttgaacaagtggtgttcacattcggacgtgtgttaggtagaagtgtgtgtgcacctgcgtgtgcgtgtatgttccacacgctgatgcaggaggtatacgcacagatataattgtcttttagaagattgactatcactaattttgaaaaatttcctgaatgacctttcctgccaggccaatacattgagcccaacagataaatccctgaacttattcgcagtctctaagtacctttagaatcccgggggtcgccctgagcctccccagggactagcgctgttgccctcgctcagtctcgccaccacaggaggcctcggcttgcccagcagctgagtcgggagaacctttcc

SEQ ID NO: 29492 - DNA, 159 bp, Homo sapiens
  chr16:81580486-81580645
  hypo
tgctccgtagccacgcgtggcgaacagctcttgtactggagagtgccgatgtagaacattccctgcatcgcgagagctccctggatggtgctgggctgcaaaggccactcccccgggagtgcacagccttgcggtattaaagaccggcacatattctgt

SEQ ID NO: 29493 - DNA, 31 bp, Homo sapiens
  chr16:81596519-81596550
  hypo
tctgctgggatctgccgcgtcctcgagctga

SEQ ID NO: 29494 - DNA, 403 bp, Homo sapiens
  chr16:81626930-81627333
  hypo
tgtaggcttggttgagattggcgagaggtggtgttgtgcctagcctggggggttggagggcggggggagtttctgctctgcagccctgtgatgcgcaggtgccatcgggtctctgaccccaggccatcaagagctgtgcgacctgcttgccatccatcatgtggagctggtcggtcaccccatgcaccaggccgactccaagccggagctttcctctccgctcttttcggagtaatccgtggatgatggaggagcttggcaagcatttcagcaaagctcttttttcttgttgaggcttgaaagtaatcgcctccgtgtattgagtgcccgccgaccacctggcgcgtctgggcattgagctcattggccgctggcacaaatggatcctcgcctcacccggtgc

SEQ ID NO: 29495 - DNA, 172 bp, Homo sapiens
  chr16:81632869-81633041
  hypo
ccaggggagggagagtgtgaacggcatttgagatttcttctgggaccaaggcccaaaccggcccttctaggatcatatcgttacctgccactttgcgtttgctgtatgactttccgtttgtgagattaaaaagaacatgaaatattttgacgggccttccccaaatgagcat

SEQ ID NO: 29496 - DNA, 30 bp, Homo sapiens
  chr16:81685109-81685139
  hypo
agtccctacctggccggagtctaattcctg

SEQ ID NO: 29497 - DNA, 31 bp, Homo sapiens
  chr16:81730091-81730122
  hypo
gtgtgcagatcatggtcgcccttgtcaccgg

SEQ ID NO: 29498 - DNA, 30 bp, Homo sapiens
  chr16:81970155-81970185
  hypo
agggatgagaggaccgaaggctgcttggct

SEQ ID NO: 29499 - DNA, 31 bp, Homo sapiens
  chr16:82054048-82054079
  hypo
cacccgttcctgcattcgacaagcatttatg

SEQ ID NO: 29500 - DNA, 208 bp, Homo sapiens
  chr16:82172389-82172597
  hypo
tatcacacagggtgccctgcacgtagttagcttacctccagcttcttcacgccaacagtccaatcagcacacctgagccttctcttccgtgggtcttaaagcttttgcattcctctgcctgcctttgagtctctgcgcaaacgctagtgatggtggccgactcctttgctatagcaagctcagaatcgatagcctttgcttttctcct

SEQ ID NO: 29501 - DNA, 30 bp, Homo sapiens
  chr16:83541955-83541985
  hypo
ttctgtagtgtagtccgtgcatccgccctt

SEQ ID NO: 29502 - DNA, 454 bp, Homo sapiens
  chr16:83863589-83864043
  hypo
gcattctgccctatggcagtccggccaagggggtggcaccgcagagccaggagggcaatcccagttcacggtcaccaggctcaaccgcaggcaacgggctggttgcattcgtgtggcaggtcctggctcccctgttgtgtagacaggagcgcgcggtgagcggagtgtcggccacaaactcttgccctgggcgtggccatgtgacttggttgatccaatgggataagagcggggatgacagagcccgccccatcctaggtccctgcctgagatgctggagctgagcgtcccagccacgtgcgcatgctggagcggaggggctgtgcctggccagtgctgcgtatgggggggcgcctccgtttcatgtctggtcagtttagggacgccgcatcattgcagcaaaagcctgactccataccgctgagaaatcaccgtggctaatgcagaagctgaa

SEQ ID NO: 29503 - DNA, 30 bp, Homo sapiens
  chr16:83941416-83941446
  hypo
gtgttcaacaccaagcgtttgattaggttt

SEQ ID NO: 29504 - DNA, 151 bp, Homo sapiens
  chr16:83941758-83941909
  hypo
tggatggacatgaagcgccgcgttgggccctacagaaggtgttacttcttttctcactgttcgacccctggggagcccctggtcgttttgcacgtggcactgactggtgacatctccagcaacatccaggtacctgcgatggtcaattcgg

SEQ ID NO: 29505 - DNA, 30 bp, Homo sapiens
  chr16:83945963-83945993
  hypo
gagttgcaggtaagcgacacgcagggagcc

SEQ ID NO: 29506 - DNA, 42 bp, Homo sapiens
  chr16:83999490-83999532
  hypo
gccaggagggcctgtacgccatggggccgctggccggggaca

SEQ ID NO: 29507 - DNA, 34 bp, Homo sapiens
  chr16:84004406-84004440
  hypo
gtgctggtgggcagggcgccgtggctcacgcctg

SEQ ID NO: 29508 - DNA, 31 bp, Homo sapiens
  chr16:84061605-84061636
  hypo
gcacgccgactgattacgaggaagagaaatg

SEQ ID NO: 29509 - DNA, 30 bp, Homo sapiens
  chr16:84093195-84093225
  hypo
tgattggttcctcccggacaatgtgtgttt

SEQ ID NO: 29510 - DNA, 108 bp, Homo sapiens
  chr16:84132656-84132764
  hypo
cattcagcatacttgagggaacgaaagacttttcgttggggcgtgacccgtttgatgtttggatgatcttcaagtgttagcagccccgctttctgtttttcttttatc

SEQ ID NO: 29511 - DNA, 31 bp, Homo sapiens
  chr16:84163868-84163899
  hypo
gaccgctgctgaagtccgcaactataatatc

SEQ ID NO: 29512 - DNA, 30 bp, Homo sapiens
  chr16:84213818-84213848
  hypo
gagcaggggctgcacgcagctgggccgggg

SEQ ID NO: 29513 - DNA, 31 bp, Homo sapiens
  chr16:84229845-84229876
  hypo
ctgtttgcagggcccccggtggccccttccg

SEQ ID NO: 29514 - DNA, 30 bp, Homo sapiens
  chr16:84423945-84423975
  hypo
ccatacgtgcacttcgtggtcccctcggga

SEQ ID NO: 29515 - DNA, 203 bp, Homo sapiens
  chr16:84483541-84483744
  hypo
ttaagtgcctgtgtgaggccacgccctgaatccccaccgggcagaggagccggcccaggtgacacagccctgcctagtgcagccagcgccttcgcccggatgtctgctgcggagcgtaatgacgcgttccagggacttgctccaggccttgcgggagagcgtaatgagaacgggtcagtggcggaggagcagtgagacctttt

SEQ ID NO: 29516 - DNA, 30 bp, Homo sapiens
  chr16:84485584-84485614
  hypo
catcattgaccccccgagagttggcgtgaa

SEQ ID NO: 29517 - DNA, 85 bp, Homo sapiens
  chr16:84535395-84535480
  hypo
ggacacgtctcagaacggctcaaggacagcccgtctcctttgagagccccgtgccaggcaagataaagaaatggcaatggtgtgg

SEQ ID NO: 29518 - DNA, 143 bp, Homo sapiens
  chr16:84535779-84535922
  hypo
ctggtgctgacagcgcacatcaaggttgcttgtaccagtggagctcgactggagcagtttcgtcccccaggggcatttggcaatgactggaaaagtgtgtggttgccacaactgggggaggggagtgccgttggcatctagca

SEQ ID NO: 29519 - DNA, 30 bp, Homo sapiens
  chr16:84593155-84593185
  hypo
aggtggacaggcgcacgggatagctgtcct

SEQ ID NO: 29520 - DNA, 744 bp, Homo sapiens; identical to SEQ ID NO: 10836
  chr16:84651071-84651815
  hypo

SEQ ID NO: 29521 - DNA, 22 bp, Homo sapiens
  chr16:84670542-84670564
  hypo
cggccacattcacttctactac

SEQ ID NO: 29522 - DNA, 30 bp, Homo sapiens
  chr16:84695178-84695208
  hypo
tgcaggttcacgtacggccacgcgggcacc

SEQ ID NO: 29523 - DNA, 31 bp, Homo sapiens
  chr16:84701645-84701676
  hypo
cctttccttgtcccttcggcaggtcagcatc

SEQ ID NO: 29524 - DNA, 186 bp, Homo sapiens
  chr16:84749466-84749652
  hypo
gggctagtttcccccacgatggcggaatggccacagcagtttcaggcttcacatttgggcacagcctccgtcacaccagcctgaccaagagagtgagtgtgcatcccagaattttaggcagtgtcctgagcttcttgccctttgggtcgtccctcaaccagagcactgtggcgaggagggtggtat

SEQ ID NO: 29525 - DNA, 144 bp, Homo sapiens
  chr16:84780617-84780761
  hypo
acagggtcaggagcatcaagacgccactaggcggcaggacgtttcagttccactagaatcttgtgggaccatcatacgtgcggctcattgttgaccgaaatgttacgccgcgcgtgactgtacgtacctaagaagcagaagctg

SEQ ID NO: 29526 - DNA, 30 bp, Homo sapiens
  chr16:84799780-84799810
  hypo
agaaacctgcgctgacgccctcagaagctg

SEQ ID NO: 29527 - DNA, 31 bp, Homo sapiens
  chr16:84800117-84800148
  hypo
tgtgaggacaccccctcgggatgggagagaa

SEQ ID NO: 29528 - DNA, 64 bp, Homo sapiens
  chr16:84812704-84812768
  hypo
gtgtgcgcccagtgcccgcttcgtaggacaccacctcacactcacttcccgcctctctttagtg

SEQ ID NO: 29529 - DNA, 362 bp, Homo sapiens
  chr16:84813521-84813883
  hypo
gtttaaaggtgtgtgcgtgtttctttgaatgcgaatgccttttcgggtaactgaaattcatgggggcatgagtttgcctgcagaattaaaatctgcccttcgatcagctcgacgtgtttgtggaagctgaaccaccactcaggttatgcttgtttagtattttcaaatggattagtgatttgggtacacgaagtttttgactcttcgattggcagaaaggaggaggttttctccccttcccctcctcatcccttgtttctatagcccaccgttttcagtatcaccaaaatagttgctgtaggtcaaggctaaatgctcttcagttgagtgccactggggcggctgagcggtgcctccagacg

SEQ ID NO: 29530 - DNA, 30 bp, Homo sapiens
  chr16:84906600-84906630
  hypo
tctagcatatgccgcgccgccatccactac

SEQ ID NO: 29531 - DNA, 31 bp, Homo sapiens
  chr16:84912366-84912397
  hypo
ccgcaggtctctgggacgtccccactttata

SEQ ID NO: 29532 - DNA, 7 bp, Homo sapiens
  chr16:84955095-84955102
  hypo
gcgccat

SEQ ID NO: 29533 - DNA, 183 bp, Homo sapiens
  chr16:84965069-84965252
  hypo
gctggcctcccagccccgggccacctccctctgtgctatcggagagaaacaagcatctatcttgtttaggatcgtgtactacagggcctctttttcaccacagcttacacagtgactagctcagacccttgggcctctgtgtctgagatgtgcctccggtgaactccccgggcctctgcctcc

SEQ ID NO: 29534 - DNA, 31 bp, Homo sapiens
  chr16:84974955-84974986
  hypo
tccccaaccttaccctcgggcctcagtgctg

SEQ ID NO: 29535 - DNA, 31 bp, Homo sapiens
  chr16:84987807-84987838
  hypo
catagggagggtaacccgggtcatccaggtg

SEQ ID NO: 29536 - DNA, 315 bp, Homo sapiens
  chr16:84998379-84998694
  hypo
attaggtgtggtgtggccacacggtgagggacaggaaaggatggagctccgtgactgttgatagggacagatctccaagacatgttgtgacgtgcaaaacagcaaagtgaatgtttgctaccattcgtgcacaaacacatccgtgagcaaacgtgtgtatgcacgcacacacacctgttggcttcaaacgtgtgtgtgcacgcacacgcacctgtcagcttgaaatgtgtgtatgcatgcacaggcacctgtcagcttgaacatgctcagagaccgtctaggccccgcgtgggtaccacccgctcaaaacatgaa

SEQ ID NO: 29537 - DNA, 159 bp, Homo sapiens
  chr16:85001584-85001743
  hypo
tgaagtctggacacgcgctaccacatgggcagaacctgaaagcataatgccgagtgaaagaagccagacacagaaggacacgttttgcaagattccgtttctatgaaatgtccagaacagacagattcatagaaacagagtagacgagtcggggccagg

SEQ ID NO: 29538 - DNA, 561 bp, Homo sapiens
  chr16:85007512-85008073
  hypo
tcaggtgtgcgcctccgtgttcgagtctccttctcatttccgcgtgtctggaatgccaccaggagccccaaggcacagcacgtgcgaggcagggctgcggcacacactgaccatctggcctctgaaaggtaagcgaggcagggctgcggcacacactgaccatctggcctctggaaggtaagtgggcattttggttccctcagtgcaaatgttagacaaatttgttgaatgaattaaaatcaaattgtaggtacttgagattctgaactgtggagattttgaaacattgtttttatttcaacgtgcactaaaaaaaggactaagtaaaacgatgggagtcgaattaaacattcaacaagcaacagtactcactgggcaacatttgtgagtcgcgcttgagtgcccaggtcacttgtcatgggcacaaaagcatttagagtttctggaaactgtttgggagtgaccttaacagcctggggctgggcccacgaagcacggaaaggcaccccctgaaaacaccaccatccaggaagaacgggcgctttggaagccatttgagaa

SEQ ID NO: 29539 - DNA, 144 bp, Homo sapiens
  chr16:85008290-85008434
  hypo
aatctcggaaactggcgtctccaggatcacccacactttgtccctctggctgtgacgcagctcttcccccaacggcgcacacgcttctgcggtgaccaagtccacttccaaaccccctgcaggtttgctcgcttggctaggacg

SEQ ID NO: 29540 - DNA, 389 bp, Homo sapiens
  chr16:85010034-85010423
  hypo
gtgaggggggccccccaaagacggacttcatcccttcccatcgcagcctccgctcccatgtgggcttctcacttttcaatcgctcgatctcctggaagcagaaagaaaagcaagtggcagcggctccaggaagctcggcagaccccaccaagcctcagaatcacaccgtgctcaagcacagtgtgggctcgatggagggtaggtgagtgaactctccttcccagctctgccccgatccagaccccgtggcctctgtgagcccagcccggctgcagccacgtggccagcccagactaccacaatggccctcccagccaggcaccaacatttgtcgctcgttagttactgtgtacagacatttactgagcgccactccaggcctgcagagc

SEQ ID NO: 29541 - DNA, 30 bp, Homo sapiens
  chr16:85018907-85018937
  hypo
gggcagttaggcttcgcagagcatgcttcc

SEQ ID NO: 29542 - DNA, 29 bp, Homo sapiens
  chr16:85028921-85028950
  hypo
accacacaagcaaaaactttccgtttcag

SEQ ID NO: 29543 - DNA, 124 bp, Homo sapiens
  chr16:85033821-85033945
  hypo
aatacccagcacaggtatgtacggccggtgtgatagtgcaagggtgcggcacaaggcaagtcccagcgagcagtggagtcacttttcttcctggataacccgcgttcctgagtccagaccctgt

SEQ ID NO: 29544 - DNA, 14 bp, Homo sapiens
  chr16:85043916-85043930
  hypo
gagccaccgcgtgc

SEQ ID NO: 29545 - DNA, 256 bp, Homo sapiens
  chr16:85083542-85083798
  hypo
cttaagagtggaaggccaagtcggtctctgtccgagttgaattcagctgtcccggagtcagccgctgtgtccttttgtgaaagaagtacagcccgtcacccagggagggcgcgccttatggcgggttctaacacgcagttgcaatggaaccaactcagtcaatggtgatcgctgatggtaaacaacccctcaccctgcactgtctcggtgcctgaaactcaagggcccagccctcgactcaggaattacctaggac

SEQ ID NO: 29546 - DNA, 30 bp, Homo sapiens
  chr16:85147131-85147161
  hypo
cttccctctgtgaccgatccccaggtgccc

SEQ ID NO: 29547 - DNA, 30 bp, Homo sapiens
  chr16:85196742-85196772
  hypo
atgccgggtgccttcgtggcacttctcggt

SEQ ID NO: 29548 - DNA, 174 bp, Homo sapiens
  chr16:85214270-85214444
  hypo
cacagtggggaagtgccggcgccgggatccgcacccaggctgcctggctccagcgtctgcactctgccatgctcatcacacccatcctgaatgggaaggcaggctgggagggagatgaaggtagatggggtcaggaagcctccctggagaaggggtatccgatgagttcttagg

SEQ ID NO: 29549 - DNA, 127 bp, Homo sapiens
  chr16:85245558-85245685
  hypo
gcatcacttgaaccatcgcccatcaaatggtttctgactgggggaggactcctgttacaggctgagccatgtccctcaactttgtgtgttgcagccctgacccccagttcctcggaatgtgcctgtg

SEQ ID NO: 29550 - DNA, 31 bp, Homo sapiens
  chr16:85285189-85285220
  hypo
gggcaggggctgggcccggggcctgcctgcc

SEQ ID NO: 29551 - DNA, 30 bp, Homo sapiens
  chr16:85318405-85318435
  hypo
gcctgctccgctgccgtcctggcagtcagt

SEQ ID NO: 29552 - DNA, 139 bp, Homo sapiens
  chr16:85327236-85327375
  hypo
cagggtgtcagcgggacggcttccttctgctggagctagagtgggaatctgtccgggcctttcttccagtttctggcattgcccacagtccttggggttccttggctcctagaagccatctctccgatcactgaacttc

SEQ ID NO: 29553 - DNA, 45 bp, Homo sapiens
  chr16:85332744-85332789
  hypo
gtccgtatgtttgcaccgtcttgtctttttcggggaaaatacatt

SEQ ID NO: 29554 - DNA, 210 bp, Homo sapiens
  chr16:85336378-85336588
  hypo
aattcttggccttggccttgtcgaggtgcggtgtgctgggcagggtgggtgaggtcagcggctgtcacaagtaaccctgcgtcttcagtggcgtgatgcagccgaagcgcattctccttcaatcgggtccaacggggtgctcagtgggtcttccacaaggtgactcggggtccggtttcccggagcctcggcctccccactgctagtgat

SEQ ID NO: 29555 - DNA, 183 bp, Homo sapiens
  chr16:85364086-85364269
  hypo
tgttagagccattgttcgtggtcgcatgttacagcagccgcagaacacagagacagcccctcgcagcaggcgcctcacctggggcactgtgaggggctgcagcgccccactgccatgtcgtctgcctctgccgatccaggaagcgtgcaggtgggcaggggtgggcaccggagggcatgatgc

SEQ ID NO: 29556 - DNA, 30 bp, Homo sapiens
  chr16:85365429-85365459
  hypo
aggcatgagtcaccgcgcccagctactccc

SEQ ID NO: 29557 - DNA, 30 bp, Homo sapiens
  chr16:85399727-85399757
  hypo
ggcgggactgcgctcgggtactgggctccg

SEQ ID NO: 29558 - DNA, 237 bp, Homo sapiens
  chr16:85407691-85407928
  hypo
gtgttggtgtgtgcacgcgtggccctcagtgtgtagtgtgtgtcagtgtgcatgtgcgtggttgcatgtggccctcggtgtgcagtgtgtgtcagtgtgcctctgtgtgttcacgcgtggccctcggtgtgcagtgtgtgtcattgtgcctgtgcatggtcgtgcgtggtcctcggtgtgcagtgtgtgtcagtgtgtatgtgcgtggttgtgtgtggccctcggtgtgcagtgtgt

SEQ ID NO: 29559 - DNA, 30 bp, Homo sapiens
  chr16:85410510-85410540
  hypo
cacacccggccccgcgttacccgacggccc

SEQ ID NO: 29560 - DNA, 112 bp, Homo sapiens
  chr16:85417809-85417921
  hypo
caggcttcctgatgggggccccgagaccctctccgagaggagcaagaaacacacgtgccttgctctgtgtgggtgcggccgggtggcgagcggcccatcctgggagggctgg

SEQ ID NO: 29561 - DNA, 117 bp, Homo sapiens
  chr16:85423784-85423901
  hypo
gtccctgaaatctgggacagtcgctggcacacagtaggtgctccaaaatactcacggcctgtagctttgtgcggtcacaggcacggttctgctggcgttggggtgggggtcatcact

SEQ ID NO: 29562 - DNA, 172 bp, Homo sapiens
  chr16:85426316-85426488
  hypo
gaaactgagagccagccgcatatcacagccaggacttgtggaagggactggaacccagaagtccagcctccttgacccttagggagcgttgcctcagtgaagatggagcctgaggctggagaggcggctggggccaggttggctgaccccgaatgtgcggggatgccctccg

SEQ ID NO: 29563 - DNA, 30 bp, Homo sapiens
  chr16:85428080-85428110
  hypo
tttgggtggttcctcggatgagcggcttga

SEQ ID NO: 29564 - DNA, 49 bp, Homo sapiens
  chr16:85432510-85432559
  hypo
catgtataatgcatgtcgagtgtgtatccacatgcgttgtatgtttgtg

SEQ ID NO: 29565 - DNA, 202 bp, Homo sapiens
  chr16:85465096-85465298
  hypo
acacttgcagagcgcgtctctgatccaacgcctgctgtccccagatctgatcctttgagcatcagggctggaaagtcgcctccggggtggtggccgtggcagcctcagaggtttctgcccgtgctccccgagacacttggccatggcacctgcctcccgccattggccttccgtcctccttcggagcgaagctccacccagc

SEQ ID NO: 29566 - DNA, 199 bp, Homo sapiens
  chr16:85485694-85485893
  hypo
cccgccagagagacccgtgtccggcgcgaataattggattttaatgaaacgaatgggagtgctgaagccgtttgccaccctggcctgcatcggggccccgcaattaagccgattatgttttgagagtcaagctgtctgactcctcgcgtccctaatgtgatgatgtttgatggccctgccagcgcggttatttatttat

SEQ ID NO: 29567 - DNA, 218 bp, Homo sapiens
  chr16:85497296-85497514
  hypo
gaactcctggcatcaaggcctcgcatcactggcacagttaggcagcgagagggtaagagtcacagagcccgccgagggtggggagcgccatgagtcccatcggagagagggtgagcgggactctgaggcctggggcagtgccacaggtgcgggtgtgaagctggcggtgggccactgaggtcctcaggctgaggggcggccagagtgagggatggaga

SEQ ID NO: 29568 - DNA, 539 bp, Homo sapiens
  chr16:85517148-85517687
  hypo
gctcccttctcttccaccaggcgatgcccaggcccccggccactgtctccgccctcttggtaggccctgtgggatcaagtgtctccgaggcggcgggctgagacggatgggcctcctggccgcacacctgagaacatgctggcaaaagcgtttgcttaattaattgactttgagcgagggagcccgtccccgtgtaaacctagcagcaggctcggtgcttgccgccgggatgctgcgaatgcaaggctagactttaaataagggtgtgattattgtgtgaataattgaagaatgttggggagcttgcagtcctcggtgtaccgtcccctgccagcaggcctctgggccctgcccgtcacgggtacaactctgctgccatcctctcagctgggacagtgggggactttcagacctaagcgttggaggaaacctcctcagcgaccctccccgagaggtgcgtccctgttttccagatggggaaactgaggcagagctggggttaccccagaagaccctcagattcgcggtaggatgacgtc

SEQ ID NO: 29569 - DNA, 42 bp, Homo sapiens
  chr16:85523183-85523225
  hypo
cacccaccccacaagccgtgcttcattcgtgaagttgctacg

SEQ ID NO: 29570 - DNA, 31 bp, Homo sapiens
  chr16:85529601-85529632
  hypo
gggacctgcctcagagcgtcacagggaacct

SEQ ID NO: 29571 - DNA, 108 bp, Homo sapiens
  chr16:85535587-85535695
  hypo
tcacaggaggctcagccggggagccagatgtccaccaagagctctctcttgcaggaagatcccgggaggaggggagtgggtgtcaggggcactcgatgggggtccgtg

SEQ ID NO: 29572 - DNA, 30 bp, Homo sapiens
  chr16:85537512-85537542
  hypo
cgcttaattaggaccggcagtgcggaagat

SEQ ID NO: 29573 - DNA, 142 bp, Homo sapiens
  chr16:85541385-85541527
  hypo
ggggctgggatgtcagcgtgtcaattttcgcaggacacaaatcagcctataataggtgtcattttccctctttttcaatttgaaatggatgcgtcatattcatcagaagagttgcgagcacacgcctcgtgtgtttctatgg

SEQ ID NO: 29574 - DNA, 30 bp, Homo sapiens
  chr16:85543194-85543224
  hypo
tgactgtggagtgacgttgaatggaaaggc

SEQ ID NO: 29575 - DNA, 25 bp, Homo sapiens
  chr16:85550409-85550434
  hypo
ttttttttttttgagacggagtctc

SEQ ID NO: 29576 - DNA, 752 bp, Homo sapiens; identical to SEQ ID NO: 10841
  chr16:85589832-85590584
  hypo

SEQ ID NO: 29577 - DNA, 284 bp, Homo sapiens
  chr16:85616218-85616502
  hypo
ctgacacccagttcccccttacgcagccgcctggggtgcctggagctcagtcctccccgtgttgataaattgagcttctcttctccacggttcagggcgtcggggtggggacggggccatcctgcacaaccccccctcgcctcttaatgccttttcacccctgagagcctgtctgcacagcctgcggttggtcggccgccttgtcatttagctgttccgagccagtgatcgggaggcagcacaaactgtggcatttgctgagcgtaaaaattcaattaattcca

SEQ ID NO: 29578 - DNA, 30 bp, Homo sapiens
  chr16:85618191-85618221
  hypo
cctctccccgcacgcgttctttctcagatg

SEQ ID NO: 29579 - DNA, 30 bp, Homo sapiens
  chr16:85619959-85619989
  hypo
tggatgcctttgtccgtgaggttcccgagt

SEQ ID NO: 29580 - DNA, 35 bp, Homo sapiens
  chr16:85661741-85661776
  hypo
ggcctcaagggagctgcgcccggctgctgcggccc

SEQ ID NO: 29581 - DNA, 86 bp, Homo sapiens
  chr16:85671176-85671262
  hypo
tgctgtgcccctggcgggctcgctgtgcttctcacacacccttcgcctctggtggatgagaactgagcctccggcttgcccgggtc

SEQ ID NO: 29582 - DNA, 319 bp, Homo sapiens
  chr16:85671745-85672064
  hypo
ttcgccatctgactgcgattgcctccgcgtctctcctctcattgtgtctcaagggtgtagtttaaaaattcaattcagacgaagctgtggcatgcgctgccctgggagaaaggctgggaaggagaggaagaggaggccctcgctgggatttatttttctggaggcgctgagacgtcttctcttcttcaaagctcagtcacccgcccaccagcgcgggccagacacccttccccagggccagcctgaccctttaacctactcacctactcactgccgaggctggggcgctttgggcaagggcagacgcttgcgaatcgcc

SEQ ID NO: 29583 - DNA, 30 bp, Homo sapiens
  chr16:85672903-85672933
  hypo
ccctcctcggaatggcggcctggccaccgc

SEQ ID NO: 29584 - DNA, 436 bp, Homo sapiens
  chr16:85673576-85674012
  hypo
acagttgggggcgatcgtgctgcgggcctttgctctgggaggccggcgctttgggaacagggtggctccagagccttcccaggtgggctggagagccgccgtctggaggacagttctgagcaggtgctcctggctggcgaggaagccccacctcaccccagcaccacccatggtgcagggagctggggttgggcgcacaagagtctgagcccgttcccaccccgcctccttgtcaccagcccggtggccgggactcatggcttccctgcccacacttcgctcccttaacaccggccgggggctcatggtacctgccctggaagctgccagaggcctctccaagcaggtgttggccgctgtgttacctgcggcaggggtggcccagccacccatagcccggcttgggccacagggacggggccgacaggtggtggca

SEQ ID NO: 29585 - DNA, 65 bp, Homo sapiens
  chr16:85674236-85674301
  hypo
catcctcatgagctgccgtgggaatgcttccaccgtggagccggcctgggcgggggagaggctcc

SEQ ID NO: 29586 - DNA, 31 bp, Homo sapiens
  chr16:85678804-85678835
  hypo
gtctggggttgggtcacgcctcaggggcagc

SEQ ID NO: 29587 - DNA, 31 bp, Homo sapiens
  chr16:85682502-85682533
  hypo
aacgtgagggtgacagcggcaccctcctgga

SEQ ID NO: 29588 - DNA, 159 bp, Homo sapiens
  chr16:85683112-85683271
  hypo
atgtctgtgggcccctcgctctgcactgactggggcctgcctgtgtggaaggagctggcactgggagctgctcttctgccgctgcctggggcctgtgcgccctcaggtgggtacctgcagctctcccggccccccacccctggcgcgcagcctggagtg

SEQ ID NO: 29589 - DNA, 491 bp, Homo sapiens
  chr16:85684057-85684548
  hypo
acccagccactgccttgaccccgaccagagctcctggcctagacccaggacgcctcgaggggattccagcgccttttccggcgactcctccgctctgagctggtccctcctcggagggtccttaccgcctcgggaacattgagctaccccagagcagagcaggggcgcgacaggcccgccccagcagtgtaccaccgcggcgcttaatggaacacggtgccgccagggaaggcgcggggccggcagctggattagcaggtgatgtacggctcctcgctcgggcacagaggctcagcggggcatttaatcctctcggagtggggaggcagagagaggattcccctcccacccggcccaaagctgtggccatgagtctccgaggctgcggacgtgggtggcagttgccgggccggaggcttctcggccccttctcggggtcacccctctctcccaggtgtagtgggagctgcgagaggagaaatgagatgaaa

SEQ ID NO: 29590 - DNA, 31 bp, Homo sapiens
  chr16:85694658-85694689
  hypo
tgtgtcatcttaggagcggcaggcagccagg

SEQ ID NO: 29591 - DNA, 30 bp, Homo sapiens
  chr16:85696642-85696672
  hypo
gcccacctccgttgcgtggccgagcagccg

SEQ ID NO: 29592 - DNA, 48 bp, Homo sapiens
  chr16:85699440-85699488
  hypo
ttacttaaatgttccccgggtcttggttctttgcgctaggtctttgtt

SEQ ID NO: 29593 - DNA, 30 bp, Homo sapiens
  chr16:85699739-85699769
  hypo
aaggccaggctgagcgaggcccctggaggc

SEQ ID NO: 29594 - DNA, 80 bp, Homo sapiens
  chr16:85704415-85704495
  hypo
acgtttatgtatttatcggtacaattcaaagggctgggagcattgtggtccacaggagaggccttcgctggctgcactgg

SEQ ID NO: 29595 - DNA, 30 bp, Homo sapiens
  chr16:85711739-85711769
  hypo
gagctccagaaccacgagtacctcatcacg

SEQ ID NO: 29596 - DNA, 30 bp, Homo sapiens
  chr16:85741445-85741475
  hypo
caggctggattcctcgctggtcctgccacg

SEQ ID NO: 29597 - DNA, 30 bp, Homo sapiens
  chr16:85877228-85877258
  hypo
gtgaactctccccacgcggcagtgttgctg

SEQ ID NO: 29598 - DNA, 861 bp, Homo sapiens; identical to SEQ ID NO: 10843
  chr16:85932119-85932980
  hypo

SEQ ID NO: 29599 - DNA, 149 bp, Homo sapiens
  chr16:85966672-85966821
  hypo
tggtggacacatgggtgttcccggggatcagaaagggggcccacaccgtgctgcagagctggcatctgctcgagtggctgctgcctgcagctaagtattttgaatatccgcctgcctactctgtgtgcgtcctcttggtaaatagaagc

SEQ ID NO: 29600 - DNA, 485 bp, Homo sapiens
  chr16:86101895-86102380
  hypo
cagggtcatgtcacacgtatttcatacggttattgtgggcattaggcacagtaaccgaagtttcaggagtggaacgttacgtgtgagtagacgttagcacagtctctcgtttgtggggtgggaacagggtcttgtcacaggtatttcatacagttattgtgggcattagacacagtaaccgaagtttcaggagtggaaccgctacgtggaagtagacgttagcacagtctctcgtttgtggggtgggaacagggtcatgtcacacgtatttcatacagttattgtggggattagacacaaataactgaagttttgggagtggaactgctacgtggaagtaggcgtgagcactgacatcgttaacattatgtcgtcgctctcaaaatgctaaatgtagttgctctcggagccaacaattccccttctgggtttctgggagatgcgaaaacaagaggaacgcaaatatccatcgtcccagaaactcg

SEQ ID NO: 29601 - DNA, 30 bp, Homo sapiens; identical to SEQ ID NO: 10846
  chr16:86542407-86542437
  hypo

SEQ ID NO: 29602 - DNA, 156 bp, Homo sapiens
  chr16:86560977-86561133
  hypo
ctattccctttttaatggaaacgatggcctccgagtccctttgtgactcctgtatgaacatgtccaccacggctagcacgtgtctcaagatgctgatgttcggcagctccttgttgcctgctcgtatctgtagacgaggcccagactcctgccaca

SEQ ID NO: 29603 - DNA, 30 bp, Homo sapiens; identical to SEQ ID NO: 10847
  chr16:86567476-86567506
  hypo

SEQ ID NO: 29604 - DNA, 203 bp, Homo sapiens; identical to SEQ ID NO: 10848
  chr16:86600311-86600514
  hypo

SEQ ID NO: 29605 - DNA, 887 bp, Homo sapiens; identical to SEQ ID NO: 10849
  chr16:86600888-86601775
  hypo

SEQ ID NO: 29606 - DNA, 30 bp, Homo sapiens; identical to SEQ ID NO: 10850
  chr16:86602068-86602098
  hypo

SEQ ID NO: 29607 - DNA, 30 bp, Homo sapiens
  chr16:86618820-86618850
  hypo
ctttgcaatgtgcagcggaaagtattatga

SEQ ID NO: 29608 - DNA, 30 bp, Homo sapiens
  chr16:86735107-86735137
  hypo
ccccaccgcagcctcgggtcctgttcctca

SEQ ID NO: 29609 - DNA, 30 bp, Homo sapiens
  chr16:86903434-86903464
  hypo
ctgcgtagaggtgacggcggcgcaggcgca

SEQ ID NO: 29610 - DNA, 197 bp, Homo sapiens
  chr16:87022631-87022828
  hypo
aaaatgctatgacacaggtgacgtgcgtgacgcaccatccagagtgctgctgctgctctgcggggctcctgtgacaccccgacctcccccggcccccggcactgggggcaggtcttgatagaggcagagctgcgctgtgtaactggtggcctcgcaaagatgtcccaagagagggcggcccccaggttggctgtagg

SEQ ID NO: 29611 - DNA, 176 bp, Homo sapiens
  chr16:87092491-87092667
  hypo
ggttggaaaaacactccagggcgaagggccagcgtgtgcaaaagcaccgaagcatgaccgagcgcgggcattcccgccagccaccagtgggccacgcatcccaacatgtgagtgccgcaaggatacaagtgcctaatgtgaacctccaagtggacgatcattcagtactgactttg

SEQ ID NO: 29612 - DNA, 30 bp, Homo sapiens
  chr16:87219427-87219457
  hypo
gacagtcctgactccgctgcttggccggaa

SEQ ID NO: 29613 - DNA, 30 bp, Homo sapiens
  chr16:87219764-87219794
  hypo
cacggggctccctccgtgttgaagatgtcc

SEQ ID NO: 29614 - DNA, 38 bp, Homo sapiens
  chr16:87310541-87310579
  hypo
agagcaaaaacagctccgcaagtcgcctgcccaagcat

SEQ ID NO: 29615 - DNA, 31 bp, Homo sapiens
  chr16:87366016-87366047
  hypo
agcacgtgctgtgactcgcaaactggctctg

SEQ ID NO: 29616 - DNA, 30 bp, Homo sapiens
  chr16:87367706-87367736
  hypo
ccggccacgaccctcgcccgcctcgtgccc

SEQ ID NO: 29617 - DNA, 30 bp, Homo sapiens
  chr16:87368190-87368220
  hypo
tgaaaggcagagctcgggagccgagccctg

SEQ ID NO: 29618 - DNA, 105 bp, Homo sapiens
  chr16:87391986-87392091
  hypo
cagaagccaaagctcgcaggaggtacatacggcaggtgtaaacgtctctgtacgccatgtgctcataatcagggagaattttcacaaaacgtcccgacttcacgc

SEQ ID NO: 29619 - DNA, 31 bp, Homo sapiens
  chr16:87404802-87404833
  hypo
gtgaccactgagccagcgtagctcctgctca

SEQ ID NO: 29620 - DNA, 30 bp, Homo sapiens; identical to SEQ ID NO: 10852
  chr16:87418082-87418112
  hypo

SEQ ID NO: 29621 - DNA, 30 bp, Homo sapiens
  chr16:87443525-87443555
  hypo
ctcgattcagaccacgtgtagctgccctgg

SEQ ID NO: 29622 - DNA, 30 bp, Homo sapiens
  chr16:87444918-87444948
  hypo
gaaatcatcatggccgttttagacccaaca

SEQ ID NO: 29623 - DNA, 48 bp, Homo sapiens
  chr16:87447845-87447893
  hypo
cggccctctctgtgtacgagtaacccacctgcccggcacacgggccct

SEQ ID NO: 29624 - DNA, 1093 bp, Homo sapiens; identical to SEQ ID NO: 10854
  chr16:87525991-87527084
  hypo

SEQ ID NO: 29625 - DNA, 182 bp, Homo sapiens
  chr16:87594928-87595110
  hypo
ctttaaaaatcattgccaaagcgtttgctcctaaggattggaaacgaccatcggcaggggacgggttaaaccgattaaggtgactgacaccgcgcagtgatgcgcagccagtgtaacggccctgtggaggacatctaggtgcatcgtctggtagaaggtacgagggcagacagcatggtctg

SEQ ID NO: 29626 - DNA, 44 bp, Homo sapiens; identical to SEQ ID NO: 10856
  chr16:87635769-87635813
  hypo

SEQ ID NO: 29627 - DNA, 701 bp, Homo sapiens; identical to SEQ ID NO: 10857
  chr16:87636626-87637327
  hypo

SEQ ID NO: 29628 - DNA, 31 bp, Homo sapiens
  chr16:87670945-87670976
  hypo
ctccccggccatcatccgtctgtctctggat

SEQ ID NO: 29629 - DNA, 311 bp, Homo sapiens
  chr16:87681105-87681416
  hypo
cccatgctccctggcaggttgcggcttgccttctgcactggcggagtccgagctgactccgtcccttcgcccgagcgggcgtcgcggggagggaggtggttcctgcttccgcatgcgcacaactggggtcttggatcgtagctcctttgtgagaaagggactggctcacccgccatgtcctgctgtccacacacacggctctgcacaccactcacggcctcctcaccgctgtgcacagccagcacgtccatgcgcacctgtggagccagggtgtacggctgcacaggtgcgcctaggtggaggtctccagg

SEQ ID NO: 29630 - DNA, 982 bp, Homo sapiens; identical to SEQ ID NO: 10858
  chr16:87723181-87724163
  hypo

SEQ ID NO: 29631 - DNA, 242 bp, Homo sapiens
  chr16:87739362-87739604
  hypo
acaagggctggagccgcagagccgggcagggcctgggcgggggcgggggcgggggcgctgctgcctgcgctctggcttctcaaccctgtccgagcctcttccaaccagcttagctgagagtgtgaggaaaggaccttgattgcccagcactcagacaaagtgcccagaccggccgccaaagccggcgcaacgcaacacaagctgcagccctgtgcggggtcggtgcaacacaaacacaagct

SEQ ID NO: 29632 - DNA, 30 bp, Homo sapiens
  chr16:87741567-87741597
  hypo
agctctctcctgtgcgtcaggacgcacgct

SEQ ID NO: 29633 - DNA, 30 bp, Homo sapiens
  chr16:87742587-87742617
  hypo
aagcatgctgtggacggagcagcagatgca

SEQ ID NO: 29634 - DNA, 102 bp, Homo sapiens
  chr16:87744861-87744963
  hypo
acggttcctggtggcgtcgtagaagtacagatcgttgaagaactcgcccgacaggctctcctcctcttcctcgtcacagacacccccgaagaacagtgtctg

SEQ ID NO: 29635 - DNA, 31 bp, Homo sapiens
  chr16:87774174-87774205
  hypo
caccaggacacaccttcgtcaaaggaaaatg

SEQ ID NO: 29636 - DNA, 133 bp, Homo sapiens
  chr16:87776439-87776572
  hypo
cacggcccctccagacgagttgccctaacgccttcctatcagggaagggaagactcattctgcaaggcgccgcagctgtagtccagtgtctgccacaggtatgaagtgacgacgagcacggagaacacttgag

SEQ ID NO: 29637 - DNA, 98 bp, Homo sapiens
  chr16:87782715-87782813
  hypo
cttcaaacattaacaacggtgtggtgcaacctagcagtgttttccttttattaatatccacaataaagctgtctgcctgctctcgttaatccctctcc

SEQ ID NO: 29638 - DNA, 30 bp, Homo sapiens
  chr16:87864576-87864606
  hypo
gggaagcagtggtgcgtgcctccagggagc

SEQ ID NO: 29639 - DNA, 152 bp, Homo sapiens
  chr16:87895431-87895583
  hypo
ctgtgagctccccctacggccttgccccgaatcccgtgatgcagcgtgacctgcctaggtgccggcggcactttcatgtgcggctgggaaagtcagatttcagcactaatcactggctgccgcctgcaatgagcccacggcttgagctctgg

SEQ ID NO: 29640 - DNA, 86 bp, Homo sapiens
  chr16:87916231-87916317
  hypo
agtgcgacccacagcggggctggagctgctgaatgtgcacaacacacttcacccgggcctggttcaggagcgggcgaggcagccgt

SEQ ID NO: 29641 - DNA, 30 bp, Homo sapiens
  chr16:87923993-87924023
  hypo
tattttcacaggcccgggagactgaaagac

SEQ ID NO: 29642 - DNA, 30 bp, Homo sapiens
  chr16:87992493-87992523
  hypo
gaaggcccagaatgcgtggaggcttcggga

SEQ ID NO: 29643 - DNA, 365 bp, Homo sapiens
  chr16:88037885-88038250
  hypo
tcttttgttccctagcgtcgtcccccagactacagtaatactcaacaatgatcggcagaacgccattgtagccaagatggaagaccccttgagcaacagggcaccggattccctggaaaatgtcattagcaagtcagtagcacggcaccaaccccacctttccctgccactgtgcggagtcccatgagaataagtcaacgtccctaagccagggcacagtccagcacacgcttcatctctgtggtcacagggttgagcctggcaggcaccgccccagctctctgaggtcggggagggcaggctgggcgatgctgaatgctgagtccagccacaccaggggcagctgccgccggggacttctgtgt

SEQ ID NO: 29644 - DNA, 31 bp, Homo sapiens
  chr16:88039775-88039806
  hypo
gcggctcggaggccagcgactctgtgtccag

SEQ ID NO: 29645 - DNA, 30 bp, Homo sapiens
  chr16:88048326-88048356
  hypo
gggtgggtgatggtcggggaggctggtggc

SEQ ID NO: 29646 - DNA, 301 bp, Homo sapiens
  chr16:88049612-88049913
  hypo
tgccagcatgggcctccgcagcctctgcttgccagccaccaggggccacaagcaaatctctgccccttgcccaggccccaaggcagaacatttttaaaaatcctcccttcagaaggacagacacagggaaggattcagccccttaggtttaatctgaccaggaaatctgtggcatggtttaaggtcagcacaagcggggactatgtctggggcctcccgtccatgcaggagaagcatgtggcgctgggaaatgcgtggtgcaggtgccaatgctccagagccgcctcggccactgtcctcc

SEQ ID NO: 29647 - DNA, 190 bp, Homo sapiens
  chr16:88073664-88073854
  hypo
gacctcaaatcaaagacggcttcaggagaggccggtgctgccactcagggtagcgggcggaatcttggtacatggcccctgcttctcttgggaaggaaactgctgtgtgatttaaagaaaccgctgtgttcatctgaagctgccttttctggtgaatctgtgtagcgaaccccctcgttttccatttgtg

SEQ ID NO: 29648 - DNA, 31 bp, Homo sapiens
  chr16:88078971-88079002
  hypo
cgtgcgtgcacttgagcgtttcttgcaggag

SEQ ID NO: 29649 - DNA, 41 bp, Homo sapiens
  chr16:88091518-88091559
  hypo
gttccgacaagccaggcgccgaggctcggtgtgggcccgtg

SEQ ID NO: 29650 - DNA, 30 bp, Homo sapiens
  chr16:88096573-88096603
  hypo
tttttgctgcttcacgtttaagatctgact

SEQ ID NO: 29651 - DNA, 30 bp, Homo sapiens
  chr16:88105821-88105851
  hypo
agtctggggccccgcgccgggacactgaag

SEQ ID NO: 29652 - DNA, 124 bp, Homo sapiens
  chr16:88106136-88106260
  hypo
tgggggcccctttagccggagagctccctgccccactcgttgaaggtctcagctcggggcagagccagtacctcgggctgctgtggccctagcgtccacgaaaacaaagcgcagggctgctgtg

SEQ ID NO: 29653 - DNA, 30 bp, Homo sapiens
  chr16:88106972-88107002
  hypo
tgtgcccatgggcacggtggcccctgcaga

SEQ ID NO: 29654 - DNA, 30 bp, Homo sapiens
  chr16:88110182-88110212
  hypo
ctcccttttgcagacggccgaagccctgca

SEQ ID NO: 29655 - DNA, 30 bp, Homo sapiens
  chr16:88111410-88111440
  hypo
tgggaggagttccgcgttgccatccagacg

SEQ ID NO: 29656 - DNA, 30 bp, Homo sapiens
  chr16:88154177-88154207
  hypo
ccgcagcagggaggcgagagccctcaacca

SEQ ID NO: 29657 - DNA, 30 bp, Homo sapiens
  chr16:88242366-88242396
  hypo
gtaaatgcgcgtgcgcgcgcacacacacac

SEQ ID NO: 29658 - DNA, 72 bp, Homo sapiens
  chr16:88260675-88260747
  hypo
cacccgtgcctcctccgcgccggggcctgcgcgtttccacccgtccctcctccacgccggggcctccacact

SEQ ID NO: 29659 - DNA, 319 bp, Homo sapiens
  chr16:88338957-88339276
  hypo
acacacatgctcacaggcacacgcatgcacaccctcacatgtgcacacacacgctcacaggcacacatgcacgccctcacacacgtgcacacatgctcatagacacacacgcacaccctcacacgtgcacacatggtcacaggcacacacgcacaccctcacacacatgcacacacacgctcacaggcacacatgtgtgcacaccctcacacgtgcacacacgctcacaggcacacacgcacaccctcacacatgcacacacaccctcacgtgcacacacattctcacaggcacacacgcatgcacaccttcacataca

SEQ ID NO: 29660 - DNA, 30 bp, Homo sapiens
  chr16:88368452-88368482
  hypo
gtgacagagacggacgtgggagccgtgaag

SEQ ID NO: 29661 - DNA, 30 bp, Homo sapiens
  chr16:88473698-88473728
  hypo
gtcgccagcacctgcgtgcagctctgagct

SEQ ID NO: 29662 - DNA, 30 bp, Homo sapiens
  chr16:88476234-88476264
  hypo
cggaggcctgagtgcgacaggtgtggtggc

SEQ ID NO: 29663 - DNA, 738 bp, Homo sapiens
  chr16:88480928-88481666
  hypo
agaggcccccaggcccggcagagctgccctggattgggagcaagctatggctgggagcgggccccacggcaggagggtccgagggagaggcaggccctgtggcctcaggttggcaccgtagaggcctcctctgtcctggctgtggcctcctgctctcgagaacaggccgaacccagaaggacgtcccagtggggggtaacttcccctgccccagggaacagggctcttcagtgcccgggcggcacagggccacccctcaccaggccactgtggccagaggtccacgcaggacagccccgcccagacgtccactgccacccggccctgccttcccagggccatgggtcagccagttagggcggggcagaggggagcacggccaggcctccagtttccagctgcccagagaccagctgaggccacacagcgagtgggaacagcagggtcagccgcgccagggcccaggtagcctcgaggaggcacctgcaacagggaagggcactgcctcggcctcgcagagactccggtcccgggtgccacttcccactgtgtggccttggaaaagtcccttcccctctctgagcctcggtttctcgtctgagcaatggggaggaacagaaccaccttgtggggccttgagaggattcatgaggcagtgctggcccggtgaccacccggaacatcagggaccctccgggatctcaggatctgtcaggccagtgccggtcacagctgagc

SEQ ID NO: 29664 - DNA, 30 bp, Homo sapiens
  chr16:88492853-88492883
  hypo
acagaggacagtcccgtatgtcatgacatg

SEQ ID NO: 29665 - DNA, 30 bp, Homo sapiens
  chr16:88493598-88493628
  hypo
gcatcccttctaagcgcggagcttctgtga

SEQ ID NO: 29666 - DNA, 61 bp, Homo sapiens
  chr16:88498086-88498147
  hypo
agccagggatgccccgccggccagcagctcctgcctttgccaggacggcgaggatgccggt

SEQ ID NO: 29667 - DNA, 274 bp, Homo sapiens
  chr16:88504038-88504312
  hypo
gcacgggctgctggagcggccggagctgcagcacacgccgctgtatgcctgcgagctctgcgccacggttatgcgcatcatcaagaagtccttcgcctgcagctcctgcaactacaccttcgccaagaaggagcagttcgaccgccacatgaacaagcacctcaggggggggcggcagcccttcgcgttccgcggcgtgcggaggccgggagcgccgggacagaaggcccgggccctcgagggcacactgcccagcaaacggcgcagggtggcc

SEQ ID NO: 29668 - DNA, 30 bp, Homo sapiens
  chr16:88506673-88506703
  hypo
gggcacctgcatggcggcgctctccctgcc

SEQ ID NO: 29669 - DNA, 416 bp, Homo sapiens
  chr16:88512480-88512896
  hypo
gccaggtgtggctgaggccatcgagtcattcctccggtgaagtatgcccgtgcgtcggggtgcagggcacggggtgtaggacaaatgctaccaatgcccctgtcgggaactgggaggagggtggcacatgtccgtcactgccacaggcggttccgaagcccgggccctgccccgtacagtgactgtgctgttagcccggccacctggggcctggctctgcactggcgtgtcctctcctcgaggcggctgagtctgccgttcggggacctccctcgctcccctgcctggtgtcctctcctcgaggcggccgagtctgccgttcagggacctccctcgctcccctgcctggtgaaggtcatggggtcccgggcctcttcaccctctgtgttgtctccgcctccttccatctcatctca

SEQ ID NO: 29670 - DNA, 30 bp, Homo sapiens
  chr16:88516210-88516240
  hypo
gctcggcactggcccgtcagaggagccagg

SEQ ID NO: 29671 - DNA, 30 bp, Homo sapiens; identical to SEQ ID NO: 10859
  chr16:88519207-88519237
  hypo

SEQ ID NO: 29672 - DNA, 30 bp, Homo sapiens
  chr16:88534570-88534600
  hypo
cccacaggccctgacgcacccgcgagccca

SEQ ID NO: 29673 - DNA, 46 bp, Homo sapiens
  chr16:88537674-88537720
  hypo
tgtgacctccaccctcgcgaaggccagcggccgcagggtctggctt

SEQ ID NO: 29674 - DNA, 230 bp, Homo sapiens
  chr16:88545511-88545741
  hypo
gtctggctgcttgatggattgcgcgtgaggtactggccacttggtcctgagggtgtgggcggtgagtcccgagtcccaaccgcggggccgggctccccacgcaggtggtgctgggctggtgtcgccagcagaccccactttgatggcggggctgggctgctgctaccactgctctctgtgcttcggtttccctgcttggcgagattcacgggatgagagatgctcctagc

SEQ ID NO: 29675 - DNA, 62 bp, Homo sapiens
  chr16:88551176-88551238
  hypo
atcaccagccccgccggcggatgtcagcacacacacctgcactcagcgccactccacagcca

SEQ ID NO: 29676 - DNA, 169 bp, Homo sapiens
  chr16:88551682-88551851
  hypo
ggagcaggtgggaaagagacacggggtccgcggcccttctctggcaagagtggaatccgtgggcgtggtggaggccaagggtcacggcaggtaagggtgggcggaggcgaccctgcagctttggaaatgttgcagagggtgggggttcgtcaagaatcatcaggtcttt

SEQ ID NO: 29677 - DNA, 31 bp, Homo sapiens
  chr16:88597829-88597860
  hypo
gtcactgacatggagccgcccaggtgtgtgg

SEQ ID NO: 29678 - DNA, 31 bp, Homo sapiens
  chr16:88602844-88602875
  hypo
acattaggatgacaggcgcgagctaccattc

SEQ ID NO: 29679 - DNA, 45 bp, Homo sapiens
  chr16:88642724-88642769
  hypo
tagatgcgagccaccgtacctggccagcctcgtcttttacatacg

SEQ ID NO: 29680 - DNA, 145 bp, Homo sapiens
  chr16:88645406-88645551
  hypo
tctccagtagcatgctggcgtgcgtgctctcaatgcacgtttggatatgactttccggccatcgctgctctctgtggcactgctcagtaatttatagggtttgaagtattgctcatgtgactttacgggacgtgtgtgcacctgc

SEQ ID NO: 29681 - DNA, 40 bp, Homo sapiens
  chr16:88647116-88647156
  hypo
tgggagccctggggtgcgccgggtccgtgagcagtcagct

SEQ ID NO: 29682 - DNA, 186 bp, Homo sapiens
  chr16:88647912-88648098
  hypo
gcaagtatcttctggaagtgccgctggcctgcgtggtggggtggaaagtttccgtacagggctgggaccagcagtttgcagcacctggctcatttgtggtgtgggtgagggcgtccctgacaccagctgaccttcagtcaccggtctcttacctgttcaggaagcggcatggaagagagctgggtg

SEQ ID NO: 29683 - DNA, 199 bp, Homo sapiens
  chr16:88649039-88649238
  hypo
cttggaaaaagggccccgtagcatcagtagtaggctcagagaccttctgtgccccttagcgtggttagtgttccacatagccacatgaaaaagcgcaggccaccgtccttacagctctgaggcctcagaagctctgagaactgaaaccttttcctcacctggtggcagacctggcccaagctggcgtgaggctgctcat

SEQ ID NO: 29684 - DNA, 30 bp, Homo sapiens
  chr16:88683208-88683238
  hypo
taccaagcagaacacgaatgaggggctctg

SEQ ID NO: 29685 - DNA, 39 bp, Homo sapiens
  chr16:88683896-88683935
  hypo
gctcaccgccgaggcacgtcattacgatgctctttggct

SEQ ID NO: 29686 - DNA, 38 bp, Homo sapiens
  chr16:88689175-88689213
  hypo
tcagcacacaggagcccggctcccgagtgagggatgat

SEQ ID NO: 29687 - DNA, 39 bp, Homo sapiens
  chr16:88690943-88690982
  hypo
aggggatgtaggccagcggggccccgtccaccagccctg

SEQ ID NO: 29688 - DNA, 30 bp, Homo sapiens
  chr16:88697680-88697710
  hypo
cgggccaagatccccgggaaagcataggcc

SEQ ID NO: 29689 - DNA, 30 bp, Homo sapiens
  chr16:88698596-88698626
  hypo
gggcttccttggtccgtgaggtggaggtac

SEQ ID NO: 29690 - DNA, 43 bp, Homo sapiens
  chr16:88702401-88702444
  hypo
cactgtacccatggggagagccgctctcctccctcctttttcc

SEQ ID NO: 29691 - DNA, 31 bp, Homo sapiens
  chr16:88712307-88712338
  hypo
atgcaaggaaatgacccgacacactagacac

SEQ ID NO: 29692 - DNA, 212 bp, Homo sapiens
  chr16:88722612-88722824
  hypo
acaaagcccccatacaggctccggcaggcgctgcctgagccccggcgagccacttctgagaggtcactctccacgccgtagacacgggccagggtgtaggctgcaggcatgcggattcagggagggtcctcagagctgcctgcgctgtgctccctgacagctcaccgccccaggaacgtcccacaccccacggcaaatggggatttccagat

SEQ ID NO: 29693 - DNA, 511 bp, Homo sapiens
  chr16:88725338-88725849
  hypo
aggccagccaacctccgtccccgctccccattccttcatcgcttctactccagcatccgtgagtgcccaggtgcggatcgctcccaccgcggcctgcctcccctccaccttcccaaacaaaaggagcccagctctgagaactcctcacatctcactgctcatatgccccaggaacatccaggataaacccctttctgcccagcacggccatgggacagcacgtgaaatcaaacttccagaaagcccgaaaggaaacgtttgccctgggagcgctgcgtggtgcttcagctgaagtcttattccacggcggcttcgctaagcacaccatctgctcggttttgtgcgaggggaggtctctgaggatggcggacagttccaggggtgataaacgcggacacctggcagagaaccacgccctgcagctcgcgaggctctttcacgcacagcactgagcggccccccttgcaggcggacgccgctgccctgacaggccgggcgaacctctgctttc

SEQ ID NO: 29694 - DNA, 128 bp, Homo sapiens
  chr16:88738305-88738433
  hypo
cggagagtggacctcggtgtgtgcggggctgcgtgcactgccatcgctccctctacacgagccggcgtggacccagggctgagctgtgaccacgagggccatcccgacgagccgccatggacccaggg

SEQ ID NO: 29695 - DNA, 69 bp, Homo sapiens
  chr16:88757534-88757603
  hypo
tcaagcagcgaggcagcgtgcgtgtgagtctgcaggccacaggcgtgttcgtgcgtgtgtccatgggcg

SEQ ID NO: 29696 - DNA, 102 bp, Homo sapiens
  chr16:88787976-88788078
  hypo
atgagctgcaccaggtcgtacttgatgtagccgtcagtcttctccaggcccaggatgcggggcgggaagtagggcttgttctcgtagcgccgcagcaccacg

SEQ ID NO: 29697 - DNA, 63 bp, Homo sapiens
  chr16:88788383-88788446
  hypo
acactggtacacggcccgcagcagccgcagcgcccggccctgcccctccgcaaacagctctgc

SEQ ID NO: 29698 - DNA, 30 bp, Homo sapiens
  chr16:88789604-88789634
  hypo
cctcagagtccccacgccccccagctcacc

SEQ ID NO: 29699 - DNA, 897 bp, Homo sapiens
  chr16:88793244-88794141
  hypo
aggccagcaggtagcccagcccgaagatgctgatgcgggtggcccccgtgacaaacaccaccaccagcaccagccagaacaggtatcggaagacggccaccttcagcatgtcaaggtaggacctgccaggccggagcgtcagggcgggcgccccggccacccctcccagaaggttccccgtggagggtgacgtggaacccacctgcagtggataaagttgggcacggggttgggctccccccgcagcggctccaggcggtcggtgttgacgccagccatgcgctgccactcctctgtgcgctcagctgagaacacctgccactgctgggaggcgcacagcagcaggagaaagtcgcctgcaggacacaggagccgccgctgtgccacacggggacccacacgaggtgggcacggcgcataaatcccacctcccaccccaggcctgtcggcgtgcagccgctgggagcggacacacgtctgcctgggtgagtggccgggtgtccctgggggagccccggtgtgagggcatctgcacaagggctgccgtgcacacaggctgaggtctgcgtgcgtgcgtgcgaggtcagggcctgcaggccgccatgtgcctgaccacacctccgcccgtgcacgcctgtgtgcacacttgtgagcagatttgggggcgtgaatgtactctgagggtcctctgcagaggcgggggtggtggggggcactcactgatgaggttggtggagttgggggcccggaagaaatcaggcaggtacagccacttgatgagtgcggagttcatggggacggcccggctccagcgccagggataatctgggggaaggggtgtcatgtcaggaagggccgggcctgcctggggcctgagacacccggtccccacccgtt

SEQ ID NO: 29700 - DNA, 30 bp, Homo sapiens
  chr16:88797491-88797521
  hypo
caaatccagtctcacggcgtcagcaacgct

SEQ ID NO: 29701 - DNA, 30 bp, Homo sapiens
  chr16:88802805-88802835
  hypo
atgctccatacctgcgcggcagagagggct

SEQ ID NO: 29702 - DNA, 30 bp, Homo sapiens
  chr16:88803267-88803297
  hypo
ctatgggcagaacacgagggctccggcaat

SEQ ID NO: 29703 - DNA, 30 bp, Homo sapiens
  chr16:88804702-88804732
  hypo
gagatggccggcgccgaagcaccccaccgc

SEQ ID NO: 29704 - DNA, 279 bp, Homo sapiens
  chr16:88805796-88806075
  hypo
ccaggtgtggtggaaagaacacggctgtcgtcagatgccctggctctggcctggctgccaccggcccagtgtccccatctgtgactcgggggctctcctggtggctgaggcgccaggtgcccgggctgagaccgcaggctgtggggctggacgataggccccaccccagctctgacagtctccgtgctctgcaggccgaggcaagtcacagcctctcggagcctattccccttctgtcaaatgggatgggggcttgacgggacagatgaaccagaccag

SEQ ID NO: 29705 - DNA, 407 bp, Homo sapiens
  chr16:88806275-88806682
  hypo
gggaaatcttctgagcagagccgtgaaaaatgagcatttctgggagtggaaagaacagaggcagctgctgtgagagaacaggtgtgaggccaccgaggggcaggcccggccctgacttggggtatgaggccaccgaggggcaggcccggccctgacttggggtgtgaggccaccgaggggcaggcccggccctgacttgggccccacgtgccgcagccatgctgcagacgcccctcaccctcctctagcggccagcacccctcgggctggctggcacactccgtcgcatgcctgcaaacacgtgtgtgtgttgcccatatgtgggagtgagggtcgcccgggggccctgccaggccgggtcatggggcttctagatctttcggaacggtatcctgcaggtgcctggt

SEQ ID NO: 29706 - DNA, 30 bp, Homo sapiens
  chr16:88816007-88816037
  hypo
ccctgagccagagccgtggaagccgcctcg

SEQ ID NO: 29707 - DNA, 77 bp, Homo sapiens
  chr16:88826507-88826584
  hypo
ggtcctgcctccagcgcccaccaccccacacgcccacctcggacctcgccggcggggcctccgtgccctcagtgaca

SEQ ID NO: 29708 - DNA, 127 bp, Homo sapiens
  chr16:88831170-88831297
  hypo
aaaaagaaagaaaaaaggaatgcccctgccacggcctgcctttgactcccagcatcatgccgtgacctcccaaaacgaggactccgccctcggcaccaggggcagacactggcgaccactccaacca

SEQ ID NO: 29709 - DNA, 115 bp, Homo sapiens; identical to SEQ ID NO: 10866
  chr16:88851817-88851932
  hypo

SEQ ID NO: 29710 - DNA, 30 bp, Homo sapiens
  chr16:88875968-88875998
  hypo
agccccaggagaggcgctgaaccccagcaa

SEQ ID NO: 29711 - DNA, 302 bp, Homo sapiens; identical to SEQ ID NO: 10867
  chr16:88878669-88878971
  hypo

SEQ ID NO: 29712 - DNA, 123 bp, Homo sapiens
  chr16:88883255-88883378
  hypo
aggggccttcttcccgaatcctgcgcggcagatccaggggctgtgggcagccacgcccagcccgtgtaaacaggtgagcgacggcccaggggcctcgaggctgggctcggccatctccactgt

SEQ ID NO: 29713 - DNA, 30 bp, Homo sapiens
  chr16:88893558-88893588
  hypo
gagaggatcagcctcgctctaacactgaat

SEQ ID NO: 29714 - DNA, 30 bp, Homo sapiens
  chr16:88897187-88897217
  hypo
gtccgcaccccatgcggcagacagacacca

SEQ ID NO: 29715 - DNA, 31 bp, Homo sapiens
  chr16:88898118-88898149
  hypo
aggagagcggtgaggccgagcacggggtgcg

SEQ ID NO: 29716 - DNA, 224 bp, Homo sapiens
  chr16:88927329-88927553
  hypo
ataacatggtgacgtcgatgatgatacaggtgtgctgagtgagctgtgctgccagccatcgcagaggagcccgcgcacgactgtggtggggccgtcggtctgttctggttgcctcttcctgaatgggacgcctggggctttcagggcaggcagctgtgcatgttctctcaactaaaggtcttgtgagaggagatttggctttttccttccgtgtcagccaagga

SEQ ID NO: 29717 - DNA, 23 bp, Homo sapiens
  chr16:88933925-88933948
  hypo
ccgcacctggtctgggtcatctt

SEQ ID NO: 29718 - DNA, 31 bp, Homo sapiens; identical to SEQ ID NO: 10868
  chr16:88938185-88938216
  hypo

SEQ ID NO: 29719 - DNA, 53 bp, Homo sapiens
  chr16:88942320-88942373
  hypo
cggcacacggaccacgcacacgcggcggacgcaccaacgcctacgcagaagag

SEQ ID NO: 29720 - DNA, 480 bp, Homo sapiens
  chr16:88943176-88943656
  hypo
aggtgcactgaatgcggttttgttggttctgtgtcttctttcggagaggggcagtagcagcagtgactaattggtcggctcccccaggtcaggcggggcgcagtgtctggcaggccaggcatcggaggccaggcacagcatccggtgggcctggagctgggtggggttggcacggtgctgtgtccggcaggccaggggccagtggggtcagcggggcacggtgtccagtgggccaggtgggctgggggagccggggcgagaaggccccgcagagccggcttcgctggggctggcagcacccacaggcagggaggggcccaggctgtgggcggcttcgggcggtccaggcaccgggtcggccaccacggctgtggggccctgcaggctctggccacacacgtggtgatgcttctcccagtcccgatgctggcagaaggacccgcagtagcgtgccgcgttgcagccgctgcacgtctcact

SEQ ID NO: 29721 - DNA, 30 bp, Homo sapiens
  chr16:88944984-88945014
  hypo
gggagccgggcgcctcggacgccacctggg

SEQ ID NO: 29722 - DNA, 779 bp, Homo sapiens
  chr16:88945515-88946294
  hypo
gctgataaagcacagtgtgggcggggatggcgtgcctgctgcaggatgcccgtgacaactgtgctgatgccacgtggaggctcagaatcctcatgggggtggcgtgggaccgcacgggagccgaggcaggggatgggtgtcagcgtggccgggtggccctacctcgctggagtcctcctgctggttgatgaccgtcagggcgtcctcggaggcctgccgcttcgcctcggccagggcccgctccatcttggcacgctccgtggtgatgagctcgtgcgctttgcgctccgcgtccgacacggctttctgcagctccgacatggcctgccgcttcacctcattcacggcctcttctgcaaaggacatgggcagggctggcggtcacatgggccatcccagatgggtctctggacttcctacgcgtggccacaacctggggacaggggctgtgtgcagctgaacacacgtaccatctgtgcacacaaaggcacatgttgatggggctgtaggcagctgaacacacgtagcatctgtgcacacacagacacacgttgatggccctcatgcctgtgcagacaagtgcatgcaaataaacacaggcatcccaggcatgtgtgtgcaaagctgggtcacgtggtgtcacaagtcaaagcttgcactctaccgcagcggctccccaggcactgcacccctgcagggcaagggcgaggcccaccccagggcctggtcagccaggggcgcacccggaatctgcattcctaacgcgagccgggggagct

SEQ ID NO: 29723 - DNA, 332 bp, Homo sapiens; identical to SEQ ID NO: 10869
  chr16:88950060-88950392
  hypo

SEQ ID NO: 29724 - DNA, 168 bp, Homo sapiens
  chr16:88952374-88952542
  hypo
ggcgtcctcctcttgccgttctcgttgacttccagtagcagctctgaggagtcgatgggggaggaggcgctggcgtccagcaggagctgctcatgctgggccaagtactgggcgggcgtctgcttggccaggcgtgcacagtgcaggagctcccgctgcagcaagggc

SEQ ID NO: 29725 - DNA, 120 bp, Homo sapiens
  chr16:88955248-88955368
  hypo
gctaccccacacaggccgtgggatcccctgtgtaccaaggggagactgaggtggacacggccctcacgagagccgggccgcgggcggcacctgctggggcgtggccgggggacaccaggg

SEQ ID NO: 29726 - DNA, 581 bp, Homo sapiens
  chr16:88956087-88956668
  hypo
gcactcctcctcctccagggacgacaccccgcgattcctcctcctccagggacacttcaaatccctggacgacgccccgcgattcctcctcctccagggacgacgccacgcgattcctcctcctccagggacacttcaaatccctggacgatgccccgcgattcctcctcctccagggacacttcaaatccctggacgacgccccgcgattcctcctccttcagggacgacgccccgcgattcctcctcctccagggacgacgccgtgcgattcctcctcctccagggacgacgccccgtgattcctcctcctccaggggacgtttcaaatccctggacgatgccccgcgattcctcctcctccaggggacgtttcaaatccctggacgatgccccgcgattcctcctcctccaggggacgtttcaaatccctggacgatgccccgcgtgaatctagaacatgcctcacctccctgtagtccccgctacctgggaggctgaggtggaagattcccctgagcccgggagtgaggccccgttctttccgcgtgtccctccacgctgtctcctcaacagcctga

SEQ ID NO: 29727 - DNA, 552 bp, Homo sapiens
  chr16:88957436-88957988
  hypo
aaagctgacaagccccgcgtgctgccaccctggtccacggttgatctgggtgtgaccatctgacctgctttcacctgacacctcttcatccatcggcctgcgcagccacagaagccccttcccgcctgtctaccgccctcacctcccgccctcacctctgctctctccaccccacgtattctgttccagtcacactgacccctctgctgttcctcaagcacagcgggcgccccatacctcagggcctctgcacgtgcagttactgctgtctggaaaaccctgcgctggctctgcacctagctccgccctcatcctcagccctcaccaacacgcctccaagcaaaggactttcggaatacttctccaccacgtgcagctgcagatttgagagtggctgtggaccgaacgccttcccaccccagggtgctggctccaggagggacctgctgcatgtcctgggccctatccccgagccttgcccccacactggcacgtcgtcagtgctcaaaaatcacccgtggagtgagcgagcacattcggccaacggcaacc

SEQ ID NO: 29728 - DNA, 290 bp, Homo sapiens
  chr16:88958252-88958542
  hypo
gaggctcccgcagcacgggggacgggtttcgcattaccttcaggaagggaatgacaaacggccgcagagggaagttggtggcctcctgaagcttggaatgaaactcctcgatcgtcaatgtcgagttctgcaggggagaaaacccacctcacatcagcaccgctcggcatgtgagccagcgccgacccacccatgcctgaggaggaggcttccgtgttggaggcaggcaggcagcccaggagctgggcacggcctgagagggtgcaggtggcatcgtgggagcgggtcca

SEQ ID NO: 29729 - DNA, 30 bp, Homo sapiens
  chr16:88963723-88963753
  hypo
ctcgttcttagagccgggagtgccacgaca

SEQ ID NO: 29730 - DNA, 256 bp, Homo sapiens
  chr16:88966331-88966587
  hypo
gtagagagacggcccgtggtttgtaccagaccggagggctcttccgaagagagggaagggtgatcccagcccggccacatcgccgtgtgacaaggacatgtgagaaaaagcccagccagcctctcactagaaaccgtggccagctccgcagagccaggacctgcacgctgggcccgccgtcccccaggacctgcaaaatcgtgagtgcggcgtcccgactctctgaggcagggccggccccgcgggtgcagggagt

SEQ ID NO: 29731 - DNA, 30 bp, Homo sapiens
  chr16:88970442-88970472
  hypo
gggccgtcatgccacggcgcaaggagtcac

SEQ ID NO: 29732 - DNA, 30 bp, Homo sapiens
  chr16:88973336-88973366
  hypo
ataggccgaagggacgctggctcgtactgg

SEQ ID NO: 29733 - DNA, 589 bp, Homo sapiens
  chr16:88978018-88978607
  hypo
tgggaatggggatggaattcccgcagaatcacggagggacgaagtacatgagctcacgaaaagcgtctagaacagagcgcctggccgctcgccctggccacccagctgtcatgcttcgggctatctgtccggccacaacggccgcgtggagctggtgcaggtggggcttgtctttggcactgtgcccagagctggcccataggtgacactgagcatcagtgttggggaaggggacccatcggagagcctctggggcacagtgaagaccccccctcctgcctcgcagctgtgtgggggaagctctgttgcccagagttggctggcagggcccagactgcccaccggctgccatcaccaacacgaacaggtacccagggcatgccttcagccggcctgggtgcagaggtcccgtctgtcacagaagtgctgctgaaccgtagcagacgaaaatctcacaaactccctccgggccccggcccagggcttcccgttggaaggtgcacaggccggcctctgcctgcaggctgggcccacccgcgcctccccaacccactacgtggctccaggcggacctggccttgcctcttcc

SEQ ID NO: 29734 - DNA, 30 bp, Homo sapiens
  chr16:88985908-88985938
  hypo
ggcgctgtccctaccgcccggtattcactc

SEQ ID NO: 29735 - DNA, 557 bp, Homo sapiens
  chr16:88994176-88994733
  hypo
gagccaacactgacccgaagacaggtcagccagacttcccacctgctccctcaggaggtgggatccggtcccctcctgctgggctgcacgggccacgatggaaaggcgcctcgtgacacgctgcggtcagctcagaaaagccgcagatgctgacacgggcaaccctgcccagtgtggggcgtcctctgaagtgggagccgcagggagggcctcacggaggcctctgtccacaggcagcggctcccggcacccaccgctgctgaccgagcccctggcacccccaagccgagcctttgaaccccagcagggaaggccacctggccgagaccctggccaccacggggccatcactgtcccacggggctctgttccgactccttggcccgagggtctctgagcaccaccagggttgcctcacgcctctgagtttggggtggtttgttcggcagcactggggcccggggcagcttcttgcccggcgtgtggcacagctgtccttgttgggggcgtttctgggatcctgtggtttcggggacgctcccctactccctggcctt

SEQ ID NO: 29736 - DNA, 30 bp, Homo sapiens
  chr16:89000143-89000173
  hypo
cacgtgcctctatacgcctcacacgcctca

SEQ ID NO: 29737 - DNA, 1437 bp, Homo sapiens; identical to SEQ ID NO: 10870
  chr16:89007176-89008613
  hypo

SEQ ID NO: 29738 - DNA, 30 bp, Homo sapiens
  chr16:89016942-89016972
  hypo
cccgtcccctggaccggcaccgccacagag

SEQ ID NO: 29739 - DNA, 30 bp, Homo sapiens
  chr16:89108904-89108934
  hypo
tggggtttcccaggcgtgtggatgggcgcg

SEQ ID NO: 29740 - DNA, 53 bp, Homo sapiens
  chr16:89120283-89120336
  hypo
ccctgtgactcgtggacggtgcggtgcagggagaagggcgggcaggtgctgga

SEQ ID NO: 29741 - DNA, 43 bp, Homo sapiens
  chr16:89129269-89129312
  hypo
tgtggtcacctttgacccctgcggcctggctgctcctgacagc

SEQ ID NO: 29742 - DNA, 533 bp, Homo sapiens
  chr16:89130772-89131305
  hypo
ctgggcaggggagcatcacagcgctggggccccagactgctgcccaccggctgcctgggttcctctctgaacctcagtctcctcatcggcctggcgggaacagctgctcgctcctgttctttccccgtcaggcgtgtgagacgtgtctcctttctctccgccaagagtgaactccctttgaccaggcctcgtggtggttcagggagagatgttcgtgaagcaagggcgtcccgtgagcctggcccgtcacccgacctctaggcttcacaaaccttcagatctgagcaacacacagtcgtgaccctgtggctccagagctccctctccaagtggcttctccgggtcccgcagagcaggccctgcagatccaaggccaacctcctaggaccccggcctcccacccacaggagggttttccctcggtcctaagcggccctccttccagcacggcagggagacctggggctgcagggatttgccgggagagcccggggccaccagcaccgtcctgcgaaggatgtagcctcaggcca

SEQ ID NO: 29743 - DNA, 43 bp, Homo sapiens
  chr16:89132245-89132288
  hypo
ccccttttcaggacaggaaaccgaggcacagaggcagagtcag

SEQ ID NO: 29744 - DNA, 160 bp, Homo sapiens
  chr16:89139332-89139492
  hypo
gcagcctccgccccgcgccaagcctgactgtggtggcttccgatgggtgtcctcctgggcttcccaaagcaggaggtgaggtgcaggacaacgctggcgcaggctggctcagaggcacagcagagccgggtcctgcacggccaggcgcatcgggagtggc

SEQ ID NO: 29745 - DNA, 597 bp, Homo sapiens
  chr16:89139897-89140494
  hypo
gagccgccgcacccggcctctcacatggttcttctcacgggcgctccccacatgtgcggacccctccttcgtggcctccagcttctatttagagagggtgtgacacgctgagatctttcacacgggtggtgacgggactgaatcgagttgcaggacgccagcgggtatgagagctgctgctgtggagaacggcagcaccatttccacacccacgtgtggcacttggtcacggcccatgcgggaaacaactacacccacctatttccctcccagaaaacctacgtttttcttcccaagacagacactgtgtgctcacaacaccctgttgctgcctttcctgagtagtatgtgtgcaggagtcctcacagcagccgtgtcgcagggagcaggcgccacggccttggaagccagcacagtcagcgaaattccgtagggagctgggactgacacggcccagtcatgtcatggatgagccatgtcatgaacgactcatgcatgcaccagtcacgtgaggacctgtcacgtgtggacctgtcatacatgcaccagttgagtgtggacctgtcatgtgtgaacttgtcacgtgaagacctgtca

SEQ ID NO: 29746 - DNA, 30 bp, Homo sapiens
  chr16:89141924-89141954
  hypo
gacaggcctccagccggggcacctcccaac

SEQ ID NO: 29747 - DNA, 188 bp, Homo sapiens
  chr16:89169227-89169415
  hypo
gccagggctctcagccgcgccctcagcctaagcgcctttcgctggttggggtcagggctctcggccgcgccctcagactaggcatcttttcctggtgtgcagtcgcccctatccacaggggacgtgccaatgccgagaccctgggtagcatggaaccctgtacctacgatgctttttgctatacatac

SEQ ID NO: 29748 - DNA, 627 bp, Homo sapiens
  chr16:89169474-89170101
  hypo
acagttataaccatgtactgtaatcaagttatgtgaaagtgctctctctcttcaaaataccttccggtactgtgctcgtctgttgtgagactgcagtgggccacgcgtcattgaaaccgtgaatagtgagactggatgagcggaggtgactgtacaggccctgctgcccgcgagctcctgcggctgcggcgaatgctcacgcgcttggtttaaaataatgcgagtttgttcttacatgcttggaggccaggattctgagacgagtcttgcggagctgatgctgggtgtggtagggctgctccgtcaggaggctccagggcaaagtccgttcctgcctcttgcagctctggaggccgcctgtgcccttggctccagctgcttcacgtccagctctgcttctgcaggcacacggccttctctccgtagtcagggctccctcggcttccctttgtgcagcctatgcggatattccaagatcatctcccatcttgaggtccttcgcttcatccacctgcagttcccaccactgcgagaggtgacacattcggggtgtagggcgtagggcgtgaccctttgagctatgatgtggccactgtggcagccctcggttactccagagtactggcc

SEQ ID NO: 29749 - DNA, 121 bp, Homo sapiens
  chr16:89172067-89172188
  hypo
gaacctctgttgggggctgcccgggcgctgacggtggctggtctaccatggtcacttgggcagaggcagcaacggccattgtcgtggaccgtgccagggcgagatgcagctggcaggggca

SEQ ID NO: 29750 - DNA, 375 bp, Homo sapiens; identical to SEQ ID NO: 10871
  chr16:89189615-89189990
  hypo

SEQ ID NO: 29751 - DNA, 270 bp, Homo sapiens
  chr16:89198317-89198587
  hypo
caggtgtttcacccccgtgggtggcgtcagcccctcctggaggagcccaggctggcgggttggcagccccgtcatcatgtggggcaggtgtttcacccccgtgggtggcgtcagcccctcctggaggagcccaggctggcgggttggcagcaggacgacacactcggcagaggctgccatggggcagtgttggccccacggcgtttgagcgccctttctccacatcagatcagtgtgttctgctatttcgcagctacttccctggcccct

SEQ ID NO: 29752 - DNA, 62 bp, Homo sapiens
  chr16:89202504-89202566
  hypo
ggtaaaagctgaagacgttttcttctttgaaagcacaggaaccacagccctgtggattttgc

SEQ ID NO: 29753 - DNA, 100 bp, Homo sapiens
  chr16:89203067-89203167
  hypo
tcctccgggtcaggatgagaggagaggttgccagctttgatgccagccgctcctgcctcccccacctgcctctgtgcctacagcccgcttctgcctcaag

SEQ ID NO: 29754 - DNA, 31 bp, Homo sapiens
  chr16:89206302-89206333
  hypo
gaccccctctttttaacgtacagggtgtcct

SEQ ID NO: 29755 - DNA, 406 bp, Homo sapiens
  chr16:89219292-89219698
  hypo
aaagagaaaaaaagaaaaatgcgatttggaaatgtggaggtcgaggttgacagcgacaccgaggtcgaagccagttgcccctggagagcgagagactgggctgggccgactcccacctctgtcgcgagaggcctacgggcaggggcaggtgggcagggggactgtgctgggtctctggccgcgtctggacggcaggcgacactttctccacaaaaagcgtcaagaaaccacgacacttggtttctggacttttccgcggaacagtaaccagaacaatcgccatgaaggttcgtttctgtcatggctcagtgcagcctggacgccctggaccagcccctcctgcgcctgggccacggccgctgccttcagggcatcactggtgggcggcacaaccatcctccctttg

SEQ ID NO: 29756 - DNA, 159 bp, Homo sapiens
  chr16:89220276-89220435
  hypo
gtgataacaccatgccgggcacctcctgcagtcaccacccctgggctgctagggcagagacagctgcggtggcccggtgcacctgcctggcctcaggatggccgaggcgcctggcaaggctgcagggtcccaggggcacctgtccgtactgctgggcgc

SEQ ID NO: 29757 - DNA, 306 bp, Homo sapiens
  chr16:89220720-89221026
  hypo
ccccaaatcaggtcacgtagaatcaagaactgtttgggatgaaatcaccatgtggggtccccagcctcgggccagttgttgcagctcaaggagaccgtccctggtgtcacctctgcctggtcaccgccgacctcatctgtgcagcgcggtgcagccagcccctggccccacgtgctgaggcacctcccgccccacagtgccctgcagttgccaggctctccagggcaggtcccagaggtttcccacaaaaaacaaagactccactggaggaaacaagcccctgtcccacgccgtctgcacgtgcct

SEQ ID NO: 29758 - DNA, 30 bp, Homo sapiens
  chr16:89242920-89242950
  hypo
ccgctcaccagggccgactcggtgctccct

SEQ ID NO: 29759 - DNA, 376 bp, Homo sapiens
  chr16:89254537-89254913
  hypo
ggagtggatgtgggacgcctggaagtggaggacagggacctgccaggctccccaaactgggtggccaggttcaccatcctggaaggcgaccccgatgggcagttcaccatccgcacggaccccaagaccaacgagggtgttctgtccattgtgaaggtgagcggcccccggctggcacacagatgccggcagacgcagatgccgacacacacagatgcccacacacagatgccggcacacacagatgcccacacacagatgccggcacacacacatgccggcacacacagatgcccacacacagatgccggcacacacacatgccggcacacacagatgcccacacacagatgccggcacacacagatgccggcac

SEQ ID NO: 29760 - DNA, 378 bp, Homo sapiens
  chr16:89260392-89260770
  hypo
cctgcacatgcatgcaagaaccggcgcctgcatgcacttatgggccgtcccagagcaccgcagaggaagatggtgtgcgggcgggagtgtggaagccccgctgccaccgtccaaactgggccctcagcctccacccgcgacgcgggtctttgcacagatggagtggcgatggccacagacccatccactgccccgtgtccaccatggagggggtgggggagccccgggagcatcccctgggcttcggtggctgtcagcggaatcagggcctccatagaagaccctctggacacagcgttaatgattccctgccatccacaggatgaatgtgcacacggggaatctggggtgtggggcgcacagggaaccctcctctgt

SEQ ID NO: 29761 - DNA, 30 bp, Homo sapiens; identical to SEQ ID NO: 10873
  chr16:89268025-89268055
  hypo

SEQ ID NO: 29762 - DNA, 26 bp, Homo sapiens
  chr16:89290251-89290277
  hypo
agcctgggtgacagagcgagactcca

SEQ ID NO: 29763 - DNA, 30 bp, Homo sapiens
  chr16:89296731-89296761
  hypo
taggcagtgccggacgggtgagagccctga

SEQ ID NO: 29764 - DNA, 27 bp, Homo sapiens
  chr16:89321911-89321938
  hypo
ggcatgagccaccgcgcccagccgggt

SEQ ID NO: 29765 - DNA, 64 bp, Homo sapiens
  chr16:89354319-89354383
  hypo
aaccaggggctctccacggagctctgatgaagacatcagtgagacccgccgcatctccaggcag

SEQ ID NO: 29766 - DNA, 294 bp, Homo sapiens
  chr16:89357462-89357756
  hypo
gggccacctgctggcgctcggagagggggtagccggctcggattccagacagccccatgccaaacagcagcccggccttccgggtgacaggctccttcttaatcctcttccgctcagggccctgcttctctgtgaggcgggcgagggagagagggaggagagatttcatgccatggtgtcctccaaagctaggtccttacctaatgttacggagccccctgcgtccacctgacagctgacagagcagaaaggaaggtctgtgtatggggaaagcacagcggtgctgggagcatt

SEQ ID NO: 29767 - DNA, 30 bp, Homo sapiens
  chr16:89358217-89358247
  hypo
acggtgtgagagctcggctgtttccacctc

SEQ ID NO: 29768 - DNA, 205 bp, Homo sapiens
  chr16:89359126-89359331
  hypo
cctcatagaacctggcaaacacggtggttggggaggcagcctcgccaccggccaatgagccccagcctacagccatcattggcgtagccacaccttagcagtgagcttgggtcacaggcgcttggctgtgggtctctgcgtgcgccccatgctttccctgcaccctccatgctgcccgggggccggccctccccaggcttgcttc

SEQ ID NO: 29769 - DNA, 30 bp, Homo sapiens
  chr16:89367308-89367338
  hypo
catggcgctcctgacgagggctccctcgtg

SEQ ID NO: 29770 - DNA, 83 bp, Homo sapiens
  chr16:89409897-89409980
  hypo
tgtgtgagtgagtgagcgagcaaatgagacagagctcgaggtgggctggaggcatgtgagggtgcacgcgaaacacagtgcct

SEQ ID NO: 29771 - DNA, 99 bp, Homo sapiens
  chr16:89410180-89410279
  hypo
gcctgcgtcagggcgcgcctccctccagcggtccccgcgtcgcccatgtctgacacagtttatgcttcgcaggcggtaaggctccgctcctcactccca

SEQ ID NO: 29772 - DNA, 30 bp, Homo sapiens
  chr16:89436823-89436853
  hypo
ctgagccctcctgccgttatccagggcaaa

SEQ ID NO: 29773 - DNA, 31 bp, Homo sapiens
  chr16:89437588-89437619
  hypo
ccagaaaaagatgcaacgactctcactacct

SEQ ID NO: 29774 - DNA, 30 bp, Homo sapiens
  chr16:89439273-89439303
  hypo
tcatcagtggtccccgtttacggaccccgg

SEQ ID NO: 29775 - DNA, 115 bp, Homo sapiens
  chr16:89442346-89442461
  hypo
taaacttgcgtgacacgccgcagcctgtgctctgctgtggatgcttttcaaaatcgataaatccagcagaagggccatcacaaaaaaagaacaggacatccgtgaagccatcacc

SEQ ID NO: 29776 - DNA, 290 bp, Homo sapiens
  chr16:89445370-89445660
  hypo
gggtcaaggttctgacggcacactggggagcgtcaagacgcctcctgcagtcgtagacaagccgggctgaggcattcactgtcgcttagaactgaaaacttagggtcgtccatgcccagaacgtcggcagtgcggaccagccccaggaaggcctttctcactggcttctagaaggtggggccggcccccatgcctgccccggcacacggccattctgggagctgctggcagccggcgggctagaaggggtgcacaccgtctgtatgtgcgtcacaggctcatgctttttt

SEQ ID NO: 29777 - DNA, 78 bp, Homo sapiens
  chr16:89446068-89446146
  hypo
caggtgactgggacgcgagcgccccaagcagcacggaagagctccgtgcagtgcacggatttgcgaagaacgtgttgg

SEQ ID NO: 29778 - DNA, 30 bp, Homo sapiens
  chr16:89456313-89456343
  hypo
agagatcactggggcgaacaccgagtgtgg

SEQ ID NO: 29779 - DNA, 31 bp, Homo sapiens
  chr16:89472192-89472223
  hypo
tcacaccttcccccagcgctcctcacaaagg

SEQ ID NO: 29780 - DNA, 242 bp, Homo sapiens
  chr16:89500004-89500246
  hypo
accagagtaagagagaaggaacgggcttggacgcagcagggctgggcacgccaccttcacgagagtaagagagaaggaacgggcttggacgcagcagggctgggcacgccaccttcacgagagtaagagagaaggaacgggcttggacgcagcagggctgggcacgccaccttcacgagagtaagagagaagcaacgggcttggacgcggggactgggcacgccaccttctccagccccaga

SEQ ID NO: 29781 - DNA, 30 bp, Homo sapiens
  chr16:89504525-89504555
  hypo
ctggagatgggtccacgaaccgcgtgcgca

SEQ ID NO: 29782 - DNA, 11 bp, Homo sapiens
  chr16:89524936-89524947
  hypo
atttcatttct

SEQ ID NO: 29783 - DNA, 30 bp, Homo sapiens
  chr16:89545062-89545092
  hypo
cagcagccggctacgcgcagctctccggca

SEQ ID NO: 29784 - DNA, 30 bp, Homo sapiens
  chr16:89548160-89548190
  hypo
cttggatgggctttcgtgttcagacacgtc

SEQ ID NO: 29785 - DNA, 40 bp, Homo sapiens
  chr16:89558657-89558697
  hypo
aacagccggcgtatgcgctgatgtgcgttcacgaagaggt

SEQ ID NO: 29786 - DNA, 11 bp, Homo sapiens
  chr16:89575951-89575962
  hypo
ccggccataaa

SEQ ID NO: 29787 - DNA, 101 bp, Homo sapiens
  chr16:89577031-89577132
  hypo
tgactgcacacttaccgcctcagctacttgggaggctgatctttttttattttagagacgggatctcgccctgttgcacgggctggagtgcagtacaatgg

SEQ ID NO: 29788 - DNA, 100 bp, Homo sapiens; identical to SEQ ID NO: 10874
  chr16:89615004-89615104
  hypo

SEQ ID NO: 29789 - DNA, 30 bp, Homo sapiens
  chr16:89619387-89619417
  hypo
tctccataacccctcggacaaacgccgccc

SEQ ID NO: 29790 - DNA, 39 bp, Homo sapiens; identical to SEQ ID NO: 10875
  chr16:89627716-89627755
  hypo

SEQ ID NO: 29791 - DNA, 74 bp, Homo sapiens
  chr16:89647630-89647704
  hypo
acatcccatcacccactcacacggaacatccgatcacccgtcacacggaacatcctgtcaccagtcacacagaa

SEQ ID NO: 29792 - DNA, 216 bp, Homo sapiens
  chr16:89647763-89647979
  hypo
ccatcacacggaacatcccgtcacccgcagctgcccctgcccctttgtggccagctccccgcctggttcgtctcttctggaattccacgtccatgaatcacagcgcgtgttctccctgctgtggaattcttttacccaacataatgtctgcgtgactcatccccctgcagcctcggtcggagctggcgtgccatcgatcctgttgtcctccccatt

SEQ ID NO: 29793 - DNA, 114 bp, Homo sapiens
  chr16:89649561-89649675
  hypo
tgctccttggcaccttcgaagaggagtgggcggtggggtcctgggccggcacctcgctcacaccctttctgccgcccgtggctacgtggacatgctgggcgtgagggtccgggg

SEQ ID NO: 29794 - DNA, 147 bp, Homo sapiens
  chr16:89697116-89697263
  hypo
ccggggctgggggtgccggggctgggggtgccggggctgggggagtttggcctggggagttggggctgggggagctgggggtgagactcgtgtgtgcttggcttggggctcagtttctctgggggtgagactcgtgtgcccttgggt

SEQ ID NO: 29795 - DNA, 30 bp, Homo sapiens
  chr16:89702747-89702777
  hypo
tccaccgcatgtgccggatgtacccggaga

SEQ ID NO: 29796 - DNA, 201 bp, Homo sapiens
  chr16:89713466-89713667
  hypo
agcacagaggatgcttggtgacgtcagggagcaaccacaggtatgcagagacagcacgtcagcctgtgagccacccctcccgatgagctgcccacacacgctccttgtccccaggccacagccccaagggtaggggccacataccgatgtatggacgtccaggttctgcacctgctgctcgaacctgtccatcactgagga

SEQ ID NO: 29797 - DNA, 30 bp, Homo sapiens
  chr16:89715824-89715854
  hypo
ccagttcacaccttcgttcttcttgcggat

SEQ ID NO: 29798 - DNA, 30 bp, Homo sapiens
  chr16:89718568-89718598
  hypo
ctgccagcaccacacggaaacagggcctct

SEQ ID NO: 29799 - DNA, 30 bp, Homo sapiens
  chr16:89736775-89736805
  hypo
gctagcagctcggtcgaggcaagagtgact

SEQ ID NO: 29800 - DNA, 66 bp, Homo sapiens
  chr16:89755907-89755973
  hypo
accatttctgggtaaacgtaagcatccggttgctaatgcccataatccaaacgtgtcactgcagag

SEQ ID NO: 29801 - DNA, 691 bp, Homo sapiens
  chr16:89763952-89764643
  hypo
tagcctgggggctccgagacagacctataggctgaggctggtaccccctctgcccgaatacgcctcgggctggccgctgcagagctttcaggggtggccaggtccccaggcctactcagctcacggcgcagagagaggaaggagaaggcggaaggttcaggttccagcccctcctccaaggccccatatggtgggctgctggcctgcggcagctcctcagctgggggctcccaggcccggcccccagtgccccacagtttggcactctgctcccagagtggtggcctgtaggccagctccgccgggggcgagtcagggcctggtgacggctccccatacaggctggcgtcctccgacccctcgtcttcctgcaagtcccggtataagtccagtggggccctgtaagcagcaggggagcctcgggggggcaggggtggcggctcctcatcctgggccagccgctgctgcagccaggccacacaggaggccacgtccccgctggcacgccgtgcctgcagcagctcctcagctggcagcacactggtgcccagctgggccagcacctcacccaggatctcacactccagccggagggcgaagcagcccagggccacctgcaccagctggcaggcggggggcagggcggtcaccatgagccgatggctgtctctgcgtacgtagcccatcttct

SEQ ID NO: 29802 - DNA, 76 bp, Homo sapiens
  chr16:89800298-89800374
  hypo
tgagggtctctcaccgagtctctccttcagaagcacatcaaggagcaccacgaggaggtccgggagcggccctgcc

SEQ ID NO: 29803 - DNA, 43 bp, Homo sapiens
  chr16:89807743-89807786
  hypo
actacacaagaaacctgaagacgtactcagaagaacccctgca

SEQ ID NO: 29804 - DNA, 103 bp, Homo sapiens
  chr16:89815124-89815227
  hypo
gcctggaagctgctgccgcagaggacagacgaaggcaggcggaggaggatcctggaaagaaggggctgtattggtggcgacagcacagcgtacactctgctcc

SEQ ID NO: 29805 - DNA, 39 bp, Homo sapiens
  chr16:89830046-89830085
  hypo
ttaaaacaagttcccaggggccgagcgcagtggctcaca

SEQ ID NO: 29806 - DNA, 54 bp, Homo sapiens
  chr16:89884140-89884194
  hypo
gatgacgtagatgacgttcagcaccacaaacgaagagccgaggcacagagtggg

SEQ ID NO: 29807 - DNA, 30 bp, Homo sapiens
  chr16:89888802-89888832
  hypo
ctcagcctctgtgtcggtcaccagcctaga

SEQ ID NO: 29808 - DNA, 66 bp, Homo sapiens; identical to SEQ ID NO: 10879
  chr16:89894506-89894572
  hypo

SEQ ID NO: 29809 - DNA, 184 bp, Homo sapiens
  chr16:89900043-89900227
  hypo
gcagcgtggtgctaacgtctgtgcagccctgggcacgcctggctccggaagcactggccagtggaggtggcagcaagggatctgcacctgtgcactcgctggacctgccttggggagcagcacgtgtgggtccaggctgcgaatcccgaccggattctcagggaggggttctgcaaggtgcacc

SEQ ID NO: 29810 - DNA, 325 bp, Homo sapiens
  chr16:89900472-89900797
  hypo
gagacatctgtgaacctgcctgcgctcgcggttggccgtcgtagaagcatggataagcatagcccgtgtgaatctgtgaacctgcctgcgctcgcggttggccgtcgtagaagcctggataagcatagcccgtgtgaatctgtgaacctgcctgtgctcacggttggccgtcgtagaagcatggataagcatagcccgtgtgaatctgtgaacctgcccgcgctcgcggttggccgtcgtagaaggccccataagcatagcccgtgtgaatctgtgaacctgcctgtgctcacggttggccgtcgtagaagcctggataagcata

SEQ ID NO: 29811 - DNA, 30 bp, Homo sapiens
  chr16:89936470-89936500
  hypo
ccacagtggcagagcgtggaggaggcgttc

SEQ ID NO: 29812 - DNA, 172 bp, Homo sapiens
  chr16:89947430-89947602
  hypo
aggggctctgtttacataacacgtctatactgccatggattttctcaacgggcgtaagttgctcctgacttgtctcagcgggcgtttaagatgctcctgaatcgtatccttgtcatgtgggagcctccattggagagaaagccgactgaccggcaagcacagacctgccctg

SEQ ID NO: 29813 - DNA, 97 bp, Homo sapiens
  chr16:89960698-89960795
  hypo
agtccccgtacagccccggtgcaaccctggacagccctcatgcagcccctggacagctccccttgcagccccggacggcccccgcgcagccccagac

SEQ ID NO: 29814 - DNA, 268 bp, Homo sapiens
  chr16:89966625-89966893
  hypo
cggaaactcgcgtggcgggctgctctcggaaactcgcgcggcagtgggctgctctcacagactcgcgcgggggtgggctgctctcgtctgtaaattttccacattgagagcaccaactgctcagcttcagagaggagcctgggcggcaggtgggaccctcactccccacggtgtcctcgctccggctcagtctacttctcaggccctcccacgtcctctgtatcttctgcatgcggaaagccccccaggtggacgttttaagttatct

SEQ ID NO: 29815 - DNA, 218 bp, Homo sapiens
  chr16:89971867-89972085
  hypo
gtgtgtgaacacttcggaggctcatgccctaatatgctgcaactgacaggcatccccttgctgttcttgtctcgtttgtctgcgcccttggccctgtgctagttctgtgcatcagcaccgtggctctgtgcagtggtgtggccaggctcaggaccgcctgggagtggtgcccatttgcatctccacagtgaagtctgtgtgccgcggacatgaggtgt

SEQ ID NO: 29816 - DNA, 974 bp, Homo sapiens
  chr16:89972324-89973298
  hypo
gaagccactggctacggctctcatcgttcttgttctttggatgaagaggctgagtcactggccatgtggctgggattggtccccagaggctccccagccgcaggccagggaccagccatggtgcctctgctcgagagtaaagtgtacagtttttgcagccaccagagatgcagcgagatgcctcgtgctgggtgggggtgggggccgaggctccatggcggttaccatttcatttgctgtgctttatctgctgtgccttgtttctccccggccctaggcggaaggtgctctaccagcgtgcacccaggaatatccaccgccatgtgatcctctctgagatcaaggaagccgtcgctgccctgcccccggtaagggagaaaggctgaaatgggagctctgtgtaagccggtcacatgcacgtcccttctgctccgggcggtccacatgcaggcgtgcgtggtgcgggctccctcagcagcccagccccgccacggcaggggcagggtctagtgcagagggctcctcctttcctggcagcccgggttcggatgcttgttgttttgagagagaaatcctttggggctcagagcacaagctgagtcgtcaccgtggtgagctgctccatccgtggtcttgtgagcgcgtggtgcggctgctgggggattctctgtagtcgtggggtgtagtcctgctctgacgcctcctgtgctggaggtgccgtttctgtctcaaaacctaaggagtttgtactgttgttaagggataagatagaacgagtgagaaaaccagcaagtcagagggtcgcaggaccgtggaccgtccactggggacagcttagtgcctcctggtttaacttcagctgctctgcgggcccttatgaccggcatggctggctttgtctggggctgtgagcttctgactctcctcagtagagtggcagcacgtggcactgtgcaacccgagggcagctcagg

SEQ ID NO: 29817 - DNA, 30 bp, Homo sapiens
  chr16:89973701-89973731
  hypo
acaatctactcctacgtcaggccagagagg

SEQ ID NO: 29818 - DNA, 30 bp, Homo sapiens
  chr16:89985960-89985990
  hypo
ctcctgctggaggccggtgcactggtggcc

SEQ ID NO: 29819 - DNA, 31 bp, Homo sapiens
  chr16:90039697-90039728
  hypo
gagctaagggctttacgcggattatctaagt

SEQ ID NO: 29820 - DNA, 44 bp, Homo sapiens
  chr16:90044809-90044853
  hypo
ctcactttctctatatcgtcttgacagtacggttgcttttcttg

SEQ ID NO: 29821 - DNA, 31 bp, Homo sapiens
  chr16:90053465-90053496
  hypo
tgctggatggagctcccggatgtcatctggg

SEQ ID NO: 29822 - DNA, 136 bp, Homo sapiens
  chr16:90059131-90059267
  hypo
tcaactctgccaccaacgtcgtggtgttggctggcaccaaccgccctgacgtcctggacccggccctcatgcggcctggccggtttcatcgccagatttacactggtgagtacccctttctcggggttgggccttt

SEQ ID NO: 29823 - DNA, 329 bp, Homo sapiens
  chr16:90066618-90066947
  hypo
cttgatgacgaggtccggcacctcgtcagtgccacctacaggtgcaccctggacctgctgacacggtgccgggagcatgtggagaaggtgagtgtggcctctgcccagacaggtcgtgggtcccatgttgagtcacggtcatgccacacccgaaggccacacccgtccttcagcttgcttaggtttgggctgtgatcatgtcctcagagccgtctgacaggtgggccgttgtttccaggtgggccagcggctcctggagaaggaagtactggagaaggcagacatggtggagctgctgggcccccggcccttctcggagaagtctacct

SEQ ID NO: 29824 - DNA, 30 bp, Homo sapiens
  chr16:90068350-90068380
  hypo
tcctgggtgaacagcgggaggaggaggccc

SEQ ID NO: 29825 - DNA, 31 bp, Homo sapiens
  chr16:90072679-90072710
  hypo
tgcccagatctgccatcgtgttcggacccca

SEQ ID NO: 29826 - DNA, 30 bp, Homo sapiens
  chr16:90088473-90088503
  hypo
ggtttcttttcatccgtgaggagtggggag

SEQ ID NO: 29827 - DNA, 31 bp, Homo sapiens
  chr16:90109400-90109431
  hypo
gacagcctctccctgtcgtgctacctgagcc

SEQ ID NO: 29828 - DNA, 153 bp, Homo sapiens
  chr17:512962-513115
  hypo
ataattccactagtgtcgtaagaaaatcatctcactgctttgggtaagagacagcgaagaggagagaagagagaagagaagagaggaaaaaaacaatctcaaatgcatataaaattagtagacaaggccgggtgcggtggctcacgcctgtaa

SEQ ID NO: 29829 - DNA, 234 bp, Homo sapiens; identical to SEQ ID NO: 10886
  chr17:523693-523927
  hypo

SEQ ID NO: 29830 - DNA, 30 bp, Homo sapiens
  chr17:536289-536319
  hypo
tactcaacagtggccgtgagtgtactagga

SEQ ID NO: 29831 - DNA, 30 bp, Homo sapiens
  chr17:568197-568227
  hypo
gtgtgtggtggtggcggggctggaagtgaa

SEQ ID NO: 29832 - DNA, 28 bp, Homo sapiens
  chr17:570989-571017
  hypo
tgggccagcaccagtccgtggcctgttg

SEQ ID NO: 29833 - DNA, 468 bp, Homo sapiens; identical to SEQ ID NO: 10887
  chr17:576351-576819
  hypo

SEQ ID NO: 29834 - DNA, 50 bp, Homo sapiens
  chr17:591790-591840
  hypo
attgttaaacagttaacggacattttatgagtccccgcctcaactacaac

SEQ ID NO: 29835 - DNA, 30 bp, Homo sapiens
  chr17:597090-597120
  hypo
cagaagcttaggaagcgagtgctgaaagca

SEQ ID NO: 29836 - DNA, 153 bp, Homo sapiens
  chr17:597508-597661
  hypo
cgacctgctctgctgcggcaacctgtaacctattaatacgggatgggggagaacgccgacattcctgcagactgtcgaattctgggtctgactctgtaataccgctagtttgcaagagtccagaaccacaggttgaaacgtaaataactgaaa

SEQ ID NO: 29837 - DNA, 103 bp, Homo sapiens
  chr17:634436-634539
  hypo
cgtggcccagagagccgagcccagctgttccgaagtcctcatacgggattttggtcagcattttgcatgacggtgatctgaggagacccgtcatacctttcat

SEQ ID NO: 29838 - DNA, 84 bp, Homo sapiens; identical to SEQ ID NO: 10888
  chr17:635851-635935
  hypo

SEQ ID NO: 29839 - DNA, 258 bp, Homo sapiens
  chr17:662965-663223
  hypo
taagacaatagaagagcgtatcgtcaggcgctgggaatggcaccacgacaaggcattaatgtggattcacttgcacagctgctctcataaaagctacacgattcagaggtaaccctaactatccgcaatcccaaccaaagtcatgttcatgccgctgtcctagtctggacaatcatctgtcactcatccaacacagttatatacagaatgcgcagtcccagcaacagtgtagattacagcaggcgttctctacctgga

SEQ ID NO: 29840 - DNA, 1 bp, Homo sapiens
  chr17:664091-664092
  hypo
t

SEQ ID NO: 29841 - DNA, 18 bp, Homo sapiens
  chr17:664151-664169
  hypo
ccccgtctcatatacata

SEQ ID NO: 29842 - DNA, 442 bp, Homo sapiens
  chr17:692537-692979
  hypo
tgaatcctatgaaaggaatgacgtcagcagctctgaatcctaatgtcattgtgatccgtttcccttagattcccttagcctcagcgtgggtcacatgccccgcacacaaattcgcctcattacatttctgtctcttctcatcagaaatagggattaataggcttggctctaaacagactttcctcacagttggagcacgcctaaaatgtctcttacaccttgggaggtggaggggacagagagtaccattcatcagaaacaccccagccaccattaaaagtaaactaatagtggcacccgttgttgagacttgcctaaattgctgctcgcagctctttctcagtcacgccttgctagaatacgtttctgtgccagtgtgagagctacgtgctggggttctgtgatcagtacccgcttactcgccccattatttagtgctctg

SEQ ID NO: 29843 - DNA, 145 bp, Homo sapiens
  chr17:693372-693517
  hypo
cgctaacaagctgtgcgggggagggtgggaggccatgcagtcactgcgaggccccaccctcggccactctcccagcccgcccgtggtgaggagccgcccctgggaaaggccaggcgtcgcaggctgctgccggggttgcctcttg

SEQ ID NO: 29844 - DNA, 30 bp, Homo sapiens
  chr17:693741-693771
  hypo
ccagcgctgattgaccggctcactgcctgt

SEQ ID NO: 29845 - DNA, 30 bp, Homo sapiens
  chr17:694247-694277
  hypo
ccaccgctgattggccggctcaccatgctt

SEQ ID NO: 29846 - DNA, 90 bp, Homo sapiens
  chr17:836152-836242
  hypo
actgggattccaggcgtgagccaccgcgcccagcccagcccgtcctcttgaacctgctcagtttcagtcgtcatgaccacttgtaatatc

SEQ ID NO: 29847 - DNA, 30 bp, Homo sapiens
  chr17:851918-851948
  hypo
cagctgggtcccaacgcggggcctcacccc

SEQ ID NO: 29848 - DNA, 33 bp, Homo sapiens
  chr17:864607-864640
  hypo
gagtgagactccgtctcaagaaaaaaaaaaaag

SEQ ID NO: 29849 - DNA, 30 bp, Homo sapiens
  chr17:909967-909997
  hypo
ctggtctcaccctccgccagccacgggccc

SEQ ID NO: 29850 - DNA, 30 bp, Homo sapiens
  chr17:910376-910406
  hypo
gccacgggcccgggcggtgccagggtacct

SEQ ID NO: 29851 - DNA, 460 bp, Homo sapiens
  chr17:915564-916024
  hypo
ggggccagggtggtggtgaaccgggggacacgtgccctttcccgaggggccgccagtccccgttggtgccgagcccaaacgtaggcccccggctgacagagcttcccgcttgttacgaggagcagacgatctgggatctcacaagagaccttccagcgtttaggtgctggctcgcgtgcttctgaagtgtcctgtgagcgcctctgcggccactctagatccacaccggccatctgccaccgccgagcggggggtaactgattaggtgccaggatgggcaccggcggggagggctggggggcccgggctgggggggacccggggcaccgacgccaggactgggagacccgaggcagcacctacttcgtcaccacgctgatcttcacaccgaagacgccggtctgctttttggacggggtcctcttcaggctcatatctcggctggtgaatttcatggaaa

SEQ ID NO: 29852 - DNA, 30 bp, Homo sapiens
  chr17:916257-916287
  hypo
agcagccacagggccgggctgcccacctgc

SEQ ID NO: 29853 - DNA, 30 bp, Homo sapiens
  chr17:927442-927472
  hypo
tgctccgagtctcacgttcagtggcgtcgt

SEQ ID NO: 29854 - DNA, 31 bp, Homo sapiens
  chr17:930920-930951
  hypo
aggggcctccagctctcgggggaggcagcac

SEQ ID NO: 29855 - DNA, 31 bp, Homo sapiens
  chr17:1112805-1112836
  hypo
ggtgattcacctgtctcggcctcccagtgag

SEQ ID NO: 29856 - DNA, 17 bp, Homo sapiens
  chr17:1331214-1331231
  hypo
ccgcgcccagcctatat

SEQ ID NO: 29857 - DNA, 30 bp, Homo sapiens
  chr17:1375238-1375268
  hypo
gccggctctgcgcacgcgcaggttttccaa

SEQ ID NO: 29858 - DNA, 82 bp, Homo sapiens
  chr17:1376038-1376120
  hypo
agggggcaccaggtgacgtcttctggaaatgacgctctgctgagctttaaaggataaggaggaggggcgggtgaagtggcta

SEQ ID NO: 29859 - DNA, 25 bp, Homo sapiens
  chr17:1380149-1380174
  hypo
ggggttgaagtctcactctgtcgct

SEQ ID NO: 29860 - DNA, 136 bp, Homo sapiens
  chr17:1386689-1386825
  hypo
agtcatgggtgtgagtcggggtagggactgagtcccacccacatggagctgagttgcgacattcatctctggtcactggggggcaagagactgtgggattcctcacagatgtggcgcgggacgccaggatcatttc

SEQ ID NO: 29861 - DNA, 30 bp, Homo sapiens
  chr17:1387480-1387510
  hypo
gatgaaggcggcctcgctggtgaagttctc

SEQ ID NO: 29862 - DNA, 30 bp, Homo sapiens
  chr17:1398390-1398420
  hypo
actcaagctaccaacggaagcgaacctgga

SEQ ID NO: 29863 - DNA, 31 bp, Homo sapiens
  chr17:1408148-1408179
  hypo
catgaatcctgaggtacgatgggcttgagga

SEQ ID NO: 29864 - DNA, 30 bp, Homo sapiens
  chr17:1409913-1409943
  hypo
caagctttctgccccgtttggggaccagaa

SEQ ID NO: 29865 - DNA, 165 bp, Homo sapiens
  chr17:1410271-1410436
  hypo
acctggtgtcatagtcgttggagttcctatcaaacttgtaggtgggcgggaagagtaggcggccctcctggaactcccggagcagcgggtcatgtttcttggcaatgctgagctgcagacaaagtcatagtccccgtctcccagtagtctcgacccagtggccca

SEQ ID NO: 29866 - DNA, 217 bp, Homo sapiens
  chr17:1412247-1412464
  hypo
agcgtggggcagagggcggggaacagtctgcagacccaggctcactcgtggcggtcagcgtggggcagagggcggggaacagtctgcagacccaggctcactcgtgggggtcagcgtggggcagagggcggggagcggtctgcagacccaggctcactcgtgggggttagtgggggttagcgtggggcagagggcggggaacggtctgccagaccca

SEQ ID NO: 29867 - DNA, 31 bp, Homo sapiens
  chr17:1446392-1446423
  hypo
ccccccacaaggaggacgaatggcagagtgt

SEQ ID NO: 29868 - DNA, 31 bp, Homo sapiens
  chr17:1446645-1446676
  hypo
gcatcagagcgttctccggcgcctcccaccc

SEQ ID NO: 29869 - DNA, 66 bp, Homo sapiens
  chr17:1451500-1451566
  hypo
tttccctggcctaatccggaacacgcaggtgggacccacagctctgctgcccgcccctgcctggcc

SEQ ID NO: 29870 - DNA, 325 bp, Homo sapiens
  chr17:1454050-1454375
  hypo
tataagttatgtcagacagcacggacttcgtcctgaaggcaaagggaagccgtcagcagttttggcgctgggagtgacagaccatccagactgaacacttgaagcggtgcggagaactgaaaggcagggagactcgttagaagctgctgtagtaatccaggcaagaggtggcaaggaagggacatgttggagacgctgaggagatggagtcagcaggacctgatgggacacgaagggcaagtgagagtgttgcggggcggagtcagcgggacctgatgggacacgaagggcgagtgagagtattgcggggcggagtcagcgggac

SEQ ID NO: 29871 - DNA, 30 bp, Homo sapiens
  chr17:1462823-1462853
  hypo
caagcttagacgttcggtccccagaccctt

SEQ ID NO: 29872 - DNA, 29 bp, Homo sapiens
  chr17:1545292-1545321
  hypo
ggcgtgagccaccgcgcccagccagggat

SEQ ID NO: 29873 - DNA, 114 bp, Homo sapiens
  chr17:1546298-1546412
  hypo
ttttcccctttctcgttcctctgctttgtatgttttttgagaggagcaccgcgaagccctgacccctcctcccggcgccccgccgcggccacctgtctccgctccgccccgccc

SEQ ID NO: 29874 - DNA, 184 bp, Homo sapiens; identical to SEQ ID NO: 10899
  chr17:1588081-1588265
  hypo

SEQ ID NO: 29875 - DNA, 30 bp, Homo sapiens
  chr17:1659909-1659939
  hypo
caagtctttctcagcgttcccctcctctcc

SEQ ID NO: 29876 - DNA, 18 bp, Homo sapiens
  chr17:1683761-1683779
  hypo
cagcgtctcaaagtactg

SEQ ID NO: 29877 - DNA, 157 bp, Homo sapiens
  chr17:1694899-1695056
  hypo
aaccttgctggtgggcgcgtcagtggaactttcctggagggcaattttgcaagctgtatcaagtgccttaaaaatgttcatagaaaagtactcttatcatttgaattatctttattattaaaaaaactaactgaggctgggcgcagtggctcacgcc

SEQ ID NO: 29878 - DNA, 205 bp, Homo sapiens
  chr17:1756125-1756330
  hypo
taatctaaattcttaccatgtcggttggctccttgaagatacggtgcgtagcgagaacactgcattttaattaaggaactagttgggaactgaaaaccctgcaatcacttgataatgatgcggcgaaagatgaagagaaatatttatgtaaacagatgacaaatggaaaatagttcatcacaatgatcatcggggaaagcatttt

SEQ ID NO: 29879 - DNA, 298 bp, Homo sapiens
  chr17:1775555-1775853
  hypo
cccctagcaaattcaccgagtgccatggaatgcctcagcacgaattctaatccatgggagtctttgacaaaataaaaaatttacactttcccagagcattccttctacccaagtttaaatctcttaacccaaatcctttgcactaaaacggggtttcccttttgatcttcaggactcgggcagccgcaagtagctcctccagcgccagcagccagcccagcagcaagcagcaggccccagccgcagaatggaagctcgggaatgggtgagatgcctcacggggcgtgcgctgaccagg

SEQ ID NO: 29880 - DNA, 30 bp, Homo sapiens
  chr17:1783893-1783923
  hypo
tctgatttcggtggacggagcctctccgtg

SEQ ID NO: 29881 - DNA, 108 bp, Homo sapiens
  chr17:1784181-1784289
  hypo
acaaacctagagagtcggaggaggcaattagcatgtaagtgctgcctgctgacctcgatcctgccaaaggaggggacggccaggcttcagcagcggtgtgctgaaggc

SEQ ID NO: 29882 - DNA, 30 bp, Homo sapiens
  chr17:1784834-1784864
  hypo
ccgaactgcagggcccgttcatagtctgac

SEQ ID NO: 29883 - DNA, 162 bp, Homo sapiens
  chr17:1792140-1792302
  hypo
tgtcagtaagtagcctcggtagatgagaaccacggttgtgttcacggaggccctcccgtgtgccaggcactgtggtcacaacagtagagacaaagcattcctggtaggaagcccgcagatgagtaggtgtggaagagcttatccatccgctttttcatgcca

SEQ ID NO: 29884 - DNA, 30 bp, Homo sapiens
  chr17:1801622-1801652
  hypo
tctaacaccaaccacgctttgaaatgtgta

SEQ ID NO: 29885 - DNA, 173 bp, Homo sapiens
  chr17:1801916-1802089
  hypo
ccctcggtgtctgccgttgacataggggccagccagccctagacgggatgacttccgttcctgaggacagacacagagggactcctgctcagcctcactaattgtttagacacattccttcctacccttctctagtctcaggagatggtaactgggtcgcatttcagtctctg

SEQ ID NO: 29886 - DNA, 30 bp, Homo sapiens
  chr17:1833078-1833108
  hypo
agcctctccctaacgcggcgcccgtctgca

SEQ ID NO: 29887 - DNA, 30 bp, Homo sapiens
  chr17:1837772-1837802
  hypo
gaagtgccacgaaacggagcaccagggtgt

SEQ ID NO: 29888 - DNA, 30 bp, Homo sapiens
  chr17:1843094-1843124
  hypo
cgaggttggggggccggctccaggcctcca

SEQ ID NO: 29889 - DNA, 30 bp, Homo sapiens
  chr17:1850524-1850554
  hypo
ctcatgtacctgggcgggcctgtgtttaca

SEQ ID NO: 29890 - DNA, 31 bp, Homo sapiens
  chr17:1890004-1890035
  hypo
tctggttttaaactaacgagtttgttgtaat

SEQ ID NO: 29891 - DNA, 175 bp, Homo sapiens
  chr17:1938561-1938736
  hypo
ctggcagcagttcccacggcagtgttctggccagagcctcctcttcctgatgcaggaggcgtgtaggtggtgccatgtgctatgggggagctgtgcctgggtccccccatcctgggcaccaagggccctgcctgcggtggggaggtagtgggggtccggacgagagggccctgcc

SEQ ID NO: 29892 - DNA, 54 bp, Homo sapiens
  chr17:1940205-1940259
  hypo
gggctgcacatccccccgactgtccaaagaggtggaggccgttgtgtaagttaa

SEQ ID NO: 29893 - DNA, 45 bp, Homo sapiens; identical to SEQ ID NO: 10904
  chr17:2014967-2015012
  hypo

SEQ ID NO: 29894 - DNA, 32 bp, Homo sapiens
  chr17:2015468-2015500
  hypo
cctgattaaatttcctattaccgcttccctct

SEQ ID NO: 29895 - DNA, 144 bp, Homo sapiens
  chr17:2146559-2146703
  hypo
acactttctagtccaccgcccgtggagcagagtttcttccagtggaaccaagcctttccgcttctcaaaaaagttaactacaacggtatgtggaaactgacatagcccctacctccactaagagagccttctaggccgggcgtg

SEQ ID NO: 29896 - DNA, 157 bp, Homo sapiens
  chr17:2182383-2182540
  hypo
gtggttattacaaaggcgaaatggccagtctcagggatcaggaaacgcttccttgaaaacgtgacatttaggctgagacctgaagggtaagaaagaaagtgactgataaaggcagaaataccagtgagaggtaagagcggtgcgggcagagagatga

SEQ ID NO: 29897 - DNA, 121 bp, Homo sapiens
  chr17:2207846-2207967
  hypo
ttttaaaaactagatacgatatagttggaatcgtgtggaaggaagtacatcaggaggcatataagtccatttgggacctgtaatcccggcgactcggaacgctgagacgggcggatcgctt

SEQ ID NO: 29898 - DNA, 37 bp, Homo sapiens
  chr17:2208026-2208063
  hypo
agtctccaacagagcgagactccgcctcaaaaaaaaa

SEQ ID NO: 29899 - DNA, 22 bp, Homo sapiens
  chr17:2220982-2221004
  hypo
cggagactccatctcaaaaaaa

SEQ ID NO: 29900 - DNA, 79 bp, Homo sapiens
  chr17:2291974-2292053
  hypo
cccccaagcctaggaacgtgccccctgtacttgggctaaaccgatccatgagaaatggctgttgcgtcccatgacccag

SEQ ID NO: 29901 - DNA, 31 bp, Homo sapiens; identical to SEQ ID NO: 10906
  chr17:2302258-2302289
  hypo

SEQ ID NO: 29902 - DNA, 30 bp, Homo sapiens
  chr17:2324846-2324876
  hypo
ctccaactgctaaacgtccttcgtgtacct

SEQ ID NO: 29903 - DNA, 203 bp, Homo sapiens
  chr17:2326290-2326493
  hypo
aaaaaggataaaaaagaaaaaacaccaagtcaggtttgaagatctttttctgctaaaaggaatctgacgactgctactgatcattccagtcgtacctggccacactgacagcgcacacgcacacatgcagacaccacaggttctgattactgggggacgtcttctaataagaactaaccagcggcctcacactgcatacatac

SEQ ID NO: 29904 - DNA, 40 bp, Homo sapiens
  chr17:2326809-2326849
  hypo
aagctggggaagaagcgtattaagccggtgtgtgggagga

SEQ ID NO: 29905 - DNA, 17 bp, Homo sapiens
  chr17:2388074-2388091
  hypo
accgcgcctggtgacca

SEQ ID NO: 29906 - DNA, 121 bp, Homo sapiens
  chr17:2388545-2388666
  hypo
ctgtctcccatcacccccatatgggaccgtctagctgaggggaaacaagctgcgggaaaacaagctgattctacactatggtgagttgtataattatttcattacatgaaataatacaacg

SEQ ID NO: 29907 - DNA, 35 bp, Homo sapiens
  chr17:2595623-2595658
  hypo
ggccttggcgtttggacgggcggcccctcacctga

SEQ ID NO: 29908 - DNA, 30 bp, Homo sapiens
  chr17:2599243-2599273
  hypo
gctgccagcccacacggtgggctcagcagg

SEQ ID NO: 29909 - DNA, 30 bp, Homo sapiens
  chr17:2603780-2603810
  hypo
cagggagggaaaaacgagctcagcctgtgc

SEQ ID NO: 29910 - DNA, 203 bp, Homo sapiens; identical to SEQ ID NO: 10908
  chr17:2627380-2627583
  hypo

SEQ ID NO: 29911 - DNA, 517 bp, Homo sapiens; identical to SEQ ID NO: 10909
  chr17:2627798-2628315
  hypo

SEQ ID NO: 29912 - DNA, 45 bp, Homo sapiens
  chr17:2684789-2684834
  hypo
agcacacccctgtgtgtgcaccgtgtgagcacgtctctgtgtgag

SEQ ID NO: 29913 - DNA, 241 bp, Homo sapiens
  chr17:2684893-2685134
  hypo
gtgtgcaggtctctgtgtgagcacgtctctgtgtgagcacgtctctgtgtgtgcaggtctctgtgtgggcacgtctctgtgtgtgcaggtctctgtgtgtgcacgtctctgtgtgagcacgtctctgtgtgtgcacgtctctgtgtgagtacgtctctgtgtgtgcacgtctgtgtgtgcacgtttctgtgtgtgcacgtctgtgtgtgcacgtctctgtgtgtgcaggtctctgtgtggg

SEQ ID NO: 29914 - DNA, 45 bp, Homo sapiens
  chr17:2685193-2685238
  hypo
gtgtgcaggtctctgtgtgggcacgtctctgtgtgggcaggtctc

SEQ ID NO: 29915 - DNA, 189 bp, Homo sapiens; identical to SEQ ID NO: 10912
  chr17:2756812-2757001
  hypo

SEQ ID NO: 29916 - DNA, 126 bp, Homo sapiens
  chr17:2908573-2908699
  hypo
ggtgagtagctttgtaaggagcgtggctcccgtaggggcagcgctcgtctcttccctccaggtccgtaccatgactctgtttcactcaggtctctgtcactgcgcgggaagatgtgcccacctttg

SEQ ID NO: 29917 - DNA, 30 bp, Homo sapiens
  chr17:3375586-3375616
  hypo
cggagagccgtcagcgaggcagcgccgggg

SEQ ID NO: 29918 - DNA, 30 bp, Homo sapiens
  chr17:3500368-3500398
  hypo
ggagtcgctgtggacgcccttcggcactca

SEQ ID NO: 29919 - DNA, 31 bp, Homo sapiens
  chr17:3576583-3576614
  hypo
ggcaggtcccagaaagcgtctgccatctccc

SEQ ID NO: 29920 - DNA, 1 bp, Homo sapiens
  chr17:3599244-3599245
  hypo
c

SEQ ID NO: 29921 - DNA, 68 bp, Homo sapiens
  chr17:3664935-3665003
  hypo
ctggcccacccctcaccgggtgtaggagtcagtgttggcatcaaggccgaggccgacacctgcaggag

SEQ ID NO: 29922 - DNA, 610 bp, Homo sapiens
  chr17:3716184-3716794
  hypo
cttaagatgtcttgccgaagtagcaagagcggagggtgactgtgtgagcaggagcgagagggcgccagctcctgcgggggaggttcctactgcgcgccccaccctgtgcaagaatgtcaggctttagggcagctgccataggccccaggggcatcaggactctgcctctgaaccagagctgctttcccgactaacttcaatctggagagatggtaagttatctaaccggctcttcttttggcgagactgctctttctccttaatcagagccccccatgccctttgcagctcagagtcgtcttcctcagcgccaggcgccctgtgatccactttcttcgtattcttttctttggtcttgggtgcagatcctaggcgagtccataaattacctgtttggatgagatggcatttcactttcgcagtcagcgctaagaaccagggtagcactgagggggcagcagcactgccaacacctgctgtgcaggaaacgccagcagtctgtggagcctgccaccacagtgcagccttgggcaggcaaaatctcatttcccgggccgcagcccctgcccgcaaacggaagggtctggacccagcacgggattctcaccgt

SEQ ID NO: 29923 - DNA, 74 bp, Homo sapiens
  chr17:3721568-3721642
  hypo
aactgagattccacttcgtcagcatacatagtcattttcatgcttttctttggtgaaggcgtggaaatcatttt

SEQ ID NO: 29924 - DNA, 30 bp, Homo sapiens
  chr17:3769713-3769743
  hypo
ggaagcggctgagccgcagccggtggccca

SEQ ID NO: 29925 - DNA, 31 bp, Homo sapiens
  chr17:3844262-3844293
  hypo
accatagcagtgatctcgttaaaggactgca

SEQ ID NO: 29926 - DNA, 35 bp, Homo sapiens
  chr17:3844906-3844941
  hypo
gcggactgagctacagcgctcgatcacactctcag

SEQ ID NO: 29927 - DNA, 243 bp, Homo sapiens; identical to SEQ ID NO: 10917
  chr17:3866999-3867242
  hypo

SEQ ID NO: 29928 - DNA, 92 bp, Homo sapiens
  chr17:3884834-3884926
  hypo
gtgctgtgtggcttcgcgggccgaggcgctcagcactgagcccagggcctgttggtgaaaaacgcgtcgctccaggcgtcctaagcgccagt

SEQ ID NO: 29929 - DNA, 31 bp, Homo sapiens
  chr17:3904902-3904933
  hypo
ggtcagaaatactttccgctgaggtgagagg

SEQ ID NO: 29930 - DNA, 30 bp, Homo sapiens
  chr17:3912355-3912385
  hypo
gacgctactcacgccgcccagcaccgcgtg

SEQ ID NO: 29931 - DNA, 29 bp, Homo sapiens
  chr17:3921576-3921605
  hypo
ttttttttagagatgacgtgttggagcta

SEQ ID NO: 29932 - DNA, 28 bp, Homo sapiens
  chr17:3921664-3921692
  hypo
tccctagtagctgcgattacaggctcat

SEQ ID NO: 29933 - DNA, 214 bp, Homo sapiens
  chr17:3980581-3980795
  hypo
ctgtttacaatgagcccgtgcattaggtgtaccaatctaacaggccaagctctaggtggcaggacccaatataagtgttttcgtcacagctgctgggaccaagtttgatggaactacattttccacgtataatttgtcagcacccgttgggtttcatataattttctgtgagtttacagaacatgaatctaattattctcggtaatcagcaatg

SEQ ID NO: 29934 - DNA, 32 bp, Homo sapiens
  chr17:4039290-4039322
  hypo
tttttttttttttttttgagacggtgtctcgc

SEQ ID NO: 29935 - DNA, 32 bp, Homo sapiens
  chr17:4039621-4039653
  hypo
agtgagactccgtctcaaaaaaaaaaaaacaa

SEQ ID NO: 29936 - DNA, 86 bp, Homo sapiens
  chr17:4076473-4076559
  hypo
attaaaacaaaaataccggtaccaaaagtaccaaaataaagtacccgaagctggtgaggtgccccagcggccggttttgcagctcc

SEQ ID NO: 29937 - DNA, 46 bp, Homo sapiens
  chr17:4161525-4161571
  hypo
atttcagaagtagggccgggcgcggtggctcacgcctgtaatccca

SEQ ID NO: 29938 - DNA, 30 bp, Homo sapiens
  chr17:4170806-4170836
  hypo
taaatgctgtctaccgtagcttcaagagca

SEQ ID NO: 29939 - DNA, 88 bp, Homo sapiens
  chr17:4215694-4215782
  hypo
aacaaaaaacaggaggcggcacaaggtaaactgagaaaggtaagccagtgaaatagggaggccgaggcaggcggatcacgaggtcaag

SEQ ID NO: 29940 - DNA, 143 bp, Homo sapiens
  chr17:4236550-4236693
  hypo
tactgaaatgaccttcgttcacatcaaaagtaatgtaaagaatgtgtgtatctcagccatcattttaaaagaagagaagaaaaaaacttacgggcgaagctgttccctaaacagctaaaatatgtaaaatgtaaaagacgggc

SEQ ID NO: 29941 - DNA, 25 bp, Homo sapiens
  chr17:4256508-4256533
  hypo
tctcgaaaacaacaacaacaacaac

SEQ ID NO: 29942 - DNA, 37 bp, Homo sapiens
  chr17:4273439-4273476
  hypo
agcttactggctttagcgttcacgccacacagctctt

SEQ ID NO: 29943 - DNA, 378 bp, Homo sapiens
  chr17:4392107-4392485
  hypo
gctccaagttccagggaaccacgcagaggaacccacgcctatacagacacgggcgcagcggccccagaaccctgctgaggacttgagtggccgtgcagggatcctcctggcctgcccagttctgtagccccggtcttccctgggtccacgctctgaccccagcacagcgtatggggagggctggctctgcggggcccacgcttgccactgggttcagagcagctgggctcagcgggccctgtgggagatcgacagcttccaggcgggcagcagtggggaggcttgttctcatgttctttccgcctcccctggtgcccagccaggcgatcacttgctcactcaccgatggccaccttcgctgtgccaggctgtgcctgt

SEQ ID NO: 29944 - DNA, 30 bp, Homo sapiens
  chr17:4456054-4456084
  hypo
aaattcccaggcagcggggtttttgacaag

SEQ ID NO: 29945 - DNA, 79 bp, Homo sapiens
  chr17:4461994-4462073
  hypo
gtgggagcgagggctgcgctgcgaagcacagctgccagttgtgggttggtggctcgggccccagcgcccaggggtgtcc

SEQ ID NO: 29946 - DNA, 562 bp, Homo sapiens
  chr17:4500075-4500637
  hypo
cagcctcccctgccccagacccgcactgggagatggcagctggaggggcccccgcagcaggcctgccgtctctccgcagggggaaaggcgaggcccgggccaggctgaagcggtcgcagagcttcggcgtggccagcgccagcagcatcaagcagatcctgctcgagtggtgccgcagcaagacgctgggctaccaggtgagccccggctcccctccggctgctgggacgccccagctaaaagcttgaccaagcgtcgcccctgtccttgttctcccgcctgggcaggagcccgctgaggctggggttaaggggtaggaaccacggtaattatgccttccgagtgggtgcccagctgccctcccgcactgaccccactcaccctgttgcagcacgtggacctgcagaacttctcctccagctggagcgacggcatggccttctgcgccctggtacactccttcttccccgatgcctttgactacaactccctgagccccacgcagaggcagaagaacttcgagctggctttcaccatggccgagtgagtatggtggctcctg

SEQ ID NO: 29947 - DNA, 31 bp, Homo sapiens; identical to SEQ ID NO: 10922
  chr17:4642753-4642784
  hypo

SEQ ID NO: 29948 - DNA, 31 bp, Homo sapiens
  chr17:4713424-4713455
  hypo
ttccacctccctggatcgggacatagttttg

SEQ ID NO: 29949 - DNA, 30 bp, Homo sapiens
  chr17:4764489-4764519
  hypo
cagtgtcaccaggacgtgctgcttggggcc

SEQ ID NO: 29950 - DNA, 420 bp, Homo sapiens
  chr17:4795657-4796077
  hypo
ccccgccgccccctcggcacccctgtgctcccttcacagacctcgcagcaactccgcctggcaaatctatctgcaaaggcgggcagagcggggcaccccaaagcctccagggccccctgctcagccccctggcccgcccaacgcctctaggtaatagagttgtcccccaactcactctcacctctcacttctgccacccgcttccctggtgatggctccctctgcagtgcagctcagcaccccagagaagggagcaccgtgcctccctgaccctgactctgcccccccaacagtaaccccgacctcaggaggagcgaccctggctgggaacgctcggacagcgtccttccagcctctcacgggcacctcccccaggctggctcactggagcggaaccgcgtgggaggtatgtgagccagg

SEQ ID NO: 29951 - DNA, 30 bp, Homo sapiens
  chr17:4799588-4799618
  hypo
tgtggatgtcgactcggggaacagctatga

SEQ ID NO: 29952 - DNA, 329 bp, Homo sapiens; identical to SEQ ID NO: 10924
  chr17:4853392-4853721
  hypo

SEQ ID NO: 29953 - DNA, 30 bp, Homo sapiens
  chr17:4863100-4863130
  hypo
ggctgctcccttgccgatgaggtggctgta

SEQ ID NO: 29954 - DNA, 204 bp, Homo sapiens; identical to SEQ ID NO: 10925
  chr17:4890352-4890556
  hypo

SEQ ID NO: 29955 - DNA, 31 bp, Homo sapiens; identical to SEQ ID NO: 10926
  chr17:4900808-4900839
  hypo

SEQ ID NO: 29956 - DNA, 119 bp, Homo sapiens; identical to SEQ ID NO: 10927
  chr17:4901560-4901679
  hypo

SEQ ID NO: 29957 - DNA, 64 bp, Homo sapiens
  chr17:4916169-4916233
  hypo
ctgtgggagaagggaatgggccgggttttcagcacagagcagcgtaacaatcactcaggtgttc

SEQ ID NO: 29958 - DNA, 170 bp, Homo sapiens; identical to SEQ ID NO: 10928
  chr17:4981378-4981548
  hypo

SEQ ID NO: 29959 - DNA, 89 bp, Homo sapiens; identical to SEQ ID NO: 10929
  chr17:4981951-4982040
  hypo

SEQ ID NO: 29960 - DNA, 248 bp, Homo sapiens
  chr17:5269053-5269301
  hypo
actttagaaaatgaagccatacgttctgtgttcttttgcgtctgtgttcctccgttcaacagtgtactattcctactcgtgatgcacggagtgtttgttcattttcattgttgaatagtcatatcattatacggatataccgcaatttatccagactaatgttgatggatatttcagttgtttccagttctgggatattatgaataatgttcctttgaaatttttgtatagggcgtggtggacatgtt

SEQ ID NO: 29961 - DNA, 11 bp, Homo sapiens
  chr17:5317809-5317820
  hypo
aggccctgaag

SEQ ID NO: 29962 - DNA, 30 bp, Homo sapiens
  chr17:5350269-5350299
  hypo
tgccaaccgtaggccgttggcatcagacac

SEQ ID NO: 29963 - DNA, 30 bp, Homo sapiens
  chr17:5392348-5392378
  hypo
gcccagtgcagattcgcaaatgcacagaga

SEQ ID NO: 29964 - DNA, 49 bp, Homo sapiens
  chr17:5404270-5404319
  hypo
agccatgggcaggatcgcgggtaggtgggtcagccgggtctgggtcaga

SEQ ID NO: 29965 - DNA, 30 bp, Homo sapiens
  chr17:5405245-5405275
  hypo
agaggtccactggccggctttgttagttgc

SEQ ID NO: 29966 - DNA, 30 bp, Homo sapiens
  chr17:5984243-5984273
  hypo
agagccccctgacccggccccggcccggcc

SEQ ID NO: 29967 - DNA, 478 bp, Homo sapiens
  chr17:6023532-6024010
  hypo
accctgcccacttccctctcccgagcagccccccggggaccggcagccctggcagggccagcccccgactctgcatctctcctgtcctcactctagagtggccggactttgtcaacagctacgcctcgtggtggtcctcgcacgtcctggactggctcaagtacgggaagcggctgctggtggtgcactacgaggagctgcggcgcagcctggtgcccacgttacgggagatggtggccttcctcaacgtgtctgtgagcgaggagcggctgctctgcgtggagaacaacaaggagggcagcttccggcggcgcggccggcgctcccacgaccctgagcccttcaccccggagatgaaagacttgatcaatggctacatccggacggtggaccaagccctgcgtgaccacaactggacggggctgcccagggagtatgtgcccagatgataggcctggcccacgccgccgcccccgct

SEQ ID NO: 29968 - DNA, 43 bp, Homo sapiens
  chr17:6470125-6470168
  hypo
tcctgctgtacagcagcagcacgctaagaaaaataacaaccgg

SEQ ID NO: 29969 - DNA, 253 bp, Homo sapiens; identical to SEQ ID NO: 10938
  chr17:6616629-6616882
  hypo

SEQ ID NO: 29970 - DNA, 21 bp, Homo sapiens
  chr17:6811262-6811283
  hypo
agccaccgcccctggcctcaa

SEQ ID NO: 29971 - DNA, 65 bp, Homo sapiens
  chr17:7077089-7077154
  hypo
cagtcctcgcctcctccgagcccgtggccgtaccagtcgtccggctgctccggcctccagttcct

SEQ ID NO: 29972 - DNA, 31 bp, Homo sapiens
  chr17:7112808-7112839
  hypo
gtaaaaagagaaggcacggcaatcccagcac

SEQ ID NO: 29973 - DNA, 38 bp, Homo sapiens
  chr17:7136108-7136146
  hypo
tcaaaaaagcagaggttgggccgggcgcggtggctcac

SEQ ID NO: 29974 - DNA, 15 bp, Homo sapiens
  chr17:7146549-7146564
  hypo
cgaagcccggtttct

SEQ ID NO: 29975 - DNA, 86 bp, Homo sapiens
  chr17:7188330-7188416
  hypo
ggttgccctcacccacgcggcccctcctacttcccgtgcccaaaaggctggggtcaagctccgactctccccgcaggtgttgttgg

SEQ ID NO: 29976 - DNA, 421 bp, Homo sapiens
  chr17:7224769-7225190
  hypo
gctccccacctaggaccgaggtaggacaaggacggacgatgttcagcccacctctccctgccacctccactcccaacccctcccctgtccctggagccagccacttcacccccagcctctctaggttccggccatagttcatcctctggagctgcccatcacgcctcacttcacagctggataccatccaagtggtcttcgtccggagctctggcagggaaggaggcagccctgggccaccaccgcctgccccgggtcccatctcccccggtgctagtgtggtcagccccagccgcagggaacctgcccacttctcatctagctcttccactttcacctacgagacagagaaaacataagctggccctgtcgtgatgggcctcgcagcccctctgtcacatcactacggcctacctcaaag

SEQ ID NO: 29977 - DNA, 30 bp, Homo sapiens
  chr17:7227226-7227256
  hypo
gcagctgatggaagcgcaggtcagagcccc

SEQ ID NO: 29978 - DNA, 58 bp, Homo sapiens; identical to SEQ ID NO: 10945
  chr17:7254510-7254568
  hypo

SEQ ID NO: 29979 - DNA, 891 bp, Homo sapiens; identical to SEQ ID NO: 10946
  chr17:7254951-7255842
  hypo

SEQ ID NO: 29980 - DNA, 31 bp, Homo sapiens; identical to SEQ ID NO: 10948
  chr17:7307051-7307082
  hypo

SEQ ID NO: 29981 - DNA, 30 bp, Homo sapiens
  chr17:7330128-7330158
  hypo
tgagcagtgggcctcgtctccaccacctcc

SEQ ID NO: 29982 - DNA, 30 bp, Homo sapiens
  chr17:7367424-7367454
  hypo
cgcagcctaactcacggagccttcttctca

SEQ ID NO: 29983 - DNA, 491 bp, Homo sapiens
  chr17:7368874-7369365
  hypo
ctcccacctcagctaaccacagtgctgggattactgcagctagcctagtttcaggataactttctaggccccaagccccacccactgccgcccttgttcctatgaccgctgagtgccagcctccagccgctcccccgccagcctggatcactcacctgcgctcccccgtgtgccacacttcatgcttcgtgcggtactccgccagagcaaacactttctcacaatagcggcaggggtacttcctccgccacgagtgtacattgctgtgtctcttcagactggacagggtcacgtaggaacgctcgcaggccgcgcacacatacagcacgtggccgcccaccaccttcaccacgtgctcggggccccctcggaagcccactggtggaggcagggctgaggcgtccacccctgcaggaccaccagggccagcgcccccagctcccagccctgtagacccccgcgtgctggcccctcgtcggcactgggcctca

SEQ ID NO: 29984 - DNA, 30 bp, Homo sapiens
  chr17:7460470-7460500
  hypo
gtgtgctggccctgcgctgcctggaggaat

SEQ ID NO: 29985 - DNA, 30 bp, Homo sapiens
  chr17:7466806-7466836
  hypo
ctcaaaaagcacctcgctgacattccactg

SEQ ID NO: 29986 - DNA, 30 bp, Homo sapiens
  chr17:7480134-7480164
  hypo
tgatggagcccatgcgtgtcatctgagcct

SEQ ID NO: 29987 - DNA, 113 bp, Homo sapiens
  chr17:7491969-7492082
  hypo
acccagcccgctgggcgcagcaggcatggaagccgaccccgggatggagagcccgcggccctgttggggcacgctcgggagcgggcttgcgtgctgcacggctgttttcctct

SEQ ID NO: 29988 - DNA, 124 bp, Homo sapiens
  chr17:7492334-7492458
  hypo
ccgccacaccttggccgcgagtggcctctgcttgggtgggctcccgtcctccggcatccgcccccaccaaggctccagaagaggggcgcatgggcctccgtcttcggcccgcttcccaggcact

SEQ ID NO: 29989 - DNA, 86 bp, Homo sapiens
  chr17:7494080-7494166
  hypo
accaccaagaaggccggaccccgggctccagaggctgctgtgagggaaccctgctccccactctgcccaacggcccagcccaagcc

SEQ ID NO: 29990 - DNA, 31 bp, Homo sapiens
  chr17:7496152-7496183
  hypo
ggggctctggttcagacgtgtccaataggct

SEQ ID NO: 29991 - DNA, 31 bp, Homo sapiens
  chr17:7571394-7571425
  hypo
tcagacatttaaatcccgtaatccttggtga

SEQ ID NO: 29992 - DNA, 166 bp, Homo sapiens; identical to SEQ ID NO: 10956
  chr17:7571718-7571884
  hypo

SEQ ID NO: 29993 - DNA, 825 bp, Homo sapiens; identical to SEQ ID NO: 10957
  chr17:7572183-7573008
  hypo

SEQ ID NO: 29994 - DNA, 112 bp, Homo sapiens; identical to SEQ ID NO: 10958
  chr17:7573921-7574033
  hypo

SEQ ID NO: 29995 - DNA, 622 bp, Homo sapiens; identical to SEQ ID NO: 10959
  chr17:7576545-7577167
  hypo

SEQ ID NO: 29996 - DNA, 122 bp, Homo sapiens; identical to SEQ ID NO: 10960
  chr17:7577495-7577617
  hypo

SEQ ID NO: 29997 - DNA, 559 bp, Homo sapiens; identical to SEQ ID NO: 10961
  chr17:7578174-7578733
  hypo

SEQ ID NO: 29998 - DNA, 692 bp, Homo sapiens; identical to SEQ ID NO: 10962
  chr17:7579248-7579940
  hypo

SEQ ID NO: 29999 - DNA, 175 bp, Homo sapiens; identical to SEQ ID NO: 10963
  chr17:7590693-7590868
  hypo

SEQ ID NO: 30000 - DNA, 30 bp, Homo sapiens
  chr17:7690312-7690342
  hypo
accctcatcaacggcgagcgcatcgcgatg

SEQ ID NO: 30001 - DNA, 96 bp, Homo sapiens
  chr17:7769320-7769416
  hypo
tttaatgggagactcacggaagtttgtgattctcttaatttgtcatcctgcttccttatttacacagtagccatggggaacttttttttttttttt

SEQ ID NO: 30002 - DNA, 36 bp, Homo sapiens
  chr17:7769715-7769751
  hypo
gcgcccggccgccacggggaacttttaaagttccca

SEQ ID NO: 30003 - DNA, 164 bp, Homo sapiens
  chr17:7798645-7798809
  hypo
ccatcccaaagtgccccgtgctgaagggtcgagtgcagaagatcctacattggcggtggggggagccacctgtagcagtgccagcccctcaacaggcagatggaaatccagatgtcccacccccccgtcctcttcaaggcagatcagagcgagagttctttgtc

SEQ ID NO: 30004 - DNA, 31 bp, Homo sapiens
  chr17:7800249-7800280
  hypo
tacaggcatgagccaccgtgcctgggccaat

SEQ ID NO: 30005 - DNA, 169 bp, Homo sapiens
  chr17:7806523-7806692
  hypo
gctctatgggcagcttctccccggccactcccctgacccacccgccactttctcttgcccctgcaggcctttagccgggctcatcggattggccaggccaacaaagtgatgatttaccggtttgtgactcgcgcgtcagtggaagagcgaatcacacaagtggccaaga

SEQ ID NO: 30006 - DNA, 110 bp, Homo sapiens
  chr17:7807195-7807305
  hypo
gctcggctgttggaccggaaccaggatgcaactgaggacactgacgtgcagaacatgaatgagtatctcagctccttcaaggtggcacagtacgtcgtgcgggaagaaga

SEQ ID NO: 30007 - DNA, 31 bp, Homo sapiens
  chr17:7810098-7810129
  hypo
ttgcgctggtgtgagacggaggagactggag

SEQ ID NO: 30008 - DNA, 50 bp, Homo sapiens
  chr17:7811071-7811121
  hypo
gtggagtctggggaaccgaatgcttgggtcctgggcgggtagctgtttga

SEQ ID NO: 30009 - DNA, 31 bp, Homo sapiens
  chr17:7813719-7813750
  hypo
ttctttctctgtggcccgggccccagttctg

SEQ ID NO: 30010 - DNA, 8 bp, Homo sapiens
  chr17:7860533-7860541
  hypo
ccttaact

SEQ ID NO: 30011 - DNA, 151 bp, Homo sapiens
  chr17:7892699-7892850
  hypo
gaagaatgttaaaatccggtcaagtataacttcattgatttctggtttcaaggattgtaccccacaattgtctcttttctccccacacgtcatggaaatgatcagaaagaagtaattgtatgacagtttaaaaaatgaactgttccgacct

SEQ ID NO: 30012 - DNA, 30 bp, Homo sapiens
  chr17:8045648-8045678
  hypo
gggatcctggagcacgtacttaatcacctg

SEQ ID NO: 30013 - DNA, 30 bp, Homo sapiens
  chr17:8053411-8053441
  hypo
tctgagtccttgcccgggctgactgttcac

SEQ ID NO: 30014 - DNA, 28 bp, Homo sapiens
  chr17:8104139-8104167
  hypo
gccttaaaccttgcctttggccgggtgc

SEQ ID NO: 30015 - DNA, 291 bp, Homo sapiens
  chr17:8104406-8104697
  hypo
tccagcctgggcaacagagcaagattccgtcttgagaaaaagcaaaaaccttgcctttatctcgtttgaattcttgccctcgagaaaacagaggagagaggttgctgcagagttgcaactccggagtttcccggatagctgcaggcttacccgcaggtaacagtagaagtaggagtcagcgttaaggctgtgggaaaataggtgtccttcattattgccggtgggagtgtaaactgtccaccacttagaggggcatttttggtgatatctatagaccgtttacctgcgtgt

SEQ ID NO: 30016 - DNA, 42 bp, Homo sapiens
  chr17:8104905-8104947
  hypo
aaaaattataggctgaaaggccgggcgcggtggctcacgcct

SEQ ID NO: 30017 - DNA, 361 bp, Homo sapiens
  chr17:8138509-8138870
  hypo
agctttgaagcagaacggcgccacggaggcagggggcgagcactggccttcttgtcccccctcccactgactggagcaggtgaacatcctggagctgggggaaagcagagaaaatgaaaaagcagagatgaagaccccaactcaatgaacccaggcagagttaaccgcactttgccactgcctgggttccaggaagacggaaagcaatttctcccacgtgggctggcctcactttccattacaacccactcccgctgcggtcagccttcatctcccatgagctccactcagtcttgctgtgggctgggtggctcctggatgaacagacatggctgaggcttctcaccgggtcgcctgagat

SEQ ID NO: 30018 - DNA, 31 bp, Homo sapiens
  chr17:8139151-8139182
  hypo
cagacacactccaggtcgcatcacccgccta

SEQ ID NO: 30019 - DNA, 237 bp, Homo sapiens
  chr17:8197592-8197829
  hypo
gcagatcagaagactccgaagcctaccagcactttcctgatgcctttccctgcttgcagtggggcagcactctgccacctatgcccttgggaaagaacagctcctatcctacaacgaggatctgccctgaaggtcccaggcaagagccctcttcttaccatgtagatggggctccccaagtaggctcccatgaccccagccatggccccagctgctgcgctgcgggcaggactgtgg

SEQ ID NO: 30020 - DNA, 123 bp, Homo sapiens
  chr17:8296211-8296334
  hypo
ggcagcagaaggcgcgggcggagcggggcgccagggaggcctccgagagctctgccaggctgcggcggggcagcacgctgtcctgctcccccaggggcatcccgtggcggctgatgacaaaga

SEQ ID NO: 30021 - DNA, 30 bp, Homo sapiens
  chr17:8311579-8311609
  hypo
agagctggcgcccacgcaggggacagaaac

SEQ ID NO: 30022 - DNA, 31 bp, Homo sapiens
  chr17:8365272-8365303
  hypo
actgtctgttcagggtcgctactcctgcccg

SEQ ID NO: 30023 - DNA, 196 bp, Homo sapiens
  chr17:8384571-8384767
  hypo
cctccagccttctcagcagtgcgcgtgcctgagggcgaagaacccacccccggccgtgggagactcacttgccagaggcgctgttggtgatctcgtccgccagctcatctctctcctgctcggcgtgtcggcgggctcgctcagatgaggcaagttcctaagcagtggagactgcgttaagctctggctgtgaata

SEQ ID NO: 30024 - DNA, 31 bp, Homo sapiens
  chr17:8390694-8390725
  hypo
aaagccacataggtcacgtggtgccatccag

SEQ ID NO: 30025 - DNA, 31 bp, Homo sapiens
  chr17:8424445-8424476
  hypo
gttagggttggtgtttcggagagttgccatc

SEQ ID NO: 30026 - DNA, 159 bp, Homo sapiens
  chr17:8438421-8438580
  hypo
ggtggcctaagtcatacgtgtacgtctttgtggctccgggcctagaatgtttctgtactcctacaacatctgaccaagaaggtagctgtctctgtattcatttcttaacccaagtattgttaaaacggataaattccgatataacggcagccctgctct

SEQ ID NO: 30027 - DNA, 20 bp, Homo sapiens
  chr17:8474804-8474824
  hypo
aaatgccagtcaggggccag

SEQ ID NO: 30028 - DNA, 20 bp, Homo sapiens
  chr17:8475063-8475083
  hypo
agagactcatctccaaaaaa

SEQ ID NO: 30029 - DNA, 22 bp, Homo sapiens
  chr17:8567947-8567969
  hypo
cgtctcaaaaaaaaaaaacaaa

SEQ ID NO: 30030 - DNA, 49 bp, Homo sapiens
  chr17:8700776-8700825
  hypo
cgagtacttgattttccgctctcggggcagcctccgctgtatggacagg

SEQ ID NO: 30031 - DNA, 30 bp, Homo sapiens
  chr17:8732017-8732047
  hypo
cagccctgggggcccgtcccagctgccagg

SEQ ID NO: 30032 - DNA, 30 bp, Homo sapiens
  chr17:8817203-8817233
  hypo
accctgagccagaccgggcagacccctccc

SEQ ID NO: 30033 - DNA, 633 bp, Homo sapiens; identical to SEQ ID NO: 10981
  chr17:8868815-8869448
  hypo

SEQ ID NO: 30034 - DNA, 1538 bp, Homo sapiens; identical to SEQ ID NO: 10982
  chr17:8906189-8907727
  hypo

SEQ ID NO: 30035 - DNA, 148 bp, Homo sapiens
  chr17:9054226-9054374
  hypo
gggctgtgctttttggagagccgagcccgtgaccccggtatccttaatcctgcccgtggtcctgatcccaaaccccacgaaatgccctctccggtctgtttgccgccagcctctttgcagggaccacgtccatcagttggtcccccct

SEQ ID NO: 30036 - DNA, 52 bp, Homo sapiens
  chr17:9124885-9124937
  hypo
tgtctgcatcatactgcggggatttgacccgagtccacgtggctcaaaggga

SEQ ID NO: 30037 - DNA, 147 bp, Homo sapiens
  chr17:9127065-9127212
  hypo
ctttggacctgggcaccgcagcactgtcctcctagcaaagcggtgggcccagaggagttaatgggtcgcagagggaaagccctgtgcttctcctctccccatccttccctgcacaaggcctaggggtaacctcggcaaggaggtagg

SEQ ID NO: 30038 - DNA, 192 bp, Homo sapiens
  chr17:9150997-9151189
  hypo
agttgccggggctccgtgctgagcaagtcgagaggaggtgagaaagtcaaacagactgtcaatgccgcctcccccgagccccaaagtggggggctccctccaaggagacactgtttgtagagatttggggtttcgcacaagactggaagatgaggctctgcagattcttgatcgtccgttggatgatccgtt

SEQ ID NO: 30039 - DNA, 91 bp, Homo sapiens
  chr17:9234038-9234129
  hypo
acacaacacaaaggcggtatggcttgtatacactttccaggctgagcccctattcagagggggctgcagcttgcgcgtaatgggcccccta

SEQ ID NO: 30040 - DNA, 32 bp, Homo sapiens
  chr17:9393282-9393314
  hypo
gaatgagccaccgtgcccggcctataaagctt

SEQ ID NO: 30041 - DNA, 226 bp, Homo sapiens; identical to SEQ ID NO: 10987
  chr17:9549055-9549281
  hypo

SEQ ID NO: 30042 - DNA, 226 bp, Homo sapiens
  chr17:9631364-9631590
  hypo
caagaccatgcctctgcggtggtcctttggatccaaggagaaaccaccaggtgcctccgtcgagttggtggagtacttggaatccagacgaagacctcggtccacgagccagtccattgtgtcgctgttgacgggcactgcgggtgaggatgagaagtcagcatcgccgaggtccaacgtcgcccttcctgctaacagcgaagatggtgggcgggccattgaaaga

SEQ ID NO: 30043 - DNA, 100 bp, Homo sapiens
  chr17:9893604-9893704
  hypo
agaaagctcgccctacggatgctggcaggagccaaagttccttgccacgggctctgcacaatatggctgctgacttcgcccagagcgagcgagccagggg

SEQ ID NO: 30044 - DNA, 153 bp, Homo sapiens; identical to SEQ ID NO: 10989
  chr17:10101294-10101447
  hypo

SEQ ID NO: 30045 - DNA, 315 bp, Homo sapiens; identical to SEQ ID NO: 10990
  chr17:10102264-10102579
  hypo

SEQ ID NO: 30046 - DNA, 31 bp, Homo sapiens
  chr17:10555783-10555814
  hypo
ctggctcattcaggtgcgtcagcatggccat

SEQ ID NO: 30047 - DNA, 667 bp, Homo sapiens; identical to SEQ ID NO: 10992
  chr17:10632843-10633510
  hypo

SEQ ID NO: 30048 - DNA, 25 bp, Homo sapiens
  chr17:11791606-11791631
  hypo
ttacgtttttaaaagaaacccaata

SEQ ID NO: 30049 - DNA, 204 bp, Homo sapiens
  chr17:12517841-12518045
  hypo
agccaactgatcaacccgttgttttgccaggcagagcgaaacatttatgaaaacagtcaactggtttgaggagaaaattcaccaaaagcaatatagctagaagtctaacatcttaatgaggaacagtgctcttcgtccagactttatcgctttaggtacaagatgcccaaaacacaagtttgtaccttacgagcaaaattgtga

SEQ ID NO: 30050 - DNA, 45 bp, Homo sapiens
  chr17:12744162-12744207
  hypo
tccacaaaccccactgatgaccgcgatgtgaacacaccatcctgt

SEQ ID NO: 30051 - DNA, 49 bp, Homo sapiens; identical to SEQ ID NO: 10996
  chr17:12877270-12877319
  hypo

SEQ ID NO: 30052 - DNA, 121 bp, Homo sapiens
  chr17:12905819-12905940
  hypo
gaatcttgtggctgcgaaggttgtgaactgaggcacagttctcattcaggaccaagtgctgggtgtcaggcccaaacctgtgaagaaacagacccggcatttgcagcgtctgttaggaggc

SEQ ID NO: 30053 - DNA, 686 bp, Homo sapiens; identical to SEQ ID NO: 10999
  chr17:13505001-13505687
  hypo

SEQ ID NO: 30054 - DNA, 31 bp, Homo sapiens
  chr17:14109918-14109949
  hypo
agggatcttagctcatcggctgccccaccag

SEQ ID NO: 30055 - DNA, 30 bp, Homo sapiens
  chr17:14111629-14111659
  hypo
cctttgtgctcccacgggtctgcagagtcc

SEQ ID NO: 30056 - DNA, 30 bp, Homo sapiens; identical to SEQ ID NO: 11000
  chr17:14201048-14201078
  hypo

SEQ ID NO: 30057 - DNA, 949 bp, Homo sapiens; identical to SEQ ID NO: 11001
  chr17:14204052-14205001
  hypo

SEQ ID NO: 30058 - DNA, 642 bp, Homo sapiens; identical to SEQ ID NO: 11002
  chr17:14205182-14205824
  hypo

SEQ ID NO: 30059 - DNA, 45 bp, Homo sapiens
  chr17:14236461-14236506
  hypo
ccagagccatagtagtcaaagcggtataaaaacagattttaggcc

SEQ ID NO: 30060 - DNA, 30 bp, Homo sapiens; identical to SEQ ID NO: 11003
  chr17:14940884-14940914
  hypo

SEQ ID NO: 30061 - DNA, 11 bp, Homo sapiens
  chr17:15411142-15411153
  hypo
actccatctca

SEQ ID NO: 30062 - DNA, 30 bp, Homo sapiens
  chr17:15646400-15646430
  hypo
ctgcctgctccatccgggttggggggtctg

SEQ ID NO: 30063 - DNA, 23 bp, Homo sapiens
  chr17:15858714-15858737
  hypo
ttttgtttttttttttcgagaca

SEQ ID NO: 30064 - DNA, 31 bp, Homo sapiens
  chr17:15945326-15945357
  hypo
tgtgagccaccgtgcccggccagaatgtgaa

SEQ ID NO: 30065 - DNA, 126 bp, Homo sapiens
  chr17:15952497-15952623
  hypo
gttactgccacttgacccatgcgcgccccgtggatccaggagtcacgtcatcagacagtgctgcccgggcagcagcagtggcagaagctgcgtccttgaggctccgcatgtccttcaacatcagac

SEQ ID NO: 30066 - DNA, 30 bp, Homo sapiens; identical to SEQ ID NO: 11010
  chr17:16256922-16256952
  hypo

SEQ ID NO: 30067 - DNA, 282 bp, Homo sapiens
  chr17:16282359-16282641
  hypo
ttgctggagccagagcgaagcccggccactgtcaccatgggctccagcctcgcctctctgggcctggtggtgagcggcttcagcaacaggtttccggtccccgcagagggtcccactctgaactcccgatttacagactgttctcgggccgtgatgaggattaagacaatgcaactaagagcactctgactacagaagcatgatttaaagctccacaaccctgcaataaccacgaagaaaaataaaaagcggctagtccgccaggcacggtggttcatgcct

SEQ ID NO: 30068 - DNA, 23 bp, Homo sapiens
  chr17:16283543-16283566
  hypo
gcgtttttaaaacatgggagagg

SEQ ID NO: 30069 - DNA, 1151 bp, Homo sapiens; identical to SEQ ID NO: 11012
  chr17:16283956-16285107
  hypo

SEQ ID NO: 30070 - DNA, 31 bp, Homo sapiens
  chr17:16295226-16295257
  hypo
agaggctcctctcaaacgatcagggtttctg

SEQ ID NO: 30071 - DNA, 30 bp, Homo sapiens
  chr17:16375606-16375636
  hypo
gatgtggggcctggcgagaggaaccacaaa

SEQ ID NO: 30072 - DNA, 30 bp, Homo sapiens
  chr17:16381204-16381234
  hypo
tttgtctacagcttcgagacaccgggaggg

SEQ ID NO: 30073 - DNA, 73 bp, Homo sapiens
  chr17:16385339-16385412
  hypo
ggaattctgactgttacgcttggtgtggggcaggacctcctgggcccttacctgcccccggtgccaatggaga

SEQ ID NO: 30074 - DNA, 173 bp, Homo sapiens
  chr17:16391198-16391371
  hypo
ctgcttaagaggtgtgcgccacacttcgagtaaaccaaccccatcagcctcttctcatgggaaagctggggtgctggtgaacacgaagacaggggctacctcagctgggtgtatcccagggaaacagacgcctttttctgctgctccatgacgcaggccgacagctcagtcta

SEQ ID NO: 30075 - DNA, 706 bp, Homo sapiens; identical to SEQ ID NO: 11014
  chr17:16472108-16472814
  hypo

SEQ ID NO: 30076 - DNA, 30 bp, Homo sapiens
  chr17:16521042-16521072
  hypo
ggcgtcgtcggtgtcgcgggagtcctcgaa

SEQ ID NO: 30077 - DNA, 31 bp, Homo sapiens; identical to SEQ ID NO: 11015
  chr17:16570443-16570474
  hypo

SEQ ID NO: 30078 - DNA, 2 bp, Homo sapiens
  chr17:16927736-16927738
  hypo
cc

SEQ ID NO: 30079 - DNA, 30 bp, Homo sapiens
  chr17:16934640-16934670
  hypo
atccaacactcacacgcatgcacatgtgcc

SEQ ID NO: 30080 - DNA, 402 bp, Homo sapiens
  chr17:17062291-17062693
  hypo
gctgacctctctgctcgagaaggaggtaatagcctgggaccagatccccaccctgctcccagcagcctttccagagcatcagctgtgcccagctgtggcctgaggggttcatctagacagtcctacccgcgagggacttgcagacccctaggggagacagacgcatagatgagtcctcatagttgaggcagacctgagagctgtgggagcgtgccagtgcatgcagggcagggaaaggggccttccaggcacagaggaattcttccgatggtgggggcccctgccattgagaggcaagcggcgttgcagggcctagatggtttcctcgttctgactcccgatggcaggaggggcgcgagcagggcaaggcttttgcattacgcagccctggcttggacaggt

SEQ ID NO: 30081 - DNA, 30 bp, Homo sapiens
  chr17:17063029-17063059
  hypo
gctggggaggtgtagcgttacagtttttgt

SEQ ID NO: 30082 - DNA, 30 bp, Homo sapiens
  chr17:17064688-17064718
  hypo
tgtggcccatggtgcgctcaggagcttcag

SEQ ID NO: 30083 - DNA, 30 bp, Homo sapiens
  chr17:17079842-17079872
  hypo
acaggagggcgggtacgggaacaggctcta

SEQ ID NO: 30084 - DNA, 352 bp, Homo sapiens
  chr17:17080459-17080811
  hypo
cagcaagcctccctaccgtgttcagtccccaggaagacaggccatgttgtatgtgctcctctttcctggatgtaactaccattctctgtcatttcactcccaaggacaagaagtacgcaagtgacaagtacaaagacatctacacagagctcagcatcgcgaaggctaaggctgactgtgacatcagcaggttgaaggagcagctcaaggctgcaacggaagcactgggggagaagtcccctgacagtgccacggtgtccggatatggtgcgtcctcgggtcatgccctctcggttattgctggggggcttatgggggtttggtcgtagaggtttcccggtgcttgacttga

SEQ ID NO: 30085 - DNA, 30 bp, Homo sapiens
  chr17:17086026-17086056
  hypo
ctgtggctgtcagggcgctcccctcccctg

SEQ ID NO: 30086 - DNA, 31 bp, Homo sapiens
  chr17:17104697-17104728
  hypo
caacttcagatgtcatcggagctatctgtat

SEQ ID NO: 30087 - DNA, 30 bp, Homo sapiens
  chr17:17124506-17124536
  hypo
aaaggagcaaagaccgtcgaccaggccaag

SEQ ID NO: 30088 - DNA, 30 bp, Homo sapiens
  chr17:17188364-17188394
  hypo
atgactgaaagagacgtgattatagggata

SEQ ID NO: 30089 - DNA, 113 bp, Homo sapiens
  chr17:17251262-17251375
  hypo
tcaagtgcctccttcccgcacctgccccagtgcttcagagcagggtcccccgtccccctctcctccgctcttctcccaaggccaagtttctgtgggatcgcaggagccctgtg

SEQ ID NO: 30090 - DNA, 78 bp, Homo sapiens
  chr17:17330585-17330663
  hypo
tcaattcctccaagatcgccatgatagatcagggattagatgagaatcccactgccttccggaaaggctaagaggggc

SEQ ID NO: 30091 - DNA, 31 bp, Homo sapiens
  chr17:17352482-17352513
  hypo
gcccctctggctgcaacgcctgccacctttt

SEQ ID NO: 30092 - DNA, 738 bp, Homo sapiens; identical to SEQ ID NO: 11017
  chr17:17398398-17399136
  hypo

SEQ ID NO: 30093 - DNA, 269 bp, Homo sapiens; identical to SEQ ID NO: 11018
  chr17:17399419-17399688
  hypo

SEQ ID NO: 30094 - DNA, 53 bp, Homo sapiens
  chr17:17402428-17402481
  hypo
ttcccagcactcccgccgcctgggccctgtcagccatcgcggcatttgatgtc

SEQ ID NO: 30095 - DNA, 133 bp, Homo sapiens
  chr17:17447944-17448077
  hypo
gtgtcctcaagtgtgacgggcaggggctggcacaggtgctcatgaacatctgaaccagctctggcttcctttagtcctccgaacagaaaagacgtttcaaaatggaggcagaacagggcggctttctccactt

SEQ ID NO: 30096 - DNA, 93 bp, Homo sapiens
  chr17:17618836-17618929
  hypo
tgggatgacaccagaccgggaggagaagtgcgaggagtggtgtggtcattggcgtctttcctctgcctctgcctcccccggccccttccattc

SEQ ID NO: 30097 - DNA, 30 bp, Homo sapiens
  chr17:17632248-17632278
  hypo
gaacttctccatggcgcccctgaggtggtt

SEQ ID NO: 30098 - DNA, 88 bp, Homo sapiens
  chr17:17637993-17638081
  hypo
ccacacctgctttcctatgtgcgggtcagagcgtgtaggtgtattacatgcctgcctgtgtgtctgcgtgtgagctccttggacacac

SEQ ID NO: 30099 - DNA, 30 bp, Homo sapiens
  chr17:17699446-17699476
  hypo
ccctgagtgagccccgcacgcccggacccc

SEQ ID NO: 30100 - DNA, 103 bp, Homo sapiens
  chr17:17717879-17717982
  hypo
aggaaggctgagcccgggaccaggcaggaggaacctgccgtgcactcactcagactcctgcagcacccggggcaggtgctccaccagcgggcacagccgctca

SEQ ID NO: 30101 - DNA, 30 bp, Homo sapiens
  chr17:17747883-17747913
  hypo
ccttgtcccatgcacgctggtaagcgagcc

SEQ ID NO: 30102 - DNA, 220 bp, Homo sapiens
  chr17:17910220-17910440
  hypo
ccagccagaatttccgagctcgccttgggcccttaaagtctgtctcccgccgtctgagagcatcagggacgcgccgggcctgctcctcccgggcctttgcttaactcggggctgcacgatggctcagtgccgggacctggagaatcaccaccacgagaagctcctggagatctctatcagcaccctggagaagattgtcgagggcgacctggacgaggac

SEQ ID NO: 30103 - DNA, 30 bp, Homo sapiens
  chr17:18022010-18022040
  hypo
gccgcgtgtccagccgcgggcaagagacag

SEQ ID NO: 30104 - DNA, 59 bp, Homo sapiens
  chr17:18024774-18024833
  hypo
gcgcctgcccttccaccgaccgcccagggccggggcctggcgggcgcccctggaacacc

SEQ ID NO: 30105 - DNA, 24 bp, Homo sapiens
  chr17:18110682-18110706
  hypo
aaaaaaatgttttggccggcacag

SEQ ID NO: 30106 - DNA, 189 bp, Homo sapiens
  chr17:18139365-18139554
  hypo
tctgggctttcaccaccgcctggggccctgcttggactctgcagctgtgtcccaaggctgcgccctagatttgtctactccttcccctgccccctccctgctttctcccggcctctgtagtcttcctgctcctccacctacgtggctgccttgggccccatgcagctcctcccccgggatgccccatgc

SEQ ID NO: 30107 - DNA, 185 bp, Homo sapiens
  chr17:18163100-18163285
  hypo
ctcatttgtaaaatactttctaaggttgtcaccatgagcaaattaacaaagaatgcacgtgtagctcgcagcatacagcaggcgctcagtgagtggcaggttattattccgttttgttttgttttgtgcgccaggttattattcccacttagtgtcagcacccctgtgctcgtacccccctacaa

SEQ ID NO: 30108 - DNA, 227 bp, Homo sapiens
  chr17:18854647-18854874
  hypo
cgccttcaatggctgcgtaatggcggatggccatttccttgactaggatgagacattgcctactctgcgtggctgctgtgagcgtgaaatgggatcatgtgcggaacagccacgcatggtccgtgaaatgggatcatgtgcagaacagccacgcatggtccttggtgtgtgacagatattgggtccctctgtggtcccaggcagacattgcccggggtgggggccga

SEQ ID NO: 30109 - DNA, 30 bp, Homo sapiens
  chr17:18878121-18878151
  hypo
cagggagtgagtgccggcttcctcagggaa

SEQ ID NO: 30110 - DNA, 30 bp, Homo sapiens
  chr17:18918296-18918326
  hypo
gcgggaggggttcccggggctgtctcaagg

SEQ ID NO: 30111 - DNA, 322 bp, Homo sapiens; identical to SEQ ID NO: 11027
  chr17:19140729-19141051
  hypo

SEQ ID NO: 30112 - DNA, 103 bp, Homo sapiens
  chr17:19233947-19234050
  hypo
tccttgactcctgctccgtgcctcagtgagaaggcagcgtggccattgttacatgtcagcttttgaaacatttatcccctgccggtgcagtggctcacacctg

SEQ ID NO: 30113 - DNA, 237 bp, Homo sapiens; identical to SEQ ID NO: 11030
  chr17:19282088-19282325
  hypo

SEQ ID NO: 30114 - DNA, 30 bp, Homo sapiens
  chr17:19287662-19287692
  hypo
aaggagttggtgctcgggaatcagcagaag

SEQ ID NO: 30115 - DNA, 31 bp, Homo sapiens; identical to SEQ ID NO: 11031
  chr17:19391541-19391572
  hypo

SEQ ID NO: 30116 - DNA, 28 bp, Homo sapiens
  chr17:19513233-19513261
  hypo
tttttttttttgtgacggagtctcgctc

SEQ ID NO: 30117 - DNA, 43 bp, Homo sapiens
  chr17:19606832-19606875
  hypo
agccctccaaggggattccagcgcaggctacagcctaagaacc

SEQ ID NO: 30118 - DNA, 31 bp, Homo sapiens
  chr17:19618656-19618687
  hypo
agccagggctggaggtcggatgacctagccc

SEQ ID NO: 30119 - DNA, 31 bp, Homo sapiens
  chr17:19641502-19641533
  hypo
gtatggccaggccaggcggagcaacccctcc

SEQ ID NO: 30120 - DNA, 40 bp, Homo sapiens
  chr17:19687067-19687107
  hypo
ctggggggtgaagcaccgtaaggcacgtatctcaggctgg

SEQ ID NO: 30121 - DNA, 30 bp, Homo sapiens
  chr17:19771798-19771828
  hypo
ctcagaatcgcacacgttttcaaggttctc

SEQ ID NO: 30122 - DNA, 30 bp, Homo sapiens
  chr17:19842112-19842142
  hypo
cagctcactgcagcctcgacctcccaaggc

SEQ ID NO: 30123 - DNA, 31 bp, Homo sapiens
  chr17:19842380-19842411
  hypo
tgaaaagaataccatacgttacagagctggc

SEQ ID NO: 30124 - DNA, 30 bp, Homo sapiens
  chr17:20013872-20013902
  hypo
caggtaggagggaccgggcaggtgggctcg

SEQ ID NO: 30125 - DNA, 167 bp, Homo sapiens; identical to SEQ ID NO: 11034
  chr17:20059179-20059346
  hypo

SEQ ID NO: 30126 - DNA, 30 bp, Homo sapiens
  chr17:20137404-20137434
  hypo
ggaaatctccgcatacgtcctgccagttta

SEQ ID NO: 30127 - DNA, 30 bp, Homo sapiens
  chr17:20170316-20170346
  hypo
gccagacccacctgccgagctccgggccaa

SEQ ID NO: 30128 - DNA, 30 bp, Homo sapiens
  chr17:20516157-20516187
  hypo
cgttgccctgaacgcgtgatggatctcggc

SEQ ID NO: 30129 - DNA, 31 bp, Homo sapiens
  chr17:20905668-20905699
  hypo
tttgtggaaaaaggagcgggagagggataag

SEQ ID NO: 30130 - DNA, 196 bp, Homo sapiens
  chr17:20914086-20914282
  hypo
ttaatcatgtgcagagaaggccgtggaccatggggagaggcccgggcgcatctcagctcacactccggggtaggtgattagtgcaagggctaagggagcagccagtttggctctgggttcatttacatgcggaggttggagtagcagctgctgacactgacacctggtgctgtgcgaagctgggggacagaaatat

SEQ ID NO: 30131 - DNA, 41 bp, Homo sapiens
  chr17:20919059-20919100
  hypo
cccacctttgcagtgtcggtggagcacgtccagggccgcga

SEQ ID NO: 30132 - DNA, 30 bp, Homo sapiens
  chr17:21096617-21096647
  hypo
aacacctgctttcacgtttttttttctttt

SEQ ID NO: 30133 - DNA, 30 bp, Homo sapiens
  chr17:21157484-21157514
  hypo
acttctttgaaaggcgccttaattaggctc

SEQ ID NO: 30134 - DNA, 84 bp, Homo sapiens
  chr17:21160807-21160891
  hypo
tcccaaagtgcttacacgcttgagccaccgcgcctcctgaaatttcttgaaccggccatactcgttccctcctctgggcctatg

SEQ ID NO: 30135 - DNA, 31 bp, Homo sapiens
  chr17:21196972-21197003
  hypo
ggtggccttgcacagccgggcagaggcaggg

SEQ ID NO: 30136 - DNA, 48 bp, Homo sapiens
  chr17:21221774-21221822
  hypo
ccgtgccgggggttagcgtcccggctgcgctcccgctcccatgccctc

SEQ ID NO: 30137 - DNA, 182 bp, Homo sapiens
  chr17:21793591-21793773
  hypo
ctgtggatcatgaatccgcagtgaattcggaggctggctgagaccggcctgggtcaaaatcacctccactgcaaaaaaaaaaaaaaaaaaaaaaaaaaaaaaagatgttcttctagaaagaacaggagcacaccacacccaagaaaggacatctcccagtgttttaccgtcttgcgtccaag

SEQ ID NO: 30138 - DNA, 26 bp, Homo sapiens
  chr17:25432197-25432223
  hypo
cccccgtggagatttttttaaataaa

SEQ ID NO: 30139 - DNA, 134 bp, Homo sapiens
  chr17:25620581-25620715
  hypo
gaggccccgcggcgcggtgcggcgcgatcacgcccgagtctccttctcgttcccctcggcccttcctaaaacctgctggctcaggtctgaacaatcgcagctggacaggtggtgcacaacgatgttaattttca

SEQ ID NO: 30140 - DNA, 109 bp, Homo sapiens
  chr17:25879108-25879217
  hypo
tctggtgttgagtgttgtcaccgcctccaggcagtcgtccctggtgatgtgatctaaagatcatcccctgcccatcattctcgcctgcgcacctgagtttattttctca

SEQ ID NO: 30141 - DNA, 53 bp, Homo sapiens
  chr17:25904505-25904558
  hypo
ctgtccccttaggagatcccccgagacctcacgctggatgccctgctggagat

SEQ ID NO: 30142 - DNA, 63 bp, Homo sapiens
  chr17:25907813-25907876
  hypo
gttatttatttatttatgagacggcctggagtgcagtggcgcgatcttggctcactgcaacct

SEQ ID NO: 30143 - DNA, 30 bp, Homo sapiens
  chr17:25930890-25930920
  hypo
ccctgaagctgccgacggtacccggtaggc

SEQ ID NO: 30144 - DNA, 30 bp, Homo sapiens
  chr17:25931255-25931285
  hypo
atctcaccctcagcgcggtggtaggtatca

SEQ ID NO: 30145 - DNA, 180 bp, Homo sapiens
  chr17:25931612-25931792
  hypo
acctttgtctcagatctctcccgggagtccccgctagctgagagcagagcggtgttcctcaaggtctccttgacaaaccttgtttactcttaggctcgatgaccagccgaaagcagatgtgttggaagctcacgaagcggaggtgagggtgacacacacgtgtccacagatggccccccc

SEQ ID NO: 30146 - DNA, 35 bp, Homo sapiens
  chr17:25933866-25933901
  hypo
atgataaactagacagggtctcgctctgtcaccca

SEQ ID NO: 30147 - DNA, 229 bp, Homo sapiens
  chr17:25934803-25935032
  hypo
gatttggctcacagtcgaggggctggagagagtccttgcaggcagacgggcacagttctccccatgggctccaccagggttggggtcaggccgcaccagccccagacttgtgcttgacccccaccaccctcgacagcttctgcaaggggcggacgttgcactcgtttgtgagggaccccaagacgtctctggacatcaacaagacgaggcaaatcgctcaggagatcat

SEQ ID NO: 30148 - DNA, 31 bp, Homo sapiens
  chr17:25948186-25948217
  hypo
cgcctggtggaatggtcgctgggcactccca

SEQ ID NO: 30149 - DNA, 30 bp, Homo sapiens
  chr17:26206829-26206859
  hypo
tctaagggccaagacgccagtctacattcc

SEQ ID NO: 30150 - DNA, 22 bp, Homo sapiens
  chr17:26263177-26263199
  hypo
tttgaaaacaagaagaatggcc

SEQ ID NO: 30151 - DNA, 81 bp, Homo sapiens
  chr17:26263498-26263579
  hypo
aacaaacaaaaaagaagcgtcggagtattcagaagaagcaaggggagtgtgacattgcccgtctgtaaaggtgctcatgac

SEQ ID NO: 30152 - DNA, 30 bp, Homo sapiens
  chr17:26292636-26292666
  hypo
agaaaaaggattctacgctacgcctctctc

SEQ ID NO: 30153 - DNA, 31 bp, Homo sapiens
  chr17:26851172-26851203
  hypo
agaccagtcaccttaccgcccccagggacct

SEQ ID NO: 30154 - DNA, 31 bp, Homo sapiens
  chr17:26861031-26861062
  hypo
cagaaggcctctgtagcgcccaccagccctg

SEQ ID NO: 30155 - DNA, 102 bp, Homo sapiens
  chr17:26864423-26864525
  hypo
ccccagctccaagcccgtggccctggcatgagctgtgcccagcttcgtcagctccagcgtttgcctggtctggaagtcctggccggccgcccacatcgggct

SEQ ID NO: 30156 - DNA, 31 bp, Homo sapiens
  chr17:26874434-26874465
  hypo
agaggcccagccaggccgggcaaaggtcagg

SEQ ID NO: 30157 - DNA, 31 bp, Homo sapiens; identical to SEQ ID NO: 11043
  chr17:26925397-26925428
  hypo

SEQ ID NO: 30158 - DNA, 332 bp, Homo sapiens; identical to SEQ ID NO: 11044
  chr17:26925693-26926025
  hypo

SEQ ID NO: 30159 - DNA, 342 bp, Homo sapiens; identical to SEQ ID NO: 11045
  chr17:26926083-26926425
  hypo

SEQ ID NO: 30160 - DNA, 136 bp, Homo sapiens
  chr17:26959954-26960090
  hypo
ctcacttccactgtgccgagtcagatccatcttgatggagagattgaggttctccgagcgaaaggcccggtaggagtcatgaagctggcccaagggcacctcaggcaggaactctggggcccgcagagtgacacta

SEQ ID NO: 30161 - DNA, 239 bp, Homo sapiens
  chr17:26960858-26961097
  hypo
tttcacccatcacaaacgtccctcagccaaaccaactgcctcatctctactcacagtgaaagtcatggtagaatttgagtgggggcatgttcctctccactgccacgttaccccacggaagccccaagtgcaagatctgacgccgacgggagcaaggctgaccactctgctcggtgcccacaagtcgacccattagccgccagtcacggatctcaaacaggtaccgtggatagtccctg

SEQ ID NO: 30162 - DNA, 176 bp, Homo sapiens
  chr17:26961701-26961877
  hypo
aagctccaagtaagcagtgcccggcgcatgggtgtgttgccatagagacgacgggaacgctggatgtagatttcaatgtttttgcgttccaaagaggcatagagctcctcaattttgcgggcaggcaacaactccccatgctgcttccgaagggcggccactttagcatccagtag

SEQ ID NO: 30163 - DNA, 192 bp, Homo sapiens
  chr17:26962145-26962337
  hypo
gagaggagccaaacacggttccggagggtctgcagcgcagggaaggggttccggtggaggatcatctcttccagctcaggtagcagctgcacctccacctccttgaagttgaagatactattgccatcaaagccagcagccagctctggacagtatgcctgcagggaacctccatgccggctcagtgacaca

SEQ ID NO: 30164 - DNA, 31 bp, Homo sapiens
  chr17:27011596-27011627
  hypo
ccctcaggcctgtagtcgaaagctctacaat

SEQ ID NO: 30165 - DNA, 14 bp, Homo sapiens
  chr17:27036963-27036977
  hypo
gatatcgtgctact

SEQ ID NO: 30166 - DNA, 25 bp, Homo sapiens
  chr17:27056851-27056876
  hypo
ccgcgacaggccagaagtgagattt

SEQ ID NO: 30167 - DNA, 30 bp, Homo sapiens
  chr17:27170972-27171002
  hypo
aaatgttctaggcatcgcgtgtatgctatt

SEQ ID NO: 30168 - DNA, 102 bp, Homo sapiens
  chr17:27181276-27181378
  hypo
tgatttagaggctacaaaggatgaagagggctcaaggcctcaaacagagcaaggtaaatgagtttctccggctgctagagcggtctaggagaccttaggtgg

SEQ ID NO: 30169 - DNA, 186 bp, Homo sapiens
  chr17:27207672-27207858
  hypo
cctgggccagtccgacgggctacctgggcaaccccaccgcagctaggcaggcacataccttagacaggtccacgcctgtgagggcatgcacagaggcaggcagctcggccagcagtcggttcacttctgatgtgaccttactgttgtctccactgaggaccacaatctcatcgaccttggtaagtg

SEQ ID NO: 30170 - DNA, 30 bp, Homo sapiens
  chr17:27345531-27345561
  hypo
agccccaaagcagccgctcaagtgctttcc

SEQ ID NO: 30171 - DNA, 30 bp, Homo sapiens
  chr17:27404111-27404141
  hypo
gtggcaggagctgccggggaggtggtaaac

SEQ ID NO: 30172 - DNA, 533 bp, Homo sapiens
  chr17:27406520-27407053
  hypo
gctatgacatcaccagcgagttcagctgacagggctcagggctcaggatgactgaccagcttgggtggcccctgctcatcaaggcagccaggaggctctccgaggccaggcatgcccgagaggagtgcgggtgggccctaaggtggcggcctgaggggcagggaggacgttagttcacaccgggtgggacacaccatgctgaacccaggccaggtgccacctactgcactagtcgctctcgggccggtacaggtaccgcatcatcaggctgtccacctctttcttgcgcttcttttcctccttcctcgacggccggtgcgtctgcccagtttcttcactttctgcagctgggcccttcttcacactggagcagctgtggctggagacggtcgagccgctggatgacgacgaggaggactcagactccgtctccgttctctttcttctcgacttggacttcttgctcttccgagagcgccccttcttccgcctcttgtgctctgaggaagcttcggagccggagctggagctgg

SEQ ID NO: 30173 - DNA, 31 bp, Homo sapiens
  chr17:27407300-27407331
  hypo
gtccaggtaggagtgacggctgacggagcgg

SEQ ID NO: 30174 - DNA, 67 bp, Homo sapiens
  chr17:27407716-27407783
  hypo
agtcggagccccaccgcttctgcggcccccggccagcgcgccccccggtccccgagcggacggagcc

SEQ ID NO: 30175 - DNA, 61 bp, Homo sapiens
  chr17:27411025-27411086
  hypo
gtatctctaagtaaatcgaaacattatttctctgcctgccttactgcgctgggctcaataa

SEQ ID NO: 30176 - DNA, 374 bp, Homo sapiens
  chr17:27411532-27411906
  hypo
aatggttggaattaaacctcacgtcaaatacaatttatgtccgggctcatgtgctattagttaacggggagccgaatcacgggggaacaaacaaacggagacagaacggcgggggatattaattgtgtgtgacaaccaggctccagcggccctctatcactgttacacactattacatttatcattagctctcactgagtcctgtgcgctgccaccagcccatcctggccaggggagggggtccatcaggcgagagagagtgggggaagaaacccaatgccatgctaaaaaaaaaagacctctaaaaaacaaccctgtcgaacttgatggaggatcagcccgctctgcctgaaggcctgcgcatctgcatccgc

SEQ ID NO: 30177 - DNA, 137 bp, Homo sapiens
  chr17:27419325-27419462
  hypo
ccccgagctctgccccgggcaccttggcccctcaccgctgtcttggctttggcgatgtcatcaatctgcaggtgcaggtcttcgatctccacctccattgctttccgtgctttcacggctgccgcacaggtgaactc

SEQ ID NO: 30178 - DNA, 109 bp, Homo sapiens
  chr17:27421467-27421576
  hypo
tttgtggaaagttccacgagcgcgtcttcacactgtggctggcacagatcaggtgctcactccacattttgtgagtaggtgagtgagtgaatacgcgaatgaatggagg

SEQ ID NO: 30179 - DNA, 30 bp, Homo sapiens
  chr17:27436900-27436930
  hypo
gagcaggcgggagccgcggagctgggtgcg

SEQ ID NO: 30180 - DNA, 27 bp, Homo sapiens
  chr17:27686897-27686924
  hypo
tgggcaacagagcgagactgtctcaaa

SEQ ID NO: 30181 - DNA, 31 bp, Homo sapiens
  chr17:27716045-27716076
  hypo
acatacactgtatacacggattgcttaggtc

SEQ ID NO: 30182 - DNA, 54 bp, Homo sapiens; identical to SEQ ID NO: 11055
  chr17:27893140-27893194
  hypo

SEQ ID NO: 30183 - DNA, 309 bp, Homo sapiens; identical to SEQ ID NO: 11056
  chr17:27893344-27893653
  hypo

SEQ ID NO: 30184 - DNA, 134 bp, Homo sapiens
  chr17:27902813-27902947
  hypo
ggcatggaaacattaccgtgtggcggcttccctcctgggagcaggacagcagcggggaggagggagtgaagggcacagctgaggcagacacccctttccggatctgaaacccagggcagcgctggatggagtca

SEQ ID NO: 30185 - DNA, 200 bp, Homo sapiens
  chr17:27903153-27903353
  hypo
ggatgttagcacagcgagcgtcatggtggaccctgcggcagccccacccatctccccacaccttgagacccataggtgactcacagtgctgtggaaaggctgcagccgcgtagtgagctcgtccccaggggggcccccaaagggcttcagggcagagccaggttcatacatggaaaaggcctggcgatccctgcggtgtg

SEQ ID NO: 30186 - DNA, 221 bp, Homo sapiens
  chr17:27934685-27934906
  hypo
cagggctgtctggctccggagggctgcctccgacgtgactggggctttatcttccactcctcctcctcctccaggtggacatcgagcagctggatccccgcggccggactcccctgcacctggccaccacgctggggcaccttgagtgtgcccgtgtgctcctggcgcacggcgcagacgtgggcagggagaatcgcagcggctggacaggtgggcagccc

SEQ ID NO: 30187 - DNA, 31 bp, Homo sapiens
  chr17:27936394-27936425
  hypo
tggcgcagtgaaaagacggagatggtgaatg

SEQ ID NO: 30188 - DNA, 30 bp, Homo sapiens
  chr17:27939312-27939342
  hypo
tcctgagcccgtggcgggccgaccggggtt

SEQ ID NO: 30189 - DNA, 620 bp, Homo sapiens; identical to SEQ ID NO: 11059
  chr17:27942739-27943359
  hypo

SEQ ID NO: 30190 - DNA, 30 bp, Homo sapiens
  chr17:27948244-27948274
  hypo
ggccagaggcaggacgatgaaggcaccccc

SEQ ID NO: 30191 - DNA, 56 bp, Homo sapiens; identical to SEQ ID NO: 11061
  chr17:28089159-28089215
  hypo

SEQ ID NO: 30192 - DNA, 31 bp, Homo sapiens
  chr17:28250200-28250231
  hypo
tacaggtgtgagccaccgtggctggccttaa

SEQ ID NO: 30193 - DNA, 260 bp, Homo sapiens
  chr17:28299359-28299619
  hypo
cccggcccaggcattttttaaatggattcctggctccttttaaaatggggatcactcacttgtgagctaggagtgctcataaatattgtgtagtcattgtttctaggcccttcaggactaaaacatataatttttagagtcaatgacccgtgaccagacatcacctgcagcctcttcaggcgtgccaccgctgccgggcctgctgtacgacccgcgggctctgggccatgcctgctcttgcgcccggctcaggaggaccc

SEQ ID NO: 30194 - DNA, 30 bp, Homo sapiens
  chr17:28395659-28395689
  hypo
tcacgctgctattccgggccagcgtcaaga

SEQ ID NO: 30195 - DNA, 566 bp, Homo sapiens; identical to SEQ ID NO: 11062
  chr17:28562556-28563122
  hypo

SEQ ID NO: 30196 - DNA, 31 bp, Homo sapiens
  chr17:29094864-29094895
  hypo
gcactccagcctttatcgcttcttactccta

SEQ ID NO: 30197 - DNA, 30 bp, Homo sapiens
  chr17:29247878-29247908
  hypo
cacgtgtgtgcttgcgcccgcatgtatgtt

SEQ ID NO: 30198 - DNA, 444 bp, Homo sapiens; identical to SEQ ID NO: 11064
  chr17:29421943-29422387
  hypo

SEQ ID NO: 30199 - DNA, 145 bp, Homo sapiens; identical to SEQ ID NO: 11066
  chr17:29482999-29483144
  hypo

SEQ ID NO: 30200 - DNA, 92 bp, Homo sapiens; identical to SEQ ID NO: 11067
  chr17:29486026-29486118
  hypo

SEQ ID NO: 30201 - DNA, 192 bp, Homo sapiens; identical to SEQ ID NO: 11068
  chr17:29490202-29490394
  hypo

SEQ ID NO: 30202 - DNA, 110 bp, Homo sapiens; identical to SEQ ID NO: 11069
  chr17:29496907-29497017
  hypo

SEQ ID NO: 30203 - DNA, 69 bp, Homo sapiens; identical to SEQ ID NO: 11070
  chr17:29508438-29508507
  hypo

SEQ ID NO: 30204 - DNA, 89 bp, Homo sapiens; identical to SEQ ID NO: 11071
  chr17:29508714-29508803
  hypo

SEQ ID NO: 30205 - DNA, 164 bp, Homo sapiens; identical to SEQ ID NO: 11072
  chr17:29509519-29509683
  hypo

SEQ ID NO: 30206 - DNA, 175 bp, Homo sapiens; identical to SEQ ID NO: 11073
  chr17:29527438-29527613
  hypo

SEQ ID NO: 30207 - DNA, 124 bp, Homo sapiens; identical to SEQ ID NO: 11074
  chr17:29528053-29528177
  hypo

SEQ ID NO: 30208 - DNA, 76 bp, Homo sapiens; identical to SEQ ID NO: 11075
  chr17:29528427-29528503
  hypo

SEQ ID NO: 30209 - DNA, 141 bp, Homo sapiens; identical to SEQ ID NO: 11076
  chr17:29533248-29533389
  hypo

SEQ ID NO: 30210 - DNA, 136 bp, Homo sapiens; identical to SEQ ID NO: 11077
  chr17:29541467-29541603
  hypo

SEQ ID NO: 30211 - DNA, 137 bp, Homo sapiens; identical to SEQ ID NO: 11078
  chr17:29546008-29546145
  hypo

SEQ ID NO: 30212 - DNA, 81 bp, Homo sapiens; identical to SEQ ID NO: 11079
  chr17:29548866-29548947
  hypo

SEQ ID NO: 30213 - DNA, 125 bp, Homo sapiens; identical to SEQ ID NO: 11080
  chr17:29550460-29550585
  hypo

SEQ ID NO: 30214 - DNA, 157 bp, Homo sapiens; identical to SEQ ID NO: 11081
  chr17:29552111-29552268
  hypo

SEQ ID NO: 30215 - DNA, 251 bp, Homo sapiens; identical to SEQ ID NO: 11082
  chr17:29553451-29553702
  hypo

SEQ ID NO: 30216 - DNA, 75 bp, Homo sapiens; identical to SEQ ID NO: 11083
  chr17:29554234-29554309
  hypo

SEQ ID NO: 30217 - DNA, 85 bp, Homo sapiens; identical to SEQ ID NO: 11084
  chr17:29554539-29554624
  hypo

SEQ ID NO: 30218 - DNA, 442 bp, Homo sapiens; identical to SEQ ID NO: 11085
  chr17:29556041-29556483
  hypo

SEQ ID NO: 30219 - DNA, 141 bp, Homo sapiens; identical to SEQ ID NO: 11086
  chr17:29556851-29556992
  hypo

SEQ ID NO: 30220 - DNA, 124 bp, Homo sapiens; identical to SEQ ID NO: 11087
  chr17:29557276-29557400
  hypo

SEQ ID NO: 30221 - DNA, 85 bp, Homo sapiens; identical to SEQ ID NO: 11088
  chr17:29557858-29557943
  hypo

SEQ ID NO: 30222 - DNA, 118 bp, Homo sapiens; identical to SEQ ID NO: 11089
  chr17:29559089-29559207
  hypo

SEQ ID NO: 30223 - DNA, 515 bp, Homo sapiens; identical to SEQ ID NO: 11090
  chr17:29559716-29560231
  hypo

SEQ ID NO: 30224 - DNA, 412 bp, Homo sapiens; identical to SEQ ID NO: 11091
  chr17:29562627-29563039
  hypo

SEQ ID NO: 30225 - DNA, 137 bp, Homo sapiens; identical to SEQ ID NO: 11092
  chr17:29576000-29576137
  hypo

SEQ ID NO: 30226 - DNA, 64 bp, Homo sapiens; identical to SEQ ID NO: 11093
  chr17:29579954-29580018
  hypo

SEQ ID NO: 30227 - DNA, 160 bp, Homo sapiens; identical to SEQ ID NO: 11094
  chr17:29585360-29585520
  hypo

SEQ ID NO: 30228 - DNA, 99 bp, Homo sapiens; identical to SEQ ID NO: 11095
  chr17:29586048-29586147
  hypo

SEQ ID NO: 30229 - DNA, 148 bp, Homo sapiens; identical to SEQ ID NO: 11096
  chr17:29587385-29587533
  hypo

SEQ ID NO: 30230 - DNA, 148 bp, Homo sapiens; identical to SEQ ID NO: 11097
  chr17:29588727-29588875
  hypo

SEQ ID NO: 30231 - DNA, 112 bp, Homo sapiens; identical to SEQ ID NO: 11098
  chr17:29592245-29592357
  hypo

SEQ ID NO: 30232 - DNA, 434 bp, Homo sapiens; identical to SEQ ID NO: 11099
  chr17:29652836-29653270
  hypo

SEQ ID NO: 30233 - DNA, 342 bp, Homo sapiens; identical to SEQ ID NO: 11100
  chr17:29654515-29654857
  hypo

SEQ ID NO: 30234 - DNA, 204 bp, Homo sapiens; identical to SEQ ID NO: 11101
  chr17:29657312-29657516
  hypo

SEQ ID NO: 30235 - DNA, 195 bp, Homo sapiens; identical to SEQ ID NO: 11102
  chr17:29661854-29662049
  hypo

SEQ ID NO: 30236 - DNA, 583 bp, Homo sapiens; identical to SEQ ID NO: 11103
  chr17:29663349-29663932
  hypo

SEQ ID NO: 30237 - DNA, 216 bp, Homo sapiens; identical to SEQ ID NO: 11104
  chr17:29664384-29664600
  hypo

SEQ ID NO: 30238 - DNA, 322 bp, Homo sapiens; identical to SEQ ID NO: 11105
  chr17:29664835-29665157
  hypo

SEQ ID NO: 30239 - DNA, 103 bp, Homo sapiens; identical to SEQ ID NO: 11106
  chr17:29665720-29665823
  hypo

SEQ ID NO: 30240 - DNA, 142 bp, Homo sapiens; identical to SEQ ID NO: 11107
  chr17:29667521-29667663
  hypo

SEQ ID NO: 30241 - DNA, 128 bp, Homo sapiens; identical to SEQ ID NO: 11108
  chr17:29670025-29670153
  hypo

SEQ ID NO: 30242 - DNA, 142 bp, Homo sapiens; identical to SEQ ID NO: 11109
  chr17:29676129-29676271
  hypo

SEQ ID NO: 30243 - DNA, 143 bp, Homo sapiens; identical to SEQ ID NO: 11110
  chr17:29677199-29677342
  hypo

SEQ ID NO: 30244 - DNA, 159 bp, Homo sapiens; identical to SEQ ID NO: 11111
  chr17:29679273-29679432
  hypo

SEQ ID NO: 30245 - DNA, 124 bp, Homo sapiens; identical to SEQ ID NO: 11112
  chr17:29683476-29683600
  hypo

SEQ ID NO: 30246 - DNA, 411 bp, Homo sapiens; identical to SEQ ID NO: 11113
  chr17:29683976-29684387
  hypo

SEQ ID NO: 30247 - DNA, 144 bp, Homo sapiens; identical to SEQ ID NO: 11114
  chr17:29685496-29685640
  hypo

SEQ ID NO: 30248 - DNA, 48 bp, Homo sapiens; identical to SEQ ID NO: 11115
  chr17:29685985-29686033
  hypo

SEQ ID NO: 30249 - DNA, 218 bp, Homo sapiens; identical to SEQ ID NO: 11116
  chr17:29687503-29687721
  hypo

SEQ ID NO: 30250 - DNA, 3666 bp, Homo sapiens; identical to SEQ ID NO: 11117
  chr17:29701029-29704695
  hypo

SEQ ID NO: 30251 - DNA, 31 bp, Homo sapiens; identical to SEQ ID NO: 11118
  chr17:29815732-29815763
  hypo

SEQ ID NO: 30252 - DNA, 31 bp, Homo sapiens
  chr17:29841345-29841376
  hypo
cagtggccagaggccacgtcagacacctgag

SEQ ID NO: 30253 - DNA, 52 bp, Homo sapiens
  chr17:30243880-30243932
  hypo
ggcacaggccttcgcccgccgcatgcaccctgggctgcgcagccccagccag

SEQ ID NO: 30254 - DNA, 109 bp, Homo sapiens
  chr17:30333040-30333149
  hypo
ggcatgagctatcgcgcccggccaagtatttttgtttaaattactttttggttgtcacttatctcaataaatattaacatatgtttacgaaacctttctttttcttttt

SEQ ID NO: 30255 - DNA, 13 bp, Homo sapiens
  chr17:30484580-30484593
  hypo
tttgggaggtcga

SEQ ID NO: 30256 - DNA, 150 bp, Homo sapiens
  chr17:30529220-30529370
  hypo
acccggctctaagaaggtctctttacctcaggaagggatgcttgctgtccctatgatacagcattgttttctggcatgcctcttttacagtttacatttgaaaggacggctaaccccaaagtgtgtgtccctttccgttttatggatcca

SEQ ID NO: 30257 - DNA, 31 bp, Homo sapiens
  chr17:30632642-30632673
  hypo
ctattttctccagtcacggcttggcctagga

SEQ ID NO: 30258 - DNA, 11 bp, Homo sapiens
  chr17:30710916-30710927
  hypo
tcaaaaaacaa

SEQ ID NO: 30259 - DNA, 31 bp, Homo sapiens
  chr17:30804492-30804523
  hypo
agtgtgcagaataaatcgctttcatggtttg

SEQ ID NO: 30260 - DNA, 83 bp, Homo sapiens; identical to SEQ ID NO: 11121
  chr17:30813428-30813511
  hypo

SEQ ID NO: 30261 - DNA, 200 bp, Homo sapiens
  chr17:30844874-30845074
  hypo
agtgcctgtgaaggagcggctgagcccccaagggtcacagagctcagaggaggatgtggagatgggcacccctcctgccaccccggctctccctctggacagcacctggcccgccactctgccatcaccctctggacagcacctggcccgccactctgccatcaccctctggacagcacctggcccgccactctgccatc

SEQ ID NO: 30262 - DNA, 30 bp, Homo sapiens
  chr17:30856863-30856893
  hypo
cgtgctgactcccaacgcgtaaacaaacac

SEQ ID NO: 30263 - DNA, 256 bp, Homo sapiens
  chr17:30954409-30954665
  hypo
aaatggtgatggggcacagaccggcgggcggatggatttcagcagggttcaccctgtacgcattacaaggacaatccatcttccaaacgaaatgatatctttctagcaagtcacgtcaaatagagcaataaagcatgaagtctggcataattacagtccatttacctttacaaaacagtcacatcggttcagataattgtctcttttctctcccctgcttgctttgtattctccacagaacgaaaggaggtatttg

SEQ ID NO: 30264 - DNA, 31 bp, Homo sapiens; identical to SEQ ID NO: 11124
  chr17:31203739-31203770
  hypo

SEQ ID NO: 30265 - DNA, 1005 bp, Homo sapiens; identical to SEQ ID NO: 11128
  chr17:31618439-31619444
  hypo

SEQ ID NO: 30266 - DNA, 784 bp, Homo sapiens; identical to SEQ ID NO: 11129
  chr17:31619649-31620433
  hypo

SEQ ID NO: 30267 - DNA, 183 bp, Homo sapiens; identical to SEQ ID NO: 11133
  chr17:32907621-32907804
  hypo

SEQ ID NO: 30268 - DNA, 273 bp, Homo sapiens; identical to SEQ ID NO: 11134
  chr17:32907873-32908146
  hypo

SEQ ID NO: 30269 - DNA, 547 bp, Homo sapiens; identical to SEQ ID NO: 11135
  chr17:32908170-32908717
  hypo

SEQ ID NO: 30270 - DNA, 23 bp, Homo sapiens
  chr17:33327282-33327305
  hypo
tgttttgtttttgagacggagtt

SEQ ID NO: 30271 - DNA, 275 bp, Homo sapiens
  chr17:33344313-33344588
  hypo
gccatgaggcttctccgtctccactgtgacctcacaactccttataaatacactgaccgcttcactagttaacctggaacactaacactaaaccctaccccaaaaatataatttcggaagcactatcatcacacatttattctctctccactcgactctgctaagaggttccgaagaacaccagtgaaagaggaaaggtgaagacacagacccaagcagaggccccacctgggtctcatcctcagcaggtactctggccacgctctccaggtaga

SEQ ID NO: 30272 - DNA, 45 bp, Homo sapiens
  chr17:33351139-33351184
  hypo
catcacagaactggccgtggcgcctcaggccgacaccacccttca

SEQ ID NO: 30273 - DNA, 30 bp, Homo sapiens
  chr17:33568554-33568584
  hypo
atccttgtctcctcgcgctgccggtcgctg

SEQ ID NO: 30274 - DNA, 30 bp, Homo sapiens
  chr17:33568823-33568853
  hypo
ccccggcccagactgcgacgacccagactg

SEQ ID NO: 30275 - DNA, 30 bp, Homo sapiens; identical to SEQ ID NO: 11140
  chr17:33814581-33814611
  hypo

SEQ ID NO: 30276 - DNA, 45 bp, Homo sapiens
  chr17:33917230-33917275
  hypo
ccggctgtaacttctaatgaagacgtcagtttttgccatcctgta

SEQ ID NO: 30277 - DNA, 30 bp, Homo sapiens
  chr17:34261795-34261825
  hypo
tgtttcatctcaggcggcatcctgtcagcc

SEQ ID NO: 30278 - DNA, 30 bp, Homo sapiens
  chr17:34345377-34345407
  hypo
ctcatacgacatcccgtaatgtacagccca

SEQ ID NO: 30279 - DNA, 30 bp, Homo sapiens; identical to SEQ ID NO: 11144
  chr17:35082280-35082310
  hypo

SEQ ID NO: 30280 - DNA, 32 bp, Homo sapiens; identical to SEQ ID NO: 11145
  chr17:35165829-35165861
  hypo

SEQ ID NO: 30281 - DNA, 334 bp, Homo sapiens; identical to SEQ ID NO: 11146
  chr17:35291564-35291898
  hypo

SEQ ID NO: 30282 - DNA, 799 bp, Homo sapiens; identical to SEQ ID NO: 11147
  chr17:35291920-35292719
  hypo

SEQ ID NO: 30283 - DNA, 30 bp, Homo sapiens
  chr17:35336278-35336308
  hypo
gcctgggtagcccgcgagttgcacaataat

SEQ ID NO: 30284 - DNA, 36 bp, Homo sapiens
  chr17:35414065-35414101
  hypo
ccctggaaagatgctgcgttccgaacctgtgcctaa

SEQ ID NO: 30285 - DNA, 30 bp, Homo sapiens
  chr17:35577338-35577368
  hypo
agcattaagtacagcgtgtagttctctaca

SEQ ID NO: 30286 - DNA, 30 bp, Homo sapiens
  chr17:35631393-35631423
  hypo
tggcaaaagccagccgaactaacagggagc

SEQ ID NO: 30287 - DNA, 39 bp, Homo sapiens
  chr17:35802038-35802077
  hypo
ttacaggtgtgagccaccgtgcctggttgatacctccta

SEQ ID NO: 30288 - DNA, 19 bp, Homo sapiens
  chr17:35810278-35810297
  hypo
caggttggataagcttggc

SEQ ID NO: 30289 - DNA, 27 bp, Homo sapiens
  chr17:35845111-35845138
  hypo
aactccgtctcaaaaaaaaaaaaaaaa

SEQ ID NO: 30290 - DNA, 32 bp, Homo sapiens
  chr17:35845346-35845378
  hypo
gttgatgaagattaaatgagccgggtgtggtg

SEQ ID NO: 30291 - DNA, 183 bp, Homo sapiens
  chr17:35872840-35873023
  hypo
ggcaactgatagactacgagcgccagctctttgggaagtcgacagttaaaatggtacagacaccttatggcatagttcccgacgtctatgagaaggagtcccgacacctgatgccttactgggggatttagtgccactgaagcctgcgtcagcagcccgagcggggccggcatctgctccccg

SEQ ID NO: 30292 - DNA, 2022 bp, Homo sapiens; identical to SEQ ID NO: 11158
  chr17:36102012-36104034
  hypo

SEQ ID NO: 30293 - DNA, 333 bp, Homo sapiens; identical to SEQ ID NO: 11159
  chr17:36104217-36104550
  hypo

SEQ ID NO: 30294 - DNA, 706 bp, Homo sapiens; identical to SEQ ID NO: 11160
  chr17:36104643-36105349
  hypo

SEQ ID NO: 30295 - DNA, 46 bp, Homo sapiens; identical to SEQ ID NO: 11164
  chr17:36762362-36762408
  hypo

SEQ ID NO: 30296 - DNA, 30 bp, Homo sapiens
  chr17:36876499-36876529
  hypo
cctccttaggatggcgccgccttttcaagg

SEQ ID NO: 30297 - DNA, 223 bp, Homo sapiens; identical to SEQ ID NO: 11167
  chr17:36886753-36886976
  hypo

SEQ ID NO: 30298 - DNA, 38 bp, Homo sapiens; identical to SEQ ID NO: 11168
  chr17:36904349-36904387
  hypo

SEQ ID NO: 30299 - DNA, 778 bp, Homo sapiens; identical to SEQ ID NO: 11169
  chr17:36905120-36905898
  hypo

SEQ ID NO: 30300 - DNA, 62 bp, Homo sapiens
  chr17:36927314-36927376
  hypo
caggaccaaagaaccgaggaaagctgaggaggttgccagggctgtccggaggtgtgccatag

SEQ ID NO: 30301 - DNA, 43 bp, Homo sapiens
  chr17:36967821-36967864
  hypo
gagacccctatcagtctcctttgaggggcgtggctcatgcaca

SEQ ID NO: 30302 - DNA, 144 bp, Homo sapiens
  chr17:37074887-37075031
  hypo
gccgccgacgaggacgaggtctccttccaggacggggacaccatcgtcaacgtgcagcagatcgacgacggctggatgtacgggacggtggagcgcaccggcgacacggggatgctgccggccaactacgtggaggccatctga

SEQ ID NO: 30303 - DNA, 30 bp, Homo sapiens
  chr17:37216806-37216836
  hypo
actaggcatctcttcgaggatctctacagg

SEQ ID NO: 30304 - DNA, 497 bp, Homo sapiens; identical to SEQ ID NO: 11178
  chr17:37380932-37381429
  hypo

SEQ ID NO: 30305 - DNA, 156 bp, Homo sapiens; identical to SEQ ID NO: 11179
  chr17:37381570-37381726
  hypo

SEQ ID NO: 30306 - DNA, 244 bp, Homo sapiens; identical to SEQ ID NO: 11180
  chr17:37381825-37382069
  hypo

SEQ ID NO: 30307 - DNA, 18 bp, Homo sapiens
  chr17:37407230-37407248
  hypo
aattcttgcataagcccg

SEQ ID NO: 30308 - DNA, 30 bp, Homo sapiens
  chr17:37417640-37417670
  hypo
ctggagagactccacggtagctctagaagt

SEQ ID NO: 30309 - DNA, 40 bp, Homo sapiens
  chr17:37445219-37445259
  hypo
tgctgggattacaggcgtgagccaccgtgcctggcagaag

SEQ ID NO: 30310 - DNA, 35 bp, Homo sapiens
  chr17:37452477-37452512
  hypo
catctctcacagtaaacgtttccaaatcaatctat

SEQ ID NO: 30311 - DNA, 32 bp, Homo sapiens
  chr17:37455740-37455772
  hypo
aagctggtcaggggccaggcacggtggcccac

SEQ ID NO: 30312 - DNA, 25 bp, Homo sapiens
  chr17:37484110-37484135
  hypo
gcccgggtaaccaaacatgtatttc

SEQ ID NO: 30313 - DNA, 31 bp, Homo sapiens
  chr17:37736505-37736536
  hypo
tttgctctcttactagcgccagaaggcactt

SEQ ID NO: 30314 - DNA, 14 bp, Homo sapiens
  chr17:37761816-37761830
  hypo
agccgaagactagc

SEQ ID NO: 30315 - DNA, 827 bp, Homo sapiens; identical to SEQ ID NO: 11186
  chr17:37761946-37762773
  hypo

SEQ ID NO: 30316 - DNA, 340 bp, Homo sapiens; identical to SEQ ID NO: 11190
  chr17:37774744-37775084
  hypo

SEQ ID NO: 30317 - DNA, 30 bp, Homo sapiens; identical to SEQ ID NO: 11191
  chr17:37782848-37782878
  hypo

SEQ ID NO: 30318 - DNA, 471 bp, Homo sapiens; identical to SEQ ID NO: 11192
  chr17:37783204-37783675
  hypo

SEQ ID NO: 30319 - DNA, 30 bp, Homo sapiens
  chr17:37809823-37809853
  hypo
cgcagcctgcctgccgtggcctccctgggc

SEQ ID NO: 30320 - DNA, 221 bp, Homo sapiens
  chr17:37819038-37819259
  hypo
ctgcctgccttcccccagggccgcctgccccggtacctcatccaccagagcctcgcggccaccatgtttgaatttgcctttcacctgcgacagcgcatcagcgagctgggggcccgggcgtgactgtgccccctcccaccctgcgggccagggtcctgtcgccaccacttccagagccagaaagggtgccagttgggctcgcactgcccacatgggacctg

SEQ ID NO: 30321 - DNA, 30 bp, Homo sapiens; identical to SEQ ID NO: 11194
  chr17:37823890-37823920
  hypo

SEQ ID NO: 30322 - DNA, 30 bp, Homo sapiens; identical to SEQ ID NO: 11195
  chr17:37824218-37824248
  hypo

SEQ ID NO: 30323 - DNA, 31 bp, Homo sapiens; identical to SEQ ID NO: 11196
  chr17:37844562-37844593
  hypo

SEQ ID NO: 30324 - DNA, 56 bp, Homo sapiens
  chr17:37880945-37881001
  hypo
tcccataccctctcagcgtacccttgtccccaggaagcatacgtgatggctggtgt

SEQ ID NO: 30325 - DNA, 30 bp, Homo sapiens
  chr17:37884299-37884329
  hypo
cagaaggccaagtccgcagaagccctgatg

SEQ ID NO: 30326 - DNA, 25 bp, Homo sapiens
  chr17:38055925-38055950
  hypo
ttttttttttgaacagagtctcgat

SEQ ID NO: 30327 - DNA, 30 bp, Homo sapiens
  chr17:38073545-38073575
  hypo
gatttcctcaaatacgctgaacattgcgcc

SEQ ID NO: 30328 - DNA, 69 bp, Homo sapiens
  chr17:38105713-38105782
  hypo
actaccaccacacacgcatatgtgagcacacacacacgtatctgcctcgggcccctgtaatgcagttga

SEQ ID NO: 30329 - DNA, 53 bp, Homo sapiens
  chr17:38179481-38179534
  hypo
ccttggcaaaaatgtccgtcagcacctctttgatgggccgcttggggggcagc

SEQ ID NO: 30330 - DNA, 40 bp, Homo sapiens; identical to SEQ ID NO: 11203
  chr17:38228512-38228552
  hypo

SEQ ID NO: 30331 - DNA, 30 bp, Homo sapiens
  chr17:38244540-38244570
  hypo
agatcatgtccctgcgggcggctgtccgct

SEQ ID NO: 30332 - DNA, 30 bp, Homo sapiens
  chr17:38245527-38245557
  hypo
actacgtcaaccaccgcaaacacaacattc

SEQ ID NO: 30333 - DNA, 192 bp, Homo sapiens
  chr17:38249415-38249607
  hypo
gcagcttggtgaagcgggaagtctccaagggccggttcttcagcaccagagcccgaagagcccgcagcagcgtctcctggagctgctccaccgaagcggaattctccatgcccgagcggtctgtggggaagacgacagcagtgaggcggactccccgagctcctctgaggaggaaccggaggtctgcgagga

SEQ ID NO: 30334 - DNA, 31 bp, Homo sapiens
  chr17:38251852-38251883
  hypo
ggaggagggagcctggcgcagaccatttagg

SEQ ID NO: 30335 - DNA, 21 bp, Homo sapiens
  chr17:38383815-38383836
  hypo
tgttccaggctggttgcggtg

SEQ ID NO: 30336 - DNA, 21 bp, Homo sapiens
  chr17:38395607-38395628
  hypo
ccactgcgcccagccttggct

SEQ ID NO: 30337 - DNA, 848 bp, Homo sapiens; identical to SEQ ID NO: 11212
  chr17:38498097-38498945
  hypo

SEQ ID NO: 30338 - DNA, 50 bp, Homo sapiens
  chr17:38511679-38511729
  hypo
ctcacagacctggaggggtaccggcccccgacacctggcccaggccccca

SEQ ID NO: 30339 - DNA, 92 bp, Homo sapiens
  chr17:38513564-38513656
  hypo
acaccacacacatgcgcgtgcgcacacacacaaacacacacacactggacagtagatgggccgacacacacttggcccgagttcctccattt

SEQ ID NO: 30340 - DNA, 31 bp, Homo sapiens
  chr17:38527562-38527593
  hypo
tggagtcctcaggggcgcgggcacctcgctg

SEQ ID NO: 30341 - DNA, 20 bp, Homo sapiens
  chr17:38575001-38575021
  hypo
cagagcgaggccacctcaag

SEQ ID NO: 30342 - DNA, 30 bp, Homo sapiens
  chr17:38631676-38631706
  hypo
ttcggggactcttccggactcctcttgagg

SEQ ID NO: 30343 - DNA, 30 bp, Homo sapiens
  chr17:38657295-38657325
  hypo
gaactgctgaactccgcggtctgtgatcct

SEQ ID NO: 30344 - DNA, 216 bp, Homo sapiens
  chr17:38668669-38668885
  hypo
ctggacttggtccccaggcctcggtgtggattcaggcctcggtgtggattcaggcttgccactcgggtcatggggtcttgggtggtcacgtctgtggctaaccacgctcacctggccactctggcctttggaccaactcgggcaaggagctgagcttgacggggagggaagccacggattggggtggacggaggcggtgagtgagagtagagtgtt

SEQ ID NO: 30345 - DNA, 67 bp, Homo sapiens
  chr17:38774492-38774559
  hypo
ggaagatggacaaaataattacgccctatgagttgaaaggagaattaaaattaattccctcgtgcaa

SEQ ID NO: 30346 - DNA, 31 bp, Homo sapiens
  chr17:38786988-38787019
  hypo
tcgtctttcttctcctcgcctttgttagctg

SEQ ID NO: 30347 - DNA, 31 bp, Homo sapiens
  chr17:38821260-38821291
  hypo
tccttgttgagagcaccgtctctatctgatt

SEQ ID NO: 30348 - DNA, 21 bp, Homo sapiens
  chr17:39344858-39344879
  hypo
acacacggccgggcgcggtgg

SEQ ID NO: 30349 - DNA, 31 bp, Homo sapiens
  chr17:39651771-39651802
  hypo
gtacctcagtgtctagcgtccccttgattca

SEQ ID NO: 30350 - DNA, 727 bp, Homo sapiens
  chr17:39658614-39659341
  hypo
agaggacctacttggcgtcctggccctcgagcaggctgcggtaggtggcgatctcctgctccagacgtgtcttgatgtccagcagcatcttgtactcttggttctggcactccatctcactgcggagctcgctcagctgggcctcgatgctgctgatgagtccctggatctgctgcagctgcagggcatagcggcactccgtctctgccaccgtgttctccagccccgctttctggtggagcgacagacaagaagttacagagggagccaggccagagggaaacctagaggtggtcgccaccgggcaggaggctgcaggcataccatgctcagctgggactgcagctcaatctccaggccttggagcgtgcgcctgagctccgtgatctctgtcttgctggtctgaatcatggcagtgttggtagacacctccttgttcagctctgcactctgaaatgcaagcaggaagaaggtggtggggaagctcagctcgagcagcctgaccaagaggctgtgtccgcccggcccccctggctatatgggatgggctatgtggggtgggagggccgggtaccttggtgtggaaccattcctcagcatcccggcggttcctctctgccatggcctcgtactgctccctcatctctgccagcacgcgggtcaggtcaatgcctggggtggcatccatctccacgttgacctggccgaccacctggttgctaaattc

SEQ ID NO: 30351 - DNA, 129 bp, Homo sapiens
  chr17:39659564-39659693
  hypo
ctagctcttcattcaggctctcgatctgcatctccaggtcagtcttagacagagtgagctcatccagcacccggcgcaggccgttgatgtcggcctccacgctctggcgcagggccagctcattctcat

SEQ ID NO: 30352 - DNA, 289 bp, Homo sapiens
  chr17:39672354-39672643
  hypo
ccttgctgaagaaccaggcctcgacatcccggcggttcttctccgccatggcctcgtactgctccctcatctctgccagcacacgggtcaggtccacacccggtgctgcgtccatctccacattgacctggccggccagctggctgctgaactccttcatctcctgcaggatgggagggacccacttagagacggagagcagaagagagacctgagagtctggcgtcacacatgccaatcctggctctgcccgtaacacaccccaaccgctgttccccattgcacatga

SEQ ID NO: 30353 - DNA, 113 bp, Homo sapiens
  chr17:39676656-39676769
  hypo
catgaccggcacctgcgcctgagtgccctcaccaggaggggctttgtcgttgggcatcagaacatgccctgtgagcctgagcatgttcttaggctcaacggcatcgaccttcc

SEQ ID NO: 30354 - DNA, 407 bp, Homo sapiens
  chr17:39680349-39680756
  hypo
agtgtgaattgcacagggaagcggcggcggtggggggacacataccatgctcagctgtgactgcagctcaatctcaagaccctgaagggtgcgccgcaggtcagtaacctcggacctgctcatctggagctgctccgtgtggccagcgacctcccggttcaattcttcagtctgcagagagaggaagaagagggaataagcattgagtcagaccttcgcgtagggaacacaaagccctccccttcctaacccccaaagggtgcctgcttccctctacctacccggctggtgaaccaggcttcagcatccttccggttctgctcggccatgacctcatattggcttcgcatgtcactcaggatcttggcgagatcggtgcccggagcggaatccacctccacactgac

SEQ ID NO: 30355 - DNA, 143 bp, Homo sapiens
  chr17:39681120-39681263
  hypo
ccagctcttccttcaggccttcgatctgcatctccaggtcggtcctggccagggtcagctcatccagcaccctgcgcaggccgttgatgtcggcctccacgctcatgcgcagagcctgttccgtctcaaacctttcaaaggaa

SEQ ID NO: 30356 - DNA, 20 bp, Homo sapiens
  chr17:39682232-39682252
  hypo
ggtttttttgagacagagtc

SEQ ID NO: 30357 - DNA, 241 bp, Homo sapiens
  chr17:39682491-39682732
  hypo
ctgggattacaggcatgagccaccgcgcccggccgattgtgtagttttttaatgcaacagaataggctacaaaatatcagaggggatttctcttagtatggtgagaattgtgtcacccatttgtgtgtgtgcatgtgcacgcacacacacacacagaggtgagaaaaagaatgcgtaagggtgcgtagtaaaatgtacttattgtcgcaatttttttttttttttgatacagggtctcgct

SEQ ID NO: 30358 - DNA, 856 bp, Homo sapiens; identical to SEQ ID NO: 11215
  chr17:39683577-39684433
  hypo

SEQ ID NO: 30359 - DNA, 31 bp, Homo sapiens
  chr17:39702524-39702555
  hypo
atgccacaggcactgacggttgccactaagc

SEQ ID NO: 30360 - DNA, 101 bp, Homo sapiens
  chr17:39788261-39788362
  hypo
gctttgggggcacagcgagggtcggctgtgaaaacacggagagaatgcgtgtagggtgactcgaggcacagccctggtgcgtgctgcgcggcggggttggt

SEQ ID NO: 30361 - DNA, 30 bp, Homo sapiens
  chr17:39793127-39793157
  hypo
ggcttgacaggggccggctggagggccaca

SEQ ID NO: 30362 - DNA, 119 bp, Homo sapiens
  chr17:40337519-40337638
  hypo
ttgacaggcacttgcgtccacacccaggccagacaaaggcaagtctaagattagcctgctgcaggggggccgtctccaggctgggcccaaggaatggccgctgcggcgttcagaggcca

SEQ ID NO: 30363 - DNA, 106 bp, Homo sapiens
  chr17:40353735-40353841
  hypo
aagatggagaggtcgcggggtcacgattgtgcgtgcgggatccactgactgtccattggccggcccaggagctcctccacacgccgcgctacgtccattgtgtcct

SEQ ID NO: 30364 - DNA, 139 bp, Homo sapiens
  chr17:40370155-40370294
  hypo
gctgcacaattacttgcgggtgttctcgttcttgagcagagacttggcctgctgctcactgatgatggtggccttcacctggggggggttcatgtgcacgttcagcttcccgcccaccagcaggcgcacagtggctgca

SEQ ID NO: 30365 - DNA, 663 bp, Homo sapiens
  chr17:40371744-40372407
  hypo
cagtgtctgtgcctcacgctgcaaccaggcctccagagacacctgcttctgctggagggccgtctcccggctcagacgctcctgggggctcagctgggccagcgggccaaactgagctagaggaggggagaggaaaccatgaccatcacctcccagtgtccaacaggaggcccagagaagcccactcacccgttctggagcgagaccctcctgggctcagatactgcattaagggcaagtcggggttcctgacagccaggggggccaagatgaatgggtgccccaggaggcgcctctgggccctgctcgccagcctcctgactctgagccgtcccctctgggggcacacgggtgctggggcagctggggaggaggcctgcctgcctcctgcccgcctgcctcacagggctgccagccctcttctcgcggcccagcatgggtccaggctgtctggggtgtaagtgtgcccatgcccttgactgcaggtgaacctgggcaaatcgctttcctttcctgtgccttggcttccccacgtgtaaaacgggagattctcggcacctgcctcagtggggtgcattaagattaaatacatgaggacatggaagatgccagaaagctgcctgacatgggtgagctctgtgtgaggttcgtgcttcttggtta

SEQ ID NO: 30366 - DNA, 149 bp, Homo sapiens
  chr17:40375374-40375523
  hypo
acaatgtgcctccaccgcgcctcaccttggatcctcaggctctcctggtactggatgatgaagtactcctgagtctgctgcagcttttttaactcattctctgtgtcctgcgtgaccagtcgcagctcctcaaacgtctggttgatctg

SEQ ID NO: 30367 - DNA, 22 bp, Homo sapiens
  chr17:40381601-40381623
  hypo
aagatttggctgggcccggtgg

SEQ ID NO: 30368 - DNA, 23 bp, Homo sapiens
  chr17:40387506-40387529
  hypo
ttttttttttttgagacggagtc

SEQ ID NO: 30369 - DNA, 82 bp, Homo sapiens
  chr17:40387768-40387850
  hypo
caggcgtgagccaccacgctcggccaggagcacatcttattcacgactgtgtccccagtgtctagtacggtggcttgcctat

SEQ ID NO: 30370 - DNA, 20 bp, Homo sapiens
  chr17:40407743-40407763
  hypo
tggagatggaccaggtgctg

SEQ ID NO: 30371 - DNA, 7 bp, Homo sapiens
  chr17:40408598-40408605
  hypo
caggcac

SEQ ID NO: 30372 - DNA, 30 bp, Homo sapiens; identical to SEQ ID NO: 11218
  chr17:40427459-40427489
  hypo

SEQ ID NO: 30373 - DNA, 31 bp, Homo sapiens; identical to SEQ ID NO: 11219
  chr17:40429066-40429097
  hypo

SEQ ID NO: 30374 - DNA, 30 bp, Homo sapiens
  chr17:40445941-40445971
  hypo
gatagagagggccaggcgtggtggctcaca

SEQ ID NO: 30375 - DNA, 41 bp, Homo sapiens
  chr17:40447698-40447739
  hypo
gacatttgaggagctgcgactggtcacgcaggacacagaga

SEQ ID NO: 30376 - DNA, 124 bp, Homo sapiens
  chr17:40456399-40456523
  hypo
gagtaccaccaagccacgggcaccctcagtgcccacttcaggaacatggtgaggacggggcccaccctcggagggcaggtctgcccagagctgagtccttgtaagcagccgccatctccctgtt

SEQ ID NO: 30377 - DNA, 46 bp, Homo sapiens
  chr17:40477850-40477896
  hypo
attacaggcgtgagccaccgcgcccggccaatcaatttctaaatag

SEQ ID NO: 30378 - DNA, 91 bp, Homo sapiens; identical to SEQ ID NO: 11221
  chr17:40575291-40575382
  hypo

SEQ ID NO: 30379 - DNA, 19 bp, Homo sapiens
  chr17:40616718-40616737
  hypo
ccaatgtgcttgtatgttt

SEQ ID NO: 30380 - DNA, 30 bp, Homo sapiens
  chr17:40705258-40705288
  hypo
ccgtggccgctgcccgggaacgcgtgactg

SEQ ID NO: 30381 - DNA, 41 bp, Homo sapiens
  chr17:40804384-40804425
  hypo
tcggcctcccgaagtgcatgagccaccgcacccggccaaat

SEQ ID NO: 30382 - DNA, 30 bp, Homo sapiens
  chr17:40847765-40847795
  hypo
gggcctgtctacaacgttacgggagaggag

SEQ ID NO: 30383 - DNA, 31 bp, Homo sapiens
  chr17:41131483-41131514
  hypo
gagatgcggaatactccgtgtggggacatta

SEQ ID NO: 30384 - DNA, 30 bp, Homo sapiens
  chr17:41180505-41180535
  hypo
tcctctgagcgcagcgtcagggatgtcttc

SEQ ID NO: 30385 - DNA, 85 bp, Homo sapiens
  chr17:41278615-41278700
  hypo
gcccttcgtgttctgagggaccgagtgggcgaaaagcgccggagagttggagagtctgtggttcagaatgcgaggtgacaacgtg

SEQ ID NO: 30386 - DNA, 34 bp, Homo sapiens
  chr17:41389782-41389816
  hypo
tctttttttttttttttgagacggagtctcgctc

SEQ ID NO: 30387 - DNA, 31 bp, Homo sapiens
  chr17:41399439-41399470
  hypo
cattcgactccaacacgcgaatcaagagcaa

SEQ ID NO: 30388 - DNA, 31 bp, Homo sapiens
  chr17:41437690-41437721
  hypo
aatttgttcccttaaccgtaagtatctgaaa

SEQ ID NO: 30389 - DNA, 31 bp, Homo sapiens
  chr17:41528541-41528572
  hypo
atgacaagaggagacacgttgttcattcatg

SEQ ID NO: 30390 - DNA, 43 bp, Homo sapiens
  chr17:41570141-41570184
  hypo
gcggagacaccgatcccgctctcgatcacgttccaggacccgg

SEQ ID NO: 30391 - DNA, 30 bp, Homo sapiens
  chr17:41601290-41601320
  hypo
ggatacagctgtcccgtgactgactgtctt

SEQ ID NO: 30392 - DNA, 42 bp, Homo sapiens
  chr17:41692629-41692671
  hypo
aatcccagacctgtgtcgccgcatgatcgcaagggctctctg

SEQ ID NO: 30393 - DNA, 31 bp, Homo sapiens; identical to SEQ ID NO: 11230
  chr17:41723871-41723902
  hypo

SEQ ID NO: 30394 - DNA, 31 bp, Homo sapiens
  chr17:41895357-41895388
  hypo
tccctcgccctaaccccgggccctccctgga

SEQ ID NO: 30395 - DNA, 30 bp, Homo sapiens; identical to SEQ ID NO: 11239
  chr17:42005404-42005434
  hypo

SEQ ID NO: 30396 - DNA, 46 bp, Homo sapiens
  chr17:42019593-42019639
  hypo
cgagtgtgcacacacacgtgcagtcagcagacggctcttctagcgt

SEQ ID NO: 30397 - DNA, 479 bp, Homo sapiens; identical to SEQ ID NO: 11240
  chr17:42030271-42030750
  hypo

SEQ ID NO: 30398 - DNA, 846 bp, Homo sapiens; identical to SEQ ID NO: 11243
  chr17:42091702-42092548
  hypo

SEQ ID NO: 30399 - DNA, 25 bp, Homo sapiens
  chr17:42123310-42123335
  hypo
ttttttttttttgagacggagtctc

SEQ ID NO: 30400 - DNA, 17 bp, Homo sapiens
  chr17:42216973-42216990
  hypo
ttttttttttttgagac

SEQ ID NO: 30401 - DNA, 93 bp, Homo sapiens
  chr17:42222373-42222466
  hypo
acgcccggccctagattgtttaagtctttaacgaaatcccatttcttctcattccttagtcctttcccagccgtagcaaaaacaaacaaaaaa

SEQ ID NO: 30402 - DNA, 30 bp, Homo sapiens
  chr17:42254321-42254351
  hypo
acaccaggctgcggcgcgccggctcctgga

SEQ ID NO: 30403 - DNA, 30 bp, Homo sapiens
  chr17:42254632-42254662
  hypo
tgtgggggagcccgcggctggaactgctcc

SEQ ID NO: 30404 - DNA, 30 bp, Homo sapiens
  chr17:42255094-42255124
  hypo
gtttgcctcagggccgagatggggaggagg

SEQ ID NO: 30405 - DNA, 30 bp, Homo sapiens
  chr17:42267975-42268005
  hypo
tgattcactgccaccgctcacccccagggt

SEQ ID NO: 30406 - DNA, 118 bp, Homo sapiens
  chr17:42289049-42289167
  hypo
cgctctgtgctgggcacgtccttcatgttggccatgagctctgcgcagtacagcgagtagctgttcctatcagagccgcggggagagaggtgcagcccgtaagcgagcagggcagcag

SEQ ID NO: 30407 - DNA, 30 bp, Homo sapiens
  chr17:42289754-42289784
  hypo
agcctctttttgtccgagagctgagaccac

SEQ ID NO: 30408 - DNA, 30 bp, Homo sapiens
  chr17:42292670-42292700
  hypo
gaccatgacgggaaacgtcatagagggtga

SEQ ID NO: 30409 - DNA, 31 bp, Homo sapiens
  chr17:42304494-42304525
  hypo
ggcctaggcagggctgcgcctgtaaaaggta

SEQ ID NO: 30410 - DNA, 25 bp, Homo sapiens
  chr17:42331624-42331649
  hypo
tgagccaccgcgcccggccacgttt

SEQ ID NO: 30411 - DNA, 109 bp, Homo sapiens
  chr17:42395481-42395590
  hypo
ccatgctgggcctctgcggctccctggcctccattcccagctgcaagtccctggcgagcttcaaatccaacgagtgcctggtgagcgacagtcccgagggcagcccagc

SEQ ID NO: 30412 - DNA, 264 bp, Homo sapiens; identical to SEQ ID NO: 11250
  chr17:42402709-42402973
  hypo

SEQ ID NO: 30413 - DNA, 234 bp, Homo sapiens
  chr17:42427763-42427997
  hypo
gccaggggcagggggtgaagacggagtcaggaccattttttctcaggcttcctgctgtgaagacagggtgcactgctgtccgcacggtgccttctgcgacctggttcacacccgctgcatcacacccacgggcacccaccccctggcaaagaagctccctgcccagaggactaacagggcaggtgaggaggtgggagagcatcaggccaggggctggggcggggcctcattgac

SEQ ID NO: 30414 - DNA, 153 bp, Homo sapiens; identical to SEQ ID NO: 11251
  chr17:42441041-42441194
  hypo

SEQ ID NO: 30415 - DNA, 614 bp, Homo sapiens; identical to SEQ ID NO: 11254
  chr17:42635072-42635686
  hypo

SEQ ID NO: 30416 - DNA, 96 bp, Homo sapiens
  chr17:42787527-42787623
  hypo
gagactccgtctcaaaaaaaagaaaaaaaaaataccgtctacttttacttctggattgttaacagatatgccatcggcttgttgccttttaaacag

SEQ ID NO: 30417 - DNA, 976 bp, Homo sapiens; identical to SEQ ID NO: 11256
  chr17:42906654-42907630
  hypo

SEQ ID NO: 30418 - DNA, 450 bp, Homo sapiens; identical to SEQ ID NO: 11257
  chr17:42907654-42908104
  hypo

SEQ ID NO: 30419 - DNA, 160 bp, Homo sapiens
  chr17:42942199-42942359
  hypo
gatttctgacctccatcgctgggtgagaaaaaattgctgtgatacctgtggcagggcacgaggatgacagagttaaggggccacgagcacattattacctgtgaactcgccaaagaactttttgcagaccagcctgagcaaggggcggatgttcagcttc

SEQ ID NO: 30420 - DNA, 31 bp, Homo sapiens
  chr17:42963909-42963940
  hypo
ggtttcaatttcactccgcacagcccatgtc

SEQ ID NO: 30421 - DNA, 64 bp, Homo sapiens
  chr17:42981555-42981619
  hypo
caggcctgtacttctgcggcacccgcaagggggactacttttacgcctacgatgtggacatcca

SEQ ID NO: 30422 - DNA, 208 bp, Homo sapiens
  chr17:42992857-42993065
  hypo
gctctggctctgctcgctcctgggatgcgagggctttatgaaggagtgggctagactggcgatgcccgggtgcccctggcaacaccccctggcatagcctgagggggtggggttgggccgcagcccagctatggggagagctcccctcaccccactgaggtcactgtgcccagaggcagagcttcctgggcacgccaactcctgcatg

SEQ ID NO: 30423 - DNA, 23 bp, Homo sapiens
  chr17:43028038-43028061
  hypo
gccaccgcgcctggtctactttg

SEQ ID NO: 30424 - DNA, 135 bp, Homo sapiens; identical to SEQ ID NO: 11261
  chr17:43044671-43044806
  hypo

SEQ ID NO: 30425 - DNA, 5 bp, Homo sapiens
  chr17:43044863-43044868
  hypo
cgccg

SEQ ID NO: 30426 - DNA, 227 bp, Homo sapiens; identical to SEQ ID NO: 11263
  chr17:43045038-43045265
  hypo

SEQ ID NO: 30427 - DNA, 201 bp, Homo sapiens; identical to SEQ ID NO: 11264
  chr17:43045371-43045572
  hypo

SEQ ID NO: 30428 - DNA, 274 bp, Homo sapiens
  chr17:43121082-43121356
  hypo
cattctttggtctctcggctccctccggatttgggggaatgtttttctatacaattctgggtttttctcataactccatttccctaaacagtacctccctcctccctccttccacttgtataggccaaaagcctcggaatcctcctggcctctctcacaccctccatccaacccgcagtgcccggccagcgctacctcccacctgcacagcccacaaggagcccccggtgcatgagcgccaccatgtcgctgcggaagccctgcagcagcctct

SEQ ID NO: 30429 - DNA, 140 bp, Homo sapiens
  chr17:43121665-43121805
  hypo
tcactcccttctctgcccaatcgtccccccatcagagactgtcaggtcctgtcccgctgaacccaacccccgtctggaactggctggaatcaccttaaaagctgtggcaagcggatgggtgcggtggctgacgcctgtaa

SEQ ID NO: 30430 - DNA, 86 bp, Homo sapiens
  chr17:43124005-43124091
  hypo
agcagctctatgtttgcccacggtagtgccaggtggcctacacacaggagaatgagaacacttaggtgatgcgtgaagattttctg

SEQ ID NO: 30431 - DNA, 34 bp, Homo sapiens
  chr17:43173432-43173466
  hypo
gatttgtgagactccacgtcgtttttggtagttt

SEQ ID NO: 30432 - DNA, 186 bp, Homo sapiens
  chr17:43179706-43179892
  hypo
ttttctagcaaaagcagctgccgggtgggacgctgactggggataaaatcctgggagtatgctgcttttcttctgaatgtaacccacagccgtgtctctctgggaagtactggtgtaatagtgtctgggtgggcagaccctggctgggccctggggtctgtccgcgaagtgctctaagtctagcag

SEQ ID NO: 30433 - DNA, 186 bp, Homo sapiens
  chr17:43180397-43180583
  hypo
agcaatttcaccttacgcccgtcatgagccaggaggaggtggagcactggttctacccccaggagaatatcatcgacactttcgtggtggaggtgagtcagggagtggtgttccaggtctctaacacgttcccagagaggcacccccctgagtggccgggttcccagggctcgagtgttggcacct

SEQ ID NO: 30434 - DNA, 30 bp, Homo sapiens
  chr17:43181063-43181093
  hypo
gccttcccttcagaacgcaaacggagaggt

SEQ ID NO: 30435 - DNA, 54 bp, Homo sapiens
  chr17:43196205-43196259
  hypo
gaatgagctgctgggcgcgggccagtgtggcgccctcctcgccctggtcctcca

SEQ ID NO: 30436 - DNA, 31 bp, Homo sapiens; identical to SEQ ID NO: 11266
  chr17:43209588-43209619
  hypo

SEQ ID NO: 30437 - DNA, 297 bp, Homo sapiens
  chr17:43246868-43247165
  hypo
acggtgagttccagcggaaggacttctctgagacttacgaacgcttccacaccgagagcctgcagggccgcagcaagcaggagctggtgcgagactacctggagctggagaagcggctgtcgcaggcggaggaggagactaggaggctgcagcagctgcaggcgtgcaccggccagcagtcctgccgccaggtggaggagctggctgccgaggtccagaggctccggaccgaaaaccagcggcttcgtcaggagaaccagatgtggaaccgagagggctgccgctgtgatgaggagc

SEQ ID NO: 30438 - DNA, 30 bp, Homo sapiens
  chr17:43318030-43318060
  hypo
gcccacagggcacacgggccacagggccac

SEQ ID NO: 30439 - DNA, 30 bp, Homo sapiens
  chr17:43321313-43321343
  hypo
catcccgcgcctgccggagcgcatgaccac

SEQ ID NO: 30440 - DNA, 833 bp, Homo sapiens; identical to SEQ ID NO: 11270
  chr17:43324838-43325671
  hypo

SEQ ID NO: 30441 - DNA, 30 bp, Homo sapiens
  chr17:44799503-44799533
  hypo
cttcacgatcttggcgctcgaactgaacat

SEQ ID NO: 30442 - DNA, 572 bp, Homo sapiens
  chr17:44845575-44846147
  hypo
agcttagaaacagaagggggtcgtcaagaagacgagatgggcaaacaaccccattccctgcgcccaggctcccagcctcccccctgcttcccggagccctacctggtgccctacttgcaggtgtgcacgtcgtagatgcgaatacactcctggcagctgacgtagcagcaccagtggaagatgcagtggcatttttccttccgcttctccgtcctcgtgttgtggccccggccacagcagagcagatcgcagccatcgatgccgtgggaggtgacattgcaagtccggtcccttgtgccaaaggaacccgtctctgggttgggctcacaaaagttgggggagttctcgtagtagaccaggtccctctccgtgggtggcttgaagagcgagtacttggcccggagggtctccacccagcctcgggactcacggtgcttctctactaccatctccgaggcgctgtcatacttgtccttgaggaagtcaccgatggcacggaagtcaggctgcgcccaccagcaggtcttcacctcacagctgcccgacagcccgtggcacttgcatttgaggtg

SEQ ID NO: 30443 - DNA, 31 bp, Homo sapiens
  chr17:45022244-45022275
  hypo
cataagccaccgcagccggccttaattttta

SEQ ID NO: 30444 - DNA, 82 bp, Homo sapiens
  chr17:45599272-45599354
  hypo
atttttttggatttgacgtcaaggcaaacatcattgcaaactcaattccagcatgccagctccagagcactgtaacctttaa

SEQ ID NO: 30445 - DNA, 22 bp, Homo sapiens
  chr17:45723850-45723872
  hypo
caaaggagaattgcttgaaccc

SEQ ID NO: 30446 - DNA, 22 bp, Homo sapiens
  chr17:45723931-45723953
  hypo
cgagactctgtatcaaaaaaag

SEQ ID NO: 30447 - DNA, 785 bp, Homo sapiens; identical to SEQ ID NO: 11280
  chr17:45810599-45811384
  hypo

SEQ ID NO: 30448 - DNA, 113 bp, Homo sapiens
  chr17:45885681-45885794
  hypo
ttcccatagcctggctcggcccgcagcctccagtaggtattgttggtcacccaccactctttcccgctgctatccgtctgccgcctggtgggagaaggcggtggcagtgaggg

SEQ ID NO: 30449 - DNA, 30 bp, Homo sapiens
  chr17:45894354-45894384
  hypo
cagcacagaggatgcggccgctcaggcagg

SEQ ID NO: 30450 - DNA, 30 bp, Homo sapiens
  chr17:45970946-45970976
  hypo
cctccgccccgtgtgcgcacactttttttt

SEQ ID NO: 30451 - DNA, 207 bp, Homo sapiens; identical to SEQ ID NO: 11284
  chr17:46124762-46124969
  hypo

SEQ ID NO: 30452 - DNA, 307 bp, Homo sapiens; identical to SEQ ID NO: 11285
  chr17:46125006-46125313
  hypo

SEQ ID NO: 30453 - DNA, 30 bp, Homo sapiens
  chr17:46136635-46136665
  hypo
agctgagcctcatccgagacatccggcgcc

SEQ ID NO: 30454 - DNA, 153 bp, Homo sapiens
  chr17:46152421-46152574
  hypo
tccggctccaaacctcgagcaaagcctcgtggcttttctgactgtaaaaacaagatgggtagaacaattttatctatatgggactattatccagactggaaccattcctgtgtctctgattaatgtaatcacaaactcttttttttttttttt

SEQ ID NO: 30455 - DNA, 153 bp, Homo sapiens
  chr17:46152813-46152966
  hypo
caaggggctgggattacaggtgtgagccaccgtgcccggcccaatcacaaactcttttgccaatatttcaccaataccttggctcaagtaagagagctgttagaatcctttggagtgattattcatcaatgtctgaagcgcatgagattttcc

SEQ ID NO: 30456 - DNA, 12 bp, Homo sapiens
  chr17:46177206-46177218
  hypo
aagaggtaaaat

SEQ ID NO: 30457 - DNA, 30 bp, Homo sapiens
  chr17:46199892-46199922
  hypo
gagctggtaggagccgagtgccacaggcat

SEQ ID NO: 30458 - DNA, 189 bp, Homo sapiens; identical to SEQ ID NO: 11293
  chr17:46659084-46659273
  hypo

SEQ ID NO: 30459 - DNA, 482 bp, Homo sapiens; identical to SEQ ID NO: 11294
  chr17:46659384-46659866
  hypo

SEQ ID NO: 30460 - DNA, 1612 bp, Homo sapiens; identical to SEQ ID NO: 11300
  chr17:46687506-46689118
  hypo

SEQ ID NO: 30461 - DNA, 322 bp, Homo sapiens; identical to SEQ ID NO: 11302
  chr17:46690041-46690363
  hypo

SEQ ID NO: 30462 - DNA, 275 bp, Homo sapiens; identical to SEQ ID NO: 11303
  chr17:46690429-46690704
  hypo

SEQ ID NO: 30463 - DNA, 195 bp, Homo sapiens; identical to SEQ ID NO: 11304
  chr17:46690852-46691047
  hypo

SEQ ID NO: 30464 - DNA, 319 bp, Homo sapiens; identical to SEQ ID NO: 11305
  chr17:46691499-46691818
  hypo

SEQ ID NO: 30465 - DNA, 600 bp, Homo sapiens; identical to SEQ ID NO: 11306
  chr17:46691987-46692587
  hypo

SEQ ID NO: 30466 - DNA, 379 bp, Homo sapiens; identical to SEQ ID NO: 11312
  chr17:46723838-46724217
  hypo

SEQ ID NO: 30467 - DNA, 30 bp, Homo sapiens; identical to SEQ ID NO: 11324
  chr17:46805618-46805648
  hypo

SEQ ID NO: 30468 - DNA, 150 bp, Homo sapiens; identical to SEQ ID NO: 11325
  chr17:46805931-46806081
  hypo

SEQ ID NO: 30469 - DNA, 30 bp, Homo sapiens
  chr17:46907727-46907757
  hypo
aaataaagactcttcgtgaagtagtgttaa

SEQ ID NO: 30470 - DNA, 224 bp, Homo sapiens; identical to SEQ ID NO: 11343
  chr17:47073103-47073327
  hypo

SEQ ID NO: 30471 - DNA, 226 bp, Homo sapiens; identical to SEQ ID NO: 11344
  chr17:47073388-47073614
  hypo

SEQ ID NO: 30472 - DNA, 1279 bp, Homo sapiens; identical to SEQ ID NO: 11345
  chr17:47074170-47075449
  hypo

SEQ ID NO: 30473 - DNA, 31 bp, Homo sapiens
  chr17:47442692-47442723
  hypo
cgtgagccatcgcatccggacttatgtccat

SEQ ID NO: 30474 - DNA, 1090 bp, Homo sapiens; identical to SEQ ID NO: 11349
  chr17:47573575-47574665
  hypo

SEQ ID NO: 30475 - DNA, 427 bp, Homo sapiens; identical to SEQ ID NO: 11350
  chr17:47574903-47575330
  hypo

SEQ ID NO: 30476 - DNA, 30 bp, Homo sapiens
  chr17:47583905-47583935
  hypo
ggcacgtattccgacgaggccaaccacgtg

SEQ ID NO: 30477 - DNA, 21 bp, Homo sapiens
  chr17:47716149-47716170
  hypo
attcacctgaggtcaggagtt

SEQ ID NO: 30478 - DNA, 30 bp, Homo sapiens
  chr17:47722939-47722969
  hypo
agtcaccgcgcccagccagaaagcacatct

SEQ ID NO: 30479 - DNA, 93 bp, Homo sapiens
  chr17:47895283-47895376
  hypo
cctgaagaatatgcacggctgggacgtctctatatgtgtgaattctgtttaaaatatatgaagagccaaacgatactccgccggcacatggtg

SEQ ID NO: 30480 - DNA, 21 bp, Homo sapiens
  chr17:47899877-47899898
  hypo
ccattgcgcccggcctaagtc

SEQ ID NO: 30481 - DNA, 67 bp, Homo sapiens
  chr17:47911773-47911840
  hypo
tgggattacaggcatgagccgctgcgcccaaccttcttctgctgtcgagatactgctcatcacctgc

SEQ ID NO: 30482 - DNA, 30 bp, Homo sapiens
  chr17:47923460-47923490
  hypo
ggtgggggggcattcggagacattggtttc

SEQ ID NO: 30483 - DNA, 30 bp, Homo sapiens
  chr17:47998416-47998446
  hypo
cttttctctcccttccgctcacctggaaag

SEQ ID NO: 30484 - DNA, 30 bp, Homo sapiens; identical to SEQ ID NO: 11358
  chr17:48041286-48041316
  hypo

SEQ ID NO: 30485 - DNA, 53 bp, Homo sapiens; identical to SEQ ID NO: 11359
  chr17:48041532-48041585
  hypo

SEQ ID NO: 30486 - DNA, 1167 bp, Homo sapiens; identical to SEQ ID NO: 11364
  chr17:48049366-48050533
  hypo

SEQ ID NO: 30487 - DNA, 30 bp, Homo sapiens; identical to SEQ ID NO: 11365
  chr17:48072550-48072580
  hypo

SEQ ID NO: 30488 - DNA, 43 bp, Homo sapiens
  chr17:48139109-48139152
  hypo
attcctgggtccagccaggcacggtggctcacgcttgtaatcc

SEQ ID NO: 30489 - DNA, 30 bp, Homo sapiens
  chr17:48243368-48243398
  hypo
tgtcactcaccgggcgggccaggccgggca

SEQ ID NO: 30490 - DNA, 30 bp, Homo sapiens
  chr17:48268222-48268252
  hypo
agtcagaccacggacgccatctttgccagg

SEQ ID NO: 30491 - DNA, 31 bp, Homo sapiens
  chr17:48435304-48435335
  hypo
tgaacctcatccctgccgtattgtccccaat

SEQ ID NO: 30492 - DNA, 41 bp, Homo sapiens
  chr17:48555661-48555702
  hypo
gctgaggcaggaggatcgcttgaggccgaggagttcaagac

SEQ ID NO: 30493 - DNA, 258 bp, Homo sapiens
  chr17:48565117-48565375
  hypo
ggggcagcctgtggggtcacccgtgctgctcggggagctgtttcctgagacttcccctgatcttgacattcaagaagcgagcacggggccgaggcaggtgcgccatcagataacctgggaccactcaggtttctcccagctgccagggctcgtgccacttgagacatccgggcgctccctgccaggacacctcataaggcccgtgcagaggagctgggtaggagccagggccaagtcggggtggcacagatcaccttc

SEQ ID NO: 30494 - DNA, 31 bp, Homo sapiens
  chr17:48612097-48612128
  hypo
aggcatgttttcaaagcgtggggctgctttg

SEQ ID NO: 30495 - DNA, 132 bp, Homo sapiens; identical to SEQ ID NO: 11375
  chr17:48619158-48619290
  hypo

SEQ ID NO: 30496 - DNA, 608 bp, Homo sapiens; identical to SEQ ID NO: 11376
  chr17:48619346-48619954
  hypo

SEQ ID NO: 30497 - DNA, 30 bp, Homo sapiens
  chr17:48653114-48653144
  hypo
tggctcaggtctctcgggcagcaggtgtgc

SEQ ID NO: 30498 - DNA, 30 bp, Homo sapiens
  chr17:48677412-48677442
  hypo
tatgcctggggctgcggctctgccaccctt

SEQ ID NO: 30499 - DNA, 30 bp, Homo sapiens
  chr17:48680453-48680483
  hypo
ctcatctccgtcatcgacattctggtgtcc

SEQ ID NO: 30500 - DNA, 225 bp, Homo sapiens
  chr17:48687113-48687338
  hypo
acccaatgggctcagcgcaccccacccataggcagagtgaggtgggagctgaggggaagccgcccctgaggggccctgcccagcgcacctggtccggccagtgaccaatgtcgtgtttcgttcttttagatctaatgctggacgatgtaattgcttccggcagctcagccagcgctgcgtcaggtactgcgtctggggtgtgggctcatgcgtgtggggacatgc

SEQ ID NO: 30501 - DNA, 21 bp, Homo sapiens
  chr17:48763549-48763570
  hypo
gtctcaagaaaaaaaacttta

SEQ ID NO: 30502 - DNA, 172 bp, Homo sapiens
  chr17:48776850-48777022
  hypo
cattggtggcttggacgggacagaagaaaacagggagcggctctgactcactggtggctgacaaacaggacccggttttgtgctttctggtgttctgagtatggcagagggggccgacacatcaccattctgaactagtgccaaagaggtgtggtcccggggaaaggtccct

SEQ ID NO: 30503 - DNA, 85 bp, Homo sapiens
  chr17:48844994-48845079
  hypo
ggaacccagatgttcgggtaacgctcacatttcatttaaccctccaatgacaaaagacgggcaaacagacggggcatcagggtgg

SEQ ID NO: 30504 - DNA, 106 bp, Homo sapiens
  chr17:48881297-48881403
  hypo
gtgtgttctacatcctcgagatttataatgatgataatggggatgataatgactcatgtattttattgttcctacttttcaggcacagttttttgtttgtttgttt

SEQ ID NO: 30505 - DNA, 202 bp, Homo sapiens
  chr17:48911126-48911328
  hypo
gagcagctggaacacgggctgatgaaattacggggaattcaaagcagccggcgtcgcccgctgtctggcttcattacggggactggcctcgaagggaagtttattccaataatttagaggattaggatctgacacccttcattagcgatttgacataagcagaaaagacagatcctgcagaatggccgcacaacgggaaggg

SEQ ID NO: 30506 - DNA, 116 bp, Homo sapiens; identical to SEQ ID NO: 11384
  chr17:49027999-49028115
  hypo

SEQ ID NO: 30507 - DNA, 37 bp, Homo sapiens
  chr17:49129051-49129088
  hypo
gcctgggcaacacaacgagactccctcttaaaaaaaa

SEQ ID NO: 30508 - DNA, 181 bp, Homo sapiens
  chr17:49229458-49229639
  hypo
gcgggaagctgagtcacgagaatcgcttgaacccggatggcggagtttgcaatgaaccgacatcgtgcaactgcgctccggcctgggcgccaaagcgatactcggtctcaaaaagaaaaaaaagaaaacaggagaataatgaaattttacttatttattttatttattttttatttttttg

SEQ ID NO: 30509 - DNA, 164 bp, Homo sapiens
  chr17:49281026-49281190
  hypo
ggattacaggtgtgagcggccatgcccggcctttaatttccatattactctaacattactatgtgtaaaatagcattaaagtacacatataaaaaaattacggtaagggtaaataaactacttacttctaggaggaacaagaggttttccgctggctgcacacc

SEQ ID NO: 30510 - DNA, 30 bp, Homo sapiens
  chr17:49462712-49462742
  hypo
tggcgggatccatccgccatccttcccctc

SEQ ID NO: 30511 - DNA, 79 bp, Homo sapiens
  chr17:52832077-52832156
  hypo
actcttacagagggcacggcggtcggccagctgggagcaagcctcgtggcccaggctgcccccccgctcactgcctggc

SEQ ID NO: 30512 - DNA, 21 bp, Homo sapiens
  chr17:53002975-53002996
  hypo
atcctgaggccagatgcgatg

SEQ ID NO: 30513 - DNA, 37 bp, Homo sapiens
  chr17:53314419-53314456
  hypo
gtgagcaaccgctcccggcctcccaaagctttagatg

SEQ ID NO: 30514 - DNA, 1141 bp, Homo sapiens; identical to SEQ ID NO: 11388
  chr17:53342463-53343604
  hypo

SEQ ID NO: 30515 - DNA, 44 bp, Homo sapiens
  chr17:53479130-53479174
  hypo
cacctagaaaatgttttctgccggccgggcacggtggctcatgc

SEQ ID NO: 30516 - DNA, 30 bp, Homo sapiens; identical to SEQ ID NO: 11389
  chr17:54376036-54376066
  hypo

SEQ ID NO: 30517 - DNA, 30 bp, Homo sapiens
  chr17:54588468-54588498
  hypo
ccctacgcagcggccgtggtggcccaggac

SEQ ID NO: 30518 - DNA, 30 bp, Homo sapiens; identical to SEQ ID NO: 11390
  chr17:54671975-54672005
  hypo

SEQ ID NO: 30519 - DNA, 30 bp, Homo sapiens
  chr17:54872385-54872415
  hypo
gagagagaaggagacgtaccgaggctggtc

SEQ ID NO: 30520 - DNA, 353 bp, Homo sapiens; identical to SEQ ID NO: 11393
  chr17:54910846-54911199
  hypo

SEQ ID NO: 30521 - DNA, 654 bp, Homo sapiens; identical to SEQ ID NO: 11394
  chr17:54911580-54912234
  hypo

SEQ ID NO: 30522 - DNA, 272 bp, Homo sapiens
  chr17:54976881-54977153
  hypo
gatcaaggtcatgtagcggaggctgggtcaacacttgttcctttcccactattctttctctcccctcctcccacataccagccacctatagctttgcccccacgcagcacttccacaatggggctgcaccgccaccgatttcagaagcccttctgcaaggacactcggcaggccaagctgagattcaagcccaatcttggactacacaacagagatttactatgggccaggctctgtgctaggcactagggaaatagcgttgaagaaaaatc

SEQ ID NO: 30523 - DNA, 30 bp, Homo sapiens
  chr17:55037249-55037279
  hypo
catcagaagcatcccgggaaggatgctcgt

SEQ ID NO: 30524 - DNA, 30 bp, Homo sapiens
  chr17:55193501-55193531
  hypo
acggggcctggtggcgagcccaagtggttg

SEQ ID NO: 30525 - DNA, 30 bp, Homo sapiens
  chr17:55378777-55378807
  hypo
aacatgtgagatctccgtgtaaataggaat

SEQ ID NO: 30526 - DNA, 67 bp, Homo sapiens
  chr17:55379075-55379142
  hypo
ggacatttgagttgccgagtttaatttttggctagctcaaaccgtgctgcagcgaatattcttggtt

SEQ ID NO: 30527 - DNA, 35 bp, Homo sapiens
  chr17:55426662-55426697
  hypo
tttgtgtgtgtgtgcacgtgcgcttccatccctga

SEQ ID NO: 30528 - DNA, 30 bp, Homo sapiens
  chr17:55474930-55474960
  hypo
gatggcaaggaaaccgagagaagaatgtgt

SEQ ID NO: 30529 - DNA, 30 bp, Homo sapiens
  chr17:55594699-55594729
  hypo
tgagtgcgctgattcgggtgcctgatgcta

SEQ ID NO: 30530 - DNA, 30 bp, Homo sapiens
  chr17:55644936-55644966
  hypo
ccggcagttaaccggcgactgccagtctct

SEQ ID NO: 30531 - DNA, 30 bp, Homo sapiens
  chr17:55752457-55752487
  hypo
ccgggctcgggcttcggccacggcatagct

SEQ ID NO: 30532 - DNA, 124 bp, Homo sapiens
  chr17:55753391-55753515
  hypo
ggttttgagctaagatgggtgcgtctgcagtcccaggccacgttcctgtcagactccgcttctgagtgacagctggcaagccctgacttgggggccacgctgcggagaacaaaacatgtgcaga

SEQ ID NO: 30533 - DNA, 31 bp, Homo sapiens
  chr17:55753743-55753774
  hypo
atgaatctaatcccttcggatcaactgtggt

SEQ ID NO: 30534 - DNA, 71 bp, Homo sapiens
  chr17:55828322-55828393
  hypo
ctgcaactccgcaactcggattggagccatccatcagaggccctgccagcccagggcggcactttaattaa

SEQ ID NO: 30535 - DNA, 270 bp, Homo sapiens
  chr17:55917218-55917488
  hypo
ctcgttttcttccaacgcagtctgtggtctgacactcaagtgttcggatttccgggaaacgtgactacctccgtgttgcttaaaagaccagatttaagtatcacagagatgttatcattttcactcaattaattcgctaaagatatataactaggcacattctgtcactgagtgaaaaatttagcactaatatcttagatccaattctactataacaaatagtaaacatgattttaaaaagtctatagggccgggcgtggtggctcacgc

SEQ ID NO: 30536 - DNA, 29 bp, Homo sapiens
  chr17:55917727-55917756
  hypo
acagagcgagactccgtctcaaaaaaaaa

SEQ ID NO: 30537 - DNA, 23 bp, Homo sapiens
  chr17:55924358-55924381
  hypo
ttaagaatgttgctaggaggccg

SEQ ID NO: 30538 - DNA, 31 bp, Homo sapiens
  chr17:55965542-55965573
  hypo
cgtgagccactgcgcccggcattattttttc

SEQ ID NO: 30539 - DNA, 133 bp, Homo sapiens; identical to SEQ ID NO: 11399
  chr17:56032179-56032312
  hypo

SEQ ID NO: 30540 - DNA, 30 bp, Homo sapiens
  chr17:56166757-56166787
  hypo
atggactgtatactcgatttcatgtgtatg

SEQ ID NO: 30541 - DNA, 31 bp, Homo sapiens
  chr17:56388456-56388487
  hypo
ccgactccccgtggggcgacatggtgcgcac

SEQ ID NO: 30542 - DNA, 31 bp, Homo sapiens; identical to SEQ ID NO: 11400
  chr17:56401799-56401830
  hypo

SEQ ID NO: 30543 - DNA, 160 bp, Homo sapiens; identical to SEQ ID NO: 11401
  chr17:56402169-56402329
  hypo

SEQ ID NO: 30544 - DNA, 1163 bp, Homo sapiens; identical to SEQ ID NO: 11403
  chr17:56429043-56430206
  hypo

SEQ ID NO: 30545 - DNA, 33 bp, Homo sapiens
  chr17:56471127-56471160
  hypo
ctggagggccgggcgcggtggctcacgcctgta

SEQ ID NO: 30546 - DNA, 97 bp, Homo sapiens
  chr17:56569870-56569967
  hypo
cctgcaatggtgtcttcgtttggccaaccagaattcacagtcacagttatagcagtgtgatgccatatggtctggaacccagcgagtcacctaatag

SEQ ID NO: 30547 - DNA, 51 bp, Homo sapiens; identical to SEQ ID NO: 11404
  chr17:56833161-56833212
  hypo

SEQ ID NO: 30548 - DNA, 31 bp, Homo sapiens
  chr17:56906694-56906725
  hypo
gcctggcccgtgtttacgttttctttattgt

SEQ ID NO: 30549 - DNA, 25 bp, Homo sapiens
  chr17:57164466-57164491
  hypo
tttttttgggagatggagtctcgct

SEQ ID NO: 30550 - DNA, 30 bp, Homo sapiens
  chr17:57185802-57185832
  hypo
accaattcataatagcgaacaattagaaac

SEQ ID NO: 30551 - DNA, 40 bp, Homo sapiens
  chr17:57244236-57244276
  hypo
ctataggaccgggcgcggtggcttatgcctgtaatcccag

SEQ ID NO: 30552 - DNA, 30 bp, Homo sapiens
  chr17:57288334-57288364
  hypo
tctatagaatcttccggaagagtcgtgtct

SEQ ID NO: 30553 - DNA, 95 bp, Homo sapiens
  chr17:57297041-57297136
  hypo
accgcgcccggctgaatcaggattttaaatattcactctgcttttctagtcctgtgggagatatggtcttctccgtaaaatttctccctcagtcc

SEQ ID NO: 30554 - DNA, 31 bp, Homo sapiens
  chr17:57398859-57398890
  hypo
atttactcagaagcaacgtagctaaaagagc

SEQ ID NO: 30555 - DNA, 19 bp, Homo sapiens
  chr17:57402605-57402624
  hypo
ttttgagacagagtctcgc

SEQ ID NO: 30556 - DNA, 19 bp, Homo sapiens
  chr17:57402743-57402762
  hypo
accacgccccaccattact

SEQ ID NO: 30557 - DNA, 181 bp, Homo sapiens
  chr17:57476110-57476291
  hypo
tctcctccaagtaggccgaccttctcggaaaattcaccctaaaagtctcacaaaagaatgagttcatggggagattctgtaaagtgatgaactgagatgaaagcagccaacagcccaggagcttttcagaatagcgtctgcagcagaaccagtttccattcagagcgcgtccttggtggaa

SEQ ID NO: 30558 - DNA, 24 bp, Homo sapiens
  chr17:57495991-57496015
  hypo
gtgagactccgtctcaaaaaaatt

SEQ ID NO: 30559 - DNA, 77 bp, Homo sapiens
  chr17:57591254-57591331
  hypo
cccgccttggcctcccaaagtgctgggattagaggcgttatccaccctgtccagccggctttcaggcttttaaaaag

SEQ ID NO: 30560 - DNA, 20 bp, Homo sapiens
  chr17:57768696-57768716
  hypo
ccattatggctgggtgcggt

SEQ ID NO: 30561 - DNA, 37 bp, Homo sapiens
  chr17:57787258-57787295
  hypo
taagaaaccttattattgggccgggcgcggtggttca

SEQ ID NO: 30562 - DNA, 39 bp, Homo sapiens
  chr17:57787534-57787573
  hypo
gagacagagccagactccgtctcaaaaaaaaaagaaaca

SEQ ID NO: 30563 - DNA, 32 bp, Homo sapiens
  chr17:57832469-57832501
  hypo
tctttttcttttttttttagacggagactcac

SEQ ID NO: 30564 - DNA, 25 bp, Homo sapiens
  chr17:57937377-57937402
  hypo
tttttttttttttttttgagacgga

SEQ ID NO: 30565 - DNA, 18 bp, Homo sapiens
  chr17:57937581-57937599
  hypo
ttagccaggatggagaac

SEQ ID NO: 30566 - DNA, 30 bp, Homo sapiens; identical to SEQ ID NO: 11406
  chr17:58215071-58215101
  hypo

SEQ ID NO: 30567 - DNA, 326 bp, Homo sapiens; identical to SEQ ID NO: 11407
  chr17:58216972-58217298
  hypo

SEQ ID NO: 30568 - DNA, 179 bp, Homo sapiens; identical to SEQ ID NO: 11408
  chr17:58217356-58217535
  hypo

SEQ ID NO: 30569 - DNA, 45 bp, Homo sapiens
  chr17:58471328-58471373
  hypo
gccaccgcgccccaccaatatttcgtgtttttctactcacctttc

SEQ ID NO: 30570 - DNA, 30 bp, Homo sapiens
  chr17:58512810-58512840
  hypo
cgatggcattgagacgtaggcactgggcgc

SEQ ID NO: 30571 - DNA, 37 bp, Homo sapiens
  chr17:58590465-58590502
  hypo
agcgcctgaaacccagcgagctcggaaggtgtccaga

SEQ ID NO: 30572 - DNA, 705 bp, Homo sapiens; identical to SEQ ID NO: 11413
  chr17:58677542-58678247
  hypo

SEQ ID NO: 30573 - DNA, 243 bp, Homo sapiens; identical to SEQ ID NO: 11414
  chr17:58700867-58701110
  hypo

SEQ ID NO: 30574 - DNA, 126 bp, Homo sapiens; identical to SEQ ID NO: 11415
  chr17:58711212-58711338
  hypo

SEQ ID NO: 30575 - DNA, 192 bp, Homo sapiens; identical to SEQ ID NO: 11416
  chr17:58725251-58725443
  hypo

SEQ ID NO: 30576 - DNA, 251 bp, Homo sapiens; identical to SEQ ID NO: 11417
  chr17:58733951-58734202
  hypo

SEQ ID NO: 30577 - DNA, 1531 bp, Homo sapiens; identical to SEQ ID NO: 11418
  chr17:58740341-58741872
  hypo

SEQ ID NO: 30578 - DNA, 750 bp, Homo sapiens; identical to SEQ ID NO: 11419
  chr17:58742891-58743641
  hypo

SEQ ID NO: 30579 - DNA, 46 bp, Homo sapiens
  chr17:59239153-59239199
  hypo
ctcctcagcttatatttaactcgtcgcttgttctggaaaagtagta

SEQ ID NO: 30580 - DNA, 31 bp, Homo sapiens
  chr17:59395454-59395485
  hypo
gctacatgccgctcctcggctcctccccgcc

SEQ ID NO: 30581 - DNA, 163 bp, Homo sapiens
  chr17:59434279-59434442
  hypo
caggctcacctgcccccggctgagtcaggaccgagcacaggacttgacagaggaggcatcgcagcaaggtcaggtgcctcccgtgcttcttatgggcccacctggtcccagcatgagtgcttctcccaggaggcatttttttgtctctcgactttttctttct

SEQ ID NO: 30582 - DNA, 1168 bp, Homo sapiens; identical to SEQ ID NO: 11423
  chr17:59476133-59477301
  hypo

SEQ ID NO: 30583 - DNA, 30 bp, Homo sapiens; identical to SEQ ID NO: 11424
  chr17:59477542-59477572
  hypo

SEQ ID NO: 30584 - DNA, 726 bp, Homo sapiens; identical to SEQ ID NO: 11425
  chr17:59477883-59478609
  hypo

SEQ ID NO: 30585 - DNA, 30 bp, Homo sapiens
  chr17:59560584-59560614
  hypo
ccaccatgatgccgcggctgcccaccctct

SEQ ID NO: 30586 - DNA, 30 bp, Homo sapiens
  chr17:59646336-59646366
  hypo
cactaaaagtaggaacgtaggaaaggagag

SEQ ID NO: 30587 - DNA, 181 bp, Homo sapiens
  chr17:60014064-60014245
  hypo
agtaataataataataaataaaataagagattgattccagttactctcttttaggtatgtactgcattgttattcatagcactttagaggacttgtcgaactaattatgttcatacaagtgtgtttccaaatatactgaaggcttaaggtcagaggtttgtatctctcttttttttttttt

SEQ ID NO: 30588 - DNA, 31 bp, Homo sapiens
  chr17:60057207-60057238
  hypo
tttcaccttaatgtatcgaagtatttgatag

SEQ ID NO: 30589 - DNA, 33 bp, Homo sapiens
  chr17:60084914-60084947
  hypo
tgagttagaccttggccgggcgtggtggttcac

SEQ ID NO: 30590 - DNA, 18 bp, Homo sapiens
  chr17:60127001-60127019
  hypo
aaatgtgaaggctgggcg

SEQ ID NO: 30591 - DNA, 27 bp, Homo sapiens
  chr17:60263516-60263543
  hypo
cgtgagccaccacgcccagccaaaact

SEQ ID NO: 30592 - DNA, 168 bp, Homo sapiens
  chr17:60525978-60526146
  hypo
tcagaacctggtggatcgccgactgcaggtgaaccgaggaaagcaactgacaatgtaccgggtttggattcagtgcaaatactgcaagccccttctgtccagcaccagctgagaggcacctgctgccaacacgatgcaagcccattgtgtttccgggcttttttaaaa

SEQ ID NO: 30593 - DNA, 39 bp, Homo sapiens
  chr17:60564358-60564397
  hypo
gaaatatgattgcaggctgggcgcagtggcttacgcctg

SEQ ID NO: 30594 - DNA, 121 bp, Homo sapiens
  chr17:60564854-60564975
  hypo
ggccaacagagtgcgcctccgtctcaaaaaaaaaaaaaaaaagtaagtcagcaaggagatatctgtaaaaatttatgatattcttttaatctgcaggaattctttacttaaatccttggca

SEQ ID NO: 30595 - DNA, 37 bp, Homo sapiens
  chr17:60565574-60565611
  hypo
gtcagccaccgtgcccgggccaaggaactctttttct

SEQ ID NO: 30596 - DNA, 30 bp, Homo sapiens
  chr17:60582248-60582278
  hypo
ctgtctcacttagtggcgtgatcttggctt

SEQ ID NO: 30597 - DNA, 30 bp, Homo sapiens
  chr17:60743990-60744020
  hypo
gcctgatgcctgctcgtgcctctggagggc

SEQ ID NO: 30598 - DNA, 151 bp, Homo sapiens
  chr17:60753743-60753894
  hypo
gttcgagcaggccttcgtcagcagcctcatctacaactgggagggcgagtacttctggacggccctgcaggacctcaacagcaccggctccttcttctggctcagtggggatgaagtcatgtacacccactggaaccgggaccagcccggt

SEQ ID NO: 30599 - DNA, 271 bp, Homo sapiens
  chr17:60754616-60754887
  hypo
ccctctccttcagggtacagccgtgggggctgcgtggcgctggccactggcagcgccatggggctgtgggaggtgaagaactgtacctcgttccgggcccgctacatctgccggcagagcctgggcactccagtgacgccggagctgccggggccagatcccacgcccagcctcactggctcctgtccccagggctgggcctcggacaccaaactccggtattgctataaggtagggcagcctgttggccgggtagggggcagggggagga

SEQ ID NO: 30600 - DNA, 30 bp, Homo sapiens
  chr17:60758440-60758470
  hypo
cagcactggtggatcggcctgcacacctct

SEQ ID NO: 30601 - DNA, 30 bp, Homo sapiens
  chr17:60766617-60766647
  hypo
acctccagctccatgcgtaggtggcctctg

SEQ ID NO: 30602 - DNA, 346 bp, Homo sapiens
  chr17:60766876-60767222
  hypo
ctgtagacccctccctgagcccgtccccagcagcgctgccccccgccccgggcactgagctctcctacctcaacggcaccttccggctgcttcagaagccgctgcgctggcacgatgccctcctgctgtgtgagagccgcaatgccagcctggcctacgtgcccgacccctacacccaggccttcctcacgcaggctgcccgagggctgcgcacgccgctctggattgggctggctggcgaggaggtgggctcccgacacttttgccctgggccccagccttgcccgggttcccctccctgccccttcctgcccccgccttatccgcaccctatcctgactattcc

SEQ ID NO: 30603 - DNA, 58 bp, Homo sapiens; identical to SEQ ID NO: 11437
  chr17:60885476-60885534
  hypo

SEQ ID NO: 30604 - DNA, 35 bp, Homo sapiens
  chr17:61000667-61000702
  hypo
gagccaccgtgcacggcctgtcatcttgttcttaa

SEQ ID NO: 30605 - DNA, 31 bp, Homo sapiens
  chr17:61447304-61447335
  hypo
caaaaaaaagaccaagcgcttttgagtatca

SEQ ID NO: 30606 - DNA, 30 bp, Homo sapiens
  chr17:61483398-61483428
  hypo
atacatgggtgactcgtacagcagtaggaa

SEQ ID NO: 30607 - DNA, 46 bp, Homo sapiens; identical to SEQ ID NO: 11440
  chr17:61553923-61553969
  hypo

SEQ ID NO: 30608 - DNA, 30 bp, Homo sapiens
  chr17:61609164-61609194
  hypo
tgggcccatagtcccggcacctgcccaacc

SEQ ID NO: 30609 - DNA, 104 bp, Homo sapiens
  chr17:61637141-61637245
  hypo
aacagagtgggactccgtctcaaagaaaaaaaaaccttgtaccagaattccagataaatggaagaatgtaaacatataactgtaaaacacgggagaatcttggt

SEQ ID NO: 30610 - DNA, 30 bp, Homo sapiens
  chr17:61656219-61656249
  hypo
cgaggtgatgatgacggccttcagtggagg

SEQ ID NO: 30611 - DNA, 27 bp, Homo sapiens
  chr17:61677496-61677523
  hypo
tgggattacaggcgtgagccaccgcgc

SEQ ID NO: 30612 - DNA, 30 bp, Homo sapiens
  chr17:61685482-61685512
  hypo
aaggacaggacttgcgaccttgaagccaaa

SEQ ID NO: 30613 - DNA, 31 bp, Homo sapiens
  chr17:61700817-61700848
  hypo
cattatttttttcttgcggtatccctgaaat

SEQ ID NO: 30614 - DNA, 31 bp, Homo sapiens
  chr17:61780924-61780955
  hypo
ccctggctggagaatgcgcacagtttgcaga

SEQ ID NO: 30615 - DNA, 86 bp, Homo sapiens
  chr17:61817228-61817314
  hypo
ggacggctgctccgacgaaggcccgggcctggggagatggaatcggtggcagagcgaggagtgactggctccggcagtgcaccagg

SEQ ID NO: 30616 - DNA, 38 bp, Homo sapiens
  chr17:61864889-61864927
  hypo
aagccattgaaacaggctgggcgtggtagctgggcgtg

SEQ ID NO: 30617 - DNA, 94 bp, Homo sapiens
  chr17:62010992-62011086
  hypo
tgcaggccaggacctgagccacggaagtcaggggcaggagggttaaggtttcatccgaggaacagcccgttccgggcagccccagatgttcttt

SEQ ID NO: 30618 - DNA, 30 bp, Homo sapiens
  chr17:62019009-62019039
  hypo
ggggttgaggagcccgtcccagccggccga

SEQ ID NO: 30619 - DNA, 30 bp, Homo sapiens
  chr17:62019292-62019322
  hypo
atcacacggaacagcgtgggtgacacgaag

SEQ ID NO: 30620 - DNA, 38 bp, Homo sapiens
  chr17:62209842-62209880
  hypo
tgaatttcttatgcatcgtccacatgcttcatgcactt

SEQ ID NO: 30621 - DNA, 31 bp, Homo sapiens
  chr17:62781267-62781298
  hypo
ggacacagctgtgacacggtgagtatcctgg

SEQ ID NO: 30622 - DNA, 31 bp, Homo sapiens
  chr17:62783043-62783074
  hypo
gggtactgaggtcactcggggcttatgggat

SEQ ID NO: 30623 - DNA, 31 bp, Homo sapiens; identical to SEQ ID NO: 11448
  chr17:62915937-62915968
  hypo

SEQ ID NO: 30624 - DNA, 351 bp, Homo sapiens
  chr17:63534021-63534372
  hypo
acattcggctccctacgcaggagcacgcacacccgtgtgcacgcccacagccacgcccatgcgcacacgcacaggcccgcctacacaagcacatatccacacgcatatgcacacccacacgcaacccatgcacatgcgcacacagcccacgcccaggcacacacccacacgcagcccacgcgcatgcgcatgcaacccacgcacatgcgcacaccctaacgcaccccatgcacatgcgcatacacatacgagcgctcacgccgtggacggaagcaggaagaaggcctaggccgcattacctctcggatctgctgcaggcgctcctccaggctgtggcggctctccaactcc

SEQ ID NO: 30625 - DNA, 543 bp, Homo sapiens; identical to SEQ ID NO: 11451
  chr17:63555846-63556389
  hypo

SEQ ID NO: 30626 - DNA, 170 bp, Homo sapiens; identical to SEQ ID NO: 11453
  chr17:63557213-63557383
  hypo

SEQ ID NO: 30627 - DNA, 158 bp, Homo sapiens; identical to SEQ ID NO: 11454
  chr17:64257869-64258027
  hypo

SEQ ID NO: 30628 - DNA, 466 bp, Homo sapiens
  chr17:64672166-64672632
  hypo
agtttcccaatcaacatttgccgaggagttctggctcccggtgcagaactgacttgtggcgacgtgagggaactggcagcttcttagacccaagttctccctcgcagcatcgtcagaagaggcccaaagtagagacgcaaacaaaccctgagaacagcgtgttcttcccagtaacgtgaccgggaaaatgtgagccagaggaaacttgagagctccgtggtgcggctgagctggtggggtgagggttttttccctttttctatctggtccagcccatcggccacttgagatgctcctgaactgagtaaccaagctgttcggagggtactttctcagcaggacaagccctgagctctggaaaaacgcagctagaataacgaggaagcagaggggcctctcccacaccaggcttgccccgacaggtcagcttgcttgtggcccagcgctactgcgcacatgttccttt

SEQ ID NO: 30629 - DNA, 438 bp, Homo sapiens
  chr17:64751202-64751640
  hypo
atcagctagccttaccgaagagctaaaaagagattcatcccaaacaagagcttccttggaagcattccatgaagacttgaaacggtgctgcctcccaccacctgacccagtattgtcagtgcctcctctgaggatcgcagaaaatcgcaccccacgcccccccagtgcacattccagacttggagaagcgcggcatggggtggcggtggggagaacacctttctgccagatcaaaagcccagcactttattcagagttttatttatggctccttcagaaggttagtccagtcacgcctccttaataaccgcctcatcacacatgattcaggtgtcctggggccacttcacgctcctggcttcctggcccaaagcccaggagaccgctgaaccccactgcctggcattatttgcgggcgagacaccactggtgaagtgt

SEQ ID NO: 30630 - DNA, 30 bp, Homo sapiens
  chr17:64752171-64752201
  hypo
tctgagaatcagtcacgggggctccacgcg

SEQ ID NO: 30631 - DNA, 31 bp, Homo sapiens
  chr17:64781441-64781472
  hypo
atccttctgactactgcgaagttacctgtga

SEQ ID NO: 30632 - DNA, 30 bp, Homo sapiens; identical to SEQ ID NO: 11455
  chr17:64877670-64877700
  hypo

SEQ ID NO: 30633 - DNA, 31 bp, Homo sapiens
  chr17:64935531-64935562
  hypo
cccttgaccatggtgacgaaggaaaccccgt

SEQ ID NO: 30634 - DNA, 30 bp, Homo sapiens
  chr17:65026892-65026922
  hypo
tcgccctccagggacgtgtcgcccatgggc

SEQ ID NO: 30635 - DNA, 38 bp, Homo sapiens
  chr17:65109641-65109679
  hypo
ctgggattacaggcgtgagcaaccgccaagtagagatt

SEQ ID NO: 30636 - DNA, 42 bp, Homo sapiens; identical to SEQ ID NO: 11457
  chr17:65352418-65352460
  hypo

SEQ ID NO: 30637 - DNA, 97 bp, Homo sapiens
  chr17:65712195-65712292
  hypo
gatggtgccctcatcacctctcacctggtaactacaataactgcgatagacttctagggaatctccctgttggtgccccaggcgcacttgctactga

SEQ ID NO: 30638 - DNA, 31 bp, Homo sapiens
  chr17:66416570-66416601
  hypo
ctaccaaattgcctgccgctgtcaagccgca

SEQ ID NO: 30639 - DNA, 13 bp, Homo sapiens
  chr17:66420729-66420742
  hypo
cttccggccgggt

SEQ ID NO: 30640 - DNA, 26 bp, Homo sapiens
  chr17:66421041-66421067
  hypo
acttccatctcgaaatgatttcaggt

SEQ ID NO: 30641 - DNA, 30 bp, Homo sapiens
  chr17:66421687-66421717
  hypo
ctgctggggaggtgcgggtctgccggccag

SEQ ID NO: 30642 - DNA, 96 bp, Homo sapiens; identical to SEQ ID NO: 11460
  chr17:66434324-66434420
  hypo

SEQ ID NO: 30643 - DNA, 30 bp, Homo sapiens
  chr17:66440147-66440177
  hypo
atcctagcatatcgtcgaagtagagagatt

SEQ ID NO: 30644 - DNA, 30 bp, Homo sapiens
  chr17:66440530-66440560
  hypo
gcaaacactgcttcacgttcgcaatttgga

SEQ ID NO: 30645 - DNA, 136 bp, Homo sapiens
  chr17:66538904-66539040
  hypo
tactatcctccccactgttggcggcacccgtcggaagtccagaatcctgcaagagaggaagctctgttccatctgagggatgatcagggagtgaggaggaggggttttgtcccccggccagtgcacattaggaatt

SEQ ID NO: 30646 - DNA, 130 bp, Homo sapiens
  chr17:66539519-66539649
  hypo
cagcatggcgggaagcgtgttctttgtaaattgttcttttcgttacattcgttaaaaggccttgtgtttttcaatctggggggttgcatgggacattttgagttcaaagacaccacgatgaggcacgaag

SEQ ID NO: 30647 - DNA, 30 bp, Homo sapiens
  chr17:66588586-66588616
  hypo
acaatctgtccctccgtatatattccattt

SEQ ID NO: 30648 - DNA, 1203 bp, Homo sapiens; identical to SEQ ID NO: 11461
  chr17:66596260-66597463
  hypo

SEQ ID NO: 30649 - DNA, 30 bp, Homo sapiens
  chr17:66913110-66913140
  hypo
ataataatacaaattcttggccgggcgcgg

SEQ ID NO: 30650 - DNA, 19 bp, Homo sapiens
  chr17:66913379-66913398
  hypo
ctcaaaaacaaaacaaaac

SEQ ID NO: 30651 - DNA, 1005 bp, Homo sapiens; identical to SEQ ID NO: 11462
  chr17:68164769-68165774
  hypo

SEQ ID NO: 30652 - DNA, 30 bp, Homo sapiens; identical to SEQ ID NO: 11463
  chr17:68166006-68166036
  hypo

SEQ ID NO: 30653 - DNA, 63 bp, Homo sapiens
  chr17:70220135-70220198
  hypo
cagagctcaccacagctctgacgacggcaaagagaggttgccggaaggaaacaaaagtccatc

SEQ ID NO: 30654 - DNA, 52 bp, Homo sapiens; identical to SEQ ID NO: 11470
  chr17:70270192-70270244
  hypo

SEQ ID NO: 30655 - DNA, 94 bp, Homo sapiens
  chr17:70380739-70380833
  hypo
ccatctgagaagtttttaaatctccttgcccaggctgcaacctagaccaatcaaaccagaagctctgcgagtaagacaccgccaggcatcacta

SEQ ID NO: 30656 - DNA, 166 bp, Homo sapiens
  chr17:70441992-70442158
  hypo
tttctccttcttggtaggccacgcctcccccgggcacatactgcctctgtccgagggtttcgtccaagccctgggctctgaccacaaaaagcgcccttttctttggcgggctcacctcagacgtgaggtaccagagagccaaaccgtctgctaaaaggacatcccc

SEQ ID NO: 30657 - DNA, 172 bp, Homo sapiens
  chr17:71201700-71201872
  hypo
gcatttccagtcacccagaaccgggcgctgcagctgctttatgatctgcgttacctcaacattgttctgacagccaagggtgacgaggtgaagagtggccggagcaagccagactccaggtgtcgtatcctctagggagctatgtcaaggcggtctcttccaaaagcaaata

SEQ ID NO: 30658 - DNA, 83 bp, Homo sapiens
  chr17:71202365-71202448
  hypo
aacagcaaccttcatcgcctggtgcagcgaacttctgtgagtcaaatcaaaaacatgcttagtgcgaacgaagcgatacaggc

SEQ ID NO: 30659 - DNA, 136 bp, Homo sapiens
  chr17:71202869-71203005
  hypo
tacagagaatcagctcgccccccggagcagtacgttcaactcccaagaaccccataacatcctgccactggcatccagtcagatcaggtaaaggctgccaagaggcttctgcggggcacttcgggaggccaaggtg

SEQ ID NO: 30660 - DNA, 113 bp, Homo sapiens
  chr17:71269316-71269429
  hypo
ccaacatcctgaccttccctccggtcgggggctcatcagactcggcgctgtcttttttaaatttatttattttttttattgagacggagtctctgtctgtcacccgggctgga

SEQ ID NO: 30661 - DNA, 31 bp, Homo sapiens
  chr17:71272580-71272611
  hypo
ttgccattacttttaacgacaaaaaatgcaa

SEQ ID NO: 30662 - DNA, 31 bp, Homo sapiens
  chr17:71280548-71280579
  hypo
atagctatgggaggtgcgtagggaaaacaca

SEQ ID NO: 30663 - DNA, 30 bp, Homo sapiens
  chr17:71281851-71281881
  hypo
gccaggggaggggccgccacggcgtacggg

SEQ ID NO: 30664 - DNA, 964 bp, Homo sapiens; identical to SEQ ID NO: 11475
  chr17:71307045-71308009
  hypo

SEQ ID NO: 30665 - DNA, 30 bp, Homo sapiens
  chr17:71312494-71312524
  hypo
aggtcatttctcttcgtgaaataagctatc

SEQ ID NO: 30666 - DNA, 39 bp, Homo sapiens
  chr17:71325319-71325358
  hypo
taggactgtaggcgtgagccgctgcgcccagtcccccgt

SEQ ID NO: 30667 - DNA, 30 bp, Homo sapiens
  chr17:71332892-71332922
  hypo
ggcagggccagcagcgcctgtacacagtgc

SEQ ID NO: 30668 - DNA, 31 bp, Homo sapiens
  chr17:71351037-71351068
  hypo
ttctcatagacccagccgtgtaagtcgagca

SEQ ID NO: 30669 - DNA, 31 bp, Homo sapiens
  chr17:71354313-71354344
  hypo
tgatgggcacgccaggcggtcctggggcacc

SEQ ID NO: 30670 - DNA, 138 bp, Homo sapiens
  chr17:71364485-71364623
  hypo
tcctcttgcaaccccccgtggccgacctacccctcccctcctcagggccccctctcccacctgcttgctgggtctggccttgggtgggggtgctccgaggcccatccccagcggcgttgaaggcggccacgctgacca

SEQ ID NO: 30671 - DNA, 298 bp, Homo sapiens
  chr17:71431600-71431898
  hypo
ggtaggtggaagtttgcacctcgccggctgcattgcgggcgaagcactggaacatgccggtatcatcgggcaccaggccgctgatctgcaggcccccgtcgttgcgctgccggaagcgggtcaacttctccacctccaccacggctgcgtccttgtaccaggtgatggagggcggcggcacacctgtgggcaagacgtgggcccaccgtcaacctgcctcctgcctcctctccgcctaggaggggtgcttgggaggaggccgggcccggaaatctgcgagggggtccctggtgaatct

SEQ ID NO: 30672 - DNA, 30 bp, Homo sapiens; identical to SEQ ID NO: 11477
  chr17:71469605-71469635
  hypo

SEQ ID NO: 30673 - DNA, 132 bp, Homo sapiens
  chr17:71492680-71492812
  hypo
gctggacagatggacaggacccggtgatacagggtcttgtactccctcgaccaaaatcctttcgagactgtccactgcctgctggatatatccgagaagattcttcctggcgttccaggtcctacctctgcc

SEQ ID NO: 30674 - DNA, 237 bp, Homo sapiens
  chr17:71548538-71548775
  hypo
gttaaggcagcttggcgaggacgcatgacatctgtgtcacgcattgaaactggagtggcgcaggggaccctcctgagggggtggccgtccacattgccagctgatggccgagcggtcagtggtcgaggcgcaggtctgagtgtactcggccggagtacccatcatgagccacttagattagcttctcggcactcaagaagtacgtacgagcatcacgcccacttgagctatgagaaa

SEQ ID NO: 30675 - DNA, 30 bp, Homo sapiens; identical to SEQ ID NO: 11478
  chr17:71641654-71641684
  hypo

SEQ ID NO: 30676 - DNA, 291 bp, Homo sapiens
  chr17:71744647-71744938
  hypo
tgctccaagatgggccccagacgtggaagatggctctgccgggacagctgtaaactctttaaccttgtgtggggcttcgtccttcagcagcccggtgagggatcagtggcaggtgtgatggcgggggaggtggaggtggcggcggaggcggccctgcactcactcactcacggcagaacagactctggataaacaattatagtctatttacctcagaccatatggtgttggggaacaggtgtgcgggtaatgaagagcccagctccaattaagcgtcggggaacccggccg

SEQ ID NO: 30677 - DNA, 137 bp, Homo sapiens; identical to SEQ ID NO: 11479
  chr17:71948491-71948628
  hypo

SEQ ID NO: 30678 - DNA, 30 bp, Homo sapiens
  chr17:72207503-72207533
  hypo
ggtcagcaggcctccggggaagcagctaga

SEQ ID NO: 30679 - DNA, 30 bp, Homo sapiens
  chr17:72269930-72269960
  hypo
ccattctggtggtgcgggaagatgtcttta

SEQ ID NO: 30680 - DNA, 30 bp, Homo sapiens; identical to SEQ ID NO: 11481
  chr17:72270429-72270459
  hypo

SEQ ID NO: 30681 - DNA, 89 bp, Homo sapiens
  chr17:72278028-72278117
  hypo
gccgagctgaacatcgacatcatgcccaaccctgagctggccgagcagttcgtggagcggaacccagtggacacgggcatccagtgctc

SEQ ID NO: 30682 - DNA, 35 bp, Homo sapiens
  chr17:72290213-72290248
  hypo
gcccagcttggatcgtggttttttccttttaatct

SEQ ID NO: 30683 - DNA, 317 bp, Homo sapiens
  chr17:72367921-72368238
  hypo
cctcctactactaccttctggcgctcacagcctcggatatcatcatccaggtggtcatcgtgttcgcgggcttcctcctgcagggagcagtgctggcccgccaggtgccccaggctgtggtgcgcacggccaacatcctggagtttgctgccaaccacgcctcagtctggatcgccatcctgctcacggttgaccgctacactgccctgtgccaccccctgcaccatcgggccgcctcgtccccaggccggacccgccgggccattgctgctgtcctgagtgctgccctgttgaccggcatccccttctactggtgg

SEQ ID NO: 30684 - DNA, 374 bp, Homo sapiens; identical to SEQ ID NO: 11486
  chr17:72449938-72450312
  hypo

SEQ ID NO: 30685 - DNA, 159 bp, Homo sapiens; identical to SEQ ID NO: 11487
  chr17:72450330-72450489
  hypo

SEQ ID NO: 30686 - DNA, 193 bp, Homo sapiens
  chr17:72811188-72811381
  hypo
gttgaaaatttgaggacggggtgtcagagagggggaccttctccctctgccgctttctggctgtgtcactgaacctctccagccccccagtttcctcatcagtaagatgagggcatcgtcacctgcaccagtgaccttgcagcgggccatgagcatgaaatgaaaccatgtgtgttagcgcttggcagagtgt

SEQ ID NO: 30687 - DNA, 19 bp, Homo sapiens
  chr17:72823449-72823468
  hypo
ttttagacagagtctcgct

SEQ ID NO: 30688 - DNA, 37 bp, Homo sapiens
  chr17:72823707-72823744
  hypo
tacaggcatgaaccaccgtgcccggccgcatctgcat

SEQ ID NO: 30689 - DNA, 253 bp, Homo sapiens
  chr17:72824032-72824285
  hypo
cgcacccaccccttccgaggcccagctaaagccaagagagccctgcagcccggcaccttccaagggctaagtggtggtgaaggagggagctggcgccaagtcctcccctagtcctgttccccgcctggagtgccggtgcctgagctggtgatgggcacactgccggccatttgttatcattagccctggcatgttgattctctgcttggaaaagagagtgccgctcccagacagccaccgtgacggatggcct

SEQ ID NO: 30690 - DNA, 30 bp, Homo sapiens
  chr17:72824524-72824554
  hypo
tgtgtgtgcacaactcggacacccaaaggg

SEQ ID NO: 30691 - DNA, 56 bp, Homo sapiens; identical to SEQ ID NO: 11489
  chr17:72920344-72920400
  hypo

SEQ ID NO: 30692 - DNA, 543 bp, Homo sapiens; identical to SEQ ID NO: 11492
  chr17:72983946-72984489
  hypo

SEQ ID NO: 30693 - DNA, 30 bp, Homo sapiens
  chr17:73017120-73017150
  hypo
agggctcttctgggcgtccgggcagctgca

SEQ ID NO: 30694 - DNA, 178 bp, Homo sapiens; identical to SEQ ID NO: 11495
  chr17:73073505-73073683
  hypo

SEQ ID NO: 30695 - DNA, 86 bp, Homo sapiens; identical to SEQ ID NO: 11496
  chr17:73073967-73074053
  hypo

SEQ ID NO: 30696 - DNA, 207 bp, Homo sapiens
  chr17:73075425-73075632
  hypo
agtcctgggcccccataggtccgcaatggtggtcctgagggtcctgaaactcttttcagtatttccacgagccagatggcaagcaggcctgtgctttcaaggaggcaggttagcaaaccgaatgtcagggtgtctggtctctgcctggcctgttcctggagaaattagtgacccaggtttcagcctgtgcttcatgggggaaaacat

SEQ ID NO: 30697 - DNA, 136 bp, Homo sapiens
  chr17:73091069-73091205
  hypo
ccagggagactgcagagaccccggcctcggaggggcccggtggacagcagcccgagctgatggcccacaggcctctgcaggcgtgtgtctgctggccgcagctgcccatctccccggctacctcctggctactccc

SEQ ID NO: 30698 - DNA, 31 bp, Homo sapiens
  chr17:73095844-73095875
  hypo
tttaaaagataactctcgtgctacacctagg

SEQ ID NO: 30699 - DNA, 31 bp, Homo sapiens
  chr17:73096893-73096924
  hypo
tctccccaccactggccggtgaggagctggg

SEQ ID NO: 30700 - DNA, 31 bp, Homo sapiens
  chr17:73117396-73117427
  hypo
tcctagggtagatgtgcgtttaacgtcatga

SEQ ID NO: 30701 - DNA, 30 bp, Homo sapiens
  chr17:73124973-73125003
  hypo
tcgcttctccctctcggccagcgccaggct

SEQ ID NO: 30702 - DNA, 88 bp, Homo sapiens
  chr17:73132192-73132280
  hypo
agagctaacccaagacgaggctggacttgccgccagggggatttcttctggatggcactggggccggggccaccgggctgggcacagg

SEQ ID NO: 30703 - DNA, 20 bp, Homo sapiens
  chr17:73132858-73132878
  hypo
acaggcgtgagccaccgcgc

SEQ ID NO: 30704 - DNA, 121 bp, Homo sapiens
  chr17:73135932-73136053
  hypo
ccagtcagaagtactccacccacagaggagggaggtttgtttgtttccagcccataatgagataagtacaggaattgagagtaagtgttcagaaactttgatttattttttcagatggagt

SEQ ID NO: 30705 - DNA, 31 bp, Homo sapiens
  chr17:73136292-73136323
  hypo
gagccaccgcgcccagccaaatgtttagaaa

SEQ ID NO: 30706 - DNA, 5 bp, Homo sapiens
  chr17:73148047-73148052
  hypo
gagca

SEQ ID NO: 30707 - DNA, 30 bp, Homo sapiens
  chr17:73154781-73154811
  hypo
tgctctggttcaaacgtctctgacacctgt

SEQ ID NO: 30708 - DNA, 42 bp, Homo sapiens
  chr17:73179829-73179871
  hypo
caggcgtgagccaccgcgcccggcctacagtgtcttcttctg

SEQ ID NO: 30709 - DNA, 181 bp, Homo sapiens
  chr17:73209660-73209841
  hypo
tacaggtgtaagccaccgtgctggccctgaatgttccgttcttatggaacatatatgtcctgaccaaattgtgttgaggggttgtcacctgaaatggagaagtaatcttgtgagatcactgctcggtctcataaacactcctcacttcttgaactcaacattttttttttgaaagacaggg

SEQ ID NO: 30710 - DNA, 155 bp, Homo sapiens
  chr17:73215294-73215449
  hypo
acctggaattcggcccggcacggtggctcacaggaagtagtgggccaaatgtttgagtctctgattgattcgctaaggtttgttgttgtcgtttagagacagggtttcgctttgcggcctgggcgggagtgcagtgatgcgatcatggcacaatg

SEQ ID NO: 30711 - DNA, 152 bp, Homo sapiens
  chr17:73241506-73241658
  hypo
aggaggacccccaccccgatgtgtgacaactaaaaatgtttccagacactgccaaatgttccctggagggccctgttgagaatcactgggttttgttacgttttttttttgttttttgacacagaatctcgctatgttggtcaggctagagt

SEQ ID NO: 30712 - DNA, 32 bp, Homo sapiens
  chr17:73241837-73241869
  hypo
gcgatcctcccggcctaggccccacagggtgc

SEQ ID NO: 30713 - DNA, 183 bp, Homo sapiens
  chr17:73242493-73242676
  hypo
tttggcaggagccctaagaaccgctatggggacacgaggaatggcgtgggcaggtgaagggctgcggtttccacctccggagagtgaaggacctaccgtcagggcctggagcgcctcccattcctgtggggactggatcttgtgggccagcagtcggacggcgatctgtggcctgggggacaa

SEQ ID NO: 30714 - DNA, 31 bp, Homo sapiens
  chr17:73274197-73274228
  hypo
tgggagggctccctctcgtgtgagggctgcc

SEQ ID NO: 30715 - DNA, 67 bp, Homo sapiens
  chr17:73311548-73311615
  hypo
ctctgtctcaaaaaaaaaaaaaagaaaaaaaaagtatttccaagacgcataaaacaggtccactgtc

SEQ ID NO: 30716 - DNA, 41 bp, Homo sapiens
  chr17:73311871-73311912
  hypo
ggcgtgccctgaagagcgaggccatgcgcctacctccagct

SEQ ID NO: 30717 - DNA, 29 bp, Homo sapiens
  chr17:73352189-73352218
  hypo
caggcatgagccaccgcacctggccctat

SEQ ID NO: 30718 - DNA, 84 bp, Homo sapiens; identical to SEQ ID NO: 11499
  chr17:73422367-73422451
  hypo

SEQ ID NO: 30719 - DNA, 31 bp, Homo sapiens
  chr17:73474683-73474714
  hypo
ccccacgccctgccagcgtccctctttgatg

SEQ ID NO: 30720 - DNA, 30 bp, Homo sapiens
  chr17:73498112-73498142
  hypo
ggcactggccactccgaaggccagcagtgc

SEQ ID NO: 30721 - DNA, 171 bp, Homo sapiens; identical to SEQ ID NO: 11501
  chr17:73511276-73511447
  hypo

SEQ ID NO: 30722 - DNA, 30 bp, Homo sapiens
  chr17:73518215-73518245
  hypo
gaacgggagcaccacgcggaggccgcgcag

SEQ ID NO: 30723 - DNA, 55 bp, Homo sapiens; identical to SEQ ID NO: 11505
  chr17:73585951-73586006
  hypo

SEQ ID NO: 30724 - DNA, 226 bp, Homo sapiens
  chr17:73606304-73606530
  hypo
gcccagcccctgctccagaggcggcagagactgcaggtgcaggggcttgggtggggcggttcagggtagaagccaggctgcctgagctggccgagctggccaaatcccagcagcgttgaccctctcagcccggcctcgcacgggctgtggcttcagacacagtgctccttgaactcatcccttttccctccggccggggtaggccggggcccttgggaggtgctgt

SEQ ID NO: 30725 - DNA, 708 bp, Homo sapiens
  chr17:73613005-73613713
  hypo
aagctgggtatcaacggtgcccactcgtccccgccggtgagcaccccagcctgtctcccccagagtgtgtgctgctgcactggggagctcaaggctctctggggcgaacttggccttgtgctgtgactcagcccgtgtactttctccgtatccccccagatgctgtcccccagcccaggaaagggccccccgccagctgtggctcctcgacccaaggccccgctacagcttgggccctctagctccatcaaggaaaagcaggggccccttctggacctgtttggccagaagctgcctattgcccacacacccccacctccaccagcgccaccactgcctctgcccgaggacccagggaccctttcagcagagcgtcgttgtaaggaaccacatttctcctgcgccgtgggcttcactggggcagaggcagggttcgcacagactctcggtgcccagggctgaaggcatttctgcgtggctgaggccagctgttcgggcttctggactttggagccatacgtagctggggagtcccagcttccgcgttcccacccagggcagggcctgggcatctttggggctgtcatcgagaggctgtcacacacagggtgttgtccctgacacatacccgacagctctgtgaggaagttagtggccctggctgacatggtcatagaagacccacgagcctcacggacgccagggaaa

SEQ ID NO: 30726 - DNA, 30 bp, Homo sapiens
  chr17:73613935-73613965
  hypo
cgcgccctctggcagcgtgtgcttctccta

SEQ ID NO: 30727 - DNA, 210 bp, Homo sapiens
  chr17:73615977-73616187
  hypo
gtggagtgccggggcggctccaccctggagctgtcactgaagagcgagcagctggtgctgcacacagcccgggcaagggccatcgaggcgctggttgagctattcctgaatgagcttaagaaggtaagtgtggggcacgggttgagaggccgggcagacagccctcaccgatgctgcatctccctgtccgtcttccctgtgggggcaggg

SEQ ID NO: 30728 - DNA, 191 bp, Homo sapiens
  chr17:73635124-73635315
  hypo
ccacatggcctcaaggatggccgcaggccaattgcagggtggagggccccgttcgatgaccttcacggtggttctaaaccagctctgccaaggcagcggcaccgggagtgactggcctcactgacgtagccatctcagcgagaaccggctgagacctgggacaaggcaacgataattacagccaaaggtct

SEQ ID NO: 30729 - DNA, 336 bp, Homo sapiens
  chr17:73636001-73636337
  hypo
ttggccggcagcccccgaagcaagcccttggtctcactgtcctcaccggcttcctccaccctgagctgtgtcagctgggtggggactgagggccaccactaggtggaagtcaccaggggtgcaatgtgtgagacctgacaaacttgttctgcgggctgcggatgggtgcgagggtggaatctcggtgctgcgacgagtgtggggccagccgtggaggctccaggtgttctctctgccccagcagagcccggcaggagccccaacaggaagccagcgcggcatggctgccaccgacttcgtgcaggagatgcgcgccgtgggcgagaggctgctgct

SEQ ID NO: 30730 - DNA, 204 bp, Homo sapiens
  chr17:73639448-73639652
  hypo
gacaggccgaatggccgctctagggcaggcggtgaacaactgctgagtccgcacaggattcggtccctgccctcacaggactcactcctccctgctccttggccaactggcacacaccaggcccggctgtcgggccaactccttcacaggcttcaaacccactgagattaacaaaccagacctgctctccgacagcagcctggc

SEQ ID NO: 30731 - DNA, 30 bp, Homo sapiens
  chr17:73680673-73680703
  hypo
tccctgcgctcaacacgatggatggtcttc

SEQ ID NO: 30732 - DNA, 31 bp, Homo sapiens
  chr17:73692187-73692218
  hypo
tctcaagtcctaagtgcggctgcctctgaga

SEQ ID NO: 30733 - DNA, 30 bp, Homo sapiens
  chr17:73748329-73748359
  hypo
agtcccagccctaccgctacacggtgaagg

SEQ ID NO: 30734 - DNA, 37 bp, Homo sapiens
  chr17:73800543-73800580
  hypo
aaataaaaaatccattaatctgcgcaactgagtttat

SEQ ID NO: 30735 - DNA, 185 bp, Homo sapiens
  chr17:73811184-73811369
  hypo
gaaggggagcctgcccggccttccctcagggcctgagcctgacttgcctgtgctctgccctccagatctacaagtccaccaagtgcaacgacatgcagcagtcgggcagctgtccccgaggacccttctgcgcctttgcccacgtagaacgtatgctgttcccattgccccggggcagtgccctc

SEQ ID NO: 30736 - DNA, 45 bp, Homo sapiens
  chr17:73822057-73822102
  hypo
cagttcaagtgctctccgacctaggcctagcggttgatgacacag

SEQ ID NO: 30737 - DNA, 30 bp, Homo sapiens
  chr17:73825212-73825242
  hypo
atgcctgctctgaccgtgggctgatgcttt

SEQ ID NO: 30738 - DNA, 166 bp, Homo sapiens
  chr17:73830727-73830893
  hypo
ggcctgaagagagctcgcgggcccgggcctttataaggctgcagtacaccagggccaggcgacaggtgtcctagggtggggttggacagagggaactgatccatgggtggggcatccaggaagggcaggtgggagggcatgggaatttcagcgacttgggggattt

SEQ ID NO: 30739 - DNA, 30 bp, Homo sapiens
  chr17:73887229-73887259
  hypo
accgagtggtctgacgcgcgcacctcccag

SEQ ID NO: 30740 - DNA, 30 bp, Homo sapiens
  chr17:73891047-73891077
  hypo
gggcggggtcagcgcgcggcagggctgggg

SEQ ID NO: 30741 - DNA, 18 bp, Homo sapiens
  chr17:73904255-73904273
  hypo
atatttctctctctaaaa

SEQ ID NO: 30742 - DNA, 30 bp, Homo sapiens
  chr17:73906660-73906690
  hypo
ttgcaccctgtccacggaagagctgtcatc

SEQ ID NO: 30743 - DNA, 31 bp, Homo sapiens
  chr17:73910407-73910438
  hypo
ctcctcccaggaattgcgctgcactctgtgc

SEQ ID NO: 30744 - DNA, 30 bp, Homo sapiens
  chr17:73941135-73941165
  hypo
gattttaaataaaacgtgaggtactgggtc

SEQ ID NO: 30745 - DNA, 30 bp, Homo sapiens
  chr17:74005636-74005666
  hypo
gcttggccttgagccgagtgatctcctgct

SEQ ID NO: 30746 - DNA, 61 bp, Homo sapiens
  chr17:74013789-74013850
  hypo
cccagccgccccttcccgctgctcacccacctcatggctgtggatgcggccctccaagtcc

SEQ ID NO: 30747 - DNA, 31 bp, Homo sapiens
  chr17:74019499-74019530
  hypo
ctgtcaagaaggtggccggcaggtcagggct

SEQ ID NO: 30748 - DNA, 15 bp, Homo sapiens
  chr17:74022590-74022605
  hypo
cggccatgaacccct

SEQ ID NO: 30749 - DNA, 30 bp, Homo sapiens
  chr17:74041568-74041598
  hypo
agcccgaggtcaatacgatggggaaaagcc

SEQ ID NO: 30750 - DNA, 138 bp, Homo sapiens
  chr17:74042124-74042262
  hypo
gatgatgtcatagagtcggatcaggtcctggggccggggtgagcgcttgctgtcatcctctggctgctgctgcagcagagccctctgcagacctttggccatgttctcattacgcttgattgccgttgatagcttgat

SEQ ID NO: 30751 - DNA, 206 bp, Homo sapiens
  chr17:74047791-74047997
  hypo
tgttgttcactaacttgggaacgaactggggctcattcatgctataaatctagtaaagcaaacacggccaccattcactcctggaaccaccagagcagcaccatccaatagaactctctgccacgggcaatgtcctctacgtgcaccgtccaatgaacacctgagcactcggaagttttattaatttatctatctttttattattt

SEQ ID NO: 30752 - DNA, 30 bp, Homo sapiens
  chr17:74049499-74049529
  hypo
cgttcaagaaaagagcgaacttcgtcttac

SEQ ID NO: 30753 - DNA, 30 bp, Homo sapiens
  chr17:74050000-74050030
  hypo
tacaccgaccttctccgccagccactggac

SEQ ID NO: 30754 - DNA, 30 bp, Homo sapiens
  chr17:74050272-74050302
  hypo
tggtgcggaggaaagcgagctgcagtgtgt

SEQ ID NO: 30755 - DNA, 41 bp, Homo sapiens
  chr17:74050636-74050677
  hypo
aatcaccaagcctgagctgggcgctgtggctcacgcctgta

SEQ ID NO: 30756 - DNA, 18 bp, Homo sapiens
  chr17:74059750-74059768
  hypo
aaagcaagactctgtctg

SEQ ID NO: 30757 - DNA, 119 bp, Homo sapiens; identical to SEQ ID NO: 11510
  chr17:74072591-74072710
  hypo

SEQ ID NO: 30758 - DNA, 391 bp, Homo sapiens; identical to SEQ ID NO: 11511
  chr17:74072998-74073389
  hypo

SEQ ID NO: 30759 - DNA, 31 bp, Homo sapiens; identical to SEQ ID NO: 11512
  chr17:74132738-74132769
  hypo

SEQ ID NO: 30760 - DNA, 30 bp, Homo sapiens
  chr17:74275070-74275100
  hypo
cagagccctggccccggacccatatgtccc

SEQ ID NO: 30761 - DNA, 212 bp, Homo sapiens
  chr17:74387384-74387596
  hypo
gctgggggctctggcgagctgctggccttgggcaccccgttgggcagtgcctgggccttctccagcagggcatgggtttccagccaggactcgatacggttcaccagccgccagccaccagtgctaaagtgttgcctgatctcctgctcaaagacctcggggggccgccgcaccagctgggtcatggactgcaccacgcggatcagcgccat

SEQ ID NO: 30762 - DNA, 297 bp, Homo sapiens
  chr17:74390230-74390527
  hypo
atctcaacagcatcccgcttggctgctctcaggatcgcttggctgctctcaggatccctgctctttcttttcttactcccttccttccaggacagggccagaactggggcctcagactcagattcagagtctagcatagtgcttggctcgatgcacaggcccagtaagggactgcggagtcaacaaggtggcaggcaaacgggcttgcctgttccggaaggatgcactcagcgctgcctcagtaaacatgactcagagacactaggccccgtccacgaacagaggagtgggaaaatg

SEQ ID NO: 30763 - DNA, 112 bp, Homo sapiens
  chr17:74391567-74391679
  hypo
cggccgagaaagtaattttttaaaggagggaggaaagaaagaaccatctggcctggacacacggctgagtcagccctcacctgactgagcctgtgaccgcccctgtaaaagg

SEQ ID NO: 30764 - DNA, 363 bp, Homo sapiens
  chr17:74392149-74392512
  hypo
cacaaacaggagccccgagaaggcgggggaaggcgaagaccaggcaagggctgactcacagggtgcaaactccagtacggagaagacctcgcccttggcgctggtgaaggtgacgccaggcttgccgccacactgctggcacagcaccggggtttcgctgggccactcagccttcacaggtgactgcccctcgggcttgtcctccttgcgctctacgtcgggcactgcttccatcttctcctcctctacaatggccacattgtccagggtcttcttgaggttttcctgtagcttcttgatgtcatccagaaacttcttctcccgagttggcttctcaggctccacagtcggagaggtgggcga

SEQ ID NO: 30765 - DNA, 119 bp, Homo sapiens
  chr17:74415733-74415852
  hypo
atgctgacaagaacaaggccccgggccagttgctgtcacagtggcaaagagcagatcccgccagcacgcatccttgggaacctggtggacatggtttcgccaccttgaagacttccagg

SEQ ID NO: 30766 - DNA, 35 bp, Homo sapiens
  chr17:74427554-74427589
  hypo
actccagcctgggcgacagggtgctctgtctcaaa

SEQ ID NO: 30767 - DNA, 60 bp, Homo sapiens
  chr17:74435283-74435343
  hypo
agaacacctacttcacggggttctccagtgactgtgcctagaacgcggcaggtgccaaca

SEQ ID NO: 30768 - DNA, 30 bp, Homo sapiens
  chr17:74475340-74475370
  hypo
aaaccactgggctgcgcccctgcggaagca

SEQ ID NO: 30769 - DNA, 187 bp, Homo sapiens
  chr17:74531816-74532003
  hypo
cctggcctcggtgtttcgtttctcccttggcatctgccctaccctggtccccttcctggggaggttcaatggtgttccatgatgtggacggtgagcacttcctccacgtatccgcacaggtacctggcaggggttgggacacaaaacctccaaggtcctgaggaccctgcctcgcttcttcatggtg

SEQ ID NO: 30770 - DNA, 69 bp, Homo sapiens
  chr17:74533184-74533253
  hypo
gtctggggtggctggccgagcaaggagttctgaggccggggagaggagggggaccgaggtgctctcctg

SEQ ID NO: 30771 - DNA, 146 bp, Homo sapiens; identical to SEQ ID NO: 11516
  chr17:74533838-74533984
  hypo

SEQ ID NO: 30772 - DNA, 31 bp, Homo sapiens
  chr17:74551831-74551862
  hypo
gacagtagtacttcatcgcattgtgaggatt

SEQ ID NO: 30773 - DNA, 35 bp, Homo sapiens
  chr17:74579151-74579186
  hypo
ttttttaaaaaatgtattactcggggctgggcgcg

SEQ ID NO: 30774 - DNA, 647 bp, Homo sapiens; identical to SEQ ID NO: 11517
  chr17:74581100-74581747
  hypo

SEQ ID NO: 30775 - DNA, 54 bp, Homo sapiens
  chr17:74621442-74621496
  hypo
ggacgctggtacagccggattatcccttcatcgtgtagccgcttccagacttct

SEQ ID NO: 30776 - DNA, 30 bp, Homo sapiens
  chr17:74621698-74621728
  hypo
tcttttccctggctccgtccctaggggtct

SEQ ID NO: 30777 - DNA, 34 bp, Homo sapiens
  chr17:74625173-74625207
  hypo
gtctttggtttctctgcgtcgtggggctctggaa

SEQ ID NO: 30778 - DNA, 251 bp, Homo sapiens
  chr17:74667046-74667297
  hypo
gaaaagggagattttcaaaaacgctgattgcagactgagttatttaacacggttcagcaaccgtggtctgaggaattttcacttgtagaggactcaggccgccatcaggcccgaagagtccaggttggtggggccactccccgcggtgtggagcctgcagggggccacgactgggtgcagaaaaggaatgtgatcattcagccgagtggtaagtccaacccatttcacgcgcactcagcctgcactctacg

SEQ ID NO: 30779 - DNA, 31 bp, Homo sapiens
  chr17:74703800-74703831
  hypo
ccaatgtttgggaatccgaccatccagcctt

SEQ ID NO: 30780 - DNA, 31 bp, Homo sapiens
  chr17:74716633-74716664
  hypo
aagactcactcagagtcgaggcctgtgtctc

SEQ ID NO: 30781 - DNA, 225 bp, Homo sapiens; identical to SEQ ID NO: 11518
  chr17:74732258-74732483
  hypo

SEQ ID NO: 30782 - DNA, 262 bp, Homo sapiens; identical to SEQ ID NO: 11519
  chr17:74732943-74733205
  hypo

SEQ ID NO: 30783 - DNA, 195 bp, Homo sapiens
  chr17:74771098-74771293
  hypo
ctgagcaagaacaatcgttttggtagaaatccagttgtgctgttgggcatcctggtgcacttcatagctttttatctaatatttctcaacatgcctggagatgccccgattgctcctgttaaaggaactgacagcagtgcttacatcaaatccaggtatagtggctgtcatttctctagtcgcttgagtacgggt

SEQ ID NO: 30784 - DNA, 30 bp, Homo sapiens
  chr17:74771629-74771659
  hypo
gagcagtttatataacgtttgaggatatcg

SEQ ID NO: 30785 - DNA, 30 bp, Homo sapiens; identical to SEQ ID NO: 11520
  chr17:74864287-74864317
  hypo

SEQ ID NO: 30786 - DNA, 30 bp, Homo sapiens; identical to SEQ ID NO: 11521
  chr17:74865163-74865193
  hypo

SEQ ID NO: 30787 - DNA, 75 bp, Homo sapiens
  chr17:74908778-74908853
  hypo
tttgctgctgcaagatgcttccggggtgagggaggtggcacgagggagccgtgcgctctgtgatgagactgcagc

SEQ ID NO: 30788 - DNA, 4 bp, Homo sapiens
  chr17:75196343-75196347
  hypo
cagg

SEQ ID NO: 30789 - DNA, 215 bp, Homo sapiens
  chr17:75196526-75196741
  hypo
cttttaacattgcttagaaatgtctttttctcttaatagattccaaaagatgagcatattcttcggttcctccgtgcacgggattttaatattgacaaagccagagagatcatgtgtcagtctttgacgtggagaaagcagcatcaggtagactacattcttgaaacctggacccctcctcaggtccttcaggattactacgcgggaggctggca

SEQ ID NO: 30790 - DNA, 759 bp, Homo sapiens
  chr17:75206878-75207637
  hypo
aacttggggtgcagtgtgtttcgtgtgaatcgggggcatctgtagacatccacatggtaaaaacctccgttctgctttgggtattaaataaagcacagatccgagatggcaacaaactgaaaggaaggctgaagcggaggcccccactgtgaatgcaggaaagaggttccgtcagcacagggggccgaggcctcaggatggagctgcctggggagccactttgctgaagagggggccgtgccacgtggtgccgcctgctgttcttagacaggacccttgtacctcactgaatctgctgtggaaggacattctgaagtggcgtttcagtggtgaggtggcagtggtgggattaaaggggcccggctcgtagagcagccacgcgctgaagggcacagcagacagcgtgcatgggctgagaggggccgtgggcctggctctgctgcttccttaggtggagttttcagtgactgcagaactctgcacagctgcttttcattctcacgtccgcccccgcccaatctttgaaactaactttgattattccctcctgggtagctctgtcggtgctgtgtaagtttggttttcaattggttctcagcacccagggggtgaccacctcaaccccatctctactatgccaggggctcatcccgctcacccagcctcgccactgttctctcgtgtgagcctcacacggcaggcccggttccatgcccctgcttcccccttgctgggaacgctgtcctcaggctcccctgc

SEQ ID NO: 30791 - DNA, 207 bp, Homo sapiens
  chr17:75208035-75208242
  hypo
tcattcagattgtggatgcctcgtcagtcatcacttgggatttcgacgtgtgcaaaggggacattgtgtttaacatctatcactccaagaggtcgccacaaccacccaaaaaggactccctgggagcccacagcatcacctctccgggtgggaacaatgtgcagctcatagacaaagtctggcagctgggccgcgactacagcatgg

SEQ ID NO: 30792 - DNA, 350 bp, Homo sapiens
  chr17:75209342-75209692
  hypo
gccaggggtcggaagcgagtcgccctcagctgccactgccctacttgttctagggttcccatgtgaccaggtggccgggcttctacatcctgcagtggaaattccacagcatgcctgcgtgcgccgccagcagccttccccgggtggacgacgtgcttgcgtccctgcaggtctcttcgcacaagtgtaaagtgatgtactacaccgaggtgatcggctcggaggatttcaggtgcggccaccctcgccacagcaggtgctgcggacagctgggcatggttggagggagcctgcagtcccacgccgtgtgcaggatcagcagtggcggcgggtgtcaggaatgcttggag

SEQ ID NO: 30793 - DNA, 26 bp, Homo sapiens
  chr17:75211196-75211222
  hypo
tgctggggggacggggtgagtggaaa

SEQ ID NO: 30794 - DNA, 624 bp, Homo sapiens
  chr17:75213326-75213950
  hypo
tgggagtgtttcacaggtgagcggtccggcctcagaagagctttagctcatgtgggagtgtttcacaggtgagtggtcgttcaagaagagctttagctcctgtgggattgtttcacaggtgagcggtccggcctcaggtcacagccgtatgtttgctgatgcagaagcgaacccagtgtttgtcctcgcttctgtaagaagacatgatgtggtttttcttaaacgcagccagatctaacatcactgtgatggggcgatccctgctgtgatgtttccgttgtgataaaaaggattgctttcatcaggcgcctccaagaaaataaaagaggcaggtgtggacctttagaagcctggattaccttatctccactcccctgccaatcagtgggtcttcggggggtcataaaccagtgggcagagcaggctgctggctcggtgaagctcagggcaggccagaaggcggctcagggcagcgtgccagggtgcagaagccagtgcctccctaactgggaaccgcaggatcattggcattcctagtagtccgtatctgtccttggtgggacacagccaaggggtctggctggcacctgggtgggaagcaggggagaccgagggtgccctgca

SEQ ID NO: 30795 - DNA, 790 bp, Homo sapiens; identical to SEQ ID NO: 11524
  chr17:75368667-75369457
  hypo

SEQ ID NO: 30796 - DNA, 623 bp, Homo sapiens; identical to SEQ ID NO: 11525
  chr17:75369492-75370115
  hypo

SEQ ID NO: 30797 - DNA, 441 bp, Homo sapiens; identical to SEQ ID NO: 11526
  chr17:75370185-75370626
  hypo

SEQ ID NO: 30798 - DNA, 48 bp, Homo sapiens
  chr17:75398472-75398520
  hypo
gtgttgggccacaagacgccagaaccggcccctcggaggacggagatc

SEQ ID NO: 30799 - DNA, 38 bp, Homo sapiens
  chr17:75411918-75411956
  hypo
tggctcctggtggctgcgaggagcgtgggcaggacagc

SEQ ID NO: 30800 - DNA, 185 bp, Homo sapiens
  chr17:75413895-75414080
  hypo
ctcagctgcaaatcctcctaccggagggggggttccaggaacccagccttgctcggggttggggcacctcagcacctgctgcacaggcgttggtcattaaaggtcatgtgccgtatccgtgggccctcggggtctggtggcacctgggcacacagtccagtggcggcctcctacctgccagacac

SEQ ID NO: 30801 - DNA, 191 bp, Homo sapiens
  chr17:75434168-75434359
  hypo
gggtgctcctggccttgtgaccgaaaggagctgaaggtttggagaagccgttgggccgaggtcagttcttatagatttggcgaggagggaacagatgctcacggagctgctccaggcactgcacacactgcctcactctgcgctgacagccaagaggctggttccccgccgacccccattttacagataat

SEQ ID NO: 30802 - DNA, 31 bp, Homo sapiens
  chr17:75438182-75438213
  hypo
gggcccgtgactggtccgaaggtagtgagtt

SEQ ID NO: 30803 - DNA, 148 bp, Homo sapiens
  chr17:75452753-75452901
  hypo
tctcagggaccagcaccgggtacccacagccagggacgggcccccatggccagtaccagatctcagggaccagcaccgggtacccacagccagggacgggtccccatggccagtaccaggtctcagggaccagcgctgggtccccaca

SEQ ID NO: 30804 - DNA, 184 bp, Homo sapiens
  chr17:75473917-75474101
  hypo
gaacctttctgagagtcgacgtgggtactgctgataattagtctggatacccgaaagaatggaaagcagggacccagacagatccttgcacaaccgtgttcgtagcagggcgaggcctggaggtgcgatggggatctcaacggggcagctgccgtcttgctggagcccacggtctttggggggg

SEQ ID NO: 30805 - DNA, 334 bp, Homo sapiens
  chr17:75477048-75477382
  hypo
aggcaccacctctgtgaccagcgagttgtctgcacctgcatgcgcatgcaccagtgagtgtggcgagtctgaggtgtgctgggacctggcccgtgtaccagccagccctgatgggaaccagccccatcctgggtacccctggaaccccactgtgtgggagcacctgggtcctcagcaggcgtcttccgggcgtccgcccccagccccaggcctctgacccgtgtgtggtgtcttaacagcagccaggagcagggccatcgaagggacctacagacagaagaggctttagtgatttcgggaagttcagctccacgtgccccacatacccaagagt

SEQ ID NO: 30806 - DNA, 64 bp, Homo sapiens
  chr17:75490715-75490779
  hypo
ctggctagacatgggttatctcgtttcatgtccgaagctccccgcacccaccctccttgcagag

SEQ ID NO: 30807 - DNA, 77 bp, Homo sapiens
  chr17:75544176-75544253
  hypo
atcttaagcttgcttaccggtgacttgttgacctcatcttggctcaaagaagacacggccccaggtgagtgcctgga

SEQ ID NO: 30808 - DNA, 202 bp, Homo sapiens
  chr17:75733978-75734180
  hypo
aagacgcggcccgtacgcagagctgaagtggctctctgttatttgcagatggaaattggaatctctacagcatgacagacacttgagcagaaattctaagcttttatgggttgccacaggtccctttcaggaggatggcgaaggctatagtcatgagccgtctaaggtggaggtcacgagcggcaggtggctcttaataagc

SEQ ID NO: 30809 - DNA, 30 bp, Homo sapiens
  chr17:75848864-75848894
  hypo
actagcgcatgtgccgactgagctcccggc

SEQ ID NO: 30810 - DNA, 183 bp, Homo sapiens
  chr17:76034962-76035145
  hypo
ttctcaagaccctgtaatcaccgcaggcgaccagcgagagtgtgggaaaaggcgacgctggtgtgctgttggtcggaatgtaaggaggcatgtggcaggatttatcaaaatgttgggtaatatgacgtagtacatcctgcagacacctagagcacagctctttactgacgactgaatgctctg

SEQ ID NO: 30811 - DNA, 31 bp, Homo sapiens
  chr17:76093764-76093795
  hypo
gttagagtcatgaacccggacaccgccacca

SEQ ID NO: 30812 - DNA, 30 bp, Homo sapiens
  chr17:76100495-76100525
  hypo
gaaagccagtgccacgaactcagcaggact

SEQ ID NO: 30813 - DNA, 30 bp, Homo sapiens
  chr17:76101099-76101129
  hypo
ctgcggtgggtcagcgtcacatgctaatga

SEQ ID NO: 30814 - DNA, 31 bp, Homo sapiens
  chr17:76114989-76115020
  hypo
gtcctgcccccactgccggccaccctgccag

SEQ ID NO: 30815 - DNA, 118 bp, Homo sapiens
  chr17:76121807-76121925
  hypo
ctcctcctccagggccgtggggtccagctccaggtcgtacaggcggaggctgggccaggcggagcggacaaagttcccgagcaggggccggctgctcctgcaccgaagctgcaccgtg

SEQ ID NO: 30816 - DNA, 190 bp, Homo sapiens
  chr17:76129455-76129645
  hypo
ccgggctgggtatcttcgtcgctgtccccaggccttcaccaacacctatctcttctacggtgcgtaccgagtggggccggagagcagctccgtgtacagcatccgcctggcctacctcctcagcccgctggcctgcctgctcctctgcttctgtgggactctgcggcggtgagagcgaggtccacacctt

SEQ ID NO: 30817 - DNA, 213 bp, Homo sapiens
  chr17:76137897-76138110
  hypo
taacctagcagcctcacgtccacagagctgccttgtgaaactcagcagagccctggcttcctgcagagccgtgttctcccagcctgcttcatggctccctggttgagccaagcttgcggatccgtggggtgaaggtacccgcaccgcctgggccttagtggtatgtacgggcctgcatcgtgagcagcgggcgggggcccaggcaggtgaggc

SEQ ID NO: 30818 - DNA, 241 bp, Homo sapiens
  chr17:76145401-76145642
  hypo
gactctgcctcaaaaaaaaaaaaaaaaaaaaaaaaaaaaaaggcgccagtccttggcccatctggaaggactggctaaataaagtgcagcctggagatggcatattatgcagctgaaacagcttcagtgggagtggaaagctgggtacacgtgaaggacctgagggatcaggatattcgaaagatgatctctgcgtaggttggctttttgttttgttccattttgcttttagacacagggt

SEQ ID NO: 30819 - DNA, 135 bp, Homo sapiens
  chr17:76152519-76152654
  hypo
aaacagagaagtcactcgcaagcagaaagcagatacctggcgtaggtgggtgaaggcctgctggaatgcgctgacgggctggttttgatctgggtctagggagaagagcactttgggtgccgtgagcaggctggt

SEQ ID NO: 30820 - DNA, 71 bp, Homo sapiens
  chr17:76153534-76153605
  hypo
agatgcagggcctcagcgaccttcccaatgcagtcctcagcattgtgtaaaaatgactttgtaggccgggc

SEQ ID NO: 30821 - DNA, 47 bp, Homo sapiens
  chr17:76153904-76153951
  hypo
agaatggctttgtggtactcaaaggccggccacgtaagatcgtcgag

SEQ ID NO: 30822 - DNA, 208 bp, Homo sapiens
  chr17:76167731-76167939
  hypo
taggatggccaggggccggttcttgggtcaagggtggtggagggtggggtcccccacccacctgtaccctgctgtgctccccctgcagggtgtgctggcctccctggcctaccagcgctacaaggctggcgtggacgacttcatccagaattacgttgaccccactccggaccccaacactgcctacgcctcctacccaggtgcatct

SEQ ID NO: 30823 - DNA, 81 bp, Homo sapiens
  chr17:76176964-76177045
  hypo
gaggtaacattagagagatggcggccttcctctgagcaaaaacacaatgaccagcgctgctacttttcaaagcaacaagat

SEQ ID NO: 30824 - DNA, 193 bp, Homo sapiens
  chr17:76187325-76187518
  hypo
ctactggaggcaggagaggtccgggggaggtccacggctcagtcgaccatgcctggcctttcttgctcagccatccatacccaggcccgtaaggctgcgggctgtggttggcatagggaggtgaagtgaacagaggaacgttccccatccgctgctgaatgtggaatgcggtcactattcctaaaaagcaata

SEQ ID NO: 30825 - DNA, 31 bp, Homo sapiens
  chr17:76204092-76204123
  hypo
aagcttcctctgcacccgagagtggtgtgca

SEQ ID NO: 30826 - DNA, 155 bp, Homo sapiens; identical to SEQ ID NO: 11530
  chr17:76227981-76228136
  hypo

SEQ ID NO: 30827 - DNA, 31 bp, Homo sapiens
  chr17:76232540-76232571
  hypo
tggccaagtgctcctccgaaggctcctccga

SEQ ID NO: 30828 - DNA, 31 bp, Homo sapiens; identical to SEQ ID NO: 11531
  chr17:76349273-76349304
  hypo

SEQ ID NO: 30829 - DNA, 31 bp, Homo sapiens
  chr17:76364857-76364888
  hypo
taagaagaccccacttcgccaggaggagtgc

SEQ ID NO: 30830 - DNA, 31 bp, Homo sapiens
  chr17:76395197-76395228
  hypo
tggcaagaagagcaggcgtctgccacgctga

SEQ ID NO: 30831 - DNA, 140 bp, Homo sapiens
  chr17:76397568-76397708
  hypo
tcctgtgattcctgcggctgtggctcccccatggcctttagagagctgctgctggatttgcagcagtgtctgaacttggggaggaggagctgaagttggaacttgttgggagaagagctctctgcgtcttgtggacctag

SEQ ID NO: 30832 - DNA, 458 bp, Homo sapiens
  chr17:76404588-76405046
  hypo
caccttggtggggcgcgtggaggttgaaatcacactgggggccgagggctgctgcgcgtccctgagcgaatagattggcagaagggagtggggtgggggccttggatcccttggtgccgtgtctctggccttgctccctgtagttctgttgcgctgattcggtcgtgaaggaaggtgctgccaggccgcttcacctgcatcgccttggctttgggaggtggggctgagtgggcatctgggttggatctcaggcaggtggcagttcctctgattcatggttgtcagtttcctgttgcctggccctcgctcctcgcccagtaggtgtggtgggacaaggttctgggagctggggtagaatttggactcttaacgggaagtgcctcgtgctgccgcagacacatctggatgggtgctgagctttccttcccaagcctggtcctgatcgggggtggggtaca

SEQ ID NO: 30833 - DNA, 30 bp, Homo sapiens
  chr17:76425234-76425264
  hypo
gggggccagcaggacgtctccctccagcat

SEQ ID NO: 30834 - DNA, 30 bp, Homo sapiens
  chr17:76455087-76455117
  hypo
tcttgtttttgatccgggacagcttctctt

SEQ ID NO: 30835 - DNA, 31 bp, Homo sapiens
  chr17:76456116-76456147
  hypo
gtttggaccgggtcctcggtgatgccccgaa

SEQ ID NO: 30836 - DNA, 288 bp, Homo sapiens
  chr17:76526380-76526668
  hypo
ctgcacattccttgggctccccgagtacatggctggggacccacctgttggtgacgtggttgctcaggtgccgcttgaacatgaagccccagcgccggattgtgctgagcagggcctgcttgaaggggcggcagtcgcactgcagccagccgtggaacaccttggtgttctcgcacttggacacctcctcatacagcttctcgtaggagtcgatctggaaaacacggccaccggcggcctgtcatagcctgcaagcctagggggggcgtcagcacagggcctcagtcc

SEQ ID NO: 30837 - DNA, 79 bp, Homo sapiens
  chr17:76670739-76670818
  hypo
tgcctcctcagggctgcgccctgcaccgccctggtccagggtcctgtggaggggcggggcgagacggccagacagccag

SEQ ID NO: 30838 - DNA, 30 bp, Homo sapiens
  chr17:76676228-76676258
  hypo
ggctgcaccaggcgcgcactgccctttctc

SEQ ID NO: 30839 - DNA, 189 bp, Homo sapiens
  chr17:76722779-76722968
  hypo
cctttgaatttgacaccgagacaggtggattctattctgctgttgagttgggcgagagataaagaagctcttctggaagagcaagaagcggcagccaggcgccatgagaaagaaaagggactggaagctttgcgtagtcttcactgcaccgcggtctgcactcctgttcagaagcggtagcaaagaaat

SEQ ID NO: 30840 - DNA, 45 bp, Homo sapiens
  chr17:76766752-76766797
  hypo
cctgggattacaggtgtgagccacagagcccgactgaaaataggt

SEQ ID NO: 30841 - DNA, 31 bp, Homo sapiens
  chr17:76794654-76794685
  hypo
tcacagttcccaaaaacggctctttcctggc

SEQ ID NO: 30842 - DNA, 30 bp, Homo sapiens
  chr17:76818718-76818748
  hypo
ggcctcttctcacccggacccggggctgcc

SEQ ID NO: 30843 - DNA, 171 bp, Homo sapiens
  chr17:76851782-76851953
  hypo
gggggcgccgcgccgcggtaccacgcacaggagccgtcacttctcttgatgcaggcgaagaacttggcctggtgcccgttgatgttcttctctgtgacccagtccatccagaggcactcgtccggggaggagatgtagcacgggatcatggggcagcgcgtgatctgggga

SEQ ID NO: 30844 - DNA, 30 bp, Homo sapiens
  chr17:76852368-76852398
  hypo
ctacaagaggatgaccgccttcaccaccgt

SEQ ID NO: 30845 - DNA, 31 bp, Homo sapiens
  chr17:76862114-76862145
  hypo
taagttccctgcaccacgggggattctgtct

SEQ ID NO: 30846 - DNA, 69 bp, Homo sapiens; identical to SEQ ID NO: 11535
  chr17:76921483-76921552
  hypo

SEQ ID NO: 30847 - DNA, 73 bp, Homo sapiens
  chr17:76977963-76978036
  hypo
ctaccccaaacctctccgcaaattgaggaacgctccctataatagctaatatggatttcgccaggcattacta

SEQ ID NO: 30848 - DNA, 30 bp, Homo sapiens
  chr17:76987797-76987827
  hypo
tacactccctcagacgctttattgtttaca

SEQ ID NO: 30849 - DNA, 30 bp, Homo sapiens
  chr17:76989950-76989980
  hypo
aaccagcgctgcagcgtgtcactccagcag

SEQ ID NO: 30850 - DNA, 84 bp, Homo sapiens
  chr17:76991603-76991687
  hypo
gcactctgaaggggcacgtgtgtcccaggggagtgcgggtgctgccctcggccacacctgaggtctcaccgagcatcactctaa

SEQ ID NO: 30851 - DNA, 30 bp, Homo sapiens
  chr17:76992786-76992816
  hypo
agcagcggatacagccgaaaacatcttgga

SEQ ID NO: 30852 - DNA, 821 bp, Homo sapiens
  chr17:76993076-76993897
  hypo
tctccacggtgccgtcgccgtcggacagaatcacccagggcacggctttgctgccttcgatctggtagacgacccccgtccggtcatccacggagtagagtttcccattgaaaacaatcaggtcggatagctccatgcctctccccttctccgccaggtgggactccaggaccccatggtctttgtcccattccacggccaccttgtccccactgtctgacagggtcaggtagccctttttcaggtaactgaaccaggtgttttcctcttgggcccttgactctgtgtccaggtctgcgataactgcgattcgataccgaatcccagccggtgtcctttgtgggggagacagggggtaggtgtcattgtaccagttggcgggcgcctggccgagcctccagttgtgtgcattgtgggtggggggcctgccgggggccgggcggtgggagcagagcagccagaggatggcagcacccacaaagaacgtcaggatcaccttccagcgggggcggaagcgggggtccgcggccttggtcatggacgccagcacaggaaggccccccacactgatccggagggagtgcatagactcattccattccgggtgctcagacagctgcacgggcatcagcgtgacagacaggcgggacctgcacagccagggagggaggagaggagtcagcgcctccgcaagcccagtcacatcttagttccggaagctgcaggcgctggaggctgacttttccagaagaaacagtatttcactactctgtggccattcttactcccttggcttaatgaattcccgactctagattccc

SEQ ID NO: 30853 - DNA, 31 bp, Homo sapiens
  chr17:76994831-76994862
  hypo
ctcccggtgcttcgatcgagaacactggccc

SEQ ID NO: 30854 - DNA, 747 bp, Homo sapiens
  chr17:76996175-76996922
  hypo
ccttacctgcatttctgacatgcgtcttagacatttcaagacacgagtcctgtgcagcttttccctcaagcctacttgctcctcgtctccccttgggaagggtagtggtgacgggtggccaccgtgtccacagtggtctggttcaagctctctcaggatcctgggagatgtgcttttctgtgtgaatatacacttcgataaaaacataaggcactgccaccacgaaaaacctgactggcctcatcctccgtcttccttcctcagcattgactccgtggacaggttctgtcctcttccatggcccttcctcaccatgccatgccggctgcctccctccacccctcctgcctctccgcccctgacactcccataccccccgccatgaagttgccctgccagctgccccccaccaacatcccctgacactccctcgccacctgccatgaagtagcatccatcagatggcacactcccagcttcagcggcttcctcaggtcctggggtgaacccactctgctcccgctcagccctcacactgtaccatctcctctgcctgccggctggctacatagacctccttctgtcccctgaccacactggccctggcagagcctgcagttccccctgcctggaacagtcgggcctgctcttcgcaccagcagctcggtctctcctacggggcatcagctccctgggaagacttgcccactcgccctccctcccatgccgctccggctctcccaccgt

SEQ ID NO: 30855 - DNA, 459 bp, Homo sapiens
  chr17:76997142-76997601
  hypo
aagcaccccaaagatcgagctgctcagctgccacatctgagctgcaggcccgggaagacggtgcttgccagcacagaacaacggtgcctgcatagactgctgtcagacatcgtgaggtgtcgtcgtcaccagcccctggaacccccatgttcttccctgttcaactccctcagcactccggagagccactgtcctcaccttcaccattcctgtcaaatctccggcccacttctcccaggagaccactctgtggccaacttcagcagccgaggcccctgggtggggctcacacctgccactcaggtcagtccccccagccgccgggcacctgctcttctggttcctcccttccatccacaggctgccccaagtcgcccaccttgtcaccattttacctccagaccccacactcccacagacactcaactgctgctgaataaatggcgaatctgttaatga

SEQ ID NO: 30856 - DNA, 247 bp, Homo sapiens
  chr17:76998487-76998734
  hypo
ttgcaaactaccacccgtgggccaaatgcagtctcccgcctagtgtgtagatgcggcctgtgtggcctggtatgtggttgcagcttggtgtgtagactctgcctggtgtgtagacgcggcctgcgtagacgcggcctgctgtgtagtcacgtcctggtgtgtagatgtggctgattaaagccagctaggactcctccctggcatgctgagtctggctgcaccgttgagtggtcgcaacagactgtgg

SEQ ID NO: 30857 - DNA, 132 bp, Homo sapiens
  chr17:76998993-76999125
  hypo
tcctggcatctacaccgtggcacacgctccccacccgggaggctcatgtcctctgaccacatggaaccagaggtgtctgagtcccggcgtctctgcccctctggggaatcagtgtgacggaggcaggggcct

SEQ ID NO: 30858 - DNA, 30 bp, Homo sapiens
  chr17:76999461-76999491
  hypo
gtgcctggctgccggcgcctgctgcaggca

SEQ ID NO: 30859 - DNA, 30 bp, Homo sapiens
  chr17:77003098-77003128
  hypo
aagccagacttcaacgccttcttcacttcc

SEQ ID NO: 30860 - DNA, 37 bp, Homo sapiens
  chr17:77043871-77043908
  hypo
gcaagttctactgctacgtgcccggcctctacttctt

SEQ ID NO: 30861 - DNA, 15 bp, Homo sapiens
  chr17:77069721-77069736
  hypo
ctccccatgggtcag

SEQ ID NO: 30862 - DNA, 113 bp, Homo sapiens
  chr17:77070137-77070250
  hypo
actgttgggcacaggcgtggggctgtagaaagaaatccgtgtttcactggaaaactatgcatcctacataggacaccagcttccacatggcccgatactaacctactaacctt

SEQ ID NO: 30863 - DNA, 131 bp, Homo sapiens; identical to SEQ ID NO: 11538
  chr17:77071369-77071500
  hypo

SEQ ID NO: 30864 - DNA, 30 bp, Homo sapiens
  chr17:77075010-77075040
  hypo
ggggtagcagtgctcggtccattagatgca

SEQ ID NO: 30865 - DNA, 30 bp, Homo sapiens
  chr17:77076599-77076629
  hypo
aaatcttagttacacgcagtgagacagaat

SEQ ID NO: 30866 - DNA, 30 bp, Homo sapiens
  chr17:77084214-77084244
  hypo
acacaagcggctgccgcatgtagccactca

SEQ ID NO: 30867 - DNA, 56 bp, Homo sapiens
  chr17:77084577-77084633
  hypo
cgccatgcagggctcgcgtgcgggaaaactaatatgccggcgtttaagcctgtgcc

SEQ ID NO: 30868 - DNA, 215 bp, Homo sapiens
  chr17:77113341-77113556
  hypo
ctcagatgtggatgggtctgacgctcagccaccctggcagggacaggcaggagtccgcgtccttgctgaaggtgggctttgcggtggggaggaggagcgcccagcagggaagtggctgctcacctccctcacctgcgcctccaccccacgctcccatcacccggggccacgcacgctttgttcacaccacacacgttagttcagtgagcacctac

SEQ ID NO: 30869 - DNA, 598 bp, Homo sapiens
  chr17:77127118-77127716
  hypo
cccccatgtacttgtgtgtaccgtgagccatgtgctgcgtgtcccgtgtgtgctgtgtgccccgtgtgtgcacatgtgcgccccgtgtgtgctgtgtgacccgtgtgcttgtgtgtaccgtgtgtgagccatgtgctgcgtgtgctgtatgctgtgtgctccgtgtgttctgtgcactgtgtgtgccctgcgtgtactgtgtgctctgtgcccatgtgtgctccgctcagtctccatgtgccctccgtgtgtattccatgtgccctccgtgtgctgtgctctgtgcacgctgggaacagcgctagagcgtctgtgcttctggacaggaaaacaagcccctcgtctaccttcaccgtcttccagctgaacgttggtagcacctccacccacagacgcggctgcaaaccccacggcgtgagcccacctgacgcagcacccaccaccacccgcaggagcctcaggccttcctgttaagcgtcgccactccgctatctgctgaccttcacgctcactccaactccaaacctgggcctggtctctcacacgttaggaagccacggatcatgttttcatgcacgggtattttcttttggtaact

SEQ ID NO: 30870 - DNA, 102 bp, Homo sapiens; identical to SEQ ID NO: 11540
  chr17:77179380-77179482
  hypo

SEQ ID NO: 30871 - DNA, 159 bp, Homo sapiens; identical to SEQ ID NO: 11541
  chr17:77179617-77179776
  hypo

SEQ ID NO: 30872 - DNA, 221 bp, Homo sapiens; identical to SEQ ID NO: 11542
  chr17:77179799-77180020
  hypo

SEQ ID NO: 30873 - DNA, 30 bp, Homo sapiens
  chr17:77769050-77769080
  hypo
ctctgctggtaccccgctctcgttccctct

SEQ ID NO: 30874 - DNA, 38 bp, Homo sapiens; identical to SEQ ID NO: 11545
  chr17:77771550-77771588
  hypo

SEQ ID NO: 30875 - DNA, 46 bp, Homo sapiens; identical to SEQ ID NO: 11546
  chr17:77774930-77774976
  hypo

SEQ ID NO: 30876 - DNA, 30 bp, Homo sapiens
  chr17:77791080-77791110
  hypo
ggacaaaataccaacgaccagaaagaagaa

SEQ ID NO: 30877 - DNA, 30 bp, Homo sapiens
  chr17:77807460-77807490
  hypo
tagaactctgaggccgggcgcagagctgcc

SEQ ID NO: 30878 - DNA, 103 bp, Homo sapiens
  chr17:77807791-77807894
  hypo
aggcagttcgcggtgacgtcggtgataattatattcccaaagaagggcttgaactcgctcagcgactctgcaggttcgtcctgggcctcggctggaggcttct

SEQ ID NO: 30879 - DNA, 144 bp, Homo sapiens; identical to SEQ ID NO: 11550
  chr17:77813599-77813743
  hypo

SEQ ID NO: 30880 - DNA, 100 bp, Homo sapiens
  chr17:77824716-77824816
  hypo
cagaggtccagatccacggggactgacctgacagaactcttggccatggccagttaggactgttgagacaagtaggagctggggcgctgcacacctgctg

SEQ ID NO: 30881 - DNA, 31 bp, Homo sapiens
  chr17:77825535-77825566
  hypo
acgggctggcaagagccgttggccacattct

SEQ ID NO: 30882 - DNA, 181 bp, Homo sapiens
  chr17:77912318-77912499
  hypo
cagcggttcaaaggcacgaggtatctagtgaaatgctaggaccagggacgctattcccctggagcaggcgggtggggaaggagtgctccaaagcaggcattattaggacacagactctccagagtcccagttgtttagccctccaaattctcagcctactgccacccgactgtgcagagcg

SEQ ID NO: 30883 - DNA, 31 bp, Homo sapiens
  chr17:77913173-77913204
  hypo
ggtaagtggtgacctccgctttcctgctgag

SEQ ID NO: 30884 - DNA, 280 bp, Homo sapiens
  chr17:77914565-77914845
  hypo
ccctgtccccttcacgcccagccccaccccctcccgtgcccagggcctctgaggaggtcccctcaacccctgtccggtgtcgggggcccgacctatctgcggaagccgaagccgtcctgcggcgtctttgggcccttcttgccttccctcagggacttgggggaaggcatctccaccgtgcccccgtagggacagctctccgagccgggatggtggccggtgcactccaccgcgggcatggagccgctgtcccacatgcctgacccgcacagcttacaca

SEQ ID NO: 30885 - DNA, 40 bp, Homo sapiens
  chr17:77917708-77917748
  hypo
atgaagcctctcagaccgtccatgccgtgcttcccttcgt

SEQ ID NO: 30886 - DNA, 343 bp, Homo sapiens
  chr17:77918546-77918889
  hypo
agccagccacgtgggacgggaaggcagtcgccgtatggggggctaatgtgtggctgtgggtggggggcggcgaggcggacaggggcagcaggcagggtggccacggtggttcaggggccatggtcccaacctccccagccctggcccctgccctggtcacctggtagtgggcccagcaggcctcccagatccgcagcgcttcggcctcggggaactcccgcttgaagcacagaaggagccagcggtggcagaagagcatctgcaggccgtcctcgcccagcgagaccaggtgctggtagaagcgcacgtgcgtcagccgcagcagctcgcgcaggtacagctg

SEQ ID NO: 30887 - DNA, 404 bp, Homo sapiens
  chr17:77921249-77921653
  hypo
tcagagggccatccccggaggccgagataggctaagccgcccatatcccacgggcaagtcctatcctggcgttcccactgcccactgacctacagcagccaagccacgcatcaccacggcaaccccggctacaacgggagaggcaacacgggccctcacatgcccttggacgcacccatccccctgagcctcaccagttgtttctccatgtcctcgtcccggggtgagctgacgaagatcgtgttctgcatcaaacccacaaagcaccagaaggtgtctgactcatccaggacctcggccaagatgggcgccaccaggtccgacatcccttgggaatagccgacggcagggttgtacacggcgtagttcagcaggatcctcctgggaggcggtggagacagcag

SEQ ID NO: 30888 - DNA, 30 bp, Homo sapiens
  chr17:77922760-77922790
  hypo
acattacgccagaacgctctgtgctcctcg

SEQ ID NO: 30889 - DNA, 30 bp, Homo sapiens
  chr17:77923588-77923618
  hypo
cgtggctgtaatagcgcagcaggaagggcc

SEQ ID NO: 30890 - DNA, 171 bp, Homo sapiens
  chr17:77923949-77924120
  hypo
acccttctatgcaggctgacacggtatccccccaaaccctcgagggaggtgttgtgttttgtttttttttttcaacgcagcagctttgattgctttatcggtgtgttcacagagagcctcacacaagaaaacggggccctcacgaggaggtggcccgtgggtgcgggcggg

SEQ ID NO: 30891 - DNA, 31 bp, Homo sapiens
  chr17:77928736-77928767
  hypo
ctcgctttggcagtcacggatggagggcccc

SEQ ID NO: 30892 - DNA, 64 bp, Homo sapiens
  chr17:77930368-77930432
  hypo
ttgctgagtttgagggcggtttgtttcacagcaacggatcactgacacacgcaggacaagccag

SEQ ID NO: 30893 - DNA, 65 bp, Homo sapiens
  chr17:77946277-77946342
  hypo
ctaaaaaggaaggagattctgacacaggctacagcatgaatgacacctgacgttacgctaagtga

SEQ ID NO: 30894 - DNA, 34 bp, Homo sapiens
  chr17:77951520-77951554
  hypo
cacacacatgtgcacacggcggtactggactcat

SEQ ID NO: 30895 - DNA, 30 bp, Homo sapiens
  chr17:77955152-77955182
  hypo
accctccatctgcccgggccctgctgggag

SEQ ID NO: 30896 - DNA, 182 bp, Homo sapiens
  chr17:77976564-77976746
  hypo
acatctgctgcatttctagggcgtggtggccacacacagtggggcacaggcacaggaccgcgtgcactgcaggacgctctgctgacggcgctggcccaggcactgggaggaccctgtgaggaagcacccgggaacggtggcgcacgtagggaacaccacgcggccttgataggagctctcca

SEQ ID NO: 30897 - DNA, 244 bp, Homo sapiens
  chr17:77980966-77981210
  hypo
gagccacaccgagcccgcggccatgtggccaagaggcattttctgagccttcatcaggagcagggccgggctgtggtaagcaccccccagcacggtctccgggtggggacgagtcccaggccaggctcgctgaccccataccccaggctggtgctcaaccctcacgccgactctgccctacaagggggttcttggccgcacttcacacccgtgaggcatctgcgttttggatgtgggaggtaat

SEQ ID NO: 30898 - DNA, 30 bp, Homo sapiens
  chr17:77982972-77983002
  hypo
cccggctcacaccacgagctcaacagttaa

SEQ ID NO: 30899 - DNA, 30 bp, Homo sapiens
  chr17:77984071-77984101
  hypo
tctgctcacgccctcggctgacagttccaa

SEQ ID NO: 30900 - DNA, 94 bp, Homo sapiens
  chr17:77984329-77984423
  hypo
gggggtcagggtaggccgcagctccgtcggggagggctggtgggaggctcctgagctccgggtgcgccggccccgagggcggggtgccttgcga

SEQ ID NO: 30901 - DNA, 31 bp, Homo sapiens
  chr17:77987435-77987466
  hypo
caaggttgtggacttgcgttctgtctcacag

SEQ ID NO: 30902 - DNA, 15 bp, Homo sapiens
  chr17:77991189-77991204
  hypo
gtaaaaaccggccag

SEQ ID NO: 30903 - DNA, 47 bp, Homo sapiens; identical to SEQ ID NO: 11553
  chr17:78009471-78009518
  hypo

SEQ ID NO: 30904 - DNA, 508 bp, Homo sapiens; identical to SEQ ID NO: 11554
  chr17:78009995-78010503
  hypo

SEQ ID NO: 30905 - DNA, 21 bp, Homo sapiens
  chr17:78021779-78021800
  hypo
aaaaaacaagccgggcgcggt

SEQ ID NO: 30906 - DNA, 31 bp, Homo sapiens
  chr17:78024097-78024128
  hypo
agccccacacgccatccggtcctggagggtt

SEQ ID NO: 30907 - DNA, 221 bp, Homo sapiens
  chr17:78041282-78041503
  hypo
tttgctttttccatttaacagcgtgtccctagagcgcttcccaagtcaaaatataaacaccgctcgttcccgcctttctaccacatggcattccgctgggatacttctacggggaagcttcctgcccggggcatcgagggcgttcgcgtccgtctgttatggcggtgctgctgtagataaccggatccgcgaatgctaacgctcaccaggatgctatatag

SEQ ID NO: 30908 - DNA, 30 bp, Homo sapiens
  chr17:78086488-78086518
  hypo
cagctcgcctcctccgtgccaggtgagctc

SEQ ID NO: 30909 - DNA, 30 bp, Homo sapiens
  chr17:78122206-78122236
  hypo
tttaagtgcttcttcgtacccagctcctct

SEQ ID NO: 30910 - DNA, 173 bp, Homo sapiens
  chr17:78158228-78158401
  hypo
tgtgtagcctgcatggcgacgaggtgtgccttgtccagtagctgcccgtggcctggctggcttgtctgtgaactgcccatcctgctgacgcctgggcaggtctggacacactctgggctgcatatttgtagggccgcctacgtcccactgcccagctgcggcagtgacatggg

SEQ ID NO: 30911 - DNA, 403 bp, Homo sapiens
  chr17:78163402-78163805
  hypo
tggcttctctcctgcccggtgtagagtggcaagactgcatccgtccacacacctgaccgtgcagttgccgccatcttctcgggattctgcttgcctagggcaggcctctggggaagccagcaccccaggctgacctctctctgccccaggcggagaaggacattctggagcagagcctggacgaggcgcgggggagccgacaggagctggtggagcgcatccactcgctgcgggagcgggccgtggctgccgagaggcagcgagagcaggtgccgtgtgagcccttcctcccttgtgactctcctggggcttgtctcaggggtgcggacaggtctgtggggaagccagattccttcatccacgccgagctcacataattttgctgaacgaatctgtcggcctg

SEQ ID NO: 30912 - DNA, 30 bp, Homo sapiens
  chr17:78165277-78165307
  hypo
gttcccggctgacccgagctggaggccagg

SEQ ID NO: 30913 - DNA, 30 bp, Homo sapiens
  chr17:78178841-78178871
  hypo
acgtgcttctgggccgagagctgcctcacc

SEQ ID NO: 30914 - DNA, 54 bp, Homo sapiens
  chr17:78195403-78195457
  hypo
ccccgggatggccccgagcgcctgctgctgctcccctgcggccctgcagaggag

SEQ ID NO: 30915 - DNA, 2 bp, Homo sapiens
  chr17:78271716-78271718
  hypo
tg

SEQ ID NO: 30916 - DNA, 472 bp, Homo sapiens
  chr17:78271924-78272396
  hypo
ctgcaaaggagctgacgccctaggctgggggctgagggaagccctgtctcctgcgtgagttaaactctgctcagccacgcgcggtgctcctcttgctctgtgtgcacggtgcttgcttcctgttgggactccagactcccagggagatgactccctggccagctcagctcactgcgggatctttattcccttccagctggcggctgtacctggtgaacctgtgccaaagatgcatggacacaaggacgtacacctggctgggcgccctgcctgtcctgcactgctgtatggagctggccccgcggcacaaggatgcctggagacagcctgaggacacctgggccgctctggagggactctccttctcaccgttccgggaacaaatgctagatacgtaagtcgtagagttgtgcttatctacatgaatctgggaagactgactcctacattgtgcacccggagtcccggtggg

SEQ ID NO: 30917 - DNA, 30 bp, Homo sapiens
  chr17:78326747-78326777
  hypo
cagtctgtccacatcgatgacctccggaga

SEQ ID NO: 30918 - DNA, 30 bp, Homo sapiens
  chr17:78330462-78330492
  hypo
ggaaccaggctcggcggctcccgcctctcc

SEQ ID NO: 30919 - DNA, 328 bp, Homo sapiens
  chr17:78354367-78354695
  hypo
cttaacaccctgcccggggatcagcatcaataccacacagcgcagccacctgacgctgagaatgcggtcgggtctggtccaccggaaaggcgagtctatcatgagagagactcttaggaacatggtccaggctttgtggaacagcaagtactcttcacataactctcttctcagccgtaagcctcactccaagtgctgagaaagtgcagcgtgccaaagcggccagcctcagcctctgtcttgtgttctctcgttctttccagagacaaggcagacagaacgcagaccggccacgtgctgggcaacccgcagcggagagacgtggtga

SEQ ID NO: 30920 - DNA, 57 bp, Homo sapiens; identical to SEQ ID NO: 11557
  chr17:78428406-78428463
  hypo

SEQ ID NO: 30921 - DNA, 30 bp, Homo sapiens
  chr17:78489283-78489313
  hypo
gaaggtgtccccggcgtttgccgcctgccg

SEQ ID NO: 30922 - DNA, 189 bp, Homo sapiens
  chr17:78587645-78587834
  hypo
gactcgggctgggccgcgtgttctggataagtggctgtggagcacgatgaagcgtctatcgcagcatcatctctgcacccagatgtggccgtgctgagtggattcctgccccagatcttgggaagaaggttggctttcctcctggtgttggtggaaggcctccccggcgacactgctgcactccactgg

SEQ ID NO: 30923 - DNA, 268 bp, Homo sapiens
  chr17:78590517-78590785
  hypo
gaagcaataggcttcactttgtatcttgaactgggaaggagtggagaaaaaaaaaatattagagccctttgctatacttactttacgaagaccaattatttgttggtttttaaggaccagagttcccaggagtaagtgaaacacgactcgatctcttaagtgtgcccaatactgccagcacaacattcctcacaccggtccagcttgctagttaccttggatactcgcccaagcttcagctgactgcgcaggttattttctatatctt

SEQ ID NO: 30924 - DNA, 30 bp, Homo sapiens
  chr17:78593766-78593796
  hypo
acaggatccttaggcgtgtgctccagcctt

SEQ ID NO: 30925 - DNA, 232 bp, Homo sapiens
  chr17:78598705-78598937
  hypo
aaggacaggtgtgatcgcagcgttccccagctggctccaccccgatggggagtgtggaaggtgtgttgaggggtatccagagaaggcctccccaagaaattgatctttaaactgagatctgaagagagagtcagagccggccaggtgacccgggggaggggaactcccagcagagggaactgtggatttgagggccgagaggtgagtgtggccaggccgcagtgtaagtacg

SEQ ID NO: 30926 - DNA, 31 bp, Homo sapiens
  chr17:78611563-78611594
  hypo
tgtcatcccaagggaacgtttgggaggtctt

SEQ ID NO: 30927 - DNA, 31 bp, Homo sapiens
  chr17:78614859-78614890
  hypo
ccttgtttgtgtacttcgtggcccctatttt

SEQ ID NO: 30928 - DNA, 175 bp, Homo sapiens
  chr17:78667553-78667728
  hypo
gtgctgtgggaaacagcgttttgccaggggccagagagctgactcagatagtgacctggaaaacagactgtggatcaggtgggcacgggcctggaacagggtccctgaaacacccagcaagaggctggggaatgtctggagagcccggcatggtccggagcgtccacgcagccag

SEQ ID NO: 30929 - DNA, 146 bp, Homo sapiens
  chr17:78668084-78668230
  hypo
aggggcaggcatgcccgggcatggccctcgcagatggctttgctggcctggtctggcaaccgttgaataaatactgatttcccacccaggtgaggcgcatggtagatgtttgttctgtgcattgcgttggtcggcctccacagtcg

SEQ ID NO: 30930 - DNA, 159 bp, Homo sapiens
  chr17:78759733-78759892
  hypo
tgttcaccttctaaccgggaagctctccttgttcaggagttttcatagagcgtctgtccatggggagaggagtggctaggtggggtgggtggtggtgtcccggaaccagtcccccagggatacccagggatgactgtatatgcccggaccaagtcctga

SEQ ID NO: 30931 - DNA, 30 bp, Homo sapiens
  chr17:78760411-78760441
  hypo
ggagaatggaagagccgcagcagctggatt

SEQ ID NO: 30932 - DNA, 30 bp, Homo sapiens
  chr17:78760853-78760883
  hypo
tgcacacgcacctgccgcccccgccctgtg

SEQ ID NO: 30933 - DNA, 30 bp, Homo sapiens
  chr17:78768925-78768955
  hypo
acacggctggccaccgctgcggacaacagg

SEQ ID NO: 30934 - DNA, 30 bp, Homo sapiens
  chr17:78774033-78774063
  hypo
tcatatcattatcctcgtctttgtcggcac

SEQ ID NO: 30935 - DNA, 376 bp, Homo sapiens
  chr17:78775494-78775870
  hypo
tgaaaatcagtaattcattaacgtctgccagtcactgctgagatgagtaacgaggcactagacgctgatttagaaatgaagaggtggaagcaaaacccgagagatcgccgagcgagggggaggtgagtgattggcggaaacgggggaccgccgccacctagcagatcacccctgcctgcccgagcacagccacctcagcgttcccgtgcgcgccacgccagggcgcacggtgctgcacgggggtccttatgcccgggcgcctctcattaaggtccccccacgggcagagggaagacgggcaccgggtccccttcgtgttcgatgtgcaccccagcaaggcctccttagctcatccggattggtaggggtggaggag

SEQ ID NO: 30936 - DNA, 30 bp, Homo sapiens
  chr17:78789691-78789721
  hypo
cgaggtggcttccacgtgccccgtcaatca

SEQ ID NO: 30937 - DNA, 30 bp, Homo sapiens
  chr17:78796151-78796181
  hypo
ggggagccgactctcggacatgagaggagt

SEQ ID NO: 30938 - DNA, 64 bp, Homo sapiens
  chr17:78811168-78811232
  hypo
acagggaggggcctgacggcaccatcacagcgcagagctcagccctgaccgccaggactccttt

SEQ ID NO: 30939 - DNA, 30 bp, Homo sapiens
  chr17:78812472-78812502
  hypo
gggcgcggcagacacggggaggccagggat

SEQ ID NO: 30940 - DNA, 31 bp, Homo sapiens
  chr17:78817768-78817799
  hypo
ggccgggcaacccagacgctcagcccagcag

SEQ ID NO: 30941 - DNA, 207 bp, Homo sapiens
  chr17:78872484-78872691
  hypo
cgccccgactccccccgccccggctccccccgcacctgctcacccaacccctgctcaccccgcccctgctcaccccgccgtctccgtctagtgagttttgatgatgggcttttcacttgtgttcagcttcaagctttctttctacttccattgtggttcctggggatggcggtccagccacaatgacagcagcgcatgacaggagcc

SEQ ID NO: 30942 - DNA, 30 bp, Homo sapiens
  chr17:78873994-78874024
  hypo
ccgggcatctgtggccgtctcctccccgcc

SEQ ID NO: 30943 - DNA, 30 bp, Homo sapiens
  chr17:78876711-78876741
  hypo
gagttaattctgctcgggactctggtggcc

SEQ ID NO: 30944 - DNA, 30 bp, Homo sapiens
  chr17:78876946-78876976
  hypo
gcggagcctggagccggccctggtgcagct

SEQ ID NO: 30945 - DNA, 30 bp, Homo sapiens
  chr17:78877956-78877986
  hypo
gagcggctggtcagcgtgattctcgtaaca

SEQ ID NO: 30946 - DNA, 30 bp, Homo sapiens
  chr17:78880733-78880763
  hypo
ggtagacactggcccgccatatctggagct

SEQ ID NO: 30947 - DNA, 30 bp, Homo sapiens
  chr17:78935254-78935284
  hypo
cccgacggccacatcgtgagtgtgaggtga

SEQ ID NO: 30948 - DNA, 30 bp, Homo sapiens
  chr17:78968435-78968465
  hypo
agctggagcgcgagcgcgccctggcccggc

SEQ ID NO: 30949 - DNA, 30 bp, Homo sapiens
  chr17:78968910-78968940
  hypo
gcggccgggtgcttcgccctggagtgcagg

SEQ ID NO: 30950 - DNA, 30 bp, Homo sapiens
  chr17:78973676-78973706
  hypo
tccatgggggtccccgcggctggggctcat

SEQ ID NO: 30951 - DNA, 45 bp, Homo sapiens; identical to SEQ ID NO: 11559
  chr17:79008325-79008370
  hypo

SEQ ID NO: 30952 - DNA, 641 bp, Homo sapiens; identical to SEQ ID NO: 11560
  chr17:79008849-79009490
  hypo

SEQ ID NO: 30953 - DNA, 31 bp, Homo sapiens
  chr17:79020691-79020722
  hypo
ggctgtggtggcacagcgggctgggggaagc

SEQ ID NO: 30954 - DNA, 31 bp, Homo sapiens
  chr17:79027536-79027567
  hypo
ctggcaggtggaactgcgcccgggccccgtg

SEQ ID NO: 30955 - DNA, 109 bp, Homo sapiens
  chr17:79042416-79042525
  hypo
ccgtctcaggtggctccgctcttgtgtcccctgtccccgcttccctgccctggggagggtgcccccaagcctggtactgcagagaaggccacctcggtggctccttggt

SEQ ID NO: 30956 - DNA, 237 bp, Homo sapiens
  chr17:79045479-79045716
  hypo
agcctctgtttgagggactcacgtccagctcccggcagactcagcgcgggggtcggatgccttctccgcaccatcccgcaccgccacgagctgctgtggctcacattctgccatccgagctctgtccaggaggcagccgagaattggagcagttcccacgccaagtagggccttgtgggtggccggtcccctcctccagcgtggcacggaggcgccggagcatgcaggtctatgcct

SEQ ID NO: 30957 - DNA, 460 bp, Homo sapiens
  chr17:79051452-79051912
  hypo
gcttgggcttcccgcccgtcctgaggctggtggtgctgagtatgcgggtggctgtgggagcgggtgccgtctcaggtgcgagccagacaccgtgggtgcgggtgcaggtgtgggtaccgttttgggtgggagccgggcgctgtgggtgcaggttccacctcggagctgggtgctgtgggcacaggtgcgggtgccatcttgggtgggagccaggcactgtgggtgccagtgccatcttagatctgggcactctgggtgcaggtgccatctcggagctggatgctgtgggtgcgggtgccgtattgggtgggagccggacgctgtgggtgcaggttccacctcggagctgggtgctgtgggcacaggtgcgggtgccatcttgggtgggagccaggcactgtgggtgccagtgccatcttagatctgggcactctgggtgccggtgcgggtgtcgtcttgg

SEQ ID NO: 30958 - DNA, 31 bp, Homo sapiens
  chr17:79060230-79060261
  hypo
tttgaatctcaggctgcgctgaagaaatacc

SEQ ID NO: 30959 - DNA, 238 bp, Homo sapiens
  chr17:79060659-79060897
  hypo
tctgttctccccatccctgcccgggagtccggtcccagtttgttcctctaagcggtcgtggcctccgcctgcagggctggccactcgagggaaggtggtacttcaggttcctcgagggagcggcttcggtgttgtttctctcaccgtcccgccggcgtcaccggtgctgcgtgctgagtgggctgggacgtaggaaggcctggccgatgacaggcacggcctgatgtgtgtacaccag

SEQ ID NO: 30960 - DNA, 83 bp, Homo sapiens
  chr17:79062391-79062474
  hypo
ggaatcccacagtgtccggcctttggtgcctggtggctcacgtggcacggagggttcttaaagctcatcgtgccgtagcctgc

SEQ ID NO: 30961 - DNA, 51 bp, Homo sapiens
  chr17:79062727-79062778
  hypo
aggcctgaggcccccacgcagtcactgtggccctgccgcaccagctccctg

SEQ ID NO: 30962 - DNA, 98 bp, Homo sapiens
  chr17:79065508-79065606
  hypo
agtggaagtgaccccacgcaagggtggcctgaagccagtgtccagccaggggcgtgagtagcagagaagcagatgcctccctgcggttcccaagctgc

SEQ ID NO: 30963 - DNA, 31 bp, Homo sapiens
  chr17:79072590-79072621
  hypo
cagacgcaagggctgccgagcggctgaccgc

SEQ ID NO: 30964 - DNA, 306 bp, Homo sapiens
  chr17:79072863-79073169
  hypo
cctacttctcattcctggttccgtgctggcccctcacctgggcacaccctgttccgaaaggcgtgacctgtggatctgatcttgctgtccccgtggacgctggtcttgctttctgggctcccagtctccgctcggtgacctcttgtctgatcctccccacgaacttccttctcacgttctcccttggtgcacgcttatccggaaaccaggcagccaggtgtcttagcgtcccgctccccgtcattcagagccggagccgggtgggagaggagatgaggtgcgcccggagtcccctctgcagcagag

SEQ ID NO: 30965 - DNA, 142 bp, Homo sapiens
  chr17:79074764-79074906
  hypo
gagagacccctctgcccgtcatctgttgagggcccctccttgggccggtagactcttggccctgtgtttcccgctaggcgtcccccggcacagtcctgcggccctgtgtctcccgctaggtgtcccccggcacagtcctgcg

SEQ ID NO: 30966 - DNA, 78 bp, Homo sapiens
  chr17:79077410-79077488
  hypo
gcgccaccctccccagcgccctgtcggcctccaagtccaacctggtcatttccgaccccattccgggggccaagcccc

SEQ ID NO: 30967 - DNA, 31 bp, Homo sapiens
  chr17:79078010-79078041
  hypo
ctcacaattatgtgaccgtgtgtacctacat

SEQ ID NO: 30968 - DNA, 31 bp, Homo sapiens
  chr17:79078511-79078542
  hypo
agatgtgagtgtttctcgggggcgggctcca

SEQ ID NO: 30969 - DNA, 41 bp, Homo sapiens
  chr17:79079545-79079586
  hypo
caatcttggtgccatccgtggcttagcgtgacactggggct

SEQ ID NO: 30970 - DNA, 30 bp, Homo sapiens
  chr17:79080644-79080674
  hypo
gcccagacggccagcggcttcaagcagagg

SEQ ID NO: 30971 - DNA, 135 bp, Homo sapiens
  chr17:79082609-79082744
  hypo
gccccaatctgtgctccgcccttgtcctgggtcttcctggagggtcaggaggccaacgggagctgctgaaaggggcattgctcggtgctggcggactcgccgcctgtggctgggcagcgtcgtgcagccaggcag

SEQ ID NO: 30972 - DNA, 180 bp, Homo sapiens
  chr17:79082967-79083147
  hypo
atggtgctgctccatccgccccccctcccctgtgtttacgcgccccatcctgtgtgtcccagccttttgagcagaaactgccaggcaggacctgctgggccgtgcggggcaccctcggcctcaccctgcagtgtctgtggcactcactgcttttctaaggctcgccgtgagccaggtcta

SEQ ID NO: 30973 - DNA, 124 bp, Homo sapiens
  chr17:79083369-79083493
  hypo
acagagaaagggggctcgtgccaagctcgaggggcctcctgaggaagccggccgctcctgtgagggaggccgggcccgggcacctgagggcttctccctctggacactgcgggccaggtgtaca

SEQ ID NO: 30974 - DNA, 30 bp, Homo sapiens
  chr17:79084542-79084572
  hypo
gcaggctccgcaggcgccgtccagggagag

SEQ ID NO: 30975 - DNA, 31 bp, Homo sapiens
  chr17:79086356-79086387
  hypo
gaggcccaagcgcccacgctggacccgattc

SEQ ID NO: 30976 - DNA, 31 bp, Homo sapiens
  chr17:79086874-79086905
  hypo
aaattagaaaagccaccggtctcccctgcgg

SEQ ID NO: 30977 - DNA, 30 bp, Homo sapiens
  chr17:79094400-79094430
  hypo
ccttctgatctcagcggaaccggggtcagc

SEQ ID NO: 30978 - DNA, 222 bp, Homo sapiens
  chr17:79097036-79097258
  hypo
tgagctgctgctcccggaccgtgtacgccagcacctgctggtccgagtgctggggatagggctgcgtgcccagctcaaagagctcccagatggtcacgcccagggacctgtggggcgacagccgtgagccagggctgggcacagcctgccacagcaaggaccgcgcaggatccccggggcgccgaatggggcagctcccgccatcacgccagtgcctcagga

SEQ ID NO: 30979 - DNA, 30 bp, Homo sapiens
  chr17:79098045-79098075
  hypo
ggccctgccccttccgagtctacaccaggt

SEQ ID NO: 30980 - DNA, 30 bp, Homo sapiens
  chr17:79099231-79099261
  hypo
cccaggggtcctgccggctgccggagtcca

SEQ ID NO: 30981 - DNA, 30 bp, Homo sapiens
  chr17:79099867-79099897
  hypo
cctccagggtccttcgaagcagggtctgtc

SEQ ID NO: 30982 - DNA, 30 bp, Homo sapiens
  chr17:79100272-79100302
  hypo
cctcacaggccatgcgctgcagggtccggg

SEQ ID NO: 30983 - DNA, 304 bp, Homo sapiens
  chr17:79102686-79102990
  hypo
ctgagcaagaggctggggccacggcacagagagggcactggagcggcccacccccaccctgccgcaggctggcatcccacgccgggcgcaccaaaggctcctttgttgggggctgcttggcacggccccgcacggagcacactggcccattctccccgagggccaggccgggtgaggtcagcgggaggaagggtcagtgaggcccgggacgaaggggccagcgctggcagagcccactcatgcctgcccacgccccgagggattccccgaattctgctcccacgtcaactgcccagagggctga

SEQ ID NO: 30984 - DNA, 30 bp, Homo sapiens
  chr17:79104767-79104797
  hypo
agagctgagtcttccggtctccccagatca

SEQ ID NO: 30985 - DNA, 30 bp, Homo sapiens
  chr17:79105544-79105574
  hypo
ccatggcgcagcttcggggacaggaattcc

SEQ ID NO: 30986 - DNA, 36 bp, Homo sapiens
  chr17:79108203-79108239
  hypo
ggccagcatgaggacgatgacggcgaagagcccgga

SEQ ID NO: 30987 - DNA, 31 bp, Homo sapiens
  chr17:79164758-79164789
  hypo
cgcagattctcgccctcggcctccccaagct

SEQ ID NO: 30988 - DNA, 69 bp, Homo sapiens
  chr17:79166661-79166730
  hypo
tggctctcgggggccgggacgggcggtcccaggacccacccaccgcaggggcacgggccgaccacaggc

SEQ ID NO: 30989 - DNA, 30 bp, Homo sapiens
  chr17:79183375-79183405
  hypo
ctcggagaagcggacgctaagcgaggatca

SEQ ID NO: 30990 - DNA, 30 bp, Homo sapiens
  chr17:79216931-79216961
  hypo
gaagtacacaccggcgacgggacagcgcta

SEQ ID NO: 30991 - DNA, 68 bp, Homo sapiens
  chr17:79226307-79226375
  hypo
gtcgggcagaggcggcgccatctggccctggacccctggagcctttccgcccgcgtgtctggatggag

SEQ ID NO: 30992 - DNA, 30 bp, Homo sapiens
  chr17:79230307-79230337
  hypo
acagtcacatcagacggcccccagacgaag

SEQ ID NO: 30993 - DNA, 51 bp, Homo sapiens
  chr17:79234792-79234843
  hypo
gcaccatgcatgggcacgggggacagaaatggccttcgcctctccttagct

SEQ ID NO: 30994 - DNA, 30 bp, Homo sapiens
  chr17:79254214-79254244
  hypo
gccgatttacctcccgattaaaatataact

SEQ ID NO: 30995 - DNA, 30 bp, Homo sapiens
  chr17:79254580-79254610
  hypo
gggactcagcatcccggcccacgcgccgct

SEQ ID NO: 30996 - DNA, 31 bp, Homo sapiens
  chr17:79256352-79256383
  hypo
cagcccagccccacagcgagaccagccagag

SEQ ID NO: 30997 - DNA, 97 bp, Homo sapiens
  chr17:79294050-79294147
  hypo
ccgcagtctgggtgcccggcgtgtggcagcccccgcagtctgggtgccccgcgtgtggcagcccccgcagtctgggagccccgcgtgtggcagcccc

SEQ ID NO: 30998 - DNA, 219 bp, Homo sapiens
  chr17:79296319-79296538
  hypo
atggtgggcccagccgggttcagcacgtgggcctcctgggagccgccccacacctgcgcttctcaggggcgcccgctgtgggtcctgctgtgggtctgcagaccacactttgagagcaggctccccgggtggtggccgacgcctgtcacctgtggccccgcttaacccacccttcaccggcactgagtccccccgcacagaccccgggatccaaccccc

SEQ ID NO: 30999 - DNA, 31 bp, Homo sapiens; identical to SEQ ID NO: 11564
  chr17:79319252-79319283
  hypo

SEQ ID NO: 31000 - DNA, 281 bp, Homo sapiens
  chr17:79609080-79609361
  hypo
gcagagctgaagtccgcatggggggctgcagtgagagccacaaggctggcacccaaacatgcctgcctgagtcacacctgcgctgagcttaggggacccacagagccagggctggggagaaatatatctccacaagcagaggcctccttaagctctaaaatgtgattcttcacatgactcaactgtgactccggcatctgggtagggctcgcacctcccccattcccatgcccagggctgcactgttcacagactagcccagggccgcagtcaggaccagc

SEQ ID NO: 31001 - DNA, 38 bp, Homo sapiens
  chr17:79611881-79611919
  hypo
ctccagtgctgccctccgccatccggcatcctcccatc

SEQ ID NO: 31002 - DNA, 300 bp, Homo sapiens
  chr17:79612535-79612835
  hypo
cctgcgtgtggccatcgcccactaccaggacgacccagacctgcgcttcctcctcgaccaagtccagctcgggctgaggtgctgcggagctgcctcctaccaggactggcagcagaacctgtgagtcttggagtgggcgagggacagggccaccacagggtcgcagaggccacacacccttgtgcgtgtacacacagtcactcacacgtacatactcattcgtgcatgcccacatgcatgcacacgtatacccacatgtacacgcatatccacactggcacgtctcgtgctcacaggttt

SEQ ID NO: 31003 - DNA, 13 bp, Homo sapiens
  chr17:79626615-79626628
  hypo
aagacttcatctc

SEQ ID NO: 31004 - DNA, 205 bp, Homo sapiens
  chr17:79634635-79634840
  hypo
cgtgagccaccaagcccggccagcccgtgtagattctattgccagacccaactattgtttctcttactgattctgcttgtgctttacttgggacgggtctcacccccgtgttctttctcccagcaaagagaagaagaaagtgaactgcaagcccaagaaccaggacgaacaggagattcctttccggctccgggagattatgagg

SEQ ID NO: 31005 - DNA, 30 bp, Homo sapiens
  chr17:79635155-79635185
  hypo
tctccccaaaagtagcgaagattcatcaga

SEQ ID NO: 31006 - DNA, 169 bp, Homo sapiens
  chr17:79648939-79649108
  hypo
gtggcagccacacacctgccccggacccccagctgcaccacctccctaccgagccatgcttccggctgtaacccgagggagcccccgcccccgctgtgctccctctcagctcagggacgcgtacattttattgaagagtatcagcaccgatgcttctgcaagttgttct

SEQ ID NO: 31007 - DNA, 61 bp, Homo sapiens
  chr17:79653802-79653863
  hypo
ccccaccggccactgacgggcctgtcgaagggctctgctgtcccaccgggttcccctccgg

SEQ ID NO: 31008 - DNA, 451 bp, Homo sapiens
  chr17:79655114-79655565
  hypo
taggctgaggtgcaagtgccccggagcctgcttgcagcagcctctgatcgcacgccgtcctgcacgtcacaccgggacggcgtccccgagagggccgtagacgcgaggccaggctgcgctctaaccgggggagaggatggctgcagggggtctggagcccgctctgaatttggaggcatttctggagcggctgccccccgcgtctccccggctgtgactggaaggaggggcgtggccagagccccgcagtacccctgtgttctcagccccaacaccacgctgccaccgtcaggcctgccgggtcctgcctgttggaggctgacgggaaccggggatcctggggtgggcaggtcccgtggggaaagggagagacagatggtcaggggcacagagacgcggcgttgtttggctccagcaagtagaggcaggcgtgaggtttgaactcagggtc

SEQ ID NO: 31009 - DNA, 30 bp, Homo sapiens
  chr17:79658809-79658839
  hypo
gcggctccagggaccgaggctgccccgaca

SEQ ID NO: 31010 - DNA, 30 bp, Homo sapiens
  chr17:79663024-79663054
  hypo
caggcgtaggtgcccgcgccacggggcctc

SEQ ID NO: 31011 - DNA, 154 bp, Homo sapiens
  chr17:79682600-79682754
  hypo
gtgttgctgggctccgtcagcggtgagctgccgggcgggagggggaggggcgcggggtggtcaggtcggccgaggacgccgtgtgtcagcacggctcatctctggggtttgtgtcaccgcaggtttagctggaggcttcgtggggacgcccgca

SEQ ID NO: 31012 - DNA, 103 bp, Homo sapiens
  chr17:79705355-79705458
  hypo
aatgcctgctcttctacggcactgagtgtcgggtgatttgttacgggcagtagacagctaatacctgccccttaggacaccaagtcctcgcctcctggaggcc

SEQ ID NO: 31013 - DNA, 31 bp, Homo sapiens
  chr17:79781434-79781465
  hypo
ggtggcatccacgtcacgagagtgcctgccc

SEQ ID NO: 31014 - DNA, 103 bp, Homo sapiens
  chr17:79803002-79803105
  hypo
gctgtgaccccactcacgtcatcatcccctgccccatcctggccaccgctctccaggaatttcttaaaaccatccagcgtgcgttccccgttgtaatcaatga

SEQ ID NO: 31015 - DNA, 30 bp, Homo sapiens
  chr17:79844382-79844412
  hypo
ggtttctgcagacacggcatgcattcctgt

SEQ ID NO: 31016 - DNA, 310 bp, Homo sapiens
  chr17:79846190-79846500
  hypo
ctctgcctcttccacgggcgcctccgcgggtgcctctccgggtgcctccaccaccaccaaaacctccagcgccacggtttctagtcatgccacctctgtttacgctagcaaggaagacgaaaccgttcacacacccggaaggaccctaagagcgacgcagcctcaccctcggccaatccccttccccagaggccccggaagtcacctctgtgcaggcctccgctgtgcgtcaatctgtgacgtgacaagctgaatgttcatggggcggcctgcggcaaagaatacgagaaggcacgttctattgagaggc

SEQ ID NO: 31017 - DNA, 108 bp, Homo sapiens
  chr17:79851769-79851877
  hypo
ttgctgctggggcttgctgttctcccgtagctcccctgcagccctgaccctctgggcccagagccctttacttgttatttgttttaatagaaacggggctcatagcag

SEQ ID NO: 31018 - DNA, 30 bp, Homo sapiens
  chr17:79863962-79863992
  hypo
ggcccccactcacccggcaggccagcacgc

SEQ ID NO: 31019 - DNA, 30 bp, Homo sapiens
  chr17:79871390-79871420
  hypo
ctggagcaggagcacgcgggcagaatccct

SEQ ID NO: 31020 - DNA, 30 bp, Homo sapiens
  chr17:79878636-79878666
  hypo
agagggacaagacccggccctggagactgt

SEQ ID NO: 31021 - DNA, 37 bp, Homo sapiens; identical to SEQ ID NO: 11566
  chr17:79886040-79886077
  hypo

SEQ ID NO: 31022 - DNA, 30 bp, Homo sapiens
  chr17:79887760-79887790
  hypo
ccgcaggcacctcccgggcaccctcccgcc

SEQ ID NO: 31023 - DNA, 31 bp, Homo sapiens; identical to SEQ ID NO: 11567
  chr17:79889370-79889401
  hypo

SEQ ID NO: 31024 - DNA, 413 bp, Homo sapiens
  chr17:79892729-79893142
  hypo
gggagcagggacagatgtgcccggtggtcccgggaagtgcccgccgccgccagcttcccccgcagtccttacgtaggcggggccgctgccactgagccccgtgacggcatcaatcaggtcctcttccacctccgtgcagaagcccacgctgctcagcagctgctccatgagcctcccgtcctccacctgggcgtgcgtgcctgtggcatacacggtggccccctcccgcaccacgactggagtgttggtcatgcagcggatgaccctgggggctggccgaaacgctgacagcttctggaagagaaaccagcgtgtccgtctggccatggacgcagtgcctagatgcactcaccccaccaagcagtgcccgagctctcccagtgggccgggacgctgcaacccttttgcagatg

SEQ ID NO: 31025 - DNA, 30 bp, Homo sapiens
  chr17:79899060-79899090
  hypo
ctgtcatggaccagcgccccgaagatgatg

SEQ ID NO: 31026 - DNA, 101 bp, Homo sapiens
  chr17:79913288-79913389
  hypo
tgtggcgcagctcgcggccgaggttctggatgtacagccgcaggccctcctgcaccggctgccccgtcaggtgcacgttgtccaccgtcagctgtgcctcg

SEQ ID NO: 31027 - DNA, 70 bp, Homo sapiens
  chr17:79914599-79914669
  hypo
cgctccgggaccaccccgttccagtacctggagccacagccacaggttaggctgccgtgggtctcgtccc

SEQ ID NO: 31028 - DNA, 31 bp, Homo sapiens
  chr17:79943008-79943039
  hypo
cacacgcacatctgcacgcacatgcgcacac

SEQ ID NO: 31029 - DNA, 31 bp, Homo sapiens
  chr17:79951968-79951999
  hypo
ctggggctggatgtgacggcatgtgcccgtc

SEQ ID NO: 31030 - DNA, 30 bp, Homo sapiens
  chr17:79952352-79952382
  hypo
gagccagtgctgctcgcccctcctgtgcgg

SEQ ID NO: 31031 - DNA, 30 bp, Homo sapiens
  chr17:79977292-79977322
  hypo
ggggatcttaaacccgagcccagtgagggc

SEQ ID NO: 31032 - DNA, 1015 bp, Homo sapiens; identical to SEQ ID NO: 11569
  chr17:79988352-79989367
  hypo

SEQ ID NO: 31033 - DNA, 30 bp, Homo sapiens; identical to SEQ ID NO: 11570
  chr17:79989583-79989613
  hypo

SEQ ID NO: 31034 - DNA, 30 bp, Homo sapiens; identical to SEQ ID NO: 11571
  chr17:79989899-79989929
  hypo

SEQ ID NO: 31035 - DNA, 374 bp, Homo sapiens
  chr17:80005249-80005623
  hypo
cacaaatgagacagaaaccagcgaactccacgcgcgttatgtgggtgcctcctctttgccctccacacacccacgcacaagtgcacacacccacgcacgcagacactgccacgcacacacccactgatgcacacagacgcacacacgggtggatactcacctacatgcacgtacacacccactctcaatgtgtccactgagcttcgtgtacacgcccacgcacacccaccctcatacacacccacgtgcacctggctccacacaacacacgggaggaggcaagcacgatgctcaggaaggcggcctctcagggcagcgtccagtgtccgtccctcccggcgggaccctcgcacgccacctctgctggagatttt

SEQ ID NO: 31036 - DNA, 31 bp, Homo sapiens
  chr17:80018697-80018728
  hypo
tcaccccctgcaaggccgggctcccaccagc

SEQ ID NO: 31037 - DNA, 166 bp, Homo sapiens
  chr17:80019128-80019294
  hypo
ggggcaggggtgctcccgcacgatgtccagatactcctcggccagctcccacacggcagggctccggccctcgaacagggcggggttgtgcaggttgccctctgtgggaggaggagcggggaaggacacctcgtgggttgctccaggtggacggcacaggaaagcc

SEQ ID NO: 31038 - DNA, 132 bp, Homo sapiens
  chr17:80019760-80019892
  hypo
acccacacccactcaccgcacagccttgatatgctcccaggacgctgcacccgacaggggccccttctgctccttggtgcgtccgtgcaccgtcagcaactaggacagagcagtggtcgcttgacccctcca

SEQ ID NO: 31039 - DNA, 31 bp, Homo sapiens
  chr17:80021087-80021118
  hypo
catctggggctgggcccgagcaaggactctg

SEQ ID NO: 31040 - DNA, 138 bp, Homo sapiens
  chr17:80030811-80030949
  hypo
agtttccttgagccctcggtgacatacatttccttgttccttgttgacgtatattttacagctacaagagttacaaaggccaccctacaaaactttttttgtacagtggtgcagtcatggttcaccgcagccttgacc

SEQ ID NO: 31041 - DNA, 39 bp, Homo sapiens
  chr17:80038871-80038910
  hypo
cgcacgcaggtccccacggtgctacgtcaggtgggagtc

SEQ ID NO: 31042 - DNA, 88 bp, Homo sapiens
  chr17:80040621-80040709
  hypo
ggaagtggggagcagccgcagagccccatccagcaagccccccacaagatggagggggacagaccccaggcaccgtgacagcccacaa

SEQ ID NO: 31043 - DNA, 31 bp, Homo sapiens
  chr17:80042177-80042208
  hypo
caccagtcccatcacacgcttgccgctggcg

SEQ ID NO: 31044 - DNA, 113 bp, Homo sapiens
  chr17:80042627-80042740
  hypo
ttcgggtgcagtctcccgggaggggcagggcagtgtcgggggctcaccctcctccagcaggaagtggcggaaagccccccaggccccgtcgcggtagacgttcatcaccaggt

SEQ ID NO: 31045 - DNA, 31 bp, Homo sapiens
  chr17:80045800-80045831
  hypo
gcagctcccgtgccaccggccctgcttacca

SEQ ID NO: 31046 - DNA, 39 bp, Homo sapiens
  chr17:80046548-80046587
  hypo
gggtcagtgaggggcccgcagccccgctcacccacccca

SEQ ID NO: 31047 - DNA, 60 bp, Homo sapiens
  chr17:80047422-80047482
  hypo
gcgtagaccgtggccgcgtgtccctgccagacttgcaatggcaggcgcaggggacagagg

SEQ ID NO: 31048 - DNA, 31 bp, Homo sapiens
  chr17:80048709-80048740
  hypo
agagccctggggctggcgttgctcacacgct

SEQ ID NO: 31049 - DNA, 31 bp, Homo sapiens
  chr17:80050213-80050244
  hypo
ctggtggggaagcccccgcctccacttggca

SEQ ID NO: 31050 - DNA, 31 bp, Homo sapiens
  chr17:80050505-80050536
  hypo
cctctccaggcatgggcgtaggttaggctca

SEQ ID NO: 31051 - DNA, 31 bp, Homo sapiens
  chr17:80051662-80051693
  hypo
gtcaaggtgccacggccgggccccacagcgc

SEQ ID NO: 31052 - DNA, 114 bp, Homo sapiens
  chr17:80085171-80085285
  hypo
tccccaggagcagggccgtctaaagtgcaccaatgcccacgcgtctcacctgggctccattctaagtcagcctgcgcccgggtgtacagtgctccattctaagtcagcctgcgc

SEQ ID NO: 31053 - DNA, 167 bp, Homo sapiens
  chr17:80085323-80085490
  hypo
cgggtgtacggtgctgcactaggaaatggcatggtttctgcccttcagggctttgcaccataacccgggaaacactcaggtgccaaatgagaggtaaagagactccatgcattactcaaccaaagtgcagggatttcagggtgcaggaggcacgcagggtgctgact

SEQ ID NO: 31054 - DNA, 31 bp, Homo sapiens
  chr17:80104070-80104101
  hypo
ctggacggctgtcccacgttgaataatgatg

SEQ ID NO: 31055 - DNA, 30 bp, Homo sapiens
  chr17:80132885-80132915
  hypo
gcccaccgcagtgccgtgatcacaatggcg

SEQ ID NO: 31056 - DNA, 30 bp, Homo sapiens
  chr17:80139125-80139155
  hypo
cgaagcagccagcacggggctccacgtgcg

SEQ ID NO: 31057 - DNA, 150 bp, Homo sapiens
  chr17:80144202-80144352
  hypo
tagcttaagactgcaacggggggccaaggttaggcgcacaggagtggtgacgcccagtcacctcggccgcactacatggaaaatggaagcacctgcggcccctctcaccccgtataccgaccacagaggtcgccccgcacaccgaccgca

SEQ ID NO: 31058 - DNA, 31 bp, Homo sapiens; identical to SEQ ID NO: 11572
  chr17:80156992-80157023
  hypo

SEQ ID NO: 31059 - DNA, 31 bp, Homo sapiens
  chr17:80163308-80163339
  hypo
ttttcaaaataaagtccgatctccttggcac

SEQ ID NO: 31060 - DNA, 260 bp, Homo sapiens
  chr17:80201823-80202083
  hypo
gcccacctcctggggaagaagcgcgcagtgctttgcctggtaacacccactgcacccctgccccgcggcagcctgcggtccctaactgctctccgagggcctcaagagttcctgacagcaggcatgtcaattacgggaggagggagggtgagacgccaaaatcaggttgaagaggtcccaccacacacgggcacacacacacaccacggacttttgatgagaaatctcctctccaaagcggacaataaaacactgcaaaa

SEQ ID NO: 31061 - DNA, 30 bp, Homo sapiens
  chr17:80208423-80208453
  hypo
gcctgccatctctccggggcctccaagtac

SEQ ID NO: 31062 - DNA, 31 bp, Homo sapiens
  chr17:80251973-80252004
  hypo
ggacaggataagcacacgagtagatctaagt

SEQ ID NO: 31063 - DNA, 30 bp, Homo sapiens
  chr17:80257490-80257520
  hypo
gcgaggtccccgacacggtgaggggcacgc

SEQ ID NO: 31064 - DNA, 49 bp, Homo sapiens
  chr17:80260759-80260808
  hypo
aggcggggcgtcctccgtctgggtgaccctctcccggcctgcattatgg

SEQ ID NO: 31065 - DNA, 30 bp, Homo sapiens
  chr17:80285254-80285284
  hypo
aggctgggggtccccgagctcttccccgac

SEQ ID NO: 31066 - DNA, 142 bp, Homo sapiens
  chr17:80289616-80289758
  hypo
agtggccaggtgggcggtgactggccgggcagctccgtgtgtggcacagggagacctggcacagggagaccaggtacagggagacgaggcgcacggagcctcaaaacttctagagtgggccgggcgcggtggcgcatgcctg

SEQ ID NO: 31067 - DNA, 3 bp, Homo sapiens
  chr17:80303876-80303879
  hypo
ccg

SEQ ID NO: 31068 - DNA, 557 bp, Homo sapiens; identical to SEQ ID NO: 11573
  chr17:80329443-80330000
  hypo

SEQ ID NO: 31069 - DNA, 30 bp, Homo sapiens
  chr17:80350125-80350155
  hypo
tgaaaagattaacacgtcagcaaatcaaaa

SEQ ID NO: 31070 - DNA, 30 bp, Homo sapiens
  chr17:80361659-80361689
  hypo
actcaccctgcccacgtacgcactcaccct

SEQ ID NO: 31071 - DNA, 30 bp, Homo sapiens
  chr17:80367012-80367042
  hypo
tgaatagatggccacgcacatctaaggaca

SEQ ID NO: 31072 - DNA, 207 bp, Homo sapiens
  chr17:80395042-80395249
  hypo
gtcctcctcatgcagaagtaccggcggtgcggctttccgcagctgtgggcagccagtgccttcaagggtgccacggggcccagccaggccgtgccccctgttgagcaccacctcaggaaccacgtgcagtggctgcaggtggcgggcagcgggcccacggactcactgcagggcatcatcctgaccggctggcagaggtaagtcctg

SEQ ID NO: 31073 - DNA, 30 bp, Homo sapiens
  chr17:80404883-80404913
  hypo
caagagcatctctccgggaatatttgatga

SEQ ID NO: 31074 - DNA, 79 bp, Homo sapiens
  chr17:80445943-80446022
  hypo
gggatcaactcccccaaggcccgagaggtgctgcataccacgtaccagagccaggagcgtggcacacacagcctggaca

SEQ ID NO: 31075 - DNA, 15 bp, Homo sapiens
  chr17:80446257-80446272
  hypo
ttttttttttttgag

SEQ ID NO: 31076 - DNA, 181 bp, Homo sapiens
  chr17:80479372-80479553
  hypo
cggttgttggagatgctggtaagagctgttgcttttcttcttgacttgcgtgttgtgtgtgtgtgcatgcgctgttctgtttcttagcatggaaaggtgcaccagcatattccttaaactttggtagtagcattttaaagaatgttattttcaggccgggcgcggtggctcacgcctgtaa

SEQ ID NO: 31077 - DNA, 217 bp, Homo sapiens; identical to SEQ ID NO: 11574
  chr17:80503129-80503346
  hypo

SEQ ID NO: 31078 - DNA, 30 bp, Homo sapiens
  chr17:80519858-80519888
  hypo
gggctgagtgtggccggccacttgtttgcg

SEQ ID NO: 31079 - DNA, 206 bp, Homo sapiens
  chr17:80535281-80535487
  hypo
agcaggctcctaccccgcctgtggcccaacctgcatgcagggcgtggcgggcggccgggttaaggtctcgcagccaaagctgcggcgtgctcactgcccagtcagggcagcacctgcgtgccaggcccagccctgggttagggccccgccgggccctctgtgcataccgccgacactgcgggccaaggtctcggtgactccaaaat

SEQ ID NO: 31080 - DNA, 397 bp, Homo sapiens
  chr17:80563137-80563534
  hypo
ctcttctgaagaggtacttgggtattcaagttcccacacaggaacactttgatcttcaggccctgaaaatctggtgtggatcgctaatgtctggaatcgtgatgacattatcagtactcaccccagggtagcagagggaagaaaccgtgctgaaaatgacacagaggcctttgggagctaaatgatgttcacggacagagagttcataacggagtgtttgttttattccttacactgatcccctaatttaaaacagttcatactggcataaaagaactgtttatcacgccctgcgagactgcctcttccagcaaagtgaagcagtcatttgtaatttgtttctgccaggtctgcgtctgcagtgcacccgggctgcgttgatgggtgctgggaaatt

SEQ ID NO: 31081 - DNA, 605 bp, Homo sapiens
  chr17:80571116-80571721
  hypo
cagaaggctgcagatggccagcgcccccgactacagtggtgggagcgggaggtggccaggggttcacacaggcatcaacgccaaacacagggtgggtatgggtcagggctgcgttccacagggcacaagccgcctgtccccgcaagacatcccagggccacaggggagggaggacagaccagaaacgcagccggagtcatccatgcccacgcacctgtacgatcagacaggaaagctgctgagtaggcaccgtctgaggcagtcactctggagtcccttcgcacccacgtccggggcacaggaggttcgtgggggaggcagcagcccggccttgtttcccatacactgcgcttcccatcagttccacttgaaaagcagctgcgctcccgagtccgccggcctagggacaccgtgtccttgccgctctacagtgatttttaaaaagcacatgcctggggagggccggtgccgccagggcctcacatgaggcacgtccgtgcaggccctcgccacgttcctggtgaacgggcctgtgacacagccccgccgtccgcatcagttctgaggctgttcacgtgcactgcgagaaaacccacccttcttgc

SEQ ID NO: 31082 - DNA, 121 bp, Homo sapiens
  chr17:80593583-80593704
  hypo
ccactgtgcgcagccgtcttttcaagttctaaaagcaacaagtcattcccttagcaagatgtgattctagctaatggttaagtaaagaaatgttggctgggtgcaggggctgacacctata

SEQ ID NO: 31083 - DNA, 31 bp, Homo sapiens
  chr17:80604486-80604517
  hypo
atttattggaatcaagcgtggccaggtatat

SEQ ID NO: 31084 - DNA, 30 bp, Homo sapiens
  chr17:80614354-80614384
  hypo
tcggagctcctcaccgaggctcaggagcac

SEQ ID NO: 31085 - DNA, 30 bp, Homo sapiens
  chr17:80622926-80622956
  hypo
cagacgtgacgctgcgtgggatgcccgctc

SEQ ID NO: 31086 - DNA, 30 bp, Homo sapiens
  chr17:80635505-80635535
  hypo
caccttccaatcctcgtccaccacccgtct

SEQ ID NO: 31087 - DNA, 28 bp, Homo sapiens
  chr17:80645657-80645685
  hypo
acgcccccagccaggcgcggtggctcat

SEQ ID NO: 31088 - DNA, 248 bp, Homo sapiens
  chr17:80654772-80655020
  hypo
aattacacttccacagccacacgtggctcatggcatcctactggacaccacggtcctagagacctgccaccgagcggggaggggggtaggacatgcgggggcagcggcgcctggggacaggtagagacgcaggctcccctcctgccccacggagcacactctgcacccaccagctgccagagactcccccgcatgctgcagtttcaggaggcctctgggtgctggtcgtgagcccaagcccatctcag

SEQ ID NO: 31089 - DNA, 560 bp, Homo sapiens; identical to SEQ ID NO: 11576
  chr17:80655625-80656185
  hypo

SEQ ID NO: 31090 - DNA, 31 bp, Homo sapiens; identical to SEQ ID NO: 11577
  chr17:80656449-80656480
  hypo

SEQ ID NO: 31091 - DNA, 188 bp, Homo sapiens; identical to SEQ ID NO: 11578
  chr17:80656873-80657061
  hypo

SEQ ID NO: 31092 - DNA, 30 bp, Homo sapiens
  chr17:80678300-80678330
  hypo
ctcagagcgggggccgtgcagcagccgtgg

SEQ ID NO: 31093 - DNA, 31 bp, Homo sapiens
  chr17:80680723-80680754
  hypo
ggatttgacgtggtgacgtgctgtggatacc

SEQ ID NO: 31094 - DNA, 38 bp, Homo sapiens; identical to SEQ ID NO: 11579
  chr17:80693416-80693454
  hypo

SEQ ID NO: 31095 - DNA, 31 bp, Homo sapiens
  chr17:80721019-80721050
  hypo
tgtcgaagttttcaaccgtgtctcctttcat

SEQ ID NO: 31096 - DNA, 254 bp, Homo sapiens
  chr17:80747056-80747310
  hypo
ctggttcggtctcctcgtggcgttaaggaaagacctggagcagccagctcctaacactcatttcccatcactcagcattttatgtggggcgggcacagtgccgtgagtcttacagaaacctgcatggtgagccgcacgcctttgagtccccatcagccctggcccatccctgctgaggtggcgcgacctgctcacagacgtgtgctcacaggcagcccgtcgcggggtcatgtgctagacggggagggggcttg

SEQ ID NO: 31097 - DNA, 69 bp, Homo sapiens
  chr17:80747780-80747849
  hypo
tctgtgctgctgtccgtgcatacggcccaggagccgggctcatccccgagacgccgtgttccctcccgc

SEQ ID NO: 31098 - DNA, 30 bp, Homo sapiens
  chr17:80767409-80767439
  hypo
gcagcgtgttttagcgcgggggctccaagc

SEQ ID NO: 31099 - DNA, 30 bp, Homo sapiens
  chr17:80772927-80772957
  hypo
gtcaccaggctgtccgtggcaggctgcagc

SEQ ID NO: 31100 - DNA, 165 bp, Homo sapiens
  chr17:80773303-80773468
  hypo
atgaggctcacgccagcgtgaaaccagggtgggaactggggtggagggccaggggagctctgcagtggccagcagtggggtggggacagagggcacagcatggcagatgcaggggcactgccccagaccagctcttgtgccgtggccacacgcagccctgtctgt

SEQ ID NO: 31101 - DNA, 1110 bp, Homo sapiens
  chr17:80797611-80798721
  hypo
cctcattagaagttttgtaatcgtggtctgcatcccagccatgcacctgctgggtcctgagtaatcctcggagcccagagcaaggcagagcagacacggagcaaacgctgcgttcagctgggtattttagatacgtctgagaagagttttaaaataaaacttgaatttgaaaagaaatagtgagtacttaccagaggtgggcagtgctgggatgtggccggtcttggtgccggtggctggcggtgctcaggaagcagtacctgttctcacgcttgctgggtgaaactggagcctgctgttccagtgggagggatttaagtgtaggagttgagccctcggggcgtagagatgcacctgatattcctcctgcccgcagctacgattcatgtgtttgcacccaccgagctgctgcgggcagcctccccagcactggacccagcaagcaagttatctcgccgactcccagcgctgtctccagactcaactgtctgtgagtgcggcgtcggtgctgcctggacggccatatgtcagagggctttcgatgtgtccgcagttagaatagagattactatattcatcagaatcacacccgatgaatatttggcgtcatgataaagacatgtgagactttcctttagaacttgagcatgtgtacgcaggaggcaaacacttggattgattctcaagcgcgcataccctgggaggcacagtattcatggcgtccttgccatgaggtccagtgaggcctttgaggatctgtggaccttccaccctctaccctgctcctgagagtctctgtccctggtcctcctcaggagctgagccggcagggagggagcttatcccagagcctggctgcagggacctgccggagcttgcccgacaccaggcaccgcaagagctgcggagcagggtgtgtgggtgcgggggagggggccagctgtgcactcccgcaaaccaccctccccccactttaaattgcagaggcacttaacttgggggccagtttttacctccacacccccccaccaaaactgcttgcttgcttaatcggaggccgcaccccagttgtagcgaaggctggcatgtggtgtcggtttgaggactggg

SEQ ID NO: 31102 - DNA, 218 bp, Homo sapiens
  chr17:80819086-80819304
  hypo
gacccacccagtcctgccaggcgttgggcttgggatgtgcggccggctgggggcacacattcatgccgcaggtccccgtgagtctgggccgtgtgcctggcgagccctgaattccacctcacgtcagccgctggttcacgtcagccgctggttcacgtcagctgctggttcacgtcagctgctggtgttgagtgttcgcatgatgcttttctttcttg

SEQ ID NO: 31103 - DNA, 31 bp, Homo sapiens
  chr17:80821581-80821612
  hypo
agactgtaagcctcctcgggaagcagcagtt

SEQ ID NO: 31104 - DNA, 79 bp, Homo sapiens
  chr17:80830875-80830954
  hypo
gcttctgagccaggcccgtctgggcagcagctcccaggccctggcccggggctcagcgctgcctcgtggctgagaagct

SEQ ID NO: 31105 - DNA, 696 bp, Homo sapiens
  chr17:80832187-80832883
  hypo
actgcacagccagggcctccccggcatgtggcggggccagcgttggcctgggtcccacttggctttgatctcgtggggctttggtttttggaggtcctgggtgcgtctccaccatggctcccgggttcccttgcgcacaccgagccagcagctgctggggcctcagggctcgcagctcacaggcttctgacgcctcagcctggagctggcgttgtgcccctcgcccctttacctgtgccatcccggccgcagacccaagggtgcccttggagccgtgcccgccggcctgggtgtcaggcttgtccaacgggttcttagagaacctgggccccatccctccttggcccacgcagactccaggcatccggccgggcgggctgtgagtcaggctgcaccaggtgagcgtgtgggatgctgctggtgcgagcctccctgcccaggagccctgcgcacccgggtatcggttggggtgtgcccttccagatctccctcccttggtttgtcataggtgaccacattttaattaccagcttttatgcccgtcaatttgggaacgtgatacaatcttgatttctctaactttcacaagttcttcggtgggtcctgtaacagtgggtgcttgggatcagagcatcagagtggaattttcgcagggaaatggaaatgcctgatcgagctgggcggtggcagcagccg

SEQ ID NO: 31106 - DNA, 162 bp, Homo sapiens
  chr17:80839228-80839390
  hypo
tcattcggtcaggccgcttgccgccgatgaggggtgcagagcttctgcagcatcctggggaggtcccggaacgtgggtctgggctgtgctgatgctggagcagccagcggggagagctgccaggccactcctgacagccccgcacccgctctggatggaagc

SEQ ID NO: 31107 - DNA, 30 bp, Homo sapiens
  chr17:80846060-80846090
  hypo
cggggatgctgtcccgtgttttctgttctg

SEQ ID NO: 31108 - DNA, 37 bp, Homo sapiens
  chr17:80847857-80847894
  hypo
gaccagcctggccttgcggggacgcagacctgacccc

SEQ ID NO: 31109 - DNA, 30 bp, Homo sapiens
  chr17:80878135-80878165
  hypo
ctgacaggccggcccggcttctctgaagtg

SEQ ID NO: 31110 - DNA, 266 bp, Homo sapiens
  chr17:80879417-80879683
  hypo
catctcatctcaagtcactcccgccagcagatgaaggtacagtgagcatgggcgttcccggccggcgctgtggcggtgttagtgtgttagtcacggatggtgtttgtgttggcgactgtgcatcatgaggctgtccctgcagtagcctgataactgacaaatgggggcataattctatttggaatcccggatggtagcgtctacacggtttataaccagaaaatccaatacagccattggaatccgaatgtttaattttttattgc

SEQ ID NO: 31111 - DNA, 30 bp, Homo sapiens
  chr17:80882753-80882783
  hypo
ggtgtggctgtacacgatgggcagcagagg

SEQ ID NO: 31112 - DNA, 30 bp, Homo sapiens
  chr17:80887371-80887401
  hypo
cgacggtgaggaggcgtcgggctggctggg

SEQ ID NO: 31113 - DNA, 30 bp, Homo sapiens
  chr17:80894203-80894233
  hypo
ctcgcgtgtttccacgtctgcttgtagcgc

SEQ ID NO: 31114 - DNA, 127 bp, Homo sapiens
  chr17:80895932-80896059
  hypo
agatggtgcagttccccggcgacgtgaggaggcaggccctcctgcagctgtgtctgctcctctgccaccgtttcccgctggtgagtgcctgcccctgctcacgtgtgtttgccgtgtggacacaagc

SEQ ID NO: 31115 - DNA, 31 bp, Homo sapiens
  chr17:80898078-80898109
  hypo
atgctcacttgcacgcgcgcacacacacaca

SEQ ID NO: 31116 - DNA, 30 bp, Homo sapiens
  chr17:80898720-80898750
  hypo
gaggcctcctccagcgaggctgggtcgggg

SEQ ID NO: 31117 - DNA, 30 bp, Homo sapiens
  chr17:80917377-80917407
  hypo
cctgcagacggctgcggggacttccccacc

SEQ ID NO: 31118 - DNA, 30 bp, Homo sapiens
  chr17:80917847-80917877
  hypo
ccccgccttagcaccgggaaaggtggaaac

SEQ ID NO: 31119 - DNA, 62 bp, Homo sapiens
  chr17:80918497-80918559
  hypo
ccccgcagcactgggcgcgtcctcactgggtgctgcgattccctggccgtgcctctgccacc

SEQ ID NO: 31120 - DNA, 30 bp, Homo sapiens
  chr17:80935244-80935274
  hypo
ggagtgactgaggtcgggtctggggttgct

SEQ ID NO: 31121 - DNA, 31 bp, Homo sapiens
  chr17:80963751-80963782
  hypo
agcctgacctctgccccggagtgggctccca

SEQ ID NO: 31122 - DNA, 30 bp, Homo sapiens
  chr17:80964553-80964583
  hypo
gaacgtgcaggaggcggccttctgtgcccg

SEQ ID NO: 31123 - DNA, 30 bp, Homo sapiens
  chr17:80965499-80965529
  hypo
ctggggcatgagaggcgcctctcggacggg

SEQ ID NO: 31124 - DNA, 134 bp, Homo sapiens
  chr17:80965856-80965990
  hypo
aacagcgcccagccgcgatgctgccggcaccttcctctgcaggagacctcgcgctctcaagaggaggcgcagggaagaggcacgctctcaagaggaggaggaggcgcagggaagaggtgcgctatgcgcttaat

SEQ ID NO: 31125 - DNA, 249 bp, Homo sapiens
  chr17:81008618-81008867
  hypo
caggtttttagggcacgtgtttggggtaagtgtgctgggcacacaggcaggtgtgtgggcacggaggaggtgtgcaggtaggtgtgtgggatgcgcaggcaggtgtgcacggcaggtgcacgggcaggtatggggcacgggcatgtatgcaggacgcagagcaggtgtgtgaagcaggtgtgcaggcacaagacgtgtgtgtggggcatgggcaagtgtgccgggaatgtgtgacggcagacgtgtggg

SEQ ID NO: 31126 - DNA, 30 bp, Homo sapiens
  chr17:81021441-81021471
  hypo
ccaggaactgctgacggaccgaaggaggag

SEQ ID NO: 31127 - DNA, 30 bp, Homo sapiens
  chr17:81024108-81024138
  hypo
gccctggccactttcgggttggccgacctt

SEQ ID NO: 31128 - DNA, 203 bp, Homo sapiens; identical to SEQ ID NO: 11582
  chr17:81039184-81039387
  hypo

SEQ ID NO: 31129 - DNA, 222 bp, Homo sapiens
  chr17:81042971-81043193
  hypo
ccttcacggactcctcgggggccaatatttatttggaaaaaactggagaactgagactgctggtaccagacggggacggcaggcccggccgggtgcagtgttttggcctggagcagggcggcctgttcgtggaggccacgccgcagcaggatatcggccggaggaccacaggcttccagtacgagctggttaggaggcacagggcgtcggacctgcacgagc

SEQ ID NO: 31130 - DNA, 30 bp, Homo sapiens
  chr17:81050074-81050104
  hypo
tgggtgaggccccacgccggtggcaggtgg

SEQ ID NO: 31131 - DNA, 17 bp, Homo sapiens
  chr17:81061265-81061282
  hypo
atgggaggccgggtgcg

SEQ ID NO: 31132 - DNA, 297 bp, Homo sapiens
  chr17:81068582-81068879
  hypo
gcaggtcagtccaggcggtggtttccctggagccaggggctgggttccagagcccggccttccacccctacagcgggcagggctgacgggcgcgaaactgggagcgtagctctgggaggtggcctcggggaaccattttcccaccgggcgggcccttttgttctcctgtctgtgcgcgcagggcagccaggtcccgggatggaccctattttgagagatttattgactttctttttcttttgaaagggctgtggccaggcagaatattgaagcgaaggagcccgacagtagccgctc

SEQ ID NO: 31133 - DNA, 30 bp, Homo sapiens
  chr17:81080825-81080855
  hypo
agctgcagcgtcacgcgcagatgccaggta

SEQ ID NO: 31134 - DNA, 85 bp, Homo sapiens
  chr18:196511-196596
  hypo
agactccatctcaaaaaaaaaaaaaattaagtaagtttttgtttgtattaattaaaattaatttacagtcgcgtgtattaaatat

SEQ ID NO: 31135 - DNA, 246 bp, Homo sapiens
  chr18:196811-197057
  hypo
ggtttcctacatttaccgtacttactggaacatagttcgaaatataaacatcagtcttctctagttcatgccacggctgtctcttgcctggagccgcacagtagtcttaactgatatctggcttctgcctttgcccctttgcagtttctctacacagcccgcaatgtcctttttaaaatgacgataggattatgttggccccttgttcagtactccctagtgattttctaccgcagtcctaaatcc

SEQ ID NO: 31136 - DNA, 815 bp, Homo sapiens; identical to SEQ ID NO: 11583
  chr18:500308-501123
  hypo

SEQ ID NO: 31137 - DNA, 28 bp, Homo sapiens
  chr18:558857-558885
  hypo
cgcacccggcccaaacaccattatttgt

SEQ ID NO: 31138 - DNA, 565 bp, Homo sapiens
  chr18:580158-580723
  hypo
ggctgttcttgccagctcaggcgtcaactcgtggaaaccggttaatgacccgaggggacagcggattctcgcctaagcaagatcccgcagatgggagggcgtaggaagaggttccccgggccggctccaggccccagcgggcgtgggcgttggcagtgagcgaggggtggtcccgcgccgcgccggcggggggcgcccgaatgagagcgcggggcggtgccgttgggaccacggcggccagagcggcaggatggcttccggcttcaagaagcccagcgctgcctccaccggccaaaagagaaaggtggcacctaagcccgagctcactgaggatcagaagcaagaagttcgggaagcatttgacctcttcgacgtggacggaagtgggaccatcgacgcgaaggagctgaaggtggccatgagagcgctgggcttcgaacccaggaaggaagagatgaagaaaatgatctccgaggtggacagggaaggcacggggaagatcagcttcaatgacttcctggccgtgatgacgcagaagatgtccgagaaggacaccaaagaagaa

SEQ ID NO: 31139 - DNA, 98 bp, Homo sapiens
  chr18:635704-635802
  hypo
agtgagcaagttgcaacaaatcgcgccgttcagagaaaagggaggatggaattgttacaaccgtttctgtcgcccaggctggagtgcagtggcgcgat

SEQ ID NO: 31140 - DNA, 30 bp, Homo sapiens
  chr18:686331-686361
  hypo
actgaagaggagagcggggctgaaaagggg

SEQ ID NO: 31141 - DNA, 67 bp, Homo sapiens; identical to SEQ ID NO: 11584
  chr18:712371-712438
  hypo

SEQ ID NO: 31142 - DNA, 1441 bp, Homo sapiens; identical to SEQ ID NO: 11585
  chr18:811633-813074
  hypo

SEQ ID NO: 31143 - DNA, 30 bp, Homo sapiens
  chr18:940771-940801
  hypo
caacaaatgttcacccgctagcctcctttt

SEQ ID NO: 31144 - DNA, 30 bp, Homo sapiens
  chr18:941133-941163
  hypo
aggtttccttcattccgcgttgtatctgtg

SEQ ID NO: 31145 - DNA, 30 bp, Homo sapiens; identical to SEQ ID NO: 11593
  chr18:1777065-1777095
  hypo

SEQ ID NO: 31146 - DNA, 51 bp, Homo sapiens; identical to SEQ ID NO: 11594
  chr18:2571377-2571428
  hypo

SEQ ID NO: 31147 - DNA, 30 bp, Homo sapiens
  chr18:2755855-2755885
  hypo
ccctcggccgtgtattttctttttcttatc

SEQ ID NO: 31148 - DNA, 1008 bp, Homo sapiens; identical to SEQ ID NO: 11595
  chr18:2846787-2847795
  hypo

SEQ ID NO: 31149 - DNA, 742 bp, Homo sapiens; identical to SEQ ID NO: 11596
  chr18:2906054-2906796
  hypo

SEQ ID NO: 31150 - DNA, 153 bp, Homo sapiens; identical to SEQ ID NO: 11597
  chr18:2907033-2907186
  hypo

SEQ ID NO: 31151 - DNA, 94 bp, Homo sapiens
  chr18:2910111-2910205
  hypo
gttatgagggctgtgccggcacagcccgccatgccctggccacctctgatagccaccattgcacccctctctcaggctccgacagtcatcctga

SEQ ID NO: 31152 - DNA, 30 bp, Homo sapiens
  chr18:2947828-2947858
  hypo
ttagattttgaacacgttgtttcatatgct

SEQ ID NO: 31153 - DNA, 43 bp, Homo sapiens
  chr18:3011388-3011431
  hypo
ataccttaagtctggctggggcggttgctcacgcctgtaatcc

SEQ ID NO: 31154 - DNA, 31 bp, Homo sapiens
  chr18:3061642-3061673
  hypo
tgagcaaagagggttccgagaactggttagc

SEQ ID NO: 31155 - DNA, 136 bp, Homo sapiens
  chr18:3119809-3119945
  hypo
aggttctcttggaggaaattccgaggtgcggtgtggaggcaggtgtctgtggtttacctgggacggcgatggtccactcttcacatttgaagcattcgcttactgcggagggcgcgcccagcccagccatgttcat

SEQ ID NO: 31156 - DNA, 272 bp, Homo sapiens
  chr18:3214252-3214524
  hypo
tctaggcagaaacattctgagcgcaaggaaacccgctgtgaatactgaaatgatcttttctcgccctgctgctgctaaagtaacctgtggcaaaatttgcctgctcttagaaatagcaaattggcaacacaagcaagactcgcccgtgagaacaccaggctcttagtgaagctaaaagagacaataaagggaaataggtaggcacgggtcccgggtctcccaaacaaggtctgtctgcacacttggttgaaatgcagggctgccgtatttaa

SEQ ID NO: 31157 - DNA, 601 bp, Homo sapiens
  chr18:3214823-3215424
  hypo
caaaaaaccaaaaccgaaccgaaacaaagcgagaagtaactgggagggttactcagagcacacgcctcttcctgaggttggaaggttggaggagggcgtccgacatacccatgggaggagccataatcgtaggctgaggctgccttccgactgacttcagagctcagggcgtgctgcgaggcctgctgctgggaggaggaggcggacgcccgacggaaggcctcggactcccggcggtgcgcggcggaggagcggctgctgtaggccgtggagccctgggtgtagacggcggagcgtttcttctcccgctggtagtgactcacggtgctgcgcacgtccttgttgcggtagctgagatcatagtgctggtggcacctctgataaaaaggcaaagacatcctgtgccccttgaaggaaccgggccacctgaaggaaaacaacactttttgagtgacttattaaggaacaaattccatagaccaagtcatctaaatcaatgtgtaaaaatcaatactcttggctgggtgcggtggttcatgcttgaaatcccaacgaggatctctcgaggccgggagctcaaaatcaacctggccaacacagt

SEQ ID NO: 31158 - DNA, 36 bp, Homo sapiens; identical to SEQ ID NO: 11600
  chr18:3262088-3262124
  hypo

SEQ ID NO: 31159 - DNA, 255 bp, Homo sapiens
  chr18:3360374-3360629
  hypo
acaaagcttgccttgtctcaccgacccctgctgtggaagagccctgcgtccttcagcagcaaagtagggccacgcccctcgggcccggcctctggcctccgtcacgctcccttctcactgccgctccaggcctcccggacccaggtcaccttcgcttggattataagaaccaatgccccttttaggcttccggggcaggctgacttccattgctctttatccccggaaatgaccgcacatcagccttcccagctc

SEQ ID NO: 31160 - DNA, 87 bp, Homo sapiens
  chr18:3443524-3443611
  hypo
ctacaggtgtataccacgaagcccagccaatataatatgaaaataataataatgagaactttttttttgagatgtaatttcgttctg

SEQ ID NO: 31161 - DNA, 95 bp, Homo sapiens
  chr18:3445348-3445443
  hypo
ggggcagttaccaggtcggccatgtctcacttagtatattctctcttgcttgaattttcagaactttttttgtagttaaaaaatgagaagaaggc

SEQ ID NO: 31162 - DNA, 632 bp, Homo sapiens; identical to SEQ ID NO: 11602
  chr18:3447897-3448529
  hypo

SEQ ID NO: 31163 - DNA, 1868 bp, Homo sapiens; identical to SEQ ID NO: 11603
  chr18:3449232-3451100
  hypo

SEQ ID NO: 31164 - DNA, 393 bp, Homo sapiens; identical to SEQ ID NO: 11604
  chr18:3451508-3451901
  hypo

SEQ ID NO: 31165 - DNA, 50 bp, Homo sapiens; identical to SEQ ID NO: 11605
  chr18:3452214-3452264
  hypo

SEQ ID NO: 31166 - DNA, 43 bp, Homo sapiens
  chr18:3534579-3534622
  hypo
cgtcacactgttggatcgagtgaacctgcggaagcttgggaga

SEQ ID NO: 31167 - DNA, 23 bp, Homo sapiens
  chr18:3535426-3535449
  hypo
cgggcgtggtggctcacgcccgt

SEQ ID NO: 31168 - DNA, 18 bp, Homo sapiens
  chr18:3567918-3567936
  hypo
tagagtttccctctgtcg

SEQ ID NO: 31169 - DNA, 263 bp, Homo sapiens
  chr18:3581879-3582142
  hypo
ccgatagacaggcatcgatttttcttaaagtggtccttcttcctgtcctccgtggtgacggtggctatggtagtcgtggtggtgacggtggcagtgttattgcccatgtgttgactggcagggccatggatctgggcgtttgcagcttcgatggcggctgtcagagccttcatactgtccaggctctcggtggagttgctgagtccagactggctgataatatctcctcgctggccctgtccgtccatgtaggcatcctgggc

SEQ ID NO: 31170 - DNA, 37 bp, Homo sapiens
  chr18:3600254-3600291
  hypo
ttgtttttttatgagacggagtttctctcttgtcacc

SEQ ID NO: 31171 - DNA, 28 bp, Homo sapiens
  chr18:3613114-3613142
  hypo
gcatgagccaccacgcctggccttttag

SEQ ID NO: 31172 - DNA, 31 bp, Homo sapiens
  chr18:3614529-3614560
  hypo
tattctttcattatagcgtagggtgaagcta

SEQ ID NO: 31173 - DNA, 18 bp, Homo sapiens
  chr18:3636418-3636436
  hypo
ggtttgttttttgagacg

SEQ ID NO: 31174 - DNA, 155 bp, Homo sapiens
  chr18:3637283-3637438
  hypo
gtaatataaaatgatacgtgcaaatccctagaaaagtctccatctgaggctctcctcttgtttgccttctagaaacacgtttagtttatttggtaaaggagacacacttcgctcctggtagcactttcctatatctacgattttgctcttttaaa

SEQ ID NO: 31175 - DNA, 23 bp, Homo sapiens
  chr18:3647472-3647495
  hypo
ttttttttttttaaaccgagact

SEQ ID NO: 31176 - DNA, 48 bp, Homo sapiens
  chr18:3669444-3669492
  hypo
accctagtaaggaaagagacacaagcggctggacgtgttgggaaacac

SEQ ID NO: 31177 - DNA, 44 bp, Homo sapiens
  chr18:3729157-3729201
  hypo
acggtggtggtggtgcgcggcggcgaggacgacctcagggacac

SEQ ID NO: 31178 - DNA, 1037 bp, Homo sapiens; identical to SEQ ID NO: 11607
  chr18:3879109-3880146
  hypo

SEQ ID NO: 31179 - DNA, 77 bp, Homo sapiens
  chr18:4009175-4009252
  hypo
tacaggtgtgagccactgcacctggccgccaccgagtctctttagactccacttgcgctccatgctcctcttgactt

SEQ ID NO: 31180 - DNA, 30 bp, Homo sapiens
  chr18:5285184-5285214
  hypo
gggttttgcttggctcgccacataatggaa

SEQ ID NO: 31181 - DNA, 321 bp, Homo sapiens; identical to SEQ ID NO: 11612
  chr18:5542836-5543157
  hypo

SEQ ID NO: 31182 - DNA, 1213 bp, Homo sapiens; identical to SEQ ID NO: 11615
  chr18:5628270-5629483
  hypo

SEQ ID NO: 31183 - DNA, 256 bp, Homo sapiens; identical to SEQ ID NO: 11616
  chr18:5629569-5629825
  hypo

SEQ ID NO: 31184 - DNA, 530 bp, Homo sapiens; identical to SEQ ID NO: 11617
  chr18:5630124-5630654
  hypo

SEQ ID NO: 31185 - DNA, 223 bp, Homo sapiens; identical to SEQ ID NO: 11620
  chr18:5895017-5895240
  hypo

SEQ ID NO: 31186 - DNA, 30 bp, Homo sapiens; identical to SEQ ID NO: 11621
  chr18:5895498-5895528
  hypo

SEQ ID NO: 31187 - DNA, 31 bp, Homo sapiens; identical to SEQ ID NO: 11622
  chr18:6414307-6414338
  hypo

SEQ ID NO: 31188 - DNA, 345 bp, Homo sapiens
  chr18:6929435-6929780
  hypo
cctcaaccaggtccccgcccagcgtccccgcccagcctcccggggtctacaccaggccacctgcgctcgctggttgacagcacagccccttccggctagcttgacggcctccgcccgatccaccctgcgtgaatacaattatttccctctgccttccactcggagagagcggccaggatgccaactggcttcactggaaacaccccggccccccagccctcctggggcatctctaggtgacaccccacaaggcctgaggcctctacgccttctctcccatccgcagtgaccctgcctcgcacctgccacgtgggtccagccacactgtcccggcagacgctctca

SEQ ID NO: 31189 - DNA, 70 bp, Homo sapiens
  chr18:6953008-6953078
  hypo
gtgtccagtggatccacgccatgggagccatgtctgcctgtgtccggcggatccacgccatgggagccat

SEQ ID NO: 31190 - DNA, 22 bp, Homo sapiens
  chr18:7351428-7351450
  hypo
gtcttttttttttttttgagac

SEQ ID NO: 31191 - DNA, 81 bp, Homo sapiens
  chr18:7351749-7351830
  hypo
cgagtgctgaggtttgaacggacatgttcttccaacattcttaggttggaacttaaacccgaaggtgatggtgttaagagg

SEQ ID NO: 31192 - DNA, 24 bp, Homo sapiens
  chr18:7427306-7427330
  hypo
accggaaatgagctatgattttaa

SEQ ID NO: 31193 - DNA, 1711 bp, Homo sapiens; identical to SEQ ID NO: 11627
  chr18:7567006-7568717
  hypo

SEQ ID NO: 31194 - DNA, 102 bp, Homo sapiens
  chr18:8348255-8348357
  hypo
tccccccattttgccctgaagcgctctgcattaggcggccctaattgctggtgttggagccgccaggagacctttcctgtcgcagcacctggtgcagaagac

SEQ ID NO: 31195 - DNA, 107 bp, Homo sapiens
  chr18:8612127-8612234
  hypo
tgtccagaagtggatcggagcttctgggagctgcgtgaccgcttgtcagggcagtgacagatgtgtatgggtatttgggagcacagtgaaagcgcctccagtcgagg

SEQ ID NO: 31196 - DNA, 52 bp, Homo sapiens
  chr18:8612503-8612555
  hypo
tgtcagggctgctcgcgacagccgtctgggaaagaccgtgagcctcacagca

SEQ ID NO: 31197 - DNA, 307 bp, Homo sapiens
  chr18:8625677-8625984
  hypo
agatctggtctggtggtctggcggtggcttaaaagtagccccattgaggtgctctgagaatgccgttttgttttgaatgctacagctgcggtgtactcagcttactaactcctcttggcaggtcaccctcagctctgattgtttgtccaccatgtgtgtgtttgctttcatctgcgttaattgctgcttcatctgtggcatcatcggtcacctaatgcttgaatgttagtgccatgtcttcattcttcatccgtgtccctgtctgggccgcagctgcagccaagccgcagtgcctgccttctggagg

SEQ ID NO: 31198 - DNA, 408 bp, Homo sapiens
  chr18:8659284-8659692
  hypo
agaggcagcgccccgcgcagaacgcccgtgcctgggaagaggcctgcactccagcagacttccatgttcgctggaagcctcccttcctgactgtgaattgggacaatgcgcagacttccatgttcgttggaagcctcccttcctgactgtgaattgggacgatgcgcgggattttctgaaacctcagttcctccgtctgtaagatgagattgtggggaggagggcggacctgtaagtgcccagccacgagggctgagagattcgaactcctttgctgccgcgaagaagggcctgttccccggaggccaggtgggctccaggccaagctcgcagaggggccaggtgtgctctggcggtgagagggccgcgcgtcccggcacacaccccgcccatttcagcaccctctcc

SEQ ID NO: 31199 - DNA, 101 bp, Homo sapiens
  chr18:8662985-8663086
  hypo
ctaacttgtccctggcgtcctcactcgctgtctggcctggcaagcccgcggtgagctcccatctgtcccctgtcatctgcgagctgcgctatggaactgat

SEQ ID NO: 31200 - DNA, 20 bp, Homo sapiens
  chr18:8699668-8699688
  hypo
taggacgacccttctctggg

SEQ ID NO: 31201 - DNA, 52 bp, Homo sapiens
  chr18:8733059-8733111
  hypo
tagaccgttgccagttgttttcgcatcacacgtggctcatctctcctggcag

SEQ ID NO: 31202 - DNA, 44 bp, Homo sapiens; identical to SEQ ID NO: 11630
  chr18:8748271-8748315
  hypo

SEQ ID NO: 31203 - DNA, 31 bp, Homo sapiens
  chr18:8784005-8784036
  hypo
accggcaactgacccacgagctcagcaagtt

SEQ ID NO: 31204 - DNA, 616 bp, Homo sapiens
  chr18:8800042-8800658
  hypo
agtgagtaaggagctcactaacgcatgcacaaccctctgtctgtccaaggacggaagatggacgagctctactgtaacgacagctggttctctgggagggaacattcccggttagaggatttgcctctctgtgactggcatgagtattagccaggcagctgggatgcaagagccagggtacgtgtctcacagagctgcacagagccgggccgttcccgaaacgccgagcacctcgcaaggcgattagtagcatgggaaacctagccaagccgttttcccaaggacaagttctcagtcacagtattcctcaggccttggtctttgctttgtgacatatggaacgttctcacaattgaactcaagtagatggcaacatttatcacgtccacagaggtttaaaaaaaactgcatataccgatcaaccttgggatggctcataacaaatcatcaggttggcaaacatttggctccgcagacattccctgtttccctgtcttcagccacgtgagctcgcagtcatgacctgggcgctttagagccacagtgaatgctttcagtttccccagccatcctgaagagcagaggctgcgcacacgcaagagggaatcttacagtt

SEQ ID NO: 31205 - DNA, 178 bp, Homo sapiens
  chr18:8829962-8830140
  hypo
ttcagcaccagccaggcggaacgggatacggtggtgtcagataaacctatgacagcagcttcaccaacacacaacacacacagaacagatacacaatacacaacacacacactacttctataacaaggggagcgcagacacaaaacacacagatttcccaaaccgtgtgtcccagtca

SEQ ID NO: 31206 - DNA, 32 bp, Homo sapiens
  chr18:9101196-9101228
  hypo
ttttattttttatttttgagacggagtctcgc

SEQ ID NO: 31207 - DNA, 31 bp, Homo sapiens
  chr18:9285996-9286027
  hypo
ttgtttcatttctcttcggtacataccatgg

SEQ ID NO: 31208 - DNA, 105 bp, Homo sapiens
  chr18:9333522-9333627
  hypo
tcttctttaaaaagcaaattccggccgggcactatggttcacacctgtcatcccaacgatttaggagaccgcggtgggaggatcgcttgagccccgaaatttgaa

SEQ ID NO: 31209 - DNA, 62 bp, Homo sapiens
  chr18:9417715-9417777
  hypo
cttttttaagagacagagtctcgctctgtcgcccaagcagctggactgccctggcctgatct

SEQ ID NO: 31210 - DNA, 30 bp, Homo sapiens
  chr18:9478623-9478653
  hypo
ggcggtggaggcctcggtgtagtagtgccg

SEQ ID NO: 31211 - DNA, 30 bp, Homo sapiens
  chr18:9498624-9498654
  hypo
acaggcgtgagctagcgtgcccgtatttct

SEQ ID NO: 31212 - DNA, 22 bp, Homo sapiens
  chr18:9535902-9535924
  hypo
cccagcagggataggaaggaga

SEQ ID NO: 31213 - DNA, 78 bp, Homo sapiens
  chr18:9535962-9536040
  hypo
tgagactgaaaggacccgtgcatcttactgtaacccgggggccaggccggctctctcgctgtacattctgtaaaggtg

SEQ ID NO: 31214 - DNA, 30 bp, Homo sapiens
  chr18:9536977-9537007
  hypo
gtttctggtccatccgatgagacggatgct

SEQ ID NO: 31215 - DNA, 31 bp, Homo sapiens
  chr18:9547785-9547816
  hypo
tctagtaggttgaggacgctgtgctcatggc

SEQ ID NO: 31216 - DNA, 31 bp, Homo sapiens
  chr18:9615429-9615460
  hypo
atgtctaggaggtgctcggtgaagggtgcct

SEQ ID NO: 31217 - DNA, 103 bp, Homo sapiens
  chr18:9688387-9688490
  hypo
gctttcatgcgcatgcgccatcgctcatgcgggatgtgggtgtggtcatcacagaccttcccacctctatgaaatggggaaatggaagcgacactgagctctc

SEQ ID NO: 31218 - DNA, 423 bp, Homo sapiens; identical to SEQ ID NO: 11633
  chr18:9708947-9709370
  hypo

SEQ ID NO: 31219 - DNA, 194 bp, Homo sapiens
  chr18:9797314-9797508
  hypo
gaacacaataagtcaattttgcgaatcgctggcttaatgtcagcgatgcttctgcttctcctgctggcggacgttccctgatgacttgctgtgttccatgtactgttctgagtgcctgtgtgtactgatgcattcagccctcctcgcaaaagcactttgaggttgaaactgtcgttattcccatttgcaggtga

SEQ ID NO: 31220 - DNA, 30 bp, Homo sapiens
  chr18:9800134-9800164
  hypo
tagagtggcttttagcgagaggagctgaaa

SEQ ID NO: 31221 - DNA, 31 bp, Homo sapiens
  chr18:10078821-10078852
  hypo
gataagcatccataggcgatttcatcattgt

SEQ ID NO: 31222 - DNA, 135 bp, Homo sapiens
  chr18:10474410-10474545
  hypo
gcctcaaaacaccaaaaagcacggggagccttgagtgcgaggtctgagtgaggaggcaggtgcggctggggaacttgctgggcgggcgtgggccgggctgtgggctccgaacccgaccttggactagtcctttgc

SEQ ID NO: 31223 - DNA, 107 bp, Homo sapiens
  chr18:10485529-10485636
  hypo
cccaaaggcagacctgaccatcggcctgcacggggagtgggtgagccagcgctgtgaggtgcgccccgaagtcctcttcctcacccgccacttcatcttccatgaca

SEQ ID NO: 31224 - DNA, 377 bp, Homo sapiens
  chr18:10589090-10589467
  hypo
actgaattctgctgccagccacgtccttgatactttgtgggtgatttatttcattggctcgctattacttggcagcggcggtggctcctcaagccagcgtgggctccaggtggccccgggccgggaggcgatggccccgggccaggaggcgtggccacggccgctcgccggcgtccgtccccaggaacggccagcactggggcagcggaggaggcagcggtggtggtggcaccgggtagaaggcggtggcactgggtagaaggcaccgccgccgcccgccgcgggaggcttccgcggagactcagggctgcagagccagcggaggctgaaggaagagaaaggtaattttcctactcgcatatattaatttcagtaaa

SEQ ID NO: 31225 - DNA, 30 bp, Homo sapiens
  chr18:10705420-10705450
  hypo
gggctgactgccatacggttcttgcctgca

SEQ ID NO: 31226 - DNA, 30 bp, Homo sapiens
  chr18:11877622-11877652
  hypo
aagggcgatgttcccggtagtactccaagt

SEQ ID NO: 31227 - DNA, 30 bp, Homo sapiens
  chr18:11905551-11905581
  hypo
ttcactcctaccggacggcttgcttcccaa

SEQ ID NO: 31228 - DNA, 17 bp, Homo sapiens
  chr18:11954687-11954704
  hypo
agctgcctcagtgtaat

SEQ ID NO: 31229 - DNA, 36 bp, Homo sapiens
  chr18:11979847-11979883
  hypo
tgagccaccgcacccggcctctgtcttaaacatcat

SEQ ID NO: 31230 - DNA, 221 bp, Homo sapiens
  chr18:11992148-11992369
  hypo
tgtctgaccaagtatctgcgctccacgtagctcagtcaagttgacacataaaattaaccatcacaacacattcacttgtgttgcagtaaatctggaagcataaacatggggcgtgtcgtcaggtgcacacctccagtggccacatcttcctgacctgacagagggaaagacacatctcctattgaaactgcactctggcaaggctccggcgtgctgctctg

SEQ ID NO: 31231 - DNA, 195 bp, Homo sapiens
  chr18:11992750-11992945
  hypo
ctaagactgagggaaaatagccgtggtaaaggggttcagcgggaccttacctggcaaccccatgtgctccctcgccctgtggacgtgatcctggctaaagggcagggctgtttgagtctcgcttactgattttagaaatacagcacttttcctcactttttctcttagcataggacaattcgtgaattaaacttt

SEQ ID NO: 31232 - DNA, 214 bp, Homo sapiens
  chr18:12093610-12093824
  hypo
cgctcgcgagagtgcgcagctcccgcgaagggcctcgcgggcaggctgaggtgcgcatgtgccctggtgcctaagggttctggccggggaggcggggggcggtgggaggtggggggagggcgggtgcgccaccacgtggcgcccgcgaatggagggcgcgaggctcagggctgtttctccgcggatggcctcgtgggccggctgaggtgcacat

SEQ ID NO: 31233 - DNA, 30 bp, Homo sapiens; identical to SEQ ID NO: 11646
  chr18:12253844-12253874
  hypo

SEQ ID NO: 31234 - DNA, 117 bp, Homo sapiens; identical to SEQ ID NO: 11647
  chr18:12254350-12254467
  hypo

SEQ ID NO: 31235 - DNA, 697 bp, Homo sapiens
  chr18:12279586-12280283
  hypo
agctgcggccaccgccgccctgtctcctgtgcccatgattcacggagtggcccgggacagagcagcctcttcgcagaaccctcagggaggctccaggcctcagggaggaggcagcaaaggttggttttgctattgtcaaagtcttcagtgggcccttggccaggagactggtggaattgaaacccactcccttaggggaagggtcccagcaggcgtggctgtcttgtctctggttcggattaggtgacaggcactccaaatgtgacactttctcgttctcatcttagtttctctatcatctgcatttagcccgctagctcagaccaggatgtgccccatgcaggtgagggtgggtggggagagccaaggcactccagcgggctcagggcctggaccctgtgaggcctggatgccgcctccacctaagccttcagctgaacccccagggtggcgtgtgtgtcccttcaggggctgagtgttcgtctgtgtgtctttgatggggccaagcagaagagctcgaattggaaattattcacttctagaatcacaattcagaaaaaaagaaatggttcccatgagcccaggtttcatgctcctgcagtcactacatggacctggacgtcactcctatgacctctttttcaggcgcacaaacacaggtagctgccatgagcatcccacgcgcatgcgtcctggt

SEQ ID NO: 31236 - DNA, 31 bp, Homo sapiens
  chr18:12291393-12291424
  hypo
caggaaggtgccctcccgatccccccacagc

SEQ ID NO: 31237 - DNA, 265 bp, Homo sapiens; identical to SEQ ID NO: 11648
  chr18:12307602-12307867
  hypo

SEQ ID NO: 31238 - DNA, 745 bp, Homo sapiens; identical to SEQ ID NO: 11649
  chr18:12308311-12309056
  hypo

SEQ ID NO: 31239 - DNA, 245 bp, Homo sapiens
  chr18:12375232-12375477
  hypo
attattccccctccccacccccgctctttttttttttaggagacagagtccgtcacccacgctggagtacagcaatgcaatcaaaactcactggagcctcaacctcccgcgccaagcaacccgccttggccccccgagttgctgggactatagtcataagtcactgagcccaggtaagaaaaaaaaaaaaaaaacaatttgtagaggccaggagctgtggctcaggtctgtaattccaacacttt

SEQ ID NO: 31240 - DNA, 121 bp, Homo sapiens
  chr18:12375776-12375897
  hypo
ctcgtgatccacccgcctgctgggattacagccgtgagctaccgcgcctggcctctccagaaactttttaaaaatcaaccacggtgctgtagtcccagatactccggaggctgaggcggga

SEQ ID NO: 31241 - DNA, 615 bp, Homo sapiens; identical to SEQ ID NO: 11651
  chr18:12407707-12408322
  hypo

SEQ ID NO: 31242 - DNA, 42 bp, Homo sapiens; identical to SEQ ID NO: 11652
  chr18:12408339-12408381
  hypo

SEQ ID NO: 31243 - DNA, 31 bp, Homo sapiens
  chr18:12431470-12431501
  hypo
cccgcccgcccgcccacgctgtcctccactt

SEQ ID NO: 31244 - DNA, 211 bp, Homo sapiens
  chr18:12432921-12433132
  hypo
gccgccctgccccgccggccagaagcggactcggtgcagacatgcagctctctccgtggaatgtgcatgtgcacggaggtgagtgtggtctgataaggccgcaggcagctcgtttgggaaaactgcgcagggctcggcctcagtggccaagcagtgtttgtggggcaccggaagcggcgccgcacccgtgctggccggcccgccactggga

SEQ ID NO: 31245 - DNA, 30 bp, Homo sapiens
  chr18:12655872-12655902
  hypo
aaatagctaaatcccaaggcacgatattgc

SEQ ID NO: 31246 - DNA, 2 bp, Homo sapiens
  chr18:12849301-12849303
  hypo
aa

SEQ ID NO: 31247 - DNA, 24 bp, Homo sapiens
  chr18:12849542-12849566
  hypo
agcgaaaccctgtctcaaaaaata

SEQ ID NO: 31248 - DNA, 30 bp, Homo sapiens
  chr18:12849992-12850022
  hypo
tcttgtttgattgatcgtgctcgatcttga

SEQ ID NO: 31249 - DNA, 42 bp, Homo sapiens
  chr18:12949140-12949182
  hypo
caggcgtgagccaccgcgcccggcctacaagcagaatttcta

SEQ ID NO: 31250 - DNA, 31 bp, Homo sapiens; identical to SEQ ID NO: 11658
  chr18:12991134-12991165
  hypo

SEQ ID NO: 31251 - DNA, 194 bp, Homo sapiens
  chr18:13033465-13033659
  hypo
gtccattcttggcaccgcgtctacctataatgacattgcagcatctagcaaagttacgcatgtactatcctgtaaccgagcagttctgcttctgggaatttattcttcagatacacttgcataaatgatacatggtgtatgtgcaggctcattacttgcagcattgtctgtgataacaacgttagaagcaatgt

SEQ ID NO: 31252 - DNA, 395 bp, Homo sapiens
  chr18:13131793-13132188
  hypo
taaggaaataatgaacgaccagaaaacagcggaagacaaaacagcagaaataagtttagaaatgtgtgaagtgtatacaaaggaaactgtcaggttcctctggagcacatcggagacttgagtaggagtaacttaccggactgcactgggggccttcttccgtagcatgaacagcacccatgagtggggatggggctggggccgcaccagtccaggcagcatttcccccagtggagggggagctctgcaggtgcccagcctcccacgctgtttcagtagcttgttaggaactctcccagacacggatagtggcccagctgcccatccctgccgtcactgggtctgagcgtggcctgtcctttgtttaaatcctacatttagctggccggactcac

SEQ ID NO: 31253 - DNA, 38 bp, Homo sapiens
  chr18:13135169-13135207
  hypo
gccgaggaggcgccaagagtgagcgagggctgccagca

SEQ ID NO: 31254 - DNA, 179 bp, Homo sapiens
  chr18:13212960-13213139
  hypo
ggctacttaagtatcttcttccgtaagggaccttttcaaggaattcgcccttttcttatggagcacgttccggtaaggaaagccacattgctatgttctctacaaacgacccctcaccagcgggacagggagatgcagaggcacacaatcctgcctccgtcagtgtttgatgaaaaagc

SEQ ID NO: 31255 - DNA, 222 bp, Homo sapiens
  chr18:13233039-13233261
  hypo
gtgatcaatgaggactctagacgatggcagaggatctgcttgtcgccacacacagtgcgttagggatggagcttgccaccagtggcgccacctctttgcaggcgcctgtcctgaaggacgtgagcgggcgaagtgctcttgggtctgcttggacacgggtcactggccgctaagaaggcaaatgccatgccgttcagatacgttctctgctactggatgatg

SEQ ID NO: 31256 - DNA, 160 bp, Homo sapiens
  chr18:13292878-13293038
  hypo
gatctaggagttttccaaccccggggatgcccggaaatgagacgatgacggaggccatgcggattccacgagttcagcgaggtcttggagagaatgccctggaggcaggcgagctttggttctggggctcgagcaccacgtcccaggaatgctgtgaacc

SEQ ID NO: 31257 - DNA, 23 bp, Homo sapiens
  chr18:13325752-13325775
  hypo
ttcctttttttttttttgagacg

SEQ ID NO: 31258 - DNA, 117 bp, Homo sapiens
  chr18:13425934-13426051
  hypo
gagagggaggctgagattccccgagggcaggacggtggaccacagtgaccctgtgggaagaggtctggggacggatggcccatggcggcagggtgcgcagagctcctgggtgctggg

SEQ ID NO: 31259 - DNA, 273 bp, Homo sapiens
  chr18:13442592-13442865
  hypo
gggccacctgctggccggccggctgcggggagcctgaggctggcatcccacttggtggacctgccacctcattgttcctgcccagccaagcacgtcctgtggtgctgtgtttccaaagccccttggccacatcttagtgggggacagcagcgttccttcgaccgtccagaagcgataattgagtggtctgtgcagcctggcaagtgccacgccctccgaaagccttggtgagcacagacccccgaagccagcgctgctgagggattctcacca

SEQ ID NO: 31260 - DNA, 174 bp, Homo sapiens
  chr18:13491287-13491461
  hypo
cctctggaacccacagctagccggctgctcctccactatcagatggcggctgtcagtcatgggcttgtcaccgagtgcatccgtcatgctcgggccatgggccggcacctgtgtgtgtgtgtccagcttaacgacagagatttttggaaagacgccctaagatagacatacttg

SEQ ID NO: 31261 - DNA, 121 bp, Homo sapiens
  chr18:13498451-13498572
  hypo
actggagaatccttttccacacacacgtcccgccgtggacactggagaatccttcttgacacacgtgtcccactgtggacactggagaatccttctcgccacacacgtcccactgtggaca

SEQ ID NO: 31262 - DNA, 85 bp, Homo sapiens
  chr18:13498972-13499057
  hypo
tggagaatccatctccacacacgtcccgccgtggacactggagaatccttcttgccacacacgtcctgccgtggacaccggagaa

SEQ ID NO: 31263 - DNA, 241 bp, Homo sapiens
  chr18:13499116-13499357
  hypo
cccgccgtggactctggagaatccttctactcacacacacgtcgcgccgtggacactggagaatccttctactcacacacatcccgctgtggatactggagaatccttctcgccacacacttcccaccgtggacactggagaatccttctcgccacacacgtcctttcgtggacactggagaatccttctactcacacacgtcccgccatggatactggagaatccttgccacacacgtcc

SEQ ID NO: 31264 - DNA, 84 bp, Homo sapiens
  chr18:13499656-13499740
  hypo
tccttctcgccgcacacgtcctgccatggacaccggagaatccatctccacacatgtcccgccgtggacactggagaatccttt

SEQ ID NO: 31265 - DNA, 80 bp, Homo sapiens
  chr18:13525324-13525404
  hypo
acacagtgagcatcatccccacgccctgagtccattctgcaaatctcacatttaaacacgctaaagtcaacctctgcctt

SEQ ID NO: 31266 - DNA, 270 bp, Homo sapiens
  chr18:13532098-13532368
  hypo
gggagcagggctggggacagccgatgcagcctcagagctgcagaggcagctgccgggctgttaaagtcacccggagggatgcaccccgccgtgcatgcggtggacggctcctgcaattgccttcagagggtaagagcgattgggaggggcagcgaagcagccgacttctggagtatgtattattcctccctctgagaaatacgtgactatacattcaagattgcggctgaaacttcggtggtagtattcggcctggatgacctgtggcat

SEQ ID NO: 31267 - DNA, 31 bp, Homo sapiens
  chr18:14392672-14392703
  hypo
ggcatacttccacaagcggatgtagcactcg

SEQ ID NO: 31268 - DNA, 30 bp, Homo sapiens; identical to SEQ ID NO: 11663
  chr18:14726130-14726160
  hypo

SEQ ID NO: 31269 - DNA, 28 bp, Homo sapiens
  chr18:15198163-15198191
  hypo
aagcagcggtggcgctgacaaaaagccg

SEQ ID NO: 31270 - DNA, 33 bp, Homo sapiens
  chr18:19253262-19253295
  hypo
atattttttgagatggagtttcgctcttgttgc

SEQ ID NO: 31271 - DNA, 26 bp, Homo sapiens
  chr18:19267459-19267485
  hypo
ccacacccagccgcctctgttaaact

SEQ ID NO: 31272 - DNA, 17 bp, Homo sapiens
  chr18:19596546-19596563
  hypo
accgcaccccgctggca

SEQ ID NO: 31273 - DNA, 31 bp, Homo sapiens
  chr18:19775129-19775160
  hypo
ttgagagctgaagttacgctgatgcatggag

SEQ ID NO: 31274 - DNA, 35 bp, Homo sapiens
  chr18:19778301-19778336
  hypo
ggattaaaggcacgagccaccgtgcccagcctgct

SEQ ID NO: 31275 - DNA, 30 bp, Homo sapiens
  chr18:19780713-19780743
  hypo
cagtctcgcctcgccggccgaagtcacgtc

SEQ ID NO: 31276 - DNA, 30 bp, Homo sapiens; identical to SEQ ID NO: 11671
  chr18:20261870-20261900
  hypo

SEQ ID NO: 31277 - DNA, 210 bp, Homo sapiens; identical to SEQ ID NO: 11672
  chr18:20512627-20512837
  hypo

SEQ ID NO: 31278 - DNA, 1246 bp, Homo sapiens; identical to SEQ ID NO: 11673
  chr18:20512902-20514148
  hypo

SEQ ID NO: 31279 - DNA, 22 bp, Homo sapiens
  chr18:20554443-20554465
  hypo
tgtttttgagactctccgccac

SEQ ID NO: 31280 - DNA, 22 bp, Homo sapiens
  chr18:20554704-20554726
  hypo
gccactgcgcctggcctatttt

SEQ ID NO: 31281 - DNA, 31 bp, Homo sapiens
  chr18:20696269-20696300
  hypo
tacgggtgtgagccaccgtgcccggccgcta

SEQ ID NO: 31282 - DNA, 75 bp, Homo sapiens; identical to SEQ ID NO: 11674
  chr18:20715562-20715637
  hypo

SEQ ID NO: 31283 - DNA, 30 bp, Homo sapiens; identical to SEQ ID NO: 11675
  chr18:20716530-20716560
  hypo

SEQ ID NO: 31284 - DNA, 220 bp, Homo sapiens
  chr18:20790546-20790766
  hypo
caggttctaaacataacggttgatcacatgggacctgttatcagaaccatactgttcaaggtttcccagtgtaagaagccaagaagacgggagccatcacttgctgctacttgcctgctgtggttcacgcctgcagtccctcccagatgccagaactacttcaggaaacacgtatgatgtgttcttggaagctccattggcaaaccgtctgcagagcctc

SEQ ID NO: 31285 - DNA, 167 bp, Homo sapiens
  chr18:20800424-20800591
  hypo
ggtgggggcaggcagtgtggccgcagatctgccctgttgtgtttgctgctgtggagccggttcagcccgggaagctggaatgcacacttgagaaccaagtgtgtttcccttcatgatcgcgcctttggggctgggtgtgctggctcgggaccagtacaggcaggcag

SEQ ID NO: 31286 - DNA, 194 bp, Homo sapiens
  chr18:20846711-20846905
  hypo
cctctccagtgatgacaaggtcgcctggccaactcacctggacagctgccctcaaacgtggcccttggagccccctcagcggcacccgccctgcagagcagcttgttggattctctcactctcctcccccagagaggctccctcgccgaagctcagggagtgactcctggttcgctgatgaggggctggtgggc

SEQ ID NO: 31287 - DNA, 43 bp, Homo sapiens
  chr18:20910922-20910965
  hypo
agcctgggcaactagcgagaccccatctctacaaaaaaattga

SEQ ID NO: 31288 - DNA, 489 bp, Homo sapiens
  chr18:20911024-20911513
  hypo
ccagcaggagcgttcagcgagaggcagagccccggaacagcggtgttcactcagttaaacctcatggtctgagagagtggcaggtgtgccgttttccataattagtcacagcccctgaaggaaaagcgcgcccgtgtggggcaggaccaaaggaagaaacgcttctgcaatgctaccgggaagtctgagctcaccttctttaccttggcaccgagctgaagatctgttagaaaccctctccaaccaggactttcaggagaaacggtggccaccgcccagaataacaaggccccagcagcaaggtgtccttttcccagcaagtgaaacctgccccccgccaccacctgtagtacaggagacaccacaaagcaagaggccccagggctctgctcgggaagctgccgggcctgtttttcctcccagtggccaacaaacaggagggcaggttcagcacgttgggctctgctttctgagcgccgcaccattaca

SEQ ID NO: 31289 - DNA, 31 bp, Homo sapiens
  chr18:21000859-21000890
  hypo
aaatcactaaacctcacggttagaagggaac

SEQ ID NO: 31290 - DNA, 95 bp, Homo sapiens
  chr18:21164537-21164632
  hypo
ataatgtgaagcctggctgggcgaggtggctcacacctgtaatccccaaaagaggagggcggatcgctagaggtcaggatttcgagaccagcctg

SEQ ID NO: 31291 - DNA, 457 bp, Homo sapiens; identical to SEQ ID NO: 11679
  chr18:21242502-21242959
  hypo

SEQ ID NO: 31292 - DNA, 31 bp, Homo sapiens
  chr18:21338239-21338270
  hypo
cctcaatgaatggtgccgtggatgaccgtga

SEQ ID NO: 31293 - DNA, 31 bp, Homo sapiens
  chr18:21730971-21731002
  hypo
ttcttatacagcctctcgtatctcttgttag

SEQ ID NO: 31294 - DNA, 30 bp, Homo sapiens
  chr18:21849397-21849427
  hypo
atttagtcacctgacgccggtataagtcag

SEQ ID NO: 31295 - DNA, 31 bp, Homo sapiens
  chr18:22596097-22596128
  hypo
gtgtagggagaagctacgagagtgaaatggg

SEQ ID NO: 31296 - DNA, 31 bp, Homo sapiens; identical to SEQ ID NO: 11685
  chr18:22653838-22653869
  hypo

SEQ ID NO: 31297 - DNA, 30 bp, Homo sapiens
  chr18:22658457-22658487
  hypo
tgagccaattacacgcgaggcagaattatg

SEQ ID NO: 31298 - DNA, 175 bp, Homo sapiens
  chr18:22756758-22756933
  hypo
tgacaaagatgaaactgctcccggaaaattctagacactcacacatgctcaccagcacacgtgcgcgtgcacgcacacactcataagcacacgctccctggctggctccaacattcggcgctggcgtggaacctggtgtttactcccaatactcgctgtgacctgagcacttacc

SEQ ID NO: 31299 - DNA, 81 bp, Homo sapiens; identical to SEQ ID NO: 11687
  chr18:22929637-22929718
  hypo

SEQ ID NO: 31300 - DNA, 1259 bp, Homo sapiens; identical to SEQ ID NO: 11688
  chr18:22929926-22931185
  hypo

SEQ ID NO: 31301 - DNA, 13 bp, Homo sapiens
  chr18:23652482-23652495
  hypo
aattcacaatgat

SEQ ID NO: 31302 - DNA, 131 bp, Homo sapiens
  chr18:23988506-23988637
  hypo
tcatcaggccctgagtgtagacgcaatgtgcggtaattggtacattcagcgttgatcctcgtgttccttgggtgccgtgaggagctttcccataacctctcctatttcgcggcttgtctttggccctaacc

SEQ ID NO: 31303 - DNA, 31 bp, Homo sapiens
  chr18:24035812-24035843
  hypo
cccccacaggagcccacgatttcaaatcctc

SEQ ID NO: 31304 - DNA, 468 bp, Homo sapiens; identical to SEQ ID NO: 11689
  chr18:24127690-24128158
  hypo

SEQ ID NO: 31305 - DNA, 30 bp, Homo sapiens; identical to SEQ ID NO: 11693
  chr18:24367819-24367849
  hypo

SEQ ID NO: 31306 - DNA, 1117 bp, Homo sapiens; identical to SEQ ID NO: 11696
  chr18:25755555-25756672
  hypo

SEQ ID NO: 31307 - DNA, 784 bp, Homo sapiens; identical to SEQ ID NO: 11697
  chr18:25757187-25757971
  hypo

SEQ ID NO: 31308 - DNA, 151 bp, Homo sapiens
  chr18:28934935-28935086
  hypo
taatccaaccaacttccggcatgataggtagtctgagtatgcaccccgagttagccaatgcccacaatgtcattgtgacagagagggttgtttctggtgctggcgtaactggaattagtggcaccactgggatcagcggtggcataggcag

SEQ ID NO: 31309 - DNA, 31 bp, Homo sapiens
  chr18:29114802-29114833
  hypo
ttgtaaatgttgctaacgcccccaataaaca

SEQ ID NO: 31310 - DNA, 31 bp, Homo sapiens
  chr18:29199776-29199807
  hypo
cttcatcatcacaaaacgttctgttggacac

SEQ ID NO: 31311 - DNA, 37 bp, Homo sapiens; identical to SEQ ID NO: 11704
  chr18:29265159-29265196
  hypo

SEQ ID NO: 31312 - DNA, 46 bp, Homo sapiens
  chr18:29269412-29269458
  hypo
atagaagaggctgggccgggcgcaatggttcatgcctgtaatccca

SEQ ID NO: 31313 - DNA, 55 bp, Homo sapiens
  chr18:29293794-29293849
  hypo
aaccgctgacaagctcgagttaattggtgcgtcacagcatcgttggcccggcgtt

SEQ ID NO: 31314 - DNA, 46 bp, Homo sapiens
  chr18:29521105-29521151
  hypo
gtttttttaggaattcaaggccgggcgcggtggctcacgcccataa

SEQ ID NO: 31315 - DNA, 22 bp, Homo sapiens
  chr18:29549642-29549664
  hypo
atgaatatttttgggccgggcg

SEQ ID NO: 31316 - DNA, 134 bp, Homo sapiens; identical to SEQ ID NO: 11705
  chr18:29598281-29598415
  hypo

SEQ ID NO: 31317 - DNA, 447 bp, Homo sapiens; identical to SEQ ID NO: 11707
  chr18:30050267-30050714
  hypo

SEQ ID NO: 31318 - DNA, 68 bp, Homo sapiens; identical to SEQ ID NO: 11708
  chr18:30051018-30051086
  hypo

SEQ ID NO: 31319 - DNA, 532 bp, Homo sapiens; identical to SEQ ID NO: 11710
  chr18:30350056-30350588
  hypo

SEQ ID NO: 31320 - DNA, 988 bp, Homo sapiens; identical to SEQ ID NO: 11717
  chr18:31802368-31803356
  hypo

SEQ ID NO: 31321 - DNA, 1865 bp, Homo sapiens; identical to SEQ ID NO: 11724
  chr18:32556604-32558469
  hypo

SEQ ID NO: 31322 - DNA, 30 bp, Homo sapiens
  chr18:33078704-33078734
  hypo
cttcctatccctgccgcacacccccacctc

SEQ ID NO: 31323 - DNA, 409 bp, Homo sapiens; identical to SEQ ID NO: 11725
  chr18:33766780-33767189
  hypo

SEQ ID NO: 31324 - DNA, 31 bp, Homo sapiens
  chr18:34889651-34889682
  hypo
acgagcagaggtatgcgcgccctgggatgtc

SEQ ID NO: 31325 - DNA, 582 bp, Homo sapiens; identical to SEQ ID NO: 11731
  chr18:35144968-35145550
  hypo

SEQ ID NO: 31326 - DNA, 703 bp, Homo sapiens; identical to SEQ ID NO: 11733
  chr18:35146061-35146764
  hypo

SEQ ID NO: 31327 - DNA, 437 bp, Homo sapiens
  chr18:35249613-35250050
  hypo
cacggcttaacctcagcaaagcgtcagcaggcctttgcaggggtagggaatgcaggaccccgcagtacctacagacggagaggcaggcgctactcctggcacgtttcccgtgtgcgcaggtggcccaggggaaggggtgactgctcgccgttgctccgagcttgtctctgggccccggagggcagtgggaatgccaccctgagcagacgtgagactcacagggcatccccaggcgcactctaggcttcagtcgtgcacacgtacacatttactgagcctgtaccgtgtgccaagtgctggggattccgcaagcaagaaaacattcggagtctctgacttcacagagctaaaattcacacgggaggaggcggtcggcacataacagacaactagagaatgacgcgagttgagatggcgtttttgacagctcccttcca

SEQ ID NO: 31328 - DNA, 121 bp, Homo sapiens
  chr18:36298626-36298747
  hypo
tggcgggctgatcccagtgccggccggcggagcccacgcccacccggaacttgcgctggcccacagcgcatgtgcagcgccggttcccgcccacgcttatccctccacacttacccgcaag

SEQ ID NO: 31329 - DNA, 56 bp, Homo sapiens
  chr18:36889401-36889457
  hypo
ggctggtccaatcaaccgcccaagggctgacaagtgcgggcgcgtggcgcggaact

SEQ ID NO: 31330 - DNA, 121 bp, Homo sapiens
  chr18:36939329-36939450
  hypo
cagaagccagcggacaccctaccgaaccctgaggggtggaagtcagcacgggtctgcgatggcagcgatcagcagtggtgggcagcgagtgaaagctcagctccagccggttcaaacacgg

SEQ ID NO: 31331 - DNA, 18 bp, Homo sapiens
  chr18:37053945-37053963
  hypo
ttaaaaacaaaaaagaaa

SEQ ID NO: 31332 - DNA, 22 bp, Homo sapiens
  chr18:37154072-37154094
  hypo
cgtctcaaaaaaaaaaaaaaaa

SEQ ID NO: 31333 - DNA, 37 bp, Homo sapiens
  chr18:37198432-37198469
  hypo
tgggaactggggcaacgcgcagcgctcatgggccagc

SEQ ID NO: 31334 - DNA, 30 bp, Homo sapiens; identical to SEQ ID NO: 11736
  chr18:38242390-38242420
  hypo

SEQ ID NO: 31335 - DNA, 1667 bp, Homo sapiens; identical to SEQ ID NO: 11739
  chr18:42258978-42260645
  hypo

SEQ ID NO: 31336 - DNA, 68 bp, Homo sapiens; identical to SEQ ID NO: 11740
  chr18:42531891-42531959
  hypo

SEQ ID NO: 31337 - DNA, 30 bp, Homo sapiens
  chr18:43308141-43308171
  hypo
acaggagactcgggccgctcaggctctcaa

SEQ ID NO: 31338 - DNA, 30 bp, Homo sapiens
  chr18:43416003-43416033
  hypo
cagaaggaatgtcccgacctgtgattattc

SEQ ID NO: 31339 - DNA, 31 bp, Homo sapiens
  chr18:43605713-43605744
  hypo
tgtggacatatatccacgggcatctctgaga

SEQ ID NO: 31340 - DNA, 31 bp, Homo sapiens
  chr18:43627251-43627282
  hypo
tgtccagggttaggtgcggtggctcatacct

SEQ ID NO: 31341 - DNA, 13 bp, Homo sapiens
  chr18:43663650-43663663
  hypo
acttacaaagagc

SEQ ID NO: 31342 - DNA, 121 bp, Homo sapiens
  chr18:43767224-43767345
  hypo
gtgacagagcgagactctgtctcatgaaaaaacgaacaaacaaaaaatcagcagtagatgccaactataatgttttatatgataactgtctttttttttttgagacggagtcttgctctgt

SEQ ID NO: 31343 - DNA, 204 bp, Homo sapiens; identical to SEQ ID NO: 11742
  chr18:43913550-43913754
  hypo

SEQ ID NO: 31344 - DNA, 329 bp, Homo sapiens; identical to SEQ ID NO: 11743
  chr18:43914155-43914484
  hypo

SEQ ID NO: 31345 - DNA, 45 bp, Homo sapiens
  chr18:44010835-44010880
  hypo
cattaactctgttcctcgagttcattgtttaaaaattattcttta

SEQ ID NO: 31346 - DNA, 30 bp, Homo sapiens
  chr18:44259958-44259988
  hypo
agcaggagagggggcgccgcttgccgggca

SEQ ID NO: 31347 - DNA, 30 bp, Homo sapiens
  chr18:44260435-44260465
  hypo
gatagaacggccgccgccacttctccagct

SEQ ID NO: 31348 - DNA, 279 bp, Homo sapiens; identical to SEQ ID NO: 11744
  chr18:44336170-44336449
  hypo

SEQ ID NO: 31349 - DNA, 151 bp, Homo sapiens; identical to SEQ ID NO: 11745
  chr18:44337012-44337163
  hypo

SEQ ID NO: 31350 - DNA, 30 bp, Homo sapiens; identical to SEQ ID NO: 11748
  chr18:44581294-44581324
  hypo

SEQ ID NO: 31351 - DNA, 41 bp, Homo sapiens
  chr18:44701014-44701055
  hypo
gggggacagggtgagactccgtctcaaaaaaaaaaaaaaat

SEQ ID NO: 31352 - DNA, 31 bp, Homo sapiens
  chr18:45058416-45058447
  hypo
ggcattttggacatttcgtgggggggcttgt

SEQ ID NO: 31353 - DNA, 79 bp, Homo sapiens
  chr18:45353783-45353862
  hypo
attattacttggtggcaataacggttagaaaaaaagcacatccctctccctctcccgtctccccccgtctcccactttc

SEQ ID NO: 31354 - DNA, 23 bp, Homo sapiens
  chr18:45439574-45439597
  hypo
agccacagcgcccagcctgttac

SEQ ID NO: 31355 - DNA, 31 bp, Homo sapiens
  chr18:45443477-45443508
  hypo
gcctcctgggttcaagcgattccccttacag

SEQ ID NO: 31356 - DNA, 240 bp, Homo sapiens; identical to SEQ ID NO: 11758
  chr18:45687996-45688236
  hypo

SEQ ID NO: 31357 - DNA, 31 bp, Homo sapiens
  chr18:45854284-45854315
  hypo
agatattaagtgaggccgggcgtagtgactc

SEQ ID NO: 31358 - DNA, 31 bp, Homo sapiens
  chr18:45868799-45868830
  hypo
tgggggcaggcaggatcgggaggcagccagc

SEQ ID NO: 31359 - DNA, 155 bp, Homo sapiens
  chr18:45917049-45917204
  hypo
gtaaaatgagatgctgcgtcccagcatcgccaaggtgtggttccagccccagcgggccacagttctgccatccacatgcctatctcaaaagagattgcatgctaatccctccaggggcactaagagcctggtccccgtggcggctggagagggct

SEQ ID NO: 31360 - DNA, 1628 bp, Homo sapiens; identical to SEQ ID NO: 11759
  chr18:45934609-45936237
  hypo

SEQ ID NO: 31361 - DNA, 404 bp, Homo sapiens; identical to SEQ ID NO: 11760
  chr18:45936453-45936857
  hypo

SEQ ID NO: 31362 - DNA, 87 bp, Homo sapiens; identical to SEQ ID NO: 11763
  chr18:46066173-46066260
  hypo

SEQ ID NO: 31363 - DNA, 189 bp, Homo sapiens; identical to SEQ ID NO: 11765
  chr18:46067447-46067636
  hypo

SEQ ID NO: 31364 - DNA, 37 bp, Homo sapiens
  chr18:46501831-46501868
  hypo
accccagccccctcaccgaaaccgggcctgtcccctc

SEQ ID NO: 31365 - DNA, 225 bp, Homo sapiens
  chr18:46578115-46578340
  hypo
gggctgaggttccaggcgctgcccccgtccgtgctggctagtgaaggcctggtcccctccacagactgggttcccaaactgctgtctcccaagtgtgcactactggtcatggggggactgaaagagcgggtagagagagcagcgtgaacacacagccgttattggaaaacctgaacatgcagacagcactgcgcattccccgaaccatagcgccagctcctctcc

SEQ ID NO: 31366 - DNA, 31 bp, Homo sapiens
  chr18:46624147-46624178
  hypo
ccttgcatttatatttcgtttatagagcagt

SEQ ID NO: 31367 - DNA, 93 bp, Homo sapiens
  chr18:47019806-47019899
  hypo
tctttgtcttctcctccgggttcctcttttatgttgcatggtgacaagagtaacagacaatgggccgggcgcggtggctcacgcctgtaatcc

SEQ ID NO: 31368 - DNA, 291 bp, Homo sapiens; identical to SEQ ID NO: 11770
  chr18:47721048-47721339
  hypo

SEQ ID NO: 31369 - DNA, 31 bp, Homo sapiens; identical to SEQ ID NO: 11771
  chr18:47792761-47792792
  hypo

SEQ ID NO: 31370 - DNA, 89 bp, Homo sapiens
  chr18:47812103-47812192
  hypo
tctgtccatgctcacccgggcccgcagctggcactggcgcagccggcacttctgccggatcttgttggggcccccgaacttcttcatgt

SEQ ID NO: 31371 - DNA, 271 bp, Homo sapiens
  chr18:48190330-48190601
  hypo
ggctgagaagggtgactgcatcgccagtgtctatgggtatgacctcggtgggcgctttgttgacttccaacccctgggcttcggtgtcaatggtttggtgctgtcggccgtggacagccgggcctgccggaaggtcgctgtgaagaagattgccctgagcgatgcccgcagcatgaagcacgcgctccgagagatcaagatcattcggcgcctggaccacgacaacatcgtcaaagtgtacgaggtgctcggtcccaagggcactgacctg

SEQ ID NO: 31372 - DNA, 29 bp, Homo sapiens
  chr18:48403659-48403688
  hypo
acaattgtatataattatggtcgggcgcg

SEQ ID NO: 31373 - DNA, 94 bp, Homo sapiens
  chr18:48493695-48493789
  hypo
tgggattacaggtgtgagccacggcgcccggccagctgctggatattttgaccacctcaagtacgctgagcacgaaatcagtgcatctggcagt

SEQ ID NO: 31374 - DNA, 80 bp, Homo sapiens; identical to SEQ ID NO: 11773
  chr18:48494352-48494432
  hypo

SEQ ID NO: 31375 - DNA, 86 bp, Homo sapiens
  chr18:48664887-48664973
  hypo
ggattacaggcgtgagccactgcacccggccctggaagaatgatttaagaatcatttgtgatggcggtcaaatgtttattttgaaa

SEQ ID NO: 31376 - DNA, 39 bp, Homo sapiens
  chr18:48725412-48725451
  hypo
ttaagaaaatgaatccccgtttcctcctccctagacact

SEQ ID NO: 31377 - DNA, 32 bp, Homo sapiens
  chr18:53106925-53106957
  hypo
ggttattcaaggccacttaaacgatcattttt

SEQ ID NO: 31378 - DNA, 31 bp, Homo sapiens
  chr18:53107196-53107227
  hypo
tgccctcctcggcctcccaaagagctgagat

SEQ ID NO: 31379 - DNA, 1436 bp, Homo sapiens; identical to SEQ ID NO: 11782
  chr18:53254848-53256284
  hypo

SEQ ID NO: 31380 - DNA, 392 bp, Homo sapiens; identical to SEQ ID NO: 11783
  chr18:53256997-53257389
  hypo

SEQ ID NO: 31381 - DNA, 30 bp, Homo sapiens; identical to SEQ ID NO: 11784
  chr18:53257771-53257801
  hypo

SEQ ID NO: 31382 - DNA, 22 bp, Homo sapiens
  chr18:54266812-54266834
  hypo
agacagtctcactctgttgccc

SEQ ID NO: 31383 - DNA, 31 bp, Homo sapiens
  chr18:54306859-54306890
  hypo
ggaatttggattttgtcgggaagagaatgga

SEQ ID NO: 31384 - DNA, 164 bp, Homo sapiens
  chr18:54398592-54398756
  hypo
gtgaatatatttttctcgcaggtgcattggatcgttgtgtgatggggataacagcagttgagattctaaacgcttgtgatgaagctgttcctgctgctgttgattcacttagtcatccagcagtcaacctaaaacaagctatgacgagacgtagtcttgctgct

SEQ ID NO: 31385 - DNA, 158 bp, Homo sapiens
  chr18:54483259-54483417
  hypo
agctggagtcacatcagaagccgcgcagactatcaccacggctcctgatgcctcagggcctgaagcaaaagtccaggaggaagagcatgaccttgttgacgatgacatcaccactggtaagcacagacatctttaacgtctgattggagctttgtttg

SEQ ID NO: 31386 - DNA, 30 bp, Homo sapiens
  chr18:54581775-54581805
  hypo
tccttccatctctttcgctcatgccattca

SEQ ID NO: 31387 - DNA, 31 bp, Homo sapiens
  chr18:54609486-54609517
  hypo
ccatgacacaaaatggcgaggtgttcttttg

SEQ ID NO: 31388 - DNA, 30 bp, Homo sapiens; identical to SEQ ID NO: 11789
  chr18:54724442-54724472
  hypo

SEQ ID NO: 31389 - DNA, 31 bp, Homo sapiens
  chr18:55138397-55138428
  hypo
tccctggcttgatgagcgttgctgcacgact

SEQ ID NO: 31390 - DNA, 30 bp, Homo sapiens
  chr18:55315833-55315863
  hypo
ctggtgcgagaaggcgtaggccgagcgccg

SEQ ID NO: 31391 - DNA, 134 bp, Homo sapiens
  chr18:55329688-55329822
  hypo
ggcacagatacactaatgatacgtaccaaccaagaaccagtgatgattaaggcacggtttccaccgggtggaaaaaaagattcctgcacaggaggtgcaaactttgcgtagacgccacctctattcctctggtt

SEQ ID NO: 31392 - DNA, 28 bp, Homo sapiens
  chr18:55366664-55366692
  hypo
ttgttgttaagacaggagtctcggccgg

SEQ ID NO: 31393 - DNA, 30 bp, Homo sapiens
  chr18:55400152-55400182
  hypo
tctgctaacactaacgtcctgagcctttgt

SEQ ID NO: 31394 - DNA, 45 bp, Homo sapiens
  chr18:55427026-55427071
  hypo
ggagacagagcgagactccgtctcgggaaagaaaaaaaaaaaaaa

SEQ ID NO: 31395 - DNA, 177 bp, Homo sapiens
  chr18:55850817-55850994
  hypo
gcttttcatgttgcatcttaccgagttgattgagtattcacttcgaagctccatgctgcacgcatgggcctgtaaatagctttttcgtgcacttgtgggtgtcatttcagatcgcttcatcggatttcagttacccaagtttttacttggttcaccgtaagtttgcaaaaaagactt

SEQ ID NO: 31396 - DNA, 31 bp, Homo sapiens
  chr18:56277829-56277860
  hypo
gcatccctgaagaaggcgtgcagaggagaga

SEQ ID NO: 31397 - DNA, 30 bp, Homo sapiens
  chr18:56335503-56335533
  hypo
atatgtgttcatgacggaatgaatgattga

SEQ ID NO: 31398 - DNA, 40 bp, Homo sapiens
  chr18:56483917-56483957
  hypo
taagtttgaaattccccggccgggcgcggtggctcacgcc

SEQ ID NO: 31399 - DNA, 44 bp, Homo sapiens
  chr18:56815805-56815849
  hypo
actagtgcttatgcatcaactcgtgtgaccctcccacctgtgct

SEQ ID NO: 31400 - DNA, 452 bp, Homo sapiens; identical to SEQ ID NO: 11810
  chr18:57363597-57364049
  hypo

SEQ ID NO: 31401 - DNA, 82 bp, Homo sapiens; identical to SEQ ID NO: 11811
  chr18:57364448-57364530
  hypo

SEQ ID NO: 31402 - DNA, 30 bp, Homo sapiens; identical to SEQ ID NO: 11812
  chr18:57364857-57364887
  hypo

SEQ ID NO: 31403 - DNA, 16 bp, Homo sapiens
  chr18:59001327-59001343
  hypo
aggtggaggacgtggc

SEQ ID NO: 31404 - DNA, 30 bp, Homo sapiens
  chr18:59482707-59482737
  hypo
tttgtttgaatctaccgcatttagagaagg

SEQ ID NO: 31405 - DNA, 499 bp, Homo sapiens
  chr18:59483203-59483702
  hypo
tggagcttttcaccacgccccgcctgtcctgctcctcctccaccgcctcctggggagccccaccttgcagaggctgctgttcagcagggatggtcaccacggtgacggacttctgctggctcccgggcagcaggcggcagcccatgtctccgggcagcagcgcacgctccttggagatgggcaggggcagcatgtagcacccattgctgggaagtttgatgaagaccggggtgtgttcggaagtgtgtggaatggcgatgacagccaggacctccgggtcgtccgggagctgcgacacggagaagccgggaggcagcttggtgacaccgcggcaccaggggcaccgcacatccttctggctggtcctcatctgctgcaggcacactgaacagcaggtgtgcttgcagtccagcaacttgggcctgcgccgggggctgtagtaattgaaacagatctgacattccagcagagagtcctgggacagcgtctccatggtgga

SEQ ID NO: 31406 - DNA, 40 bp, Homo sapiens
  chr18:59975662-59975702
  hypo
agagctttggactgtgcgctgtggctcacgcctgtaatct

SEQ ID NO: 31407 - DNA, 31 bp, Homo sapiens; identical to SEQ ID NO: 11818
  chr18:59992690-59992721
  hypo

SEQ ID NO: 31408 - DNA, 31 bp, Homo sapiens
  chr18:60010358-60010389
  hypo
gaaaaaccacatctttcgactctactgtaag

SEQ ID NO: 31409 - DNA, 121 bp, Homo sapiens
  chr18:60110133-60110254
  hypo
gtctggcggcaccaccgtgtaccctggcatcgccgacaggatgcaggagatcaccggcctggctccaagcacgatgaagatcaagatcattgctccttctgagcgcaaatactccatgtgg

SEQ ID NO: 31410 - DNA, 165 bp, Homo sapiens
  chr18:60117013-60117178
  hypo
tgagaacctaagatggcgatgcttttatccaaggaggacttgggtttgcttctcctgagagccgggagcactatcccagccgaacgagagtctccctttctcttccccactctgtttcactgcagcccatggcttagcccaatcaatgcacggctaatcctggca

SEQ ID NO: 31411 - DNA, 31 bp, Homo sapiens
  chr18:60120804-60120835
  hypo
acttactcaaaaatgtcgctcctgtgatcat

SEQ ID NO: 31412 - DNA, 32 bp, Homo sapiens
  chr18:60127357-60127389
  hypo
tttaaaaaatgttggccgggcctggtggctca

SEQ ID NO: 31413 - DNA, 35 bp, Homo sapiens; identical to SEQ ID NO: 11819
  chr18:60189580-60189615
  hypo

SEQ ID NO: 31414 - DNA, 1009 bp, Homo sapiens; identical to SEQ ID NO: 11820
  chr18:60190636-60191645
  hypo

SEQ ID NO: 31415 - DNA, 30 bp, Homo sapiens; identical to SEQ ID NO: 11821
  chr18:60194189-60194219
  hypo

SEQ ID NO: 31416 - DNA, 84 bp, Homo sapiens
  chr18:60216458-60216542
  hypo
aaaaaaagaagggtagattcagacctggtggtcagagggcatgattcccacagcgggtgtgtagaatgccgacagagtcttcta

SEQ ID NO: 31417 - DNA, 72 bp, Homo sapiens
  chr18:60229150-60229222
  hypo
cgcttttctcttgctccgtcttccaagactccaaatccttgtatgttagatttttcaccatgtcccgtggtt

SEQ ID NO: 31418 - DNA, 137 bp, Homo sapiens
  chr18:60234751-60234888
  hypo
ctggctcctgccaggacgcagtcagcgccgtcagctgtctgtgttgttggagtgtcttttctgttaaaacccaagctttctgaaagtctgtcttctgaagaggtgcatattacctcatatagagcgttaagaatgct

SEQ ID NO: 31419 - DNA, 1 bp, Homo sapiens
  chr18:60263660-60263661
  hypo
c

SEQ ID NO: 31420 - DNA, 30 bp, Homo sapiens; identical to SEQ ID NO: 11823
  chr18:60263885-60263915
  hypo

SEQ ID NO: 31421 - DNA, 31 bp, Homo sapiens
  chr18:60273153-60273184
  hypo
tggcctggcgttcctgcgctactcagtccct

SEQ ID NO: 31422 - DNA, 1213 bp, Homo sapiens; identical to SEQ ID NO: 11824
  chr18:60383091-60384304
  hypo

SEQ ID NO: 31423 - DNA, 31 bp, Homo sapiens
  chr18:60523277-60523308
  hypo
taggcccttcttactgcgagtttcccatttt

SEQ ID NO: 31424 - DNA, 110 bp, Homo sapiens
  chr18:60609800-60609910
  hypo
tttactttaatttctaattttcggtgagcggtgacattatatctagctttgagtgaatctgcgtgctgagcctgccgtgaggatttaccgtgtttccatttcattggctt

SEQ ID NO: 31425 - DNA, 152 bp, Homo sapiens
  chr18:60645389-60645541
  hypo
tctgtggtcctacagtcgagacagtcgagggacccgcagggaacctgcacagttgccgcaggtgctctgtattaactgtctgtctgcaaacccttgttcttccaggatggcaaggtgaacggagtgactgagtccacgcgcatcctgggcta

SEQ ID NO: 31426 - DNA, 175 bp, Homo sapiens
  chr18:60645978-60646153
  hypo
tggggtcaacagcctccgatgagcccccgcccggagccctaagcgagaacagccctgcctaccccagtgagcagcgctgcatgctccaccccatctgtctgtccaactccttccagcgccagctatccagcgccacgttctctagcgccttctccgacaacggccttgacagtga

SEQ ID NO: 31427 - DNA, 31 bp, Homo sapiens
  chr18:61261736-61261767
  hypo
gcccttagtttattttcgtgatgtgcttaca

SEQ ID NO: 31428 - DNA, 207 bp, Homo sapiens; identical to SEQ ID NO: 11828
  chr18:63417590-63417797
  hypo

SEQ ID NO: 31429 - DNA, 112 bp, Homo sapiens
  chr18:66360548-66360660
  hypo
tacctgctaccaagttcgtggggtgggagccccacgctcccgggtatagctgaagctgctcaggagtggttctggaccctggcatccctgagctctccggggcctggaaagc

SEQ ID NO: 31430 - DNA, 420 bp, Homo sapiens; identical to SEQ ID NO: 11830
  chr18:67067488-67067908
  hypo

SEQ ID NO: 31431 - DNA, 783 bp, Homo sapiens; identical to SEQ ID NO: 11831
  chr18:67068592-67069375
  hypo

SEQ ID NO: 31432 - DNA, 83 bp, Homo sapiens; identical to SEQ ID NO: 11832
  chr18:67956848-67956931
  hypo

SEQ ID NO: 31433 - DNA, 31 bp, Homo sapiens
  chr18:67991163-67991194
  hypo
tggacactggcccacacgttagagtttatac

SEQ ID NO: 31434 - DNA, 110 bp, Homo sapiens
  chr18:67991979-67992089
  hypo
gtagtacaacaaccatcgctagccagtgactttggaaaagatgattccttatttggtagctgctatggtaaagatatggccagctgcgatatcaacggtgaagatgaaaa

SEQ ID NO: 31435 - DNA, 60 bp, Homo sapiens
  chr18:67992290-67992350
  hypo
ccatcactacagtcccgcgccgtggcctctgcggcccacaaactccgaggagacctgcat

SEQ ID NO: 31436 - DNA, 98 bp, Homo sapiens
  chr18:67992599-67992697
  hypo
tcctttggaaggatcacggagctattgtctggacagctcttctcccatggaagtctctgcggttcctcctcaagtgggagggcgcgctttccccgagg

SEQ ID NO: 31437 - DNA, 41 bp, Homo sapiens
  chr18:68042711-68042752
  hypo
tgctgggattacaggtgtgagccaccgcgtctgacctctgg

SEQ ID NO: 31438 - DNA, 46 bp, Homo sapiens
  chr18:68053093-68053139
  hypo
gttaggtgagataatacgattcacttaaagttattttattattatt

SEQ ID NO: 31439 - DNA, 108 bp, Homo sapiens; identical to SEQ ID NO: 11836
  chr18:70535446-70535554
  hypo

SEQ ID NO: 31440 - DNA, 365 bp, Homo sapiens; identical to SEQ ID NO: 11837
  chr18:70535575-70535940
  hypo

SEQ ID NO: 31441 - DNA, 182 bp, Homo sapiens
  chr18:71844278-71844460
  hypo
agagcccccgctgcacggccgctctccctcgcagcctcgcctctcaggggtgcgcccatctgttcacacgacatctgtggtaatttaataaacgtgggcacacagaaggcggctccgctttgggaagacatttaacctgctgcagaggtaaattatttgactctacccggtgagagcgaaga

SEQ ID NO: 31442 - DNA, 100 bp, Homo sapiens
  chr18:71879692-71879792
  hypo
cccagggtcatcctggcgacccaatcaactcctaggatccaattcactctcccacccacacatagctcccatcgccacaacatggcgggctgccccatgc

SEQ ID NO: 31443 - DNA, 160 bp, Homo sapiens
  chr18:71889088-71889248
  hypo
aagacgggaattcagcgcgccatgcaggggactcactaggccccaggtgggaaccccatcccctcctcaggcgtttttgcttcatgcttatatccgtgtcatcatcgggcctcttatgctggcattttgtttgtgtgttctctctcgcttaacaaactca

SEQ ID NO: 31444 - DNA, 31 bp, Homo sapiens
  chr18:71904667-71904698
  hypo
ctcttctcgtccactgcgcacctcctggcct

SEQ ID NO: 31445 - DNA, 31 bp, Homo sapiens
  chr18:71983236-71983267
  hypo
ctgctggaggccctgccgcccacccgccctt

SEQ ID NO: 31446 - DNA, 31 bp, Homo sapiens
  chr18:72171141-72171172
  hypo
cacgcagccacactgccgctgggacaaatga

SEQ ID NO: 31447 - DNA, 31 bp, Homo sapiens
  chr18:72171538-72171569
  hypo
tgggacaaatgaggggcgtcaggccatacac

SEQ ID NO: 31448 - DNA, 113 bp, Homo sapiens
  chr18:72190121-72190234
  hypo
ccctggaagcaagtgtgaggtcgtcgcctctggaagtgctagcggagggtgatctcccggaggaaatcagagtggtgttctactagaaggccgatgactcctgggtaaagtgc

SEQ ID NO: 31449 - DNA, 253 bp, Homo sapiens
  chr18:72226537-72226790
  hypo
ctgcttgctcttcctcctagacgctgaaggagtgggtggccatcgagagcgactctgtccagcctgtgcctcgcttcagacaagagctcttcagaatgatggccgtggctgcggacacgctgcagcgcctgggggcccgtgtggcctcggtggacatgggtcctcagcaggtgctgtacgattccctcccactgagggaggtgctacttctagacgtcagtcatgccttcccgggggtggcaagggagaggct

SEQ ID NO: 31450 - DNA, 63 bp, Homo sapiens
  chr18:72344371-72344434
  hypo
cacagatgaaaacacacgatgcagaatcagtgctgaaacacctggaagcgtgcagcagtgtgc

SEQ ID NO: 31451 - DNA, 31 bp, Homo sapiens
  chr18:72347397-72347428
  hypo
agtgtggaggagcttccggagggaggggcca

SEQ ID NO: 31452 - DNA, 31 bp, Homo sapiens
  chr18:72487985-72488016
  hypo
gagcttcgggcaggaacgcagaatcaaacca

SEQ ID NO: 31453 - DNA, 30 bp, Homo sapiens
  chr18:72547176-72547206
  hypo
atctgaccacaccatcggagtgtgggagac

SEQ ID NO: 31454 - DNA, 31 bp, Homo sapiens
  chr18:72632026-72632057
  hypo
acttagaagcaccttgcgtgacagaacttaa

SEQ ID NO: 31455 - DNA, 127 bp, Homo sapiens
  chr18:72741504-72741631
  hypo
ccaccttcattcagggcggagtgtgtgtgcgtgcgtgtgtgtgcgtatgtgtgcatgggtgtgtgtgcctgggtgtgcgtgggtgtgcgtgcgtgtgcatgcgcagggcatgcgcaggggcaggaag

SEQ ID NO: 31456 - DNA, 241 bp, Homo sapiens
  chr18:72764592-72764833
  hypo
ccaagtggactcaggcgtcagccgcctgatagagctcgtttcttaggtacctgagtttggattacacataatgaattcagttttccacttgttcacgtcaccattcccacacaaagtgccttctgggggtgcctgtgcggcacccggtacacagctttgctactgctttcctgcacgtgcacccgggtggaaggacacatgtgcgtggatgtcactccctgatcagcgttcggacccatac

SEQ ID NO: 31457 - DNA, 31 bp, Homo sapiens
  chr18:72896218-72896249
  hypo
caggggaggttgaggacgtccctgcactccc

SEQ ID NO: 31458 - DNA, 31 bp, Homo sapiens; identical to SEQ ID NO: 11839
  chr18:72921090-72921121
  hypo

SEQ ID NO: 31459 - DNA, 30 bp, Homo sapiens
  chr18:72960896-72960926
  hypo
ggcgagccacctccgcgtgggaggaggccc

SEQ ID NO: 31460 - DNA, 31 bp, Homo sapiens
  chr18:73424173-73424204
  hypo
actctcagatcccaaacggctgctgcatggc

SEQ ID NO: 31461 - DNA, 31 bp, Homo sapiens
  chr18:74058618-74058649
  hypo
actgactagtcagggccgggccggtggggca

SEQ ID NO: 31462 - DNA, 30 bp, Homo sapiens
  chr18:74062356-74062386
  hypo
tcctaagtggtcaccgaaacgcactttcag

SEQ ID NO: 31463 - DNA, 116 bp, Homo sapiens
  chr18:74069281-74069397
  hypo
acccagcgcagagtggcgtccccagcgcagagtggcgtccccagcgcagagtggcgcacccagcgcagagtggcgtacccagcggagagtggcgtacccagcggagagtggcgtac

SEQ ID NO: 31464 - DNA, 281 bp, Homo sapiens
  chr18:74083726-74084007
  hypo
gcaaggatgcataaattacagcgaattaaaaaccactccctgggacaggaggtgcccgccaggcagcacgtcgggctgtgcagctccgagcaactgcaggctgggcacagccatcacccggctctgtcaagcagcacatccagcaaatcagagtgacaccggcgtgacagagacgaggctcatggaaaataggaagtgagcgggaccagagcccaccgtgacccggccgcgatcctgggagacccacgcagagtgagtgcggccacagggtggccccacct

SEQ ID NO: 31465 - DNA, 897 bp, Homo sapiens
  chr18:74090940-74091837
  hypo
ttgatggagtgtaggacgggggggcgccccagccacgccgggctgggcctgcaaggccgcgtcgcccctggaccccgcagcacaggtggccagagtcctcagctcctgggctgccttcgaggggggctcgcggggaggtagaggaggagcgcccccttcgccctttgcaggaggtggaccctgaggctgagcactgaatttggctttcagggagtccggggcactgtgcttatttgtgggggcaaagccagcccccgctggggggaccccaaacttctccacaggcttgctattggccgagggctgcgcgccagcccgggcgatgacggtgggcgtaggggtggcgctcctgctgaagcccccgccacccggggcaggcaccggtttggagctagcctcctgcctgggcttggccaggggcccctgtgtggccgcgccatgtggctcctggccgtgacaaggtttggtctgtcgatacccgtcagggccgggcgcccacagagcgcagggacctccggaatggctctccttattcttaggcatgctagcggcttttgtgaccactcccaggggagaagagccacttttggaccccggcatcccccctggcacctgagtgcgggtgaaccgagcaaggagcaaaggctggcattctttgccaccgagggcaggcggggggcccgtgcgtccgctccgggaaaggaaaaccaaattgcttctgatgcttttgtaaccattgggctgaatccacgggggagccacggagttgcagctgacgcggtgccagatgcgtttgtgcatccacaggacctcggggtagtaggtcttgtggctgcagtaaggacacgggtgaacgactaaagccgcctgcagggaggaggccgtctccttattgct

SEQ ID NO: 31466 - DNA, 31 bp, Homo sapiens
  chr18:74092348-74092379
  hypo
agccatctgtcttcagcgggagaagccaccc

SEQ ID NO: 31467 - DNA, 31 bp, Homo sapiens
  chr18:74094300-74094331
  hypo
ctcatttctaaatattcgaaaaaggcaacat

SEQ ID NO: 31468 - DNA, 30 bp, Homo sapiens
  chr18:74096592-74096622
  hypo
tggcttttgatgtttcggtggccctgatcc

SEQ ID NO: 31469 - DNA, 553 bp, Homo sapiens
  chr18:74096832-74097385
  hypo
ctgatttgagcatggcgtggccctgcatagatggctgcctctaaccctgaccgcagtgccgagggcacacaccagagagggaaggctggctcagaaaggcctggcagcggccctgtgcagagggagcaggatctccaacactcaccccatgctctccgggtgcacggaagcacgtgccaggaggaggcagccgggtccgagcagccctagagaaggcgcacgtcgctcccaaccccacgagtgtgcacacgcgtgccacagacggtgactatggctgctctgtcctcggctcaaacacaccaggggctcccgggttcctttctaagcaggaccttcctagatgtgtcttggaaacacaaacatggattaggtcttgggtgacttcactgcgtcccaagctggccctggcctggctggtgccgcacaccgccgacaagcatgtttcacacggggcccagggagtggcagacttgcactgtctgaagtccctgaggcaacatcttcaacacacacaaccgccctcaaaagcacagaaatgcggtgagggcacttt

SEQ ID NO: 31470 - DNA, 30 bp, Homo sapiens
  chr18:74113524-74113554
  hypo
aggccatctccgaaacgccctgcagctgct

SEQ ID NO: 31471 - DNA, 300 bp, Homo sapiens
  chr18:74113797-74114097
  hypo
ccaaccacacccccgcgccgcacccctccactactgtttataggctctcaagagggacagggaaaaccagtattgtttgagtgccaactctgcataaacaatttccacagaatgactgcacatgcatgtgcgtgcctatgtgcatgtgtgtacgcgcgtgtgtacacgtttgtgtgtacacgtgcgcgcatgtgtgcacgtgaacgtgaccagtggtctctgcatcccacagggaggggagggcttctctgaaaagaaattgtatatgcacaagccttagccccgcgccttctatttgct

SEQ ID NO: 31472 - DNA, 107 bp, Homo sapiens
  chr18:74120284-74120391
  hypo
gctggtgtggacagcaagctccgaggggctgcggcgtgcgtctctcctgacagcgacacacttgagaccctccgggagttccagccggggtgaaaccagtcacaagg

SEQ ID NO: 31473 - DNA, 260 bp, Homo sapiens
  chr18:74133242-74133502
  hypo
ggagcagggcagctgaggctccgaggctgctgtcctggctgccagaggtatggcgggctaggccttaggtgatggagacgctgtgctggcagttgctccagggcttcgagctttaaggaacaagtcccacgtcctaactggtatcctggtccagtccgtgaggccagactttgtctcagagctggaaagcagagcccgggctgagcccccgtgagttctgtgtttgcaaagctgccaccgggtccctccccctgctctcc

SEQ ID NO: 31474 - DNA, 102 bp, Homo sapiens
  chr18:74145154-74145256
  hypo
ccagtaaaaagcaccactgaccgctgagtactcccgtgcaaaactacccactcccgaatacaacatttctccatggagttcgctgtcaactctgaagaacag

SEQ ID NO: 31475 - DNA, 306 bp, Homo sapiens
  chr18:74145828-74146134
  hypo
aggcatcatctcacagtgccacgtccccagctccacaggggtgcacaccgctccatggcatcacacctctcctggccgggaaaccccaccgcgaccgccagcaccttttctcacaggtgcaccaagccctcggcaacgccttacccaacccagcacctgctgctctggccgttgctgtccgttcttccagctggtcaggaactgacggctcggagtggaatcagacctccctctttaccaggagcgatcctgcctggtccatgagatgccctatctcacgggaacggggtgcaagaaccaaattca

SEQ ID NO: 31476 - DNA, 124 bp, Homo sapiens
  chr18:74148444-74148568
  hypo
ggcttcagagagagctttgcccgtgttgcgtccaagccaggacaccgctgagtccccgagagactcagcatcgcgagtggattcagctgcaaggtcagtgcgcgaaggtattgtgagagctcct

SEQ ID NO: 31477 - DNA, 676 bp, Homo sapiens
  chr18:74154238-74154914
  hypo
tgaaggcctggccacacacctcgcacgggaactccccggggctcagctcgggcttgccgttctccacgcaggcctcgccgctgccgggcccctgcgcggtgatgtggtccctctcgatgtggctcagcagcgactcctcccgcagcgtcgcgtagctgcacagcctgcacttgaacggcttgtgcgcctggtgcacgtgcagctccaggtccttcttacgctcgaactggctcttgcagaaggagcactggaccgctgccttggcctcccccggggcgcatgcggacccctctgcccccttcttgctgctccgcagcaggactctgccgctgtcggcctgcgaggccccgttcaggaccctggcgccgtcggcctgcgaggccccgttcagcagccggttgcaggccgaggcgctcttggtggggctggcgcaggcgtccaggccctcggaggcgcgcatctcacccagcggcgcctcgcccgcctccggctcgtgtccctgaatcagagtccccgtgcggtggctccggatgtgaatcttcaggttgcccttctgggaagcccggtggtcgcagtagggacacttgtagggcttctcgcccgtgtgcttgcgcatgtgctgcgaaagcgagctctggaaggggaagctcttgccgcagatgcagcaggtgtggca

SEQ ID NO: 31478 - DNA, 186 bp, Homo sapiens
  chr18:74159309-74159495
  hypo
ttatcctggtccctagtggggcgtgcctcacgtaggagcagcgccgtgtgataaagtgctacctacctcagttccagccgcagacatttccgtcctgggctgctctattccactttctcaaacgcacgccaaatacaagttgttccaactctccctgtaacacacgggcctggagataaccagcct

SEQ ID NO: 31479 - DNA, 31 bp, Homo sapiens
  chr18:74168121-74168152
  hypo
tgctcactttagctcacgctcctggcctgac

SEQ ID NO: 31480 - DNA, 31 bp, Homo sapiens
  chr18:74170657-74170688
  hypo
gtgcctcaccgtcgtgcgtgtgcatgcctgt

SEQ ID NO: 31481 - DNA, 44 bp, Homo sapiens
  chr18:74171438-74171482
  hypo
caggatttgtgccattcaggacgtggcggccgtgtgcaccccat

SEQ ID NO: 31482 - DNA, 20 bp, Homo sapiens
  chr18:74171505-74171525
  hypo
gaatgtattccagcactgtc

SEQ ID NO: 31483 - DNA, 124 bp, Homo sapiens
  chr18:74175493-74175617
  hypo
tgcgcatcacactgccgaccgccagaaatgccaggcccctgggtggctctcgctcttcttggggatgggtctgtggggcgccacctactcacctcctccgcagcatctgcgtttacaaaacaca

SEQ ID NO: 31484 - DNA, 189 bp, Homo sapiens
  chr18:74183547-74183736
  hypo
ctggtggaaacactccacacacgacagctgggcctcagccaggcaccagtcggggcctcactagatcccgtcacgctagatcctgtcacatcgctgaacgggagatcccagaattggagccgacttcccccaggagccgggtccagcatgcagtcatgctgccagtccgtggaggctaaacaccctaag

SEQ ID NO: 31485 - DNA, 24 bp, Homo sapiens
  chr18:74192763-74192787
  hypo
caccgcacccggctggtttttaca

SEQ ID NO: 31486 - DNA, 268 bp, Homo sapiens
  chr18:74195358-74195626
  hypo
catgatccactctgtctctgccgcctccctgcccactcctgtgggaagctccctctcggcatctgtccgtcatcagcatctgtccgtcatcggcatctgtctgtcacgggtcatctgccgcaccacactgagaacccatgagtgccaaatgtcccccgtcagctggcccacccgcatttcatcttcctggcttaagaaggtgagtctcagggcccagccgtctatcagaactgacctggtcttctccgacccctttccctatgatttt

SEQ ID NO: 31487 - DNA, 31 bp, Homo sapiens
  chr18:74274870-74274901
  hypo
ctagacgcacggcgtacgctccatacatatg

SEQ ID NO: 31488 - DNA, 232 bp, Homo sapiens
  chr18:74323560-74323792
  hypo
gtgtgtgtgtgcctgcgtgtgtacctgcgtgtctgcctgcgtgtgtgcttgcggtggcgggggcggtgtgcctgcgtgtgtgtgtgtgtgcctgcgtgtgtacctgcgtgtctgcctgcgtgtgtgcctgcggtggcgggggcggtgtgcctgcgtgtgtgcctgcgtgtgtgtgtgcgtgcgtgtctgcctgcgtgtgtgcctgcggtggagggggcgatgtgcctgcgtg

SEQ ID NO: 31489 - DNA, 549 bp, Homo sapiens
  chr18:74325583-74326132
  hypo
tgtaactgttattacagaaagcgtggagccaaacagatggcagaggcccaaggaagagcgcgctaaacccgaagtagatctgatttcacatcttgacttggcgattgtttagctgggtcagggtaaatgcctcactgttcctcgtctgtaaatgaacacgggtgctgaggttggggtgagcgcctcaccgagcctcagtttctcatctgtaaaatggacacctgtgcgcgcctcgcggcaggggctgctgagcacgcggatgggtcctctggaggctgggccgccaagaggcggcggctgcaccatctgatgctagagaacgagaaccgcagtgcgtgcccgacacaaagggaaggacaggggacactggaacaggggagacgacatggaagaaatctgggggagccaaaagccgccatgccgagaagggggtcggaggaggcgcgggagagaaaagcccagggctgtacactcgcatccctctgctgccggcccttcgggtacattcaaatactgggcatgagtcccgcagacaaggctttgaaagga

SEQ ID NO: 31490 - DNA, 259 bp, Homo sapiens
  chr18:74501039-74501298
  hypo
acctgggaacccagccacccacgtgcccctccaggcccggacctgcctctcagcgcccagagctgcccctgcagtgccccgtgttccctccccagccacgcttgcggttggcgctccccacggtcccgacggggctttctcatgggatccatcaatgcgcagtttagacaccccaggctctcccgccctacacggagatgagaaaaaggttgatagaataaattacattaggccgggtgaggtggctcacgcctgtaat

SEQ ID NO: 31491 - DNA, 30 bp, Homo sapiens
  chr18:74518063-74518093
  hypo
cagacatgagccgccgcgcctggccaacag

SEQ ID NO: 31492 - DNA, 132 bp, Homo sapiens
  chr18:74570065-74570197
  hypo
atctacacataataatcgggtagtaagtttttggttctgtgttgttgcaactagcatatgcgcagtttttaaaaaaaaatcacccttatatcatttattcgttttcatagtatgtagcgatggcatattcac

SEQ ID NO: 31493 - DNA, 70 bp, Homo sapiens
  chr18:74592527-74592597
  hypo
aaagaacaggcttttccgaagttgtatctatttatgttgacagaggtggaaaaagcgttttattctttct

SEQ ID NO: 31494 - DNA, 123 bp, Homo sapiens
  chr18:74625736-74625859
  hypo
agccacctgaagcagcatgtgcggtcgcacaccggggaaaagccctacaagtgcaagctctgtggacgcggctttgtttcctctggggtcctcaagtcccacgagaagacacacacaggtcac

SEQ ID NO: 31495 - DNA, 194 bp, Homo sapiens
  chr18:74631682-74631876
  hypo
taggttttcttcattacgattttgatcccttttccttgattttgtgtagacatttgtatggaggaagaggaagaacattctgacagaaatgcatcacggaagtctcgtcctgaggtcatcactttcacggaggaggagacagcccagttagccaagatccggccgcaggagagcgccacggtgtcagagaaggt

SEQ ID NO: 31496 - DNA, 31 bp, Homo sapiens
  chr18:74633614-74633645
  hypo
caaaatgctaccaaggcgacataaagtgcta

SEQ ID NO: 31497 - DNA, 31 bp, Homo sapiens
  chr18:74670146-74670177
  hypo
attaactacagctgatcgcaaacttatttga

SEQ ID NO: 31498 - DNA, 627 bp, Homo sapiens
  chr18:74728366-74728993
  hypo
gactccaggaaaaaacgagcataacccagtgttgaaccccagcgtgtgggctgcagaggcaacatcagtcatcaagtccgcaagcacacaccaccagagaccctgagaatgtggctctctttctgcaacgcccatgtccaggcacccttagagatccagaattcagcatgtccttacattcctgagccacaccccggccaccatcccttgtgaggaaaagagggggtgagttaaacgaaaacgtcctaagcagccactcaggcccacactcttgggctcatatgcattctccagcacggaacgagaccttagacagcaagaggctacgtgccagttcttcctctaatggctgagttcacctactgatttctcctttgctttttccatttaaactaaaactcctctactcctcagagctcaccttgccagagccccgcttgggcgcacccctgtcaccgccaaagaagcgcccgatggagtcaaggatgcccgtgtctctgtgccttgggaggaagccatgcctggcatggtccatggtacttgctgtggccaggtacttggatccgtgcctctgggagggtctcttctgtgacgccatcacatccaggctctcggaggtggctgcac

SEQ ID NO: 31499 - DNA, 68 bp, Homo sapiens
  chr18:74729466-74729534
  hypo
gcacccaggcttcccgatgaagtcatctgagcatgcagagcagccacatcagcgtttcttcccgggtg

SEQ ID NO: 31500 - DNA, 25 bp, Homo sapiens
  chr18:74733724-74733749
  hypo
caccgtgcccagcctctacttttaa

SEQ ID NO: 31501 - DNA, 30 bp, Homo sapiens
  chr18:74736654-74736684
  hypo
ggctgaggccagggccggaggtctgggcag

SEQ ID NO: 31502 - DNA, 1487 bp, Homo sapiens
  chr18:74736903-74738390
  hypo
tccacccacagcacccgcagagagtggcagagagggcattcctgagcagattgcaggagttttgggaggtgcatgtgtgcattctcgtaactctccgaggcgggtggttttagtagcccttttattcataccagaaactgagacttagcaaagttaaggtgggattgatggaggagctgccgttcactcctgcctaaactccctccgtatgttctagaaacgcaggcgatcccccacctctagctgtctgacaccagcccttctccagcccaaagtggctttcactgcagccaggcttttcctctcagggtaaaattgaactgcagataatcgatggctgacgcatctgtggctagcagctgcttcacggagggctgaccaggagagacccagaggctttctgatctgtcgggagccaagagctgagccagggcccccgcctgcagccacagggacctcgagtgcactcagcggtcttggtgcaccatagccacctggacatcgatacgttaatgactgttaaacatgaacaaaagccgagtcccacactccaggacattcaacacccacccgacagtctgtccgagtgttacctccaacagtatgaagctcaccgtgcaacggctccaggcttgtttaggaaactgtcccactctcatcttgctctaatcagaacatggcaggaatcaaatatccatacctgactgtctccagtagaatggtgatgacagagcggacactgtcctctattgaaatacttttttttttttttttttttacctagagcatgtttctcgtgctccattcccctgcatccgtggaaatcacatcgcacaagtaacttccatcaaaaccagcacgtgtgagagacaaacatctgggttcccaggcacaccccacaccctgagtaaaccaggacggacaggccgaggttccgctgctgcctttctggcacacgcaggggagcagtgggcagcgggttactccctctccgaaaaaccgtccttctccccatgccctgcggcaccgtgagtgcatcgctcatcccgctcgctgtgctcccagcctgtgccatggaacctgctcaactgcggagcctgggatgaggctgagcctgttgctcttcctgttgagtttggtttcgaccaccctgcatgaatctttgtgcttccaatgcttctggtcagggggccctgccgcctcgtttcagggacggtgcctgcaggccgctgtctgtgcctgaactcagcgcttttcacgctggcttgacccacggagggcggctgtcagccgcaaccggaggcagagcgcgggcgttctgaggctattggatgaggctcgctggtgataccttctgggtttgcaactttgttctaaagccaggggttttcaggccaacagaaatgcatttagttagtaatccagagcatgccataggaaaacataacgaataaaactagaataaaacataacgcagaaatcacctt

SEQ ID NO: 31503 - DNA, 513 bp, Homo sapiens
  chr18:74755466-74755979
  hypo
gtagctctgctgcaggcaccccggggacctgctggtgaccctgcccttctcctgctgcgatcatcccaggccagcgtgacactcagcagcgtggacgtctctctgcaaacgcccaaatgcagtgtatgaaatgtcatccctagaaatggcttcatttgggataaagctttgaacttgcgtgcgtgccccgcaccccgtggcggactgagtcactgctttgctgttgcggcgtggtgagtaaaactttcccaggggagccggagttgagtgagaaagggatgcaggacacgcaggagctgacacatctctatggatttaagtcgctgtttccacaaatgctactcacatgcccacacgtgtagggcaggactgtcacgcgtccactctgctcagctttccaggccggatctggtcccagccattctacctgacccagactccccgcacccctgccattcccccagctgccgtcctgtgtctcctgatttctgcgtttttgatcctgaggctctc

SEQ ID NO: 31504 - DNA, 30 bp, Homo sapiens
  chr18:74763397-74763427
  hypo
taaggagagactgcccgacagagcccacct

SEQ ID NO: 31505 - DNA, 30 bp, Homo sapiens
  chr18:74763719-74763749
  hypo
gggttcagtttgatgcgtgaagaccagggg

SEQ ID NO: 31506 - DNA, 186 bp, Homo sapiens
  chr18:74763959-74764145
  hypo
aaaaaaaggttatggtgaagccgtgcggcagcactggaagaggatgaggaggctggagaaggcgtgtgagtgcaagctgccctcccgagactgtgccctctgagccagagtcttcctccgatgtgcccaagtccacccgaccaggaacgggggaaggagcggggcgatccaacagccacacaacag

SEQ ID NO: 31507 - DNA, 333 bp, Homo sapiens
  chr18:74770084-74770417
  hypo
tttaagttcggcagaggacacccagggctgcaccggctcttcagggaccctccggggagaagaggcatcccctccccagccctggacgtccacctcaggggcggtggggatgcggggatgcggggatgccgagcgctcccaggctgggtcacagcaggcagtggctccgctctggcttcgactctcaggacccacctgggacccctgctccacgctgcggggaggccaaacctggagaacccagggcaccagttcaggctgacagcccggccggacccagccaacgccccgcacagctcgccagccacgggagggagcggcctccggcagacc

SEQ ID NO: 31508 - DNA, 233 bp, Homo sapiens
  chr18:74782715-74782948
  hypo
actgaattgtggaagcgcaattcagttttcttcatcagaaccgagtggagaagcaaaggatggcatggagtcaaacttcccaaagccagtcacagccaggacgtcggcgggcggaatcctggttggttttgaggaccccgctcaggtgcttgttcccgcgtagctggagtgtccagccaagtgtgagagatctcctacctggtacagctattcatgtacgtgcacacatggca

SEQ ID NO: 31509 - DNA, 30 bp, Homo sapiens
  chr18:74805204-74805234
  hypo
cccaggggccacctcgagggggttgaccgg

SEQ ID NO: 31510 - DNA, 31 bp, Homo sapiens
  chr18:74806855-74806886
  hypo
tgtgtctagaggctaacgtgtcaccaggcag

SEQ ID NO: 31511 - DNA, 284 bp, Homo sapiens
  chr18:74832018-74832302
  hypo
gcaatttaggaagagcacagccgtgctcagcccacgaagcatgaatcccgccttgtctcgggtgaggtatgctaaagggttcgctctcgcttggtgcgagcattcttctgtgaatccattacgggtctcaaagtcctaatgcagggaacacacgctcccgtaggcttctcccaacgctggcaaaatagaaacctctaaaatctggtcagccctcgcggcatctggtgcagctgtgaccggcacggccaggtgacctcagacgcgctgcacacacctgggaggct

SEQ ID NO: 31512 - DNA, 38 bp, Homo sapiens
  chr18:74841695-74841733
  hypo
taattagaggccaggcgcggtggctcatgcctgtaatc

SEQ ID NO: 31513 - DNA, 35 bp, Homo sapiens
  chr18:74847366-74847401
  hypo
caggcctgagccaccacgcccggccaggactgaat

SEQ ID NO: 31514 - DNA, 507 bp, Homo sapiens; identical to SEQ ID NO: 11845
  chr18:74961448-74961955
  hypo

SEQ ID NO: 31515 - DNA, 152 bp, Homo sapiens; identical to SEQ ID NO: 11846
  chr18:74962018-74962170
  hypo

SEQ ID NO: 31516 - DNA, 134 bp, Homo sapiens; identical to SEQ ID NO: 11847
  chr18:74962209-74962343
  hypo

SEQ ID NO: 31517 - DNA, 196 bp, Homo sapiens
  chr18:75229787-75229983
  hypo
ctgcttcccagtgagaaacttcggagagaagacaggaggagacgtggaatgtttcggggctagaaatgtccatttcttgaggtgtgtcgcgtgcgcgttttgacctcggactgcacatgtgcgcctccacccagggctggtcttcaacgggcaggacctggagacggggcgcaccgaggcacaggtggaaggtccc

SEQ ID NO: 31518 - DNA, 234 bp, Homo sapiens
  chr18:75339281-75339515
  hypo
tctttccagctctctgaaaatcgccgggaaagttgggattgccccgcagcgtgggggtgatgccgctgcagcgcaggctgggacagagagcagcccggatgcgcggagcagacttggacttcagagcaccttcgctgaagccgagtgctgctgtgccaggtttgtggcggtcatggtggaaagtggtgagtgcctcgggatgggtgctcctgcggtcagaatcctgtggtcaga

SEQ ID NO: 31519 - DNA, 283 bp, Homo sapiens
  chr18:75873523-75873806
  hypo
ctaacagaagttaatttcactcgtacatgtggaagtctccgattctctgacagcgctgtctaccagggatcagctgccgagcttgagtgacatggtgctgtcaccacggcagccatcccaccggcaggcgccagccttaccgtaccgtgtattgaagtgacacacaaatatgtatctggacgtgggtatgtggtgaggccgcagttgtgggaaaggtggagaagtccgatgagctggaggatctggcaggggagggatgtacgagctagccaggcaggtaggg

SEQ ID NO: 31520 - DNA, 1060 bp, Homo sapiens
  chr18:75998624-75999684
  hypo
acgtggtgtgtgtgtgtgtcgtgtgtcgtgtggcgtgtgccgtgcgtgtgcgcaccgtgggcgggaggcgagaggaagcgcagtgggagccgcgggcaggcggtcgcagaggggcctggggaggcgaagcagcccgggtgggggcgttcgctggaaacggggcccctctgaagggcgtgggcagccggtgcctgcagagcgtggagagctgcggccgcctcacctgacacaattgggcagcgatttctcaggtccaaagagcggaccccgtgggcactttcctgacggaggactcggctcctgggagctccggcaacatcagcgacagtggagcccggtctcaaaagaccgacccggcggcctgagaagaaggaaggaggccgaggcgccgcagggaccctggcacctgcccctgacgcaggagtggacgcgaagggtgggcctggggcggaggctcgggagcggcgcggaggtgggagttggcagctccaggccggcgcatgtggaggagaggagggggcccttccacgtgactccgaggttggagcccccctgactggggggcggacagcaggtgttcacagaaggcaggaagagctggaagctggggtgagccagctcatgcgggtttccgggggctgtgcaggtggaaccatctagatagctggggagtctcacacccagagcgttttagacccaaggtggccttcatggctcccacgaatcccttcacggtttagaagagatcagctcagcaacgacgaatgccttccctcagttgtgccaagggggcagcgccaggtctcctgggtcagaaccacgggacagccacgggcattcttaaggctgccagcctgtgggtgtcacctggttcagccactttcggaggaagtcggtgggggacaagacccacttttgcagatttagaaaaggaaggcagaagtgtctgggcacgcggggaaacgcaaagacctgctgaaccagttcatttctaatcaaaaggagcgctggtgtggggtatgaagggcacgtcttcatgccgtgtcggcatctgctgtta

SEQ ID NO: 31521 - DNA, 214 bp, Homo sapiens
  chr18:76123732-76123946
  hypo
ctccgggatgaagacggcacgcctgctgcgcacggtggctgtgctgtgctttccagagacaccaaagatccagcaagccccggtttgtgtcgagtgtcacgggaatggagatgccttaaggctccggcttggacggcctgttgttcgcgtgctgagtgcactctgtgggcccgagcgccgagggtcccatttcgcacacagcatggagtgggtg

SEQ ID NO: 31522 - DNA, 273 bp, Homo sapiens
  chr18:76129256-76129529
  hypo
ggtctacatttccctgtatttcgcagtaacacacggcacagaccgcgtgcctttcctccatctgcttaccgagtcggcgcggccacttaccacccatggcagcacattgcaaggtttgtccgtataaaagaaagtgccggcagatcgtgacgtggaggcctcggacctgtacactctcccgtgactctgccacaggccaggctttgctgcgatcactaaaacctggttcgaaatgagccactttagccctccgcatggtggcctcctaggcat

SEQ ID NO: 31523 - DNA, 363 bp, Homo sapiens
  chr18:76151188-76151551
  hypo
ggcctgcgggtgcccgggaggtgcagactgaagggcaagaccttgtcagagagagaaagaagcaataacgcatccgatttcacctgctcgcggagagagctacacagcccaccccgacacttttacacgacgaaaggggcttcgcggtccggcaagcctgagctgaaacgcaggtccatcgcttaccctgcagcagttcttcaagcttcggggcttcggtttcttcctccaccccagggggacggctgtgcagggccgtggtgtggcctgagccgggctgcgtttgtggcttccttcccggcacctgctgtgtcctcggggtcttcggtggccgctcccatcgtggacagaggccaacagagg

SEQ ID NO: 31524 - DNA, 508 bp, Homo sapiens
  chr18:76189658-76190166
  hypo
agcactggggtcagggatgctcgtgggacccatgacgcagagaggcaggtccctacccaccgggccgtgggccgctgagcacagagcgtggagccctgcggcggggtcgttcctgggccccgcgtgccatcctggggttgtgcatggtggcggcgaaggcacccagcgctgggaccccagcgaggcgacccggggccaccgggcaggcccaagagctccctgtctgcgggccccttgctttccgcagcagccggcctgtcggtcctcggcgggagcctctcgttccccagccacggggccttcccggggtgcggccgagtcaggcggagaccccctggggtgggtggcgggagcggggccgcagcaacagggcggcgtggagggggagaaacaccttacccagccggcggccccctccagcgtgcagctggaacgggaagctgtctgctcagccgtcagaaggatgcgagaaattacctagctccccgcagaggcctccagcagccct

SEQ ID NO: 31525 - DNA, 178 bp, Homo sapiens
  chr18:76436237-76436415
  hypo
attctgatcccacagcaaggccgcgcttctccaaggctggagcagattctgatcccaccgcaatgccgcgcttctccaagactggagcacattctgatcccaccgcaatgccgcatttctccaaggctggagcagattccgatcccaccgcaatgccgcatttctccagggctggagc

SEQ ID NO: 31526 - DNA, 30 bp, Homo sapiens
  chr18:76463640-76463670
  hypo
gtggctttcgtcaccgaggcttcagcgctt

SEQ ID NO: 31527 - DNA, 329 bp, Homo sapiens
  chr18:76477466-76477795
  hypo
tccacctcccaagcccatgaccgataccctgggtctccacctcctgggcccatgaccgacaccgagggtctgcacctccagagcccatgaccgacgctgcgggtctccacctcccgagcccatgaccgacaccgcgggtctgcacctcccgagcctatgactgacacagtgggtctccacctcccgagcccatgaccgacaccgcgggtctgcacctcccgagcctatgactgacaccgtgggtctccacctcccaggcccatgaccaacaccgtgggtctctacctcctgagcccatgactgaccccgcagttctccacctcccaacc

SEQ ID NO: 31528 - DNA, 628 bp, Homo sapiens
  chr18:76486292-76486920
  hypo
ttaataacagggactcaaagccgagtgatggcgcaaagcaggccggtgaagcctcggcgctgggcccggcctggcactgcgcatccttggccttcgggacccgggctcccgcccccgtgcccagcctcacggagcccgcccaggcctgctgtcccccgagctccaggcccactgcccgccagaaccttctggtcttgcctcgcttcccgcctgcacttttctttcccggcctggcagagacatctataccagtgggaaaggcgagccactccggcagcgctgccaggttgcactccagcacctcacactcgcttctcccgggacttaaatttaaactcctcgagcgtcatgtccccatggctgtctggggccatcattgccacctcgtactcctctcttcactgccacaagaccaagagacagatgcgtcccggggtccttccacagcgttcccaggggaggaggagggcgcctggagccctggggaaggcgagcccgagccagcgcacgtggagactccctcggagacctctgcgcacatggagacccgcgcgcacgtggagactcgcgcgcaaaaggagaccccagtgcacatggagacttccacgcactggtctctccaaggaat

SEQ ID NO: 31529 - DNA, 31 bp, Homo sapiens
  chr18:76543110-76543141
  hypo
ggaggctggggagccccgggtgtccaggcac

SEQ ID NO: 31530 - DNA, 176 bp, Homo sapiens
  chr18:76552754-76552930
  hypo
ggcaaggtggtgtgagagcagcgggtggcgtgagactggcgggtggtgtgagattggcgggtggcttgaggatggcgagtggtgtgaggacagcgggtggcatgtggatggtgcgtggcctgtggacggcgggtggcatgaggacggcaagtggcgtgaagatggtgggtggcctg

SEQ ID NO: 31531 - DNA, 182 bp, Homo sapiens
  chr18:76653366-76653548
  hypo
gaaggcagtcacaaaagcctacgcaccacatgactctatctacgggaaacacccagcagccagtcaccgaaggctacacaccgcacaactccgtctacgtgaaacgcccagcgcaggcgtgccggcacatggggtgatgagcgtgctctaaaggtgatcgcggtgacagactgcataaatct

SEQ ID NO: 31532 - DNA, 902 bp, Homo sapiens
  chr18:76685332-76686234
  hypo
tccccacagggttagcaaagacgcaagagggcgtgaagccacgcggtcgcacacctggtaccgcgcacagtgagaaaggagggcaagtgcgctgagacccaggagggagggcagccctcccctgcgctgctgaggctcgtttctttcaatgtgtccctggctctgtgctgtatcgtgcgtttcagtgtgcatgaaatatcttgtgcaatcatttacgtgaaattagagctagtaggaaaatgtatcgtcaggcgtggaagagcgcactgcaccttctttttacttgcgcgcacctgaggattgtctaaaatccaggcctcacgggactcccagagcccgtgctcgtcacagctgctggctacagaaacacagcctgcaaagtcggcctcaccgccagccagacgagcccagccagtttccacgagcaggggagggcacacccggaggccaccgtggaaagcagcctggctgccctcgggaagccacacgcggagccgccgcggcccagcactcccacccctcgatgtgtgcccaggtcgaaggaaggcttgccacccgaaggcctgcacgggaaagctcacagcagcgttctccaaacagccaaaacgcggaagcaaccccgatgtgcgtgggctggtgaatgcaggcccagcgcggagtgcgcacagcccggaacggcattcagccaagaaaagacccacagccgggaacagcatattcagccaagaaaagaaagggcggcctggggcgctctgcaccgcgggtgagccgtgagaacacggcgctccgggagagaagccagcacgagacgctgcctcgggcgcgactccatttacttgaagtccagagcccgtaaatccgcgagacagacatggaggagcggcttaccaggtctggaagca

SEQ ID NO: 31533 - DNA, 30 bp, Homo sapiens
  chr18:76957871-76957901
  hypo
gcaacataaaatctacgagaacggattttt

SEQ ID NO: 31534 - DNA, 313 bp, Homo sapiens
  chr18:76999755-77000068
  hypo
tttctcaccttgctgttttctcgagagcattgttttgtgagggcggttgatcatcagttaattattacacggaggcgttactgaagaggcatctgaatgtggctgggagagcatggttcctgagggctaagcgttcccaaaggatgagcggagaggcttgctctgcctgcgtccccatcagcggtgaccagcagatcaccacgcctcaggggccccacacccgcggtctcttcctagagctgcagtcccaagcttgcctgcgctctctggaaccctccagagtgttctcagcgcagcccactttggtagcaca

SEQ ID NO: 31535 - DNA, 31 bp, Homo sapiens
  chr18:77076162-77076193
  hypo
aatcaagtgatgacatcggaaacaggattat

SEQ ID NO: 31536 - DNA, 43 bp, Homo sapiens; identical to SEQ ID NO: 11854
  chr18:77159979-77160022
  hypo

SEQ ID NO: 31537 - DNA, 380 bp, Homo sapiens
  chr18:77166683-77167063
  hypo
cagagtaatgaacaggtggctcggcgtggcacctcaacgggaaccccccaggagccgcaggcctgcgctcgacaaaaccccctcgtgggtcccccaccgcgccttccttctgtccaccgttggactgcgtccctgtgcttcccccgagacccccagccgcagagccagccacggctccgcgggtcttccgcagcgctccatgcggggcagacgtcagggctggcctggcacggtcacccaggcgtgtggggcgtggggcacagggcgacctgcctgtgtggcctgttgtccagcgggtctgatgcagccggctcaggggctttgcacgggccacggaggggccaccgtgacgcccaggcggagctctcagagggctacag

SEQ ID NO: 31538 - DNA, 359 bp, Homo sapiens
  chr18:77174744-77175103
  hypo
agaaaggagtggttttcttcccgccttgcttctttccaggggtaatgacggtgatcatagcaagtggcctcccagggcacctttccgtgtgctgttgagggtgcaacaggaggcgttgccgggctgcgtctggaggaggccagggcgagagtgcacgttgaaggctgtgcgggttatttataaatagtggttctcaaatggtagcttttaaagatttcatattgaccgacaggaactaaagtctacgtgattgcttcctcattccttcatcgttcggcctcctccacctgggcacctgccacaggccatgtgcgtccatgtccaggtctgtctgtgccgacatctgctctttgggcatc

SEQ ID NO: 31539 - DNA, 68 bp, Homo sapiens; identical to SEQ ID NO: 11855
  chr18:77193449-77193517
  hypo

SEQ ID NO: 31540 - DNA, 167 bp, Homo sapiens
  chr18:77194446-77194613
  hypo
cccaggtgttgatgtggatcccgggtagccgtgggtgttggcattttcttcgttccacctgttacctcgtcagctataggccccaggccctagatctgctgctttggcagccacagagcagcaagtgtgtccagccccagggctccaggctacgcggcagcacagag

SEQ ID NO: 31541 - DNA, 159 bp, Homo sapiens
  chr18:77194890-77195049
  hypo
gatgccaattagtacctccctcgttggtgcttgaagcaaggaaatgcgggagacacctgagcgcacagtggcccgtttgacatttaaagtctccaccctcccaggtgggaaaggtcagacagcgctgcaccacgctccgtcactgcaggcctgcacctc

SEQ ID NO: 31542 - DNA, 1608 bp, Homo sapiens
  chr18:77196680-77198288
  hypo
ttgctcctctggataggtgctcgctcttacttgtgggtgctgaggggcgtgagggggtccggcatccgggtacctgtgggcgctgaggggcgtgagggggtccggcatccggggcttctcccatttagggcctttccttcagagggaaggaggccagccccctccagtgagcactgagcgtgccccctgccgtctctgtggggatgtcattgttcccacgccggggagagaccaccccaggccagcccctattcttctggccacattgccatgatcacaccgtccgcaccctgaggccacccccattacggctgccacggcgctaaaaacaccagcatcaaagcaacagggccgtggtttagcctggaagagcggggccctggagccgtctgcgagggggtctgggtggttcaggatggccggcagcccctggtggacgtggtccctgcggggtctggcgggacctcggccatggtgatgggtgcgccccctctgcagggtggggcctgcgggtaaggacagtcccgccccctgtgcgtgtgaggggatagtggagagaggggtctggcgtgggcctcactgctcctgggaaaccaaagatgaagacgcctgcttaggactcaccttgccctggtagaacaagtgactcagacagagcctcccagaggcttctggccaggcagggagtgaccagcagcgcagccagcctcagctcctgcccacacagcccccttgtcaccggctcctcctgcccctgctccagcaccttggccaccagttctcggtgggccggtctggatctgccgatgccgggacctcgccaggccgctggttgcaggggaggctgagggggcgtccgcctgctgtctgcttctcaccagcatttccagtgaggcatgaaagtgatgcgtggcggatgtttccctctggcctcagctttcccccaaatcccagctcacactgagtgtcctgatggtggcacctcgggcagccgccaccctctgccctccaccctctgccctgacggcaggctctgcctgagggggagggtctctctgtacacacagtctcctcaccctggagggcctgctctgctctcaacggagctggaaccaggagttcgcgagtgctctgggtggctgctggcttttctccttgtctcacctcctcatccgcacacagcctctgccctcagcgctgctcacctcggtatgtaggcagccggcatcaggatggtctggggtgagacaggcagtgttcttccccttctctggccagggagggtggagaagcacccgggcacagccattgaggccttttcgtgcaactcattgcctttctgggcgtgaaggtggaggctggtcctccacctgcgtgttctccatctgggggactgtggtcccggaggagacctggagtccggctccccgctccgtccgaggaggagctgagcggcgtgagcagtgcccgccctggtcactctgccttgctttcctcctctctgtttctggttgtgcctccttccttccctcctgctctctttgccgtggactgcagccccctcgccagatgtgttcctcacatgagtcaacccgtccttggcctgcg

SEQ ID NO: 31543 - DNA, 214 bp, Homo sapiens
  chr18:77199702-77199916
  hypo
cagaagtgcagtgttgaagcccgagccttccccgtgtcagcttttatgatgaacgaggattcaccatttatttctcccctaaagcaaagcccacgggctctgttttgagcgatggggacagatgctcggtgctgctgggaaggtgttcacggggcagattcgctgtgtcaggagaccaacgtggaatgaggtcggcccagccagtcactgctta

SEQ ID NO: 31544 - DNA, 452 bp, Homo sapiens
  chr18:77200234-77200686
  hypo
gcgtgggctctggcacggccgttgctagtgacctctcctaatagcgcagaagggcctcccaggaggctttcctaggtagagaggggtctgcacgcccactggaacatgctctatcccagcctcagaaaacccacatttggtgcaggtgggacaggaggagtggacacgtcacctggagaccacatgagaagcggccatctgcagcagcaatcaccccgtggggaggcggcgccctggcagctctcatgtggggcctggtccttcctcgctgcctgagcaatgggccctgcttccccgcagacaccgtggtgcccctgggccacacccagcaggtgtccagtgaccgagggtggtgttggccatggcaggtccctgcccgtttctccgaggacctggggctgtgacccagctgggttctcccgggaaggagcggccactgtctgcactgtcca

SEQ ID NO: 31545 - DNA, 1090 bp, Homo sapiens
  chr18:77204330-77205420
  hypo
cagccatggcgtccccgttcctcccgttccttctctgcactgcacactgggaaccaggacaagaggtgtgcggcgtcaggctgtgtccttcccccacccaccccgagcccacgctgctctggagggagaccccagcttcccccgcctaccccgagccctcgctgctctggagggagaccccaggcccctcaggccctttcccgcatctgaaggggccagggcagggcgtccggcagatgaagctgccccttaaagccaggtctgggccggtttacagggaagcactgctcacgtacaacctggcagaccacaccagcgccgcacacacaggcacccctgtgggcacccacgtgcccgaccccgcagaccacaccggcactgcacacacaggcacccccgtgggcacacacgtgcccgaccccacagaccacaccggcgctgcacacacaggcacccccgtggccacacacatgcctgcacacgcacacttctggtgcacacgcccacactcacggaggcttctgcacaccacacagccagcaggtgaggaagtggacgctgcgtggctgtctcttggtggcttcacctggaatgtcaccgtggaccccagagcccgaagccccggcaagcacagaaatcacaccggcagcctgtcccacttcgggcaggtgaggcctggctgagaaaagggggaaggagagggaggatgcgggggtgtgtcctggtcctccacccgtttcgggtttggggtgctcccttcgactactggctccatttttgatgtcttttacttttgtttcgatttttcctggtatcttgagtaaagtctccctggagcatcaaattggatttttcttacaagtaccgtgtgctgttgactcatctgctttggtgtgccgtgggtcacgtgggcctgggctgtgggtaaggtgggcctcgttcctgcaggaacacctggctctgcagcagtggctgccgtatcatcctggccaggcccctgtaccgagggtggagccacggggtctctgatgccttccttctcgtgctttggtggagaatgtggctggacgtcctcccatgacagatgcac

SEQ ID NO: 31546 - DNA, 30 bp, Homo sapiens
  chr18:77210975-77211005
  hypo
aaactcagaaactccgacattgaacttcgg

SEQ ID NO: 31547 - DNA, 613 bp, Homo sapiens
  chr18:77211290-77211903
  hypo
gagttattgcctgtggcctcccgggggcccctggcgctggctcctctgatggctgagcatggccagggaaagcggtgtgggccggggcttcccctcacgctgcgctgacctttgcgtatttgtgcgatgactgtgatttgagtgaaattggctgagtcttaggaagatattttgatgacttcttcagaacgaggtggagaccatcaggatgaagtgtgcacggcttctcccctagaagtagtggcatccgcaggggtcggcccgcaggtcgtggcggtgcttgctctgggtgggtcggctcacgtgtgacctgctgggtgccacacgtgtgccccaggccgcccactcaggacaggccctcactgcccctctccttctgatgcagcccagcgctcagctcaggagctgcctctggtggagaagcagagcacggacagctatccggtcgtgggcgggaagaagatggtcctgtctggccacaacttcctgcaggactccaaggtcattttcgtggagaaagccccaggtatgctcttcaccaggggccatctgcggcctgggcttcggcgctggtgggaaccggttcccagtcggtggagcaggacccacctgt

SEQ ID NO: 31548 - DNA, 186 bp, Homo sapiens
  chr18:77212144-77212330
  hypo
cctccatctgcagagagtggacgcttcgggggtcagttagcagcagggcaggagggagctcccctccggggccttcccctcccgccagcattcctggggtcggaggcagggatggggtgggtgccgcagacggcgggagctggggtggtctttaatgccacagccgtggtgtgtgtgaggctcttg

SEQ ID NO: 31549 - DNA, 454 bp, Homo sapiens
  chr18:77212961-77213415
  hypo
gtgcttcaatcaaaatcggctttagaggtctttgactctaacttggcttcctatagaatcagggcttaattggaaaacatgttttaaattacagagaaaaccaactaagggcagtgaccgggaaggcatttgcattgcccgtgccttctcgggaggaggctaattttgaaataattttcccttcagagctttcggtgtgtgtccacgcgttggcggagaaacacttcgcccacagtgtagggcctcgcttgggccaagactggccagaaccgtggctcccagcttctgcttttcaaagcccagacctgagcagcctccttgctttttcttctgcccagagaggcctgggcaccttggcagagcctccccccgaatgcagtccgcagaggtgccccagctcctgccctagccaagttactgtgctgagttggtgccacggcgccatgggtaaggg

SEQ ID NO: 31550 - DNA, 30 bp, Homo sapiens
  chr18:77215330-77215360
  hypo
gtcgtttctgtggccgccgtgactggcagg

SEQ ID NO: 31551 - DNA, 30 bp, Homo sapiens
  chr18:77222007-77222037
  hypo
acttctgctgtcaccgggccgtttccaact

SEQ ID NO: 31552 - DNA, 30 bp, Homo sapiens
  chr18:77231639-77231669
  hypo
gtgggggtccctttcgtggccagagccccc

SEQ ID NO: 31553 - DNA, 321 bp, Homo sapiens
  chr18:77236129-77236450
  hypo
ggctgggtgccaggaagcctgcgctctgggacatgcgtggggcaagaggggcgccctgagcttggcgacgccagccgcgcgcctgggagggatccgcctgtccacgtgcagccgcctccgggcggcgtcggccatgctgctgccccaccgtggctctgtggctccagccggaatggcaaagcctggctccacagctgcctgggagcgtgagtcacgcgccccacagaacacggcgggcagcgcgggcgaggattggcgaaagccgaccgatgtgttttggcttgtgtggtctgtgggagcgtcctttgtcatcagcctaat

SEQ ID NO: 31554 - DNA, 30 bp, Homo sapiens
  chr18:77240515-77240545
  hypo
agccctgtgcccctcgccaccaccatccta

SEQ ID NO: 31555 - DNA, 447 bp, Homo sapiens
  chr18:77255659-77256106
  hypo
gaccaagccctgatgttcagccgcgactgcgcgtctgggcagtgtggggcgtgtgtgcgatgcctttgtcatcttgtgtaggcaagccgtgaacagtggtaaggcgttcgcgagtcattgtaacgtaggcaggccgtgaacagtactaaggcgttcatgggtgtgtcactgtaacacaggcaagctgtgaaccgtagtaaggtgtccgcaagtgtcactgtaacacaggcaagccgtgaacagtagtaaggcgcccgcgggtgtgtcgctgtgacgcgggcaagccgtgaacagtagtaaggcgtccgcaagtgtcactgtaacgcaggcaagccgtgaacagtagtaaggcgtccgcgggtgtgtcgctgtgacgcgggtaagccgtgaacagtagtaaggcattcgcaagtgtgtcattgtaacgctgtgtttttctggtgtaga

SEQ ID NO: 31556 - DNA, 155 bp, Homo sapiens
  chr18:77271019-77271174
  hypo
gcctggcgtgggcccgcggtgtctgtcagggtgccctgggccagccccgctgattcgatttagagctaacgagagtccaccaacggcaattacaggaacctaatggccttcctgccgcaccgctccgtggcacccggctcgctgtgatgaattgc

SEQ ID NO: 31557 - DNA, 30 bp, Homo sapiens
  chr18:77273799-77273829
  hypo
catgaggggaggtgcgtggcgtggtgaagc

SEQ ID NO: 31558 - DNA, 30 bp, Homo sapiens
  chr18:77286037-77286067
  hypo
catttgggtggggacgtgcgacccccacac

SEQ ID NO: 31559 - DNA, 186 bp, Homo sapiens
  chr18:77288392-77288578
  hypo
atgtataaataataacagagccgacgtgtcctcgcccaggagggcttccctgtcagcaataaccggcatccgttttggaacctgcgtctggggctccagtcgctgctcttgctggcgtccatcgccgcctcggacggccgtgcattttctcgtctcacgcagttcgaggaggaccctagaaagcca

SEQ ID NO: 31560 - DNA, 320 bp, Homo sapiens
  chr18:77307983-77308303
  hypo
ccttctctagagcacctgactcgggcacacggaggctgctggaggagtgagagagtgagtggggggaggaattgcaaccaaattcagaatccgcccggccctgaggccgccccttgcctgccacccacccgggtgggggctttatttcgactcaggcacaggcgcacctgccggacccccggtgtctctgcgactccttctccgcactggcctgggcccgggctcccagccctccgctctgtctcgctggggcaaggcgtccctcactggccagttctgacattggtcccgggggagccgccttccacctgctggccctg

SEQ ID NO: 31561 - DNA, 30 bp, Homo sapiens
  chr18:77312867-77312897
  hypo
gtgagcttgggcaacgcggcggcatgcggc

SEQ ID NO: 31562 - DNA, 315 bp, Homo sapiens
  chr18:77313805-77314120
  hypo
gggctgcactgtgaagaaggacgggacttcagcagcacgcggagcctgaggctaaatgctgcaaaacacagcaccggcctcccgctcccgttcccgcaccctgaggacgcgctggctgattgtggcacgcgtgccttccgagcccagatgtcccttcctgacacgccggcagcagccaccgcggattgttggcctctttgccgttctgccttaagctgacgttttggcgatgttggtgctggaacttcaaacctcggtgtggaaggaagggacgccgaggcccctggcctgcccgaggtcatgcctccctcttgc

SEQ ID NO: 31563 - DNA, 335 bp, Homo sapiens
  chr18:77315292-77315627
  hypo
cagccagagacaggctgcaagcggggctgggggccaccagaccattcctcaaacaccaagggcgcaggaggctggcagtgggagccctgggtgccccgggggcgacttctggacccgctgggctgtttccgcacccggcttccctccctcaagcttgcggccgggtgtggctccctcaacctcagcgccgacctccgtgtctgcgcgctctctctctaccttcctcatccgcggggtcaggggtcacacggcaccgtcgcctgggtctccgagcagggagagtcgagtgctgactctgccagaaggctggaaacgttaccttaggtggaaaagta

SEQ ID NO: 31564 - DNA, 30 bp, Homo sapiens
  chr18:77315947-77315977
  hypo
ctagcggcgcctttcgggatggggccccga

SEQ ID NO: 31565 - DNA, 30 bp, Homo sapiens
  chr18:77320798-77320828
  hypo
cttgtgcaggggagtcgggaggcgggcaga

SEQ ID NO: 31566 - DNA, 255 bp, Homo sapiens
  chr18:77329762-77330017
  hypo
gggtacagcaagacacgccctcacctttaccgtctcagtacagcaggacacactctcaccttcaccgtctcagcgcagcgggacacgccatcaccttcaccgtctgagtgcagcaggacacgccctcaccttcaccgtctcagtacagcaggacacactctcaccttcactgtctcagtatagcggtccacgccctcaccttcaccgtctcagtacagccaaacacgccctcaccttcaccgtctcagtacagca

SEQ ID NO: 31567 - DNA, 30 bp, Homo sapiens
  chr18:77333358-77333388
  hypo
atttaggtattactcgtgtgattaagaagt

SEQ ID NO: 31568 - DNA, 30 bp, Homo sapiens
  chr18:77336115-77336145
  hypo
gcctgccgtccgaacgcggaccctgcagcc

SEQ ID NO: 31569 - DNA, 232 bp, Homo sapiens
  chr18:77339169-77339401
  hypo
tctccatcctcactttccatccgcacatccagggccgcccacgtgcacccacaccgtgcgctcactgtgtggcctgtcgagaacacagtgtcctctgcccctgatttcccaggagagtcgcacgtctgtgatggtggtctcccaggcacgcatggccatggagcacgggaacgtgtgcgcctgctgggagcacatgggaagactgcacgccgggtgctgaggcttcctgtga

SEQ ID NO: 31570 - DNA, 189 bp, Homo sapiens
  chr18:77356568-77356757
  hypo
tgtttagcagtgaaactgctccgggggacaccacagggcagatgcctgcgatcacacgtttgtccaaacccacggagtgagtggccccaggagggagccccgtagtgagctccgggatccggaccatcggatgcgtccgtgcgggttcatcgcccggcacaaatgcacgtctccagcctgggaggttgg

SEQ ID NO: 31571 - DNA, 111 bp, Homo sapiens
  chr18:77358202-77358313
  hypo
ccagggtgaaagccacagcaccggccctggtttgggatgacaccgcggctgtgatctcggcagccacaggcttccccgtccgactcggccgagaagcctctcctgccacct

SEQ ID NO: 31572 - DNA, 31 bp, Homo sapiens
  chr18:77372905-77372936
  hypo
tatctgcaggcacacgcgggtacatgtgggc

SEQ ID NO: 31573 - DNA, 60 bp, Homo sapiens
  chr18:77456031-77456091
  hypo
atggtgcacagcgtgccggagttgatggtgagctccgaggtgagccgggcatcagtggcg

SEQ ID NO: 31574 - DNA, 84 bp, Homo sapiens
  chr18:77457660-77457744
  hypo
aaattgtggtcacaagcgaggttgccgtgaccaggttggtgacccagccctgcctctcggcctgtacggcgcagtccatggagc

SEQ ID NO: 31575 - DNA, 317 bp, Homo sapiens
  chr18:77463263-77463580
  hypo
gcttcttcatgagggtcgtaactaacttagaactagaaaaatgtaactgagcttaagtcatctacctttttttaaagccattaagagtaaatattttactgagaaaataacaggatttaaaggatcgaagtttagcttcctaaggaaagcagactcatttgcatgtcgatcatatgtaagcgagtcggtgttgctcatttcactgtctactaaatatgacttagaatactttcagcttttatgttgtatatgtagatgaaagaaactgtctgaaaatcacccatgcgttataccaggttacccgggaatgttgattt

SEQ ID NO: 31576 - DNA, 30 bp, Homo sapiens
  chr18:77493484-77493514
  hypo
ctgggccccagagccggcgtccgctgcctc

SEQ ID NO: 31577 - DNA, 30 bp, Homo sapiens
  chr18:77495889-77495919
  hypo
gcgtccctgtggcacggccacgtctccacc

SEQ ID NO: 31578 - DNA, 423 bp, Homo sapiens
  chr18:77497993-77498416
  hypo
tcccccggcctcccccgcaggtccccgcctccccccgcccgccctgctcaccgcccccgggagttgccttccccactctctggggtgttctctgtctctgcattttggtggagtacatctcccagaagcttcctgagaaagcgtctgtcctgtccatacgtccgcagtcagcgggctgcgtaaccccaggtggcagcatctccttgaggatttagaagcacggctcccgtcttcagctccggggctgctccgaggccgtccgaggtaacctcggaggctttgtcttgcccgcctgttagacaggatgtggccctccaggtcctgccgacatcctcagtacagacttgtgtcccgaggatttgccctgagaacttggtctccagagccttcttgcatctgctgcggggccgtgggccggtattt

SEQ ID NO: 31579 - DNA, 30 bp, Homo sapiens
  chr18:77507718-77507748
  hypo
tggccacgccggcacgggttttttagtgac

SEQ ID NO: 31580 - DNA, 534 bp, Homo sapiens
  chr18:77509275-77509809
  hypo
gtcccgcctggctctcgtctgccccgtcttcactttcggtcggggcccctgcccctgcccctgctctgctcagtgcccctgatacgtccaacccagcgtcgctgtgagggagtcaaccacacctgccagcacccccgagtctggccccactaggaggggccagggctcccttgagcaaggcatcagcacacaggcagggagccgggcaccagactgtgagggtcgcgccccgtgcacacgagatccaggcccgccccctcctggacttggtgaccgtcccgagctcgacctgagagggcacttcggctctcctgttcacagtcatgactgccccctccccgaggtcagcgccatgcactgctctgggggcctgaaacaccgcctctgttcgcaagggtctcctgtcccgtccacctgccagtgggttgagctcttccaggggttcgggacacccctcacggcagcaccttcacgtttacgagaactgtctctgtcttgttttgtttcaagttctcaaaacggagtgaggtggag

SEQ ID NO: 31581 - DNA, 30 bp, Homo sapiens
  chr18:77542641-77542671
  hypo
gccgactctgcagcccggcgactgcttccc

SEQ ID NO: 31582 - DNA, 508 bp, Homo sapiens
  chr18:77542872-77543380
  hypo
gtccctctgaataaacgatgcttcacagaagtctcccctttcaaaacacgtacagcgaatgactcgggcttcagagccaccctggggtgccgtcggctggtgggtgatggagcggctctgcctggctcctctcggctctggcgcggcaggtcttcctgctttccaagcccgtgtccctggtgccagcacagaactgaactccgcccttgagtcgtgcgggacgagaccccgtgctgcgggcgcagtgccctctgtgggcggcgcgtggtggctgtcctccgtttcccacccggcgtctactgggccttgtccagtatcactgggagctgcaggctcggctagcaggtggctcccgtgccatccccgtgagctccgcctggccctgctgctcccgcccggaaagctcagacccataacccagcccacttggcagcagcgtgccgcctgatcggcaaggtttactccctttgaaaatctctgttgggtggccgggcgcggtggctcacgt

SEQ ID NO: 31583 - DNA, 88 bp, Homo sapiens
  chr18:77543688-77543776
  hypo
agaaaatctctgttgggcacatctaaacgcacccaagcttcctaccgcacgtctctgcgaggagccgggtctccgaggcatggctcct

SEQ ID NO: 31584 - DNA, 59 bp, Homo sapiens; identical to SEQ ID NO: 11857
  chr18:77547988-77548047
  hypo

SEQ ID NO: 31585 - DNA, 138 bp, Homo sapiens; identical to SEQ ID NO: 11858
  chr18:77548351-77548489
  hypo

SEQ ID NO: 31586 - DNA, 420 bp, Homo sapiens
  chr18:77549954-77550374
  hypo
ctcctgtgccaaggaaggggacgtccgtgcccctccttgtcccggggagcacggctccatggcgcccgctgtggagctgcggttctcaccatgggcaggtgcgaggccgtagactggtgtggtcagaccaggggactcctgcgttcaccctgggccccggagactagtgatcccgctccccagcagagcaccgccaaaagccccgggtgccggagctgtcctgcaagaatgaacgggcaggagacacaagagcgtggcggggccttccgaggatgcggtgcaagggcgctgttagcacccacgcgaggcggcagcgcatggaggaagcctcccatcgtaagcgcgtttctgcctgaaatgcacgtgtccttataggcagcggtcttgccactcatggacggagaggcagcatatgtttaa

SEQ ID NO: 31587 - DNA, 200 bp, Homo sapiens; identical to SEQ ID NO: 11860
  chr18:77558196-77558396
  hypo

SEQ ID NO: 31588 - DNA, 579 bp, Homo sapiens; identical to SEQ ID NO: 11861
  chr18:77558416-77558995
  hypo

SEQ ID NO: 31589 - DNA, 743 bp, Homo sapiens
  chr18:77609430-77610173
  hypo
tgccctgtgctggggcaggtgcgtccgacctcatccggggcaaggtcgtccgcgtgcaggagccgcatctggacaggccgcacctgccttccctccccgccttgctctgcgtcagcctaggagcctcctgtcctggccgcgggttacaccaagcgcggcggtaaagacaaccgttgtttcttagctgtcgtggtttctgagggcccagcgcggacgcttgcctttctctgctgcgtgaagtctgggcctcggctggaggcagagcggaggctggggccaccggaagccttgttcttgcgtggctgggggctgatgctggctgccggccgccctgggtggcgtgggagcaggagcgcgtggaagacccagcctctctgagagccccccacgtaatcacacagtgagaggtccgctgtggtttagtgggaggaacccgagactccacccaggctgagtgggagggaggcgagaccccacctggccgtgggaggaacccgagaccccacccaggctcagtgggagggaacggagaccccacctggccgtaggaggagtgtcccgcgcacctaaagggctgacagggccgtgtgaaaacccgccggggtcgctggtcctggctctcctgaccttctgcctccccgctaccctcatccatgtacccagcacacacgtgcacacatacgtggataaatggaataaacataaacttcacccagacagccgaagcccctccctctgtctaa

SEQ ID NO: 31590 - DNA, 73 bp, Homo sapiens
  chr18:77616359-77616432
  hypo
ctggatgttcattttccaggtcgaagccgctggtctcagctgtgttttcaccggttccctgaaagagaatacc

SEQ ID NO: 31591 - DNA, 30 bp, Homo sapiens
  chr18:77627461-77627491
  hypo
gaccgtgagcccggcgttgtgtcgtgtctg

SEQ ID NO: 31592 - DNA, 297 bp, Homo sapiens
  chr18:77628222-77628519
  hypo
ctcagggacaaccctgggctccgtggcacccagcccttcacactcctggcacgcacccctaaattgcttgtccagttaagaagcagtcgccctccgcgtggggcctggtgacccgtgtccgagcgtccggttaagaagcagtcgccctccgcgtggggcctggtgacccgtgtccaagcgtccggttaagaagcagtcgccctctgcatggggcctggtgacccgtgtccgagcgttgcagctgctgctgactgaccgaaggtctttttcggaagcgattcagttgtgtgggtgaag

SEQ ID NO: 31593 - DNA, 368 bp, Homo sapiens
  chr18:77638242-77638610
  hypo
cacatggcagtgtgcagagggcgcctgatgcccacgtggcagtgtgcggagggcacctgatgccacgtggcagtgtgcggagggcgcctgatgcccacgtggcagtgtgcggagggcgcctgatgcccatgtggcagtgtgcggagggcgcctgatgccacgtggcagtgtgcggagggcgcctgatgccacgtggcagtgtgcggagggcgcctgatgcccacgtggcagtgtgcggagggcgcctgatgccacgtggcagtgtgcggagggcgcctgatgccccaaatcttccccaagggcagccctcctcgcagctgtgctgcattcctccccttggcagttccgtaatttattcagcctgctct

SEQ ID NO: 31594 - DNA, 54 bp, Homo sapiens
  chr18:77644841-77644895
  hypo
ccattcacagaaacacagtagcgtgcgcgggtcggtgatgcagccaagacacca

SEQ ID NO: 31595 - DNA, 30 bp, Homo sapiens
  chr18:77675214-77675244
  hypo
ttaaaagcgcagaccggatgaactgggcct

SEQ ID NO: 31596 - DNA, 31 bp, Homo sapiens
  chr18:77677978-77678009
  hypo
cccacacccacacctacgccacacacctgta

SEQ ID NO: 31597 - DNA, 31 bp, Homo sapiens; identical to SEQ ID NO: 11862
  chr18:77710900-77710931
  hypo

SEQ ID NO: 31598 - DNA, 31 bp, Homo sapiens
  chr18:77713636-77713667
  hypo
cctgtaaatattacctcgtatgggaaaacaa

SEQ ID NO: 31599 - DNA, 19 bp, Homo sapiens
  chr18:77728888-77728907
  hypo
aaaaatgattcagaagcca

SEQ ID NO: 31600 - DNA, 19 bp, Homo sapiens
  chr18:77773126-77773145
  hypo
ttttttttttttgagacgg

SEQ ID NO: 31601 - DNA, 31 bp, Homo sapiens; identical to SEQ ID NO: 11864
  chr18:77867027-77867058
  hypo

SEQ ID NO: 31602 - DNA, 22 bp, Homo sapiens
  chr18:77931207-77931229
  hypo
ttggaaaggggcaaacgcggcc

SEQ ID NO: 31603 - DNA, 158 bp, Homo sapiens
  chr18:77939068-77939226
  hypo
ccctgcgtacactgaccgtagactggtgtgtgcaccaagcatgccagggaccccaggtcacacgcccctgggggataggagaggtggtgtctgtcccctggtccctcagccaagtcagccgatgtccccagctgggatgtctgcggaagctgtggtcc

SEQ ID NO: 31604 - DNA, 184 bp, Homo sapiens
  chr18:77942204-77942388
  hypo
cttgtatgtgagcattcgcagcggcatcattcacagtggccaggaggtggaaacaaccccgatgtccatcaactgatgaaccaaccgatgaacacagggtgacctgtccatacagtggggtctcagccacagagggagcaaggccgtgaaacctgcagcgggagcaaggcggtgaaacccgcag

SEQ ID NO: 31605 - DNA, 133 bp, Homo sapiens
  chr18:77943847-77943980
  hypo
catgcaccctcacacacgcatataccctcagacatgctcgcacaccctcacacacgcatataccctgacatgctcgcacaccctcacacgcatgcacccacacaggcaccctcacactcgcatatacagtcac

SEQ ID NO: 31606 - DNA, 397 bp, Homo sapiens
  chr19:403487-403884
  hypo
cacacaagtgcacaccagcagcgacacaggcacacacaagcgcacacagggtcacacatgcatacacggctcacgtgcttacacgtgcacacgccagcacacaggcagctatactcgagtgcctgcaggcgctcacctggcactgtcacatacgcccaacagatgagcacggtaacggcacacgcagtcacactgcacacacatgcggaagcacatggcgacgtgtgtgcacctacctggcacgcacacgcacacacccgtgcagcctagcgatgagtggctggggctgaagaggctacaaggcgcccgtagccctgtcaacccgtcccaggccctgactggggctcaccaggccgcggtcaggaggccgggctacgctgaaccccaattcccaaaa

SEQ ID NO: 31607 - DNA, 30 bp, Homo sapiens
  chr19:407865-407895
  hypo
acagagactccttgcgcctcgtgtgggggc

SEQ ID NO: 31608 - DNA, 538 bp, Homo sapiens
  chr19:418266-418804
  hypo
aggaggcctggacacccagcacgccgcaggggtccacaaagaccaggtgacgcccaccacagccgaccgcagtgtcacggtcatggctgcacgctgccaccctcgggcacatatccacccacgggcagtgacgcgtgtccacacacaacctgcacacaaaggctcacggcggccaaaaggcggaagcagccccagcgtccatcagcggatgaacacacaaaacgtggtcccctcacacagcgggacattatccagccgagaacaggagccaggctctggcccgggccacggcgcaatgcccctggaggacgtcacgctcagtgagagacgccagacacagaaggacacacagcgtggaatcccattgctatgaaatgtccaggacaggcccatccacagagacaggaggcggatgtgtggggttggagctggggaggggacagggagtgacggctggtggggacagggcttctttcggggctgacagaatgttctggaattcgacagagatggttgcacggctcggatgctgaacacc

SEQ ID NO: 31609 - DNA, 38 bp, Homo sapiens
  chr19:434175-434213
  hypo
gaggaggccgggcagatacacggcgccccattgtgagc

SEQ ID NO: 31610 - DNA, 31 bp, Homo sapiens; identical to SEQ ID NO: 11868
  chr19:452244-452275
  hypo

SEQ ID NO: 31611 - DNA, 450 bp, Homo sapiens
  chr19:453562-454012
  hypo
gcccggccagaacccagatctttagggatgctgtcgagccatgggattcatccaccgtgtcaactggccacacctgacccctcgccttcaaggaaaagctgcatttggagctgaaccatctccagcaccctctcacaactccccgcacctcccagcttaagggacccgcgatgcaggaaggatgaagtgtcattttgccgaccgtgtcccagtttgcgtccatcccccaccgggcctgggctccacgcacctggagcagagccagacacgcacaggaaactctccctgaagtgctcacgaggtgaggtgcgtgagggcaccgcagagagcaggacggcctgactcacgggacttctgtgtatggacgagcccagcgccaaaatggtacgtgtgggagaacacggggtcggtgtccacagaccttggcacgaactctggcctctccaggag

SEQ ID NO: 31612 - DNA, 333 bp, Homo sapiens
  chr19:491284-491617
  hypo
aaggcttttaaagaaacagtttagtgccctttatggtgtttgcgacgtcgtgtaaacaccagctctctagtctcaaacccggcgagggcggttcatagacaatttcagtctctcgacgcgacgccgtgtggcttgtgcccttctagccacctagaccctcgggagaggcctgtgcggctcctggctgggcccccgtcttcaaagcagcttttgagtggccctttgacccgtgagacagggccgtggaagctggggtgagcctggagatgcccccgggagcaccaaggcgtcagagcagctgaccagggccccaggcctcgccgcttccccagg

SEQ ID NO: 31613 - DNA, 41 bp, Homo sapiens; identical to SEQ ID NO: 11875
  chr19:507105-507146
  hypo

SEQ ID NO: 31614 - DNA, 39 bp, Homo sapiens
  chr19:530217-530256
  hypo
atcacaggcgtgagccaccgtgcccggcctgtatgttga

SEQ ID NO: 31615 - DNA, 30 bp, Homo sapiens
  chr19:536229-536259
  hypo
tcttcttgtgcagacgggggacgtgtgtat

SEQ ID NO: 31616 - DNA, 30 bp, Homo sapiens
  chr19:542011-542041
  hypo
gtggacggattcaccgtggccgactctttt

SEQ ID NO: 31617 - DNA, 30 bp, Homo sapiens
  chr19:549802-549832
  hypo
gatggggaccccctcgctgtctccacagga

SEQ ID NO: 31618 - DNA, 31 bp, Homo sapiens
  chr19:569949-569980
  hypo
ttggtcaatttgatccgcgaatccaaaaggg

SEQ ID NO: 31619 - DNA, 107 bp, Homo sapiens
  chr19:581581-581688
  hypo
gtcctggatggtgagccgtctgccctcctgcccacatgccctgctctcggggtggcccagggccactcctggtccgtccctgccagccccaccgctgacccagagct

SEQ ID NO: 31620 - DNA, 37 bp, Homo sapiens
  chr19:582136-582173
  hypo
gcactcagaagatgcacgtggccggggctgatgagct

SEQ ID NO: 31621 - DNA, 524 bp, Homo sapiens; identical to SEQ ID NO: 11878
  chr19:603475-603999
  hypo

SEQ ID NO: 31622 - DNA, 30 bp, Homo sapiens
  chr19:618057-618087
  hypo
tcgccccacccctgccgccccccacgctgc

SEQ ID NO: 31623 - DNA, 555 bp, Homo sapiens
  chr19:618307-618862
  hypo
caggaccacctacattcggggcacacagcctcagggcctctacacaggccccacagacacagcagatccactctgcccagtccctgcccccagctagacccagccttgccagctgtgccctgctagccagaagacgcccctgggaggcgagcggcacccacgccgtccggagacgcccacctgtagcagtgcagggcggtgagcatcatgtgggaggagtccagcgagtggatgaagttgggcgggaagccgttcttctgcttacgtgtgttgggctttctgaggacggaacaggtgccggtgggggcggcccagggacacccctaactggccgctgtctccaccgtggctgctctccagacccccggccaggccccagcccgggccccccactcaccggctgatgtctccgttgtgggtgtaggtgatgctctgaattccacctcctatttgctaaaaaggggaaggggccggtgagtcccacccgaggcccagcacggtggtggtacattgaggtggtggtacactggggtagtggcacgctaggatggtggc

SEQ ID NO: 31624 - DNA, 329 bp, Homo sapiens
  chr19:619211-619540
  hypo
ggatggcccgggtccccgagaacatctcctgtagactcttgaagacctggcgtacgagatagtgagaggcctcccacacgaactcctgcagagggcgggcagcaggtgcaggtcctcaggggctggcccgttcacgccctactcccccctatttcagagccactgaggcccaaggcctagggcctagcaggggggcaggggaatggggcctggcgcccacgcagtcagcaagaaacgcccaagccctaacaggcagccagtggtctgggggagcagccagggctcctgctgggaggctgggtcgggggcacacccgtctgagttttaaa

SEQ ID NO: 31625 - DNA, 64 bp, Homo sapiens
  chr19:623405-623469
  hypo
cccggctcagcccctgcggcggacacgggaccccggctcagcccctaccgcgtgcttgacctcc

SEQ ID NO: 31626 - DNA, 30 bp, Homo sapiens
  chr19:638573-638603
  hypo
tgtcttcctccagacgtctctttactggcc

SEQ ID NO: 31627 - DNA, 81 bp, Homo sapiens
  chr19:640912-640993
  hypo
aaggccctcattaggccgcacgtgacgagggcggacaggggactggctgggccggtccatccatggcgggcatggccaggc

SEQ ID NO: 31628 - DNA, 82 bp, Homo sapiens
  chr19:647356-647438
  hypo
ctcctgggcttaacttcgggagagcagttttgctagccggccctgggtgccaagccctgcaggaggcgcagacccctggaga

SEQ ID NO: 31629 - DNA, 53 bp, Homo sapiens
  chr19:647727-647780
  hypo
gggagccgctgaaccccgtgcttcagcgctgggggagccgctgggccccgtct

SEQ ID NO: 31630 - DNA, 30 bp, Homo sapiens
  chr19:649024-649054
  hypo
ggggctctgaaacgcgaggctgcaggacct

SEQ ID NO: 31631 - DNA, 85 bp, Homo sapiens
  chr19:651270-651355
  hypo
gagtggggccctgcgacggctcccccaggctctgttctgggcccaaggcctggacagcgtttgacgacacgcgtgtggacagcag

SEQ ID NO: 31632 - DNA, 30 bp, Homo sapiens
  chr19:727133-727163
  hypo
tgaggcggaggccccggactcctgcccaac

SEQ ID NO: 31633 - DNA, 30 bp, Homo sapiens
  chr19:731145-731175
  hypo
tgccaaggagaacgcggcggccccgagccc

SEQ ID NO: 31634 - DNA, 576 bp, Homo sapiens
  chr19:736216-736792
  hypo
cagctggaccgaggccgaggctccgagcctggggtgggggccccctctgctttgttgccctggtcccacgccggcccacgcttccccgagaagacgggccccacgcatggcggctctaaccgacgcgacctcacggctttcattccaccctaatctcacggctccctcctggggcccgctgggggtggcgctcacgcctgaacatgctcgctgcaaatcttacctgctccagtcctcgggcagtaggactggctgccccgggagaaagtgggtgccccgtccctggaggcaaccaagccaggtccccagcaccgctgcgcttccgagaagcaggggaaggtgggggttgacgctgagtgccacacggtgctcaagtcaggctcgaacccctggtctgccgccttgaatttctccgcctgccagaggggtgggacctcagtacgccatcctggggcccggcacaggacaggagcccaataatgagaaatcgtcgcagtgggcaaaaccactgctatgtgagtgagctggaacagcacagaaagaaggcagagggccgggcgtggtggctcacacctg

SEQ ID NO: 31635 - DNA, 38 bp, Homo sapiens
  chr19:737031-737069
  hypo
gacaagagcaagactccgtctcagaaaaggcagcaagg

SEQ ID NO: 31636 - DNA, 235 bp, Homo sapiens
  chr19:748254-748489
  hypo
gcttctggtgtgtgacgaggcccccgatgttcttgattttcccagagaagcaaataaacagcgtgaacagccccagttcctggagttcttgcctttcaacctggcgaggaaggcgtggccaggccagggggtggggcctgccggcctttgagccattaaagggaggctgagcagggttgcggtgtgctggcttcacctgcctgcacccgctcaccctgagcgccttggggtggtg

SEQ ID NO: 31637 - DNA, 215 bp, Homo sapiens
  chr19:752130-752345
  hypo
ctgggtcccagctccctctctcgaaaaccggagtcgaaaacggttccaaggtgttgcaggaagagtctcaggacgccgaggtccttagccaccgccgggccttgcaggggccatcttccgtcctggggctcttcccccgagggcagcgccgctgcccaagaatgccggccatgagagccgccgtggatccaggggtttttttggccgacacagtg

SEQ ID NO: 31638 - DNA, 95 bp, Homo sapiens
  chr19:758090-758185
  hypo
cggagggtccccagcccggactccggagagccctcagctcagattccatcctcagcccggccccagatgcccgtgcggccgacccagctccagaa

SEQ ID NO: 31639 - DNA, 30 bp, Homo sapiens
  chr19:811985-812015
  hypo
cctttccgtaaaagcgtgtaacaagggtgt

SEQ ID NO: 31640 - DNA, 63 bp, Homo sapiens; identical to SEQ ID NO: 11882
  chr19:813718-813781
  hypo

SEQ ID NO: 31641 - DNA, 88 bp, Homo sapiens; identical to SEQ ID NO: 11883
  chr19:814461-814549
  hypo

SEQ ID NO: 31642 - DNA, 204 bp, Homo sapiens
  chr19:869190-869394
  hypo
ttagagacccagtaaaggggacggggcccacacagggacgagggtcggtccgccacgtgcccggggagcctgaggtgcagggaaggtgcttgtgacgctcccatttgaggctggacagaagcaggtacatggggacttccacaccacctctgcccagacacccggcctggaggtgccgggacctctgaacgacaagattctggt

SEQ ID NO: 31643 - DNA, 181 bp, Homo sapiens
  chr19:874507-874688
  hypo
ggtgagcctgggcaagctgcttagcctttctgcctcagtccccttacggcaaaacggaaggaggagcagacctgcctgcacaggacccgggtgccgggtgtcggcctgggagcgtctcagcccccaggagtagagagaggtgaaaggatcgcttgagctcaggtggtcaagaccagcctgg

SEQ ID NO: 31644 - DNA, 121 bp, Homo sapiens
  chr19:874807-874928
  hypo
tgcgctgagctgggactgcgtcaccgtgctgcaacctggatgacacagtgagaccgtctctaaaagcctgggtgtggtgtaatcccagcctttaggctatatcccagcactttaggaggcc

SEQ ID NO: 31645 - DNA, 812 bp, Homo sapiens
  chr19:883637-884449
  hypo
gacggctgcaggagacgaggaggagtgtcggagcccaggactgcccagtggcttggctgtgggcagatggtagacacagacgtgcccagcgggggcaccgggcagtgaaggtgcaggtctgtgcagccacacggggtggcgccaggtgctgctgcaggagccagcgcagcccaaactgcctggtgactcaccacgaggcccaggggaaggaatgaggcccaacaaggccctggggaccgggcgaaggaacgagccctgggagaaggaatggcagcagccctcttcacctgcctggtgactcactacaagccctgggggaaggaatggcagtggccctcttcacctttactgcctctgcggccacaatgggcagttgacataaccacctgcaggccccgggagccatcggggcctcttgacacgtgctcattagtggcttctgaggagcgcctgccccacctgccccacgtgcccccacgtctggccactccagggtccattagcgctaatcggcaaatgcctgtgctctcatctaccgggaaaacatctcccttctccagagcggaggccagcctaaaaaccaggcccgcagcctccgaggctctgaaaaccaagcggctgttctggtccccggtcatagcaggcgggcgtccctgcttcgctccagccccaggattttgtgccggaggtggggatgacgggcttggctccgtgggtgcggggggcccatcgggcggatagagatgggaatgggggccccagaagaggctgctggagaggtggggtggggtggggggcgtgttctcagcagc

SEQ ID NO: 31646 - DNA, 586 bp, Homo sapiens
  chr19:885725-886311
  hypo
cattccaagcctgccagcccacgtgatggcctgcgcccgttcacctgctccgacatgtcccgggccaggaacttgaggtgggtgatggcgggaaacttgtccttgcggttgaggtcggtggtgcagcgcatgaacagggagggcaggatctccgtgtcgatacggcacttctcgctcaccacgctcacgcacaccttgtagaactgcacgggcgacgcgctgctgccgtccgccgtggccaccacgatgttgccgccgccggtgaaggcgatgtcggccagggccacgcggccgcgcagccggcacaggctctcggtggacgtcagcacctgcccgctgggcttcagcagggacacggtgaccaggccgctgaccgtcaccgcgatccagccctccatgggcttgccgccgaacagcgtgagcgacggtgagaacttgactcgggagaacttctccccgaagctggaggcgcccgactgtggagaagggagggagggaggaggggccgctcaggctcatgggggctgccccatgacccccagaaacacgcgcacagaagaaccacgcagaagccaggagtgtgtgc

SEQ ID NO: 31647 - DNA, 148 bp, Homo sapiens
  chr19:898928-899076
  hypo
accagatggggtgcctggggccggcggcgcctgcacagacgttcactacgggggtgagttctgagactgcgccccgttggaaaagtggagcgcaggggccagtagggggtctcgcctgaggtcccacgtgtggtatgtgggaggcctt

SEQ ID NO: 31648 - DNA, 31 bp, Homo sapiens
  chr19:899787-899818
  hypo
gacctctgacccaccacgtgaggctgcttaa

SEQ ID NO: 31649 - DNA, 155 bp, Homo sapiens
  chr19:900983-901138
  hypo
tgaaacactggggctgcgctgacatccccgggcaaatgggcacggtaaggccgccaagcacgtggacgcgctcctgcggtcacctctgtccactgaggggccgctgcttgtgtcgggccctgagctgagcgcagggaagcggggaaccggggtgg

SEQ ID NO: 31650 - DNA, 30 bp, Homo sapiens
  chr19:901790-901820
  hypo
aagagtccagggggcgcctgtgtctggctc

SEQ ID NO: 31651 - DNA, 507 bp, Homo sapiens
  chr19:932111-932618
  hypo
tggcctcccagagtgctgccgggattataggtgtgcgccaccgtggctgcctgcgtgatgcttttcaaggccccaaaattcacgctgtagggacggcttgtgctgttctgggctaattggaaacaaagtgggcgtcacgggtgccccacgctgtgctcatgagcgctctctgcagtctgagctggcggcggccggctcttcctatttccagagagggaaactgaggctgggcggggagtgggtctttccttgggctgggacgagccagcaccttctcccctgactcctgccctctgctcaccccaggaagcccaaatgggaggaggaggagatggaggaagacctcggggaggatgaggaggaggaggaggaggattacgaggatgaggaggaggaggaggacgaggaggggctgggccccccaggccctgccagcttgggcaccacggcactgttcccccgaaaggcccagccaccccaggccttccgcggcgatggcgttcccag

SEQ ID NO: 31652 - DNA, 221 bp, Homo sapiens
  chr19:938645-938866
  hypo
ctgtcctcatatccaggcctccgggcctgacagctgggcgtgtgtgggcactggggcagggacggccaccagcagcctctcaggctcaaggccagacacacctcgctgggcccagccccagagaccgctgggtcctcaccacggtgcctgccaggcagctctcgggagtgaagcgagaccccagcaagaaacgggcatccggtttttggtctttttttggt

SEQ ID NO: 31653 - DNA, 778 bp, Homo sapiens; identical to SEQ ID NO: 11884
  chr19:941803-942581
  hypo

SEQ ID NO: 31654 - DNA, 30 bp, Homo sapiens; identical to SEQ ID NO: 11885
  chr19:942806-942836
  hypo

SEQ ID NO: 31655 - DNA, 96 bp, Homo sapiens
  chr19:944545-944641
  hypo
gcgtcccccacccaggacccccgaccccggccctgggagggcccgactgccagcctggctgaacctccttcattgtctggttttcgggggtggatt

SEQ ID NO: 31656 - DNA, 28 bp, Homo sapiens
  chr19:944820-944848
  hypo
ttgctgcgttgcccaggctgaactcctg

SEQ ID NO: 31657 - DNA, 1001 bp, Homo sapiens
  chr19:955726-956727
  hypo
gtagaccccgtaataccgggtcagaatctcagaggagaggaccttccgctcgccctggaagggcccaaggtgtgctggcctctacgtgcggttcttagccggggggctgcgtaacgaaggacctcaaaccgcgggcgtaaaacaaacgaaacctgttctccctccgtcctggagcccagagtccaaaatcgaggcgtccgcagggctgcgctccctccaggggctgcaggaggagccttccgcctctcccagctcctgggggctccaggagtcccttgacatgtggccggcctctgtctctgtgcgaccgtctccagtgcccaccggccttcactgtgactttttctcaatttgatcacgtctgcaaaggccctttttccaaataacgtctcgttctgaggttctgggccgatgtgaatttgggtgggggatggcgttcaccccaggacagccccagcggtgaagtcctccccattccagtacctgctgcctcaggcgtttccctggcaagctcgtcctgtccccctctccgccctgtccccctctccgccctgcccggctcacttttgcagctgagaaaatcaaggttcaagtaacgagcatttattaggcaactgctgtgtgctcggctgattccagactctgggaacaaaacagactaaaccccagatacactcctagatccgtgactcggtgatggacggggtctcggaggaagaacgtggaggggagggggcggcagccgggccggggtcagaggacgaggccgggcgtgtggccatgtgtgcgtgcctgtgctcatgggacccaccggcccggccagccgggtctacctgagggccccacacccctcaggcagctgaaggggaaagggcctccccggccaccataaatcagcgcaggaatgcaggctggccagtctggcgctggccgggttggggcggagacaaagaccaggcagctggacctcgggcagcctcgaccacccagggcagaggtca

SEQ ID NO: 31658 - DNA, 82 bp, Homo sapiens
  chr19:994441-994523
  hypo
ctcctcagttctgtgtcgtgttcgggtttttcctctgtgactgggccgtcttggtgtctcgtggcacgcgtcacagtggtgc

SEQ ID NO: 31659 - DNA, 31 bp, Homo sapiens
  chr19:995015-995046
  hypo
ctggtccctgtggaaacgcagggctcaggac

SEQ ID NO: 31660 - DNA, 30 bp, Homo sapiens
  chr19:1003333-1003363
  hypo
gagatgcaggactgcgggcacgcctggccc

SEQ ID NO: 31661 - DNA, 787 bp, Homo sapiens
  chr19:1004869-1005656
  hypo
acgcactgttcgccgcgctggccaacggctcagcgccccgtgccctgcgcaagtgctgctacggctactgcattgacctgctggagcggctggcggaggacacgcccttcgacttcgagctgtacctcgtgggtgacggcaagtacggcgccctgcgggacggccgctggaccggcctggtcggggacctgctggccggccgggcccacatggcggtcaccagcttcagtatcaactccgcccgctcacaggtggtggacttcaccagccccttcttctccaccagcctgggcatcatggtgcgggcacgggacacggcctcacccatcggtgcctttatgtggcccctgcactggtccacgtggctgggcgtctttgcggccctgcacctcaccgcgctcttcctcaccgtgtacgagtggcgtagcccctacggcctcacgccacgtggccgcaaccgcagcaccgtcttctcctactcctcagccctcaacctgtgctacgccatcctcttcagacgcaccgtgtccagcaagacgcccaagtgccccacgggccgcctgctcatgaacctctgggccatcttctgcctgctggtgctgtccagctacacggccaacctggctgccgtcatggtcggggacaagaccttcgaggagctgtcggggatccacgaccccaaggtgggcggcctcggggggctgcgggtggccttggggggctagcggtggccccgggctgggctgtgtggggcaggggtggtcagctggacgtggaggacgtccac

SEQ ID NO: 31662 - DNA, 30 bp, Homo sapiens
  chr19:1009934-1009964
  hypo
gcaccaggcagagccgggctgaggccggcc

SEQ ID NO: 31663 - DNA, 31 bp, Homo sapiens
  chr19:1030194-1030225
  hypo
cggtgtctcagagcaccgaaggccaagaaag

SEQ ID NO: 31664 - DNA, 239 bp, Homo sapiens
  chr19:1032257-1032496
  hypo
aactgaggcccagagagaggccgtgagtttgcccaggaaggcgtgagcttggctgagatcagcatcgggtcttcacggttcctcgctgctcacagaggtttctgtttcccccgccccatgttgtgccctccagactcatgaacaagctacagccgggctccgtccccaagatcaaccgctccatgcagaactggcaccaggtgaggggctggtggagcggagcagggatggtgctgggg

SEQ ID NO: 31665 - DNA, 30 bp, Homo sapiens
  chr19:1047589-1047619
  hypo
cttctgctgctggacgcggcgctctacggc

SEQ ID NO: 31666 - DNA, 60 bp, Homo sapiens
  chr19:1047821-1047881
  hypo
gcctgaggcaggtgggcggggtttctgggccgcctcatacctggacgccctgattccagg

SEQ ID NO: 31667 - DNA, 31 bp, Homo sapiens
  chr19:1048973-1049004
  hypo
gccccttgccccaccccgctggacccaaagg

SEQ ID NO: 31668 - DNA, 31 bp, Homo sapiens
  chr19:1055084-1055115
  hypo
attgtctgcaggttctcggcaccagaagttc

SEQ ID NO: 31669 - DNA, 387 bp, Homo sapiens
  chr19:1079727-1080114
  hypo
cacctgcgtggccgacgcgaagacgcagaagcaggagctggaggataccaaggtgacggcgctgcggcagatccaggaggtcatccggcagagcgaccaaaccatcaagtcggtgcgtggggtgctccggccgcccgggcggggatggtggaccgggcggcctcctcctgacccctccgctctccggtgccgcccgcaggccacgatctcctactaccagatgatgcatatgcagacggcgccgctgcccgtgcacttccagatgctgtgtgagagcagcaagctgtatgacccaggccagcagtacgcctcccacgtgcgccagctgcagcgggaccaggagcccgatgtgcactacgactttgagccccacgtctccgccaacgc

SEQ ID NO: 31670 - DNA, 30 bp, Homo sapiens
  chr19:1083178-1083208
  hypo
gggaacctgggcatcgtgttcgggcccacg

SEQ ID NO: 31671 - DNA, 872 bp, Homo sapiens
  chr19:1108788-1109660
  hypo
ttcctgtccttggtcttcagccgcacgatctgcaggtagctgctgctgctgacgtcggccatgacggcggcgatgcggccccacacgcgcagcagcgcgccgcacagcatgtagtggtgccgcagccgcagcccctgcaggcagtccttaccctcctgcgccagccggcagtgccggttcctgcggacgagacgggtcgtctcggctcaggcgggtcccaggggcccgcaggctccccaggtgccctgagatctcccgcctcctctcagggtctcgggagcccccgatccccgcctgggtcgccgccatctgccggtttccccctggtccccggcccgccctcaccaggcgctgtggctgcagtgcgtcagcgacaaagcgtagccactctcccagggctccttggcctcctccgcggtgacctagggacacagggccgcatgagcctgggcggggtcagggccggcaacccgagcgaaagctgcgcccggcggccgcctacccggtggaacttgcggcggaggctgtccagggcctccagctggctctgccggccgatgttgggcttgtacaccgtgaagaactggccgcggttctgctccgccagcaggcagctgggcttgttaccgcggacctgcggaggggggcgttgaggccgcgccccggtccgccccccgcgggccctcctctgggggggtaaccccgcccgaccccaccttgtaggagaggtagaagccgtcataggggcccgtcagcgccagcgacttggcaaaggcgtcctcccacttcaggccgcggtccacgctgatctgccacggcacggggtgggggggtgtgagtgtggtgggggcggggtgggcagagtgtgaggg

SEQ ID NO: 31672 - DNA, 162 bp, Homo sapiens
  chr19:1112253-1112415
  hypo
gaagacatactctggcgcggagacctggttggaccggtgggtgcggcctgggggcagagctgctctcagggcccggccaggcgggggcggggccgagaccatgttgggggcggggccaggcagcgctgggggcggggccggactcaccgaactgctggatgg

SEQ ID NO: 31673 - DNA, 30 bp, Homo sapiens
  chr19:1112664-1112694
  hypo
gcgcggacaccacccgccacacggccactc

SEQ ID NO: 31674 - DNA, 194 bp, Homo sapiens
  chr19:1117274-1117468
  hypo
cctgcaggcccggccgccctcagccctcgaaggccgcagccgctcaccttgtctcgcgccagctcctctcgggccagctccaccagccggcgcaccttggctgcgatgcacagatacttgaagaagcgctggtgtgccgaccagaactggccccacagggacttgcgcgactccaggccgatccagtcggccgc

SEQ ID NO: 31675 - DNA, 30 bp, Homo sapiens
  chr19:1122663-1122693
  hypo
ctttcttccggccgcgcaggtggttctcca

SEQ ID NO: 31676 - DNA, 253 bp, Homo sapiens
  chr19:1128183-1128436
  hypo
cagggccacgcaggacggcgtctgacttctgcagcacctgaagggcagcaatgctgcaggaactctgagcagctcgggtctggggtgagcctggtgccatgccctgtgccggaggcaggggcgggggcagccacgcccagaggtggggctcgccatggggatgacacacacacacgcgctgcccagtgaaggagatgtatgtacatcatttcatttttttttttttgagacggattcttacactgtcgcccgg

SEQ ID NO: 31677 - DNA, 31 bp, Homo sapiens
  chr19:1156589-1156620
  hypo
agcagcccagtgtccacggataggcgagtgg

SEQ ID NO: 31678 - DNA, 346 bp, Homo sapiens
  chr19:1166899-1167245
  hypo
ggctccttggggagtgccaagcgttgccagcagccgggctatgctgatcccagacaagtggctcgaccggtcaccactgtccttgagcttaagtccagccttggtgacaaaaatgtcacaaggacctgcatccgagccctgagggcatcaggtcctggaggaggaggaagagtcccttctggcttcgggctgggcttgaggacggcagctccaagaccgcttagagcgagacttcagcgctgactgctggagctacgcaccctgtcctgacaatggccgcacagttaggcgctgctccacgcctggaggagggaactgagggcccgaaatcacagaagcaggaact

SEQ ID NO: 31679 - DNA, 444 bp, Homo sapiens
  chr19:1169793-1170237
  hypo
acaccaggaggggcacctgtccggagcatatgactcaacggtttcaacgtattctaaggcagaccaccacagcttctaattccaaaacattccgctcccccaaaacacagccgtgtccccaacagcagtcactcccccgcctctacagcccctgcaaccacacgcccacttctcttctgtggactggcctgctctggacacgtgaccacacgtctaccccccatctgtggactgccctgctctgcacacgtcacatgaacggagtcacgtgccgtggccttttgcgtctggcgtctctccgcaagcacgtctccgcagagcatccatgccgggcgcacagacgacagatctaatctccgcctcctcacggggcccaggaggcccagggcgagagctgatggggcccacgcatccgaaatccccgtcttggccagaaccccaggt

SEQ ID NO: 31680 - DNA, 30 bp, Homo sapiens
  chr19:1170711-1170741
  hypo
tgagaacacgcagcacgcacacaacacaca

SEQ ID NO: 31681 - DNA, 757 bp, Homo sapiens
  chr19:1171062-1171819
  hypo
ggcacacacacaacacaaacacgggtgcacaggcacacacaacacacaaacacggatgcacagacacgcacacaatgtgcacccataaaacacacgcgtatgaaacacacgagcaacacacacatgcacaggagcacacagccacaggcacgcacattcacacacacacaacgcacccacatccgtacaacacacacacagaacgcgcacacgtccgtacgacgcacacacagaatgcacgtgcgtacgtacaatgcacacaaagaatacacacatccatacaacacacaggcacacaacacacatgtgcatgcacatggcgcaacatacagatacacaaagacacgtgtacacacacatgcagagtccccagggcagcgctggcgtcatggggggctgcctccacaccgcctccaggagtgtttacagctgtggattacatgataccgcccccttcccagagctgatcccaccccccagcatgggggccccctgggagggggcctctgggagccggactggttctgtcgacacagtcgcctctttgttcggggcagagctcactctggcggtgttggcgtttccgcatgggccctgccggaggggcatccgtgactccgctggagccgggttgggccaagcccaagctggtcacacccctcacacccctggggttgggggaggccttaggcagcaagtgggtggggggtctaggggtggctggcgcaacctctctccacctcggtttccccgccag

SEQ ID NO: 31682 - DNA, 121 bp, Homo sapiens; identical to SEQ ID NO: 11886
  chr19:1173280-1173401
  hypo

SEQ ID NO: 31683 - DNA, 97 bp, Homo sapiens
  chr19:1178980-1179077
  hypo
tcagactttggaagccgccccccaggggagacgctcaactggtcagaggtgtggatagccccgtcccccagtagtcccaccccgcagagagctctca

SEQ ID NO: 31684 - DNA, 104 bp, Homo sapiens
  chr19:1179314-1179418
  hypo
gttaaaattcaactgtaggtacgtgacgagtactttttgttgctgctgctgttgttgttcttgttgtttttgagacggagtctcgctccgttgacaagaaggct

SEQ ID NO: 31685 - DNA, 31 bp, Homo sapiens
  chr19:1213488-1213519
  hypo
tcctgaacatttcacacgagtggtgtcacac

SEQ ID NO: 31686 - DNA, 30 bp, Homo sapiens
  chr19:1220712-1220742
  hypo
ccctgtaagtgccccgcccccccgggcact

SEQ ID NO: 31687 - DNA, 540 bp, Homo sapiens
  chr19:1226469-1227009
  hypo
gaggccagtcacaatggacagcgccggggcctccccaaggccgtgtgtatgaacggcacagaggcggcgcagctgagcaccaaatccagggcggagggccgggcccccaaccctgcccgcaaggcctgctccgccagcagcaagatccgccggctgtcggcctgcaagcagcagtgaggctggccgcctgcaggtggggcgcggcggggcccgggtggggcatgtggggacaacgcctggatgccacagccagccgtgagcatagcccgcgctagtcagtcatggtgaccgtcacgtggctgcgcgtggttgccatgtggcctttgggtggcttggccacgtagcgatccccgtggagggtgccgtctcggggcctggtgtctggccagcgtgctggtcatggaggcctacgtgtggcggggctctgggggggcgtgccgtcctcacagccacctctcagagtgggtgcattccgaggaccctgccctgggcctggcgccccctccccatgcccgcgccgcttccaggaaaggcttatgc

SEQ ID NO: 31688 - DNA, 528 bp, Homo sapiens
  chr19:1227510-1228038
  hypo
ttctccatcctcccaggggcccgcgggaggcggagaaccggtgcccaggctgacctcttccgtcttccttccaccctgcagcccgtgtccaggagccccgccaggtgcccgcgccaggccctcagtcttcctgccggttccgcccgccctcccggagaggtggccgccatgcttctgtgccgaccacgccccaggacctccggagcgccctgcagggccgggcagggggacagcagggaccgggcgcagccctcccccctcggccgcccggcagtgcacgcggcttgttgacttcgcagccccgggcggagccttcccgggcgggcgtgggaggagggaggcggcctccatgcactttatgtggagactactggccccgcccgtggcctcgtgctccgcagggcgcccagcgccgtccggcggccccgccgcagaccagctggcgggtgtggagaccaggctcctgaccccgccatgcatgcagcgccacctggaagccgcgcggccgctttggttttttgtttggtt

SEQ ID NO: 31689 - DNA, 30 bp, Homo sapiens
  chr19:1229169-1229199
  hypo
cgcgggacttaggccgggctgtggtcgggg

SEQ ID NO: 31690 - DNA, 30 bp, Homo sapiens
  chr19:1231277-1231307
  hypo
cgcacgggatgtgccgtaagcgtcagccgg

SEQ ID NO: 31691 - DNA, 594 bp, Homo sapiens
  chr19:1234899-1235493
  hypo
tgccttggtccctgcagcctccgcacccagctcctcccccgtcccggcggccaggacctcagacaggccctggggtgcctcccaacgccgccccgcttaccggcgacccttgtcctgcgtcttgcggctctgctcaaacagcgccgcctcattgaaggagacccggcggcccgtggagctggtggacaggaagcgttcggtctccgcatcctggcactcggggtcctctccccggaagtcggggtctgcgtggagaggcaggagagggtgggccccgggcgggccacgccaggcgcctggtcccgggagggctgctcctccgggcggccacggcagggagggctggggccgcggcacgggcggccgggctggcggggcgagggacactcgtccatccgctcacacactcactcgctcagcacgcgcctgggcccacctacgcctgggcgttaaggaaacagagatgagtcggaatcgagctgcgcccagtctggtgggggagacagacagacacagacggtcaggcagcccgagggggcggcgggtggccgaggggcggatggacaggcgagcgcacagccaggctggccagca

SEQ ID NO: 31692 - DNA, 154 bp, Homo sapiens
  chr19:1255377-1255531
  hypo
gactgtgcccgtgccgggcactcacggccacctctgcccgcaggcacgctacaccccaactgccaagacagcagcgggcggccgcggcgtgacatcggcaccatcctgcagatcctgaacgacctcctgagcgccacccggcactaccagggca

SEQ ID NO: 31693 - DNA, 30 bp, Homo sapiens
  chr19:1296960-1296990
  hypo
tggggaacacagcagcgccagccggagtcc

SEQ ID NO: 31694 - DNA, 207 bp, Homo sapiens
  chr19:1297608-1297815
  hypo
gttcgattgtccacacgtgtgcacaccccagcggccccggcttcaggcgtccttttcctcctctcttgatccttgcagacgcccccactgcactccaggatgcttctgggggcccgaaagcaggggcggtgatgctggaattttgggcgtaagaaccagttggaaataatctttcccagccaggcgtggcggtggctcacgcctgta

SEQ ID NO: 31695 - DNA, 30 bp, Homo sapiens
  chr19:1308146-1308176
  hypo
cgaggccggaacttcggagtcacctgctcc

SEQ ID NO: 31696 - DNA, 349 bp, Homo sapiens
  chr19:1312766-1313115
  hypo
tgggtgggggggagctccaggcgcccctgccccccgcccagccgtcagtcaggctggccgggcccccttcaagtcgtcacggcccagcagcggccacgggagggattattccggcctgtccagggtggactgaagtggaaccaaggctgacgagcggaacgcgcccccatggacccagcccgcccgcctttgtccgccgccagccccccacccgcctgccgtcacagaccccgcctcccgtgcctgagccccatttctctgggggccgggctgcctcgcgtggcccccgcctgactaaagccatgcagcttctcggccggctccatccgctggctgcctcagtttcccc

SEQ ID NO: 31697 - DNA, 121 bp, Homo sapiens
  chr19:1357652-1357773
  hypo
tgacagcaattccgacgccccagtcagtcctgcgtgattgtggcgagggcgcgtctggcaccgggaaggtgtagatcatctagaatgacggcgattccgacgccccggtcagtcctgcgtg

SEQ ID NO: 31698 - DNA, 31 bp, Homo sapiens
  chr19:1359088-1359119
  hypo
tttgcctgagtccagccggggactggtcatg

SEQ ID NO: 31699 - DNA, 30 bp, Homo sapiens
  chr19:1360193-1360223
  hypo
cgcgtggctctggacgttctgagcgagggc

SEQ ID NO: 31700 - DNA, 679 bp, Homo sapiens
  chr19:1370829-1371508
  hypo
tgaaggccaagggcgcggagagccacctgcgggccatcctaaagagcaggaagccatctcgctggctgcagaccttcctgagctccagccagtacgtgacctgtgtggagacctacctggaggatgaggggcagctggacctggtggtgaagtacctgcagggcgtctaccaggaggtgggggccaaggtgctccagcgcaccaacggcgaccggatccggttcattctggacgtgcttctgcccgaggtgagccgcggaccggcgtgtcacgtgggcagggaggggcctgcgctgggattttgcaactccgcacgaggaggctgccacggtcctcgcccctgctccctggccgttcggcggccaacggagcgtggaggcctcctgtgtttacatcctgtcagtgctgggaaatgcgagtgcgtgcgcttgaccctgtgcggagacggagccgcttacttgacccctgtgcagagatggagctgcttagaagctgtcagcaccagggggtgcgaactccctccctactgcgggcgcacagatgcttcccagcctcggtgggtcagtcctgggaaacccactgcgagttggaaattcccaagtcagaatcgcatttagtacccagataaacccactgtaagttgaaaaactgtaagtggataatgcgcctcatactctga

SEQ ID NO: 31701 - DNA, 30 bp, Homo sapiens
  chr19:1424937-1424967
  hypo
tagaggaggagacccgccccgttagccggg

SEQ ID NO: 31702 - DNA, 31 bp, Homo sapiens
  chr19:1432759-1432790
  hypo
ttcctcccctgctggacgctccccagccttt

SEQ ID NO: 31703 - DNA, 30 bp, Homo sapiens; identical to SEQ ID NO: 11891
  chr19:1449907-1449937
  hypo

SEQ ID NO: 31704 - DNA, 53 bp, Homo sapiens
  chr19:1482275-1482328
  hypo
cctggggccacatgcacgctgcccacggtggccgccaccgcctcccagcagtg

SEQ ID NO: 31705 - DNA, 167 bp, Homo sapiens; identical to SEQ ID NO: 11897
  chr19:1491271-1491438
  hypo

SEQ ID NO: 31706 - DNA, 30 bp, Homo sapiens
  chr19:1495371-1495401
  hypo
ccccgcatatgcctcgtgagtgcacggctg

SEQ ID NO: 31707 - DNA, 41 bp, Homo sapiens
  chr19:1496653-1496694
  hypo
tcccctggaagctgaccgtacgtaaccgctgtggggagata

SEQ ID NO: 31708 - DNA, 31 bp, Homo sapiens
  chr19:1533725-1533756
  hypo
gctacatgcccaactgcgggaggctggaagc

SEQ ID NO: 31709 - DNA, 129 bp, Homo sapiens; identical to SEQ ID NO: 11898
  chr19:1546216-1546345
  hypo

SEQ ID NO: 31710 - DNA, 34 bp, Homo sapiens
  chr19:1555126-1555160
  hypo
gtgcggcctgagaccggccggcgagaaaagtcaa

SEQ ID NO: 31711 - DNA, 30 bp, Homo sapiens
  chr19:1555380-1555410
  hypo
ctccacgcctgaggcggcagttaaagctca

SEQ ID NO: 31712 - DNA, 31 bp, Homo sapiens
  chr19:1578814-1578845
  hypo
tggccctgagcctccccggggctcagctgtg

SEQ ID NO: 31713 - DNA, 69 bp, Homo sapiens
  chr19:1579337-1579406
  hypo
aaagaatccacaccctcgtctcaacccaccaccagggatggggggcctcctcctcggggcctacaagct

SEQ ID NO: 31714 - DNA, 24 bp, Homo sapiens
  chr19:1582923-1582947
  hypo
cacatggggtggctcacgcctgta

SEQ ID NO: 31715 - DNA, 30 bp, Homo sapiens
  chr19:1584556-1584586
  hypo
cgccttctgcgggtcgctcttgaccttgtt

SEQ ID NO: 31716 - DNA, 30 bp, Homo sapiens
  chr19:1584855-1584885
  hypo
cgcccgccgcgggccgcgtcctcgccatgc

SEQ ID NO: 31717 - DNA, 30 bp, Homo sapiens
  chr19:1585231-1585261
  hypo
gtcggcgccccgggcggaccccagacccca

SEQ ID NO: 31718 - DNA, 30 bp, Homo sapiens
  chr19:1585902-1585932
  hypo
cctgctctcagacacggggctctgctctca

SEQ ID NO: 31719 - DNA, 171 bp, Homo sapiens
  chr19:1612623-1612794
  hypo
cagcagtgtgggtacacggctggtgttggtgtgggcagcagtgcaggtacacggctggtgttggtgtgggcagcagtgcgggtacacggctggtgtgggtgtgggcagcagtgcgggtacacggcttacgttggtggacacagcagtgtgggtacacggctggtgttggtg

SEQ ID NO: 31720 - DNA, 115 bp, Homo sapiens
  chr19:1617229-1617344
  hypo
atcagcaggttggcaggaaagcgtgatgttggaatgacctacagccccacgcccgggccagggccaacggcacactcacaatgggaccccagccgctcacaccacacatgtaccc

SEQ ID NO: 31721 - DNA, 30 bp, Homo sapiens
  chr19:1619263-1619293
  hypo
gggagccgggtccccgcccactgcccagct

SEQ ID NO: 31722 - DNA, 31 bp, Homo sapiens
  chr19:1648784-1648815
  hypo
ctgtttcaaccccaaacgctgccactgggca

SEQ ID NO: 31723 - DNA, 30 bp, Homo sapiens
  chr19:1698944-1698974
  hypo
ccgcaggcctgcaccgaagctcttaatagc

SEQ ID NO: 31724 - DNA, 210 bp, Homo sapiens; identical to SEQ ID NO: 11900
  chr19:1748637-1748847
  hypo

SEQ ID NO: 31725 - DNA, 1129 bp, Homo sapiens; identical to SEQ ID NO: 11902
  chr19:1754224-1755353
  hypo

SEQ ID NO: 31726 - DNA, 49 bp, Homo sapiens
  chr19:1756823-1756872
  hypo
caggcttgagccaccccgccgggcctccctctgacgtttaaacaccaac

SEQ ID NO: 31727 - DNA, 93 bp, Homo sapiens
  chr19:1785484-1785577
  hypo
gcaggcaagacagggccaccacgaccgcaaaggactggtggtcgctgaagctggcgggtcccgccgtgtcgcggctgatccacagtgtcatga

SEQ ID NO: 31728 - DNA, 101 bp, Homo sapiens
  chr19:1799798-1799899
  hypo
ggaaaccaggccatctggctacggttccctggttcagattcgggcggaggtgctgggcatggggccagacgtggctctggttctcaggcaccctgagcccc

SEQ ID NO: 31729 - DNA, 92 bp, Homo sapiens
  chr19:1808271-1808363
  hypo
ctcgtacaggttcagcggcaggaacgagtagaagttgtacttggccgtgcggatgacattggtctggaacgagagccgcgggctgcctggca

SEQ ID NO: 31730 - DNA, 30 bp, Homo sapiens
  chr19:1809741-1809771
  hypo
agagagccgggcgtcgctggagctcgaggc

SEQ ID NO: 31731 - DNA, 301 bp, Homo sapiens
  chr19:1815902-1816203
  hypo
tgggctgggctgggcgttctctggccgccagctcatcccgctgctctgggctgcctcggccaggtggacgggttaccggagatttattgcactgttttggaagaggcatggggctaaggaccagcgggacggcaggagaggcgggtgggaggcgggcaggcgtcatcgcttggtcttggcgtcttctcgaaccttccagatcaccaggtgcatgcaggcgccggcgtcctcgctggagctgtgcccatccactgcggggcagatgcggtgagcacccggcccctgcgcagggacggcccca

SEQ ID NO: 31732 - DNA, 251 bp, Homo sapiens
  chr19:1818650-1818901
  hypo
ccttgcccacatcccgcacctgcccacctaggccgtcgcaggccagcgactcacagtccttgggcctcttctcctcagctgtgaagatgattgcgcccccgggccgctctgggtgcgggaaggggtagccgttctccttgagctggtcctgggtgagcaggtactccctgaggcggctgtacagggcagcccctgtggacaggcacagtggtcagcccctgcctgggatggcccacggggcggtagacacc

SEQ ID NO: 31733 - DNA, 30 bp, Homo sapiens
  chr19:1820149-1820179
  hypo
ctcccaggcagctccgggtcacagctgcgg

SEQ ID NO: 31734 - DNA, 30 bp, Homo sapiens
  chr19:1822430-1822460
  hypo
cctccagactccctcggctgcacgctgggg

SEQ ID NO: 31735 - DNA, 30 bp, Homo sapiens
  chr19:1827483-1827513
  hypo
ttcttggtcccttccggccgctctgccttg

SEQ ID NO: 31736 - DNA, 58 bp, Homo sapiens
  chr19:1882111-1882169
  hypo
acacccccgaaacgcccggctccagcaccagggaaaccccatgcgccaggactcggtc

SEQ ID NO: 31737 - DNA, 17 bp, Homo sapiens
  chr19:1899115-1899132
  hypo
tccgtctcaaaacaaac

SEQ ID NO: 31738 - DNA, 162 bp, Homo sapiens
  chr19:1907680-1907842
  hypo
tcccagcccaggctggcggccgtgttctgctgggacctgggacctgggctgcctgccctcctgaggggtcccagtggtcggtcgcctgccttctgggtgggtgtggtagagggagggtcaggtggccccctgctgttggggggcagtcgctgtgggagtgag

SEQ ID NO: 31739 - DNA, 149 bp, Homo sapiens
  chr19:1912433-1912582
  hypo
gctgtggacccccgcggcctggggcaacccttcctggtgcccgtgcccgcccggccgcctctgaccaggggccagttcgaggaggcccgggcccactggcccacgtccttccacgaggacaagcaggtgaccagcgccctggctgggcg

SEQ ID NO: 31740 - DNA, 470 bp, Homo sapiens
  chr19:1914074-1914544
  hypo
tgaggaggtgggagccgcagaggcgtgcccagttgagtggtagaggcagcatttgggcctccttcatgctcaggtgctcagctccttcccctgaggggcaggaagtcagggaggagggagtgagaggtgggaggtggcaggcgggcggaggggaagatgtcctgtcccaagagccaggggtgccccaccccacggtgacatgttcctgaacgggttgtgagtggagggctcagttcctgggaactgcctcacctggactgtgggcgggaggcagctcctggccccgtgcccgccccctcgggcctgttcccctgccaggatctgggatggttcacaccccactggtctgtgatgcccagtgggcagcaggcatgcccctgctgggctggcccacctcccgatggcaggtccgcccccaggatcacggaagcagctagatccactcagtcgtgggtggatgtcaggccagg

SEQ ID NO: 31741 - DNA, 30 bp, Homo sapiens
  chr19:1918817-1918847
  hypo
cgttcctctctaggcgcgtctgggagaagc

SEQ ID NO: 31742 - DNA, 46 bp, Homo sapiens
  chr19:1920168-1920214
  hypo
agagagtgactgttctcgcccacgtccccgacgtgtctcccttgtc

SEQ ID NO: 31743 - DNA, 562 bp, Homo sapiens
  chr19:1921093-1921655
  hypo
gcgacttcatgtccaccgttggcttagtgaggccccacgctcagtgcgctgctgtggggcgagaggggacagccccgctctccctgtcctgggcggcttcaccagcgccacctccccacacactctgtgcactgctgtggggcaagaggcgacagccccgctctccctgccccgggcagcttcaccagcgtcacctccccaggggtgacgcatgcccgaggccatgagccacggcagcatctgtggtggcagaggactggaaactccagagaaatgacccccagcggggcctagctgtgtagatggtgagggtggccacatggcggcagccaggtactgaggacacggtgcagcaggggcccccggtgggccccgccaggaatcggacatcagcgggcgccgcagcctctaagcggagcatgcagcccactgacagtgtgctgggtgcctccctagacctgacacttgcatgcgggggcgtgcgatgctggccagtgggaagctgcgggggcggcggcaggagtcctcaaatgcctttgccgcttttcataaatctaaaatt

SEQ ID NO: 31744 - DNA, 135 bp, Homo sapiens
  chr19:1961170-1961305
  hypo
accccagccctggccgtcgcggttgtggcattctcgctgtcagggggctgttcccgtggctctcatggctgtggaggggcgtggagggggcggtccccatggccagaacctggccgtggcgggtggaggacttga

SEQ ID NO: 31745 - DNA, 319 bp, Homo sapiens
  chr19:1977027-1977346
  hypo
gtgcccggccacagaggcctcattctgcagcgtatgctactcgggcaaaggcagctgactgcagacccaacacggtgacccagctggatggtgcctgagagacggggctgccccacatggtgccctgtcatgccgcgggacaggtcgcccagcagatggtagctatggccccagtgccatcctgggctggagacacatgggtgccagacacgttcatgcctgtcgtctggcccagctgccgtggggagccctccagggccgtgtgcctgcagggaccggcctgttcacctctaggctcacccctcgggtgctgagtcac

SEQ ID NO: 31746 - DNA, 30 bp, Homo sapiens
  chr19:1977777-1977807
  hypo
gcctcgtaccttctgcgctttcatgagact

SEQ ID NO: 31747 - DNA, 30 bp, Homo sapiens
  chr19:1978008-1978038
  hypo
agacctccccagtgccgcttctgtcctggg

SEQ ID NO: 31748 - DNA, 726 bp, Homo sapiens; identical to SEQ ID NO: 11912
  chr19:1978312-1979038
  hypo

SEQ ID NO: 31749 - DNA, 30 bp, Homo sapiens
  chr19:1985998-1986028
  hypo
cgtgtcctgataaacggacaggaacaaaag

SEQ ID NO: 31750 - DNA, 18 bp, Homo sapiens
  chr19:1992863-1992881
  hypo
cccggcccaaaacacatt

SEQ ID NO: 31751 - DNA, 30 bp, Homo sapiens
  chr19:1993085-1993115
  hypo
tcgagcgctggcaccgcgtacttcttggcg

SEQ ID NO: 31752 - DNA, 81 bp, Homo sapiens
  chr19:2000098-2000179
  hypo
cccttgagcctccagagggagcgccgccctcggacgccttgatccatggtcctgggctccgggactggcagaggatgaacc

SEQ ID NO: 31753 - DNA, 264 bp, Homo sapiens
  chr19:2000542-2000806
  hypo
ggggctcctccaacaccgagcccctccctggagacacctgcatgggccttcaggattcgacccctgggcaccgctactgcctcctctgcccaccgtgagtccccagccccactcccggctgttccccccttcatgtatctgtaaccccttccccttccaaacaaatcgagaacacacggccacacaaaaacacatccacaattgctcacagcagcacgattcccaactccgaacgggggaaacaaccagcgtccattgacagac

SEQ ID NO: 31754 - DNA, 21 bp, Homo sapiens
  chr19:2009031-2009052
  hypo
ttccaagacagagtctcgctt

SEQ ID NO: 31755 - DNA, 30 bp, Homo sapiens
  chr19:2038585-2038615
  hypo
attcggccagaccccggggtctgggctcag

SEQ ID NO: 31756 - DNA, 30 bp, Homo sapiens
  chr19:2046070-2046100
  hypo
gacacgggtcttcccggctgtaggacggac

SEQ ID NO: 31757 - DNA, 41 bp, Homo sapiens
  chr19:2088264-2088305
  hypo
ctgcgagtggcaaggccggggatctaactgttcttgtttgc

SEQ ID NO: 31758 - DNA, 30 bp, Homo sapiens
  chr19:2099514-2099544
  hypo
gtgcgcagcatcagcgcctgggcaggtccg

SEQ ID NO: 31759 - DNA, 31 bp, Homo sapiens
  chr19:2111290-2111321
  hypo
acataggaattttcagcgaggagggagtagc

SEQ ID NO: 31760 - DNA, 50 bp, Homo sapiens
  chr19:2120003-2120053
  hypo
tggctggggaccctttcgggatcccagaagtcaggcgccttcctgagccg

SEQ ID NO: 31761 - DNA, 30 bp, Homo sapiens
  chr19:2136921-2136951
  hypo
cccacaggaagacgcgtgtgggaaccagac

SEQ ID NO: 31762 - DNA, 125 bp, Homo sapiens
  chr19:2140168-2140293
  hypo
gaacaaaaagaccatcccaggcgtggagaggtcagaccctcacgagggcaaaggggatgtcaaacggcgcggctgctgtggaaagcagcctggggttcctccacggttccatgtggagttaccgc

SEQ ID NO: 31763 - DNA, 39 bp, Homo sapiens
  chr19:2148549-2148588
  hypo
aactagacaacctcagcgctctggcgcttccagaaaacc

SEQ ID NO: 31764 - DNA, 30 bp, Homo sapiens
  chr19:2160537-2160567
  hypo
aaaaaaaaagtgggcggagatacaggttgc

SEQ ID NO: 31765 - DNA, 578 bp, Homo sapiens; identical to SEQ ID NO: 11913
  chr19:2165095-2165673
  hypo

SEQ ID NO: 31766 - DNA, 370 bp, Homo sapiens; identical to SEQ ID NO: 11914
  chr19:2168976-2169346
  hypo

SEQ ID NO: 31767 - DNA, 199 bp, Homo sapiens
  chr19:2182655-2182854
  hypo
cccctctctgaccaggcgcttgctagtgtgtctggaggtgctcagcagcaggggagctgcacctgctccccatgggaaggggcctgcacagacttctggggtcagaggagaccccaggcccccggatctcaggcagtggcggtgagagtgcctctctggctgcatgctcgccttctgcagggctcggagctgactgtct

SEQ ID NO: 31768 - DNA, 30 bp, Homo sapiens
  chr19:2191139-2191169
  hypo
tcccccgaggtgtacggggagacctccttc

SEQ ID NO: 31769 - DNA, 31 bp, Homo sapiens
  chr19:2198383-2198414
  hypo
ccgcggccttggagagcggaggatgtgcagc

SEQ ID NO: 31770 - DNA, 30 bp, Homo sapiens
  chr19:2200489-2200519
  hypo
ttgggctgggcccccgtgctttccactgcc

SEQ ID NO: 31771 - DNA, 55 bp, Homo sapiens
  chr19:2213918-2213973
  hypo
gctgcgggagcagtcggagcagctggagcaggacaaccgcgcgctccgcggccag

SEQ ID NO: 31772 - DNA, 140 bp, Homo sapiens
  chr19:2215592-2215732
  hypo
ggctgtccccggaggcgggctctcacgggcggctgacggacgtcgggaagcaccactcacgtgctcccgagctgctccctcacgtgtgtggcccaggcgagcctcaccagcgtacattagagaaacggaggtcgccgacc

SEQ ID NO: 31773 - DNA, 513 bp, Homo sapiens
  chr19:2216068-2216581
  hypo
cagcaaaaaccatcctcggccctccacatgactttatttgacgcccccagcttcccgaccccgcctctatgtggtcggcagctttggtttttccatcccacacaagcagcgggggtcctggccacccctccgggtgtccatctgtggcagtcttggttccctggagtggtcccccggtggggcgggcctgacaccatctctcctcctgcagatcagcattgtggagctagagaagagccagcggcagcaggagctcctgcagctcaagtcctgtgtgccgcctgacgacgccctgtccctgcacctgcgtgggaagggcgccctgggccgcgagctggagcctgacgccagccggctgcacctggagctggactgcaccaagttctcgctgcctcacttgagcagcatgagcccggagctctccatgaacggccaggctgctggctatgagctctgcggtgtgctgagccggccttcgtcgaagcagaacacgccccagtacctggcctcacc

SEQ ID NO: 31774 - DNA, 44 bp, Homo sapiens
  chr19:2222843-2222887
  hypo
tgcctgggccacagagcgagactccctctcggggggacaaaaaa

SEQ ID NO: 31775 - DNA, 137 bp, Homo sapiens
  chr19:2224707-2224844
  hypo
ctgcctcccagtgcctcccagcgtgcgccatcacagccggccctaagtgtgcttttggtggtgttctgtgttagttcgttctgctccttgcccacgtgtgcgtgcacgtgttacacgagaaacattgtagcacctgg

SEQ ID NO: 31776 - DNA, 184 bp, Homo sapiens
  chr19:2243477-2243661
  hypo
gagagcaaccgtgaccgcagggagcgcctccggcagctggccctggagaccatcgacatcaacaaggtgggccagccaccgtgcagctgcctgtggtgggtgctgggctttccagggcagccctggagagggtgccagaggctcttcttgggcctccgcccaggctgggcgatgcagccccgtg

SEQ ID NO: 31777 - DNA, 840 bp, Homo sapiens
  chr19:2243866-2244706
  hypo
tgtgcagaggcaggggtgagccgagtcccctcagcaccgtggacatcggggctggagcactctttgtgtaccctgacatgccccacgggcctggcctatggcaagggctctgttaccgtccccgtcttccagatgaggtcatgggtagagggggtgccacagccgcagatggtggagttagactttgaactccagcgtctgagacgagatgtgtgcgcccggctgccccagcttagggcctgcagatgggcgggtctttgggtcttcagtgtagcccatttgcttttcttgtgcctgtgtctgccttgtgcctactgctggcgtggtggcgtgggcagtggacggctccctgcctcgggagtgaccggcggtgctgtcctggctgtgcctccctctgactcagaaccaccaggaaggtggtgtcgggggctccctgggaacccccactgctcgaagcctggcccacagccccaggtggtgacacccgtgctcacgaaggcctcccgctggatcccccgttttcagaaatgcttgaccactgtcagcggtagccatgcctctacagaaggggggttctgcctccatgcctctacagaaaggggatcccgcctctgagggccttgacggcagcaggccgcgatcttctgtctaacgggcccctgttcttcccctccaggacccgtacttcatgaagaaccacctgggctcctatgaatgcaaactctgcctgacacttcacaacaatgaggtgcggcctctgcctggctccgggcggctcgcggcgggctgagtggctgacgtcagggggacctgcctgtgtctgtccgcccggcctcgagt

SEQ ID NO: 31778 - DNA, 30 bp, Homo sapiens
  chr19:2248617-2248647
  hypo
tttgtactgccccccgctcattaaacagcc

SEQ ID NO: 31779 - DNA, 73 bp, Homo sapiens
  chr19:2255404-2255477
  hypo
acctggaggttctgcggacaccaactaacaggccccgtcctcccacccctcctcactcggcaaattcatactc

SEQ ID NO: 31780 - DNA, 844 bp, Homo sapiens
  chr19:2275642-2276486
  hypo
caggcctggaccaggtgtgttcgccctgggttggggtcagtcccacagcagcgccagggcctggcccatcgaggactcggtggcctcggccaggtattcgcaacacagccagtcctcgaggctgggagcttccccacctgcggcccgctctgctaggcgcaggaccagcagcccgcggcgcacccgcagccagggcccgagcgctcggagccagggaccaagcggtgctccgcggccgcgcagctcaggcccgggcccccagagcagcgcctgcagcgcgccccgcgtccgggacgccgagggccgcaagcgggtcagctgtgctgccaggagctccaggcccgcggccaaaggcgtggtcgagggcgcagcaaggctgagcagcgctcggaggaggctgcccagctgcggcgcgtgggggcccggggatcccgggggtccagggggctgcagacagacgcggccaaagtcagtgaggagcaggcgtgggggccccgtcgtcgcacagccccgaggtgccaccagcagcaagttctccggccgcaactcgactagggccgcgccccacgcctccaggaacttcagggccgcgctcagctgcagcagcagcagggccacagcccacacgaactcctccggcggctgcgtgcaggcctccgccagccactgcgccaccgtgcgctctggaacctcggctgccagcgccactgcgcctctccagggcgccccgggcagtgtgccttcaggcaccaggccacacagcccctgcagattgaagtgtggagacagggaggcctgcagctccaggccccacgggtggggcacgtccgccccgggcttgggc

SEQ ID NO: 31781 - DNA, 509 bp, Homo sapiens; identical to SEQ ID NO: 11919
  chr19:2289762-2290271
  hypo

SEQ ID NO: 31782 - DNA, 237 bp, Homo sapiens; identical to SEQ ID NO: 11920
  chr19:2290630-2290867
  hypo

SEQ ID NO: 31783 - DNA, 58 bp, Homo sapiens
  chr19:2321711-2321769
  hypo
gatggcctccatgccgtcctgcgggcagattagcaccacggacgtgccccggcacacc

SEQ ID NO: 31784 - DNA, 31 bp, Homo sapiens; identical to SEQ ID NO: 11922
  chr19:2329160-2329191
  hypo

SEQ ID NO: 31785 - DNA, 25 bp, Homo sapiens
  chr19:2330122-2330147
  hypo
tttgagacggagtctcgctctgtcg

SEQ ID NO: 31786 - DNA, 21 bp, Homo sapiens
  chr19:2330386-2330407
  hypo
gacaggcgtgagccaccgtgc

SEQ ID NO: 31787 - DNA, 259 bp, Homo sapiens
  chr19:2339494-2339753
  hypo
tcttcctgctgagccgcctgggtctggggaggccccatgtccagggctctttatgcagatccaagctgcggttgctgcccacacgccagcctctggcccggcctagtggccaccccagctcaacccagggacgcgggccctgccaccctctgctgtgtggtctcctctgccctggggacgttcggggcggttccttgcacttcagtcccccccgggtcccctcctgctcccgggttttctgccccgttcccccgggtgg

SEQ ID NO: 31788 - DNA, 30 bp, Homo sapiens
  chr19:2363155-2363185
  hypo
tgtggcccactgcgcgctgggtcccgtccc

SEQ ID NO: 31789 - DNA, 30 bp, Homo sapiens
  chr19:2434975-2435005
  hypo
gcccacccgcctgccggccacaccttggcc

SEQ ID NO: 31790 - DNA, 30 bp, Homo sapiens
  chr19:2442052-2442082
  hypo
ttcagctgggtgcccggggttttgtggcag

SEQ ID NO: 31791 - DNA, 349 bp, Homo sapiens; identical to SEQ ID NO: 11927
  chr19:2488499-2488848
  hypo

SEQ ID NO: 31792 - DNA, 29 bp, Homo sapiens
  chr19:2507947-2507976
  hypo
gcccggccgcatgtgggtttttcaatggc

SEQ ID NO: 31793 - DNA, 30 bp, Homo sapiens
  chr19:2511460-2511490
  hypo
gaggcgcggctggccggcatatggcttctg

SEQ ID NO: 31794 - DNA, 30 bp, Homo sapiens
  chr19:2513421-2513451
  hypo
gccgcaggtgatgccggcaggccctggaag

SEQ ID NO: 31795 - DNA, 31 bp, Homo sapiens
  chr19:2518492-2518523
  hypo
tcccggccagcagcagcgtgatggggtctgg

SEQ ID NO: 31796 - DNA, 257 bp, Homo sapiens
  chr19:2524627-2524884
  hypo
atgagtgcatgtacacatctacgtgtgtgcgtctgcatatgagtgtgtgcataggtgcatttgcatacgtgcatgtgtgtggacatgcatgccagtgtgcacgtgtgtatgtgcacgtgtgtggacacggcactgcatgtgcgtgtgcgcacacgtgtgtgggcatgcatgtcactatgggtgtgtgcatgcgtgttggcgtgtgtgtacgtcactgtaggtgcgtggatatgtgcgtgcgtgggtgtgtacatgtg

SEQ ID NO: 31797 - DNA, 35 bp, Homo sapiens
  chr19:2682926-2682961
  hypo
ggctcactgaataaggactcccggcaggacacggt

SEQ ID NO: 31798 - DNA, 157 bp, Homo sapiens
  chr19:2683885-2684042
  hypo
tagggagctggtggacagcatcggccagaggagctcaaatccgccctcagccccagggggccgagctgcaaaagcgacgtcaaatggacaaaaatcccaccgggcacagaagtgcgaccagcaagtctatgggtttaaaaataaatgatggggccgg

SEQ ID NO: 31799 - DNA, 30 bp, Homo sapiens
  chr19:2716449-2716479
  hypo
gggtgggcggtgtccgggaagcccctccac

SEQ ID NO: 31800 - DNA, 31 bp, Homo sapiens
  chr19:2753327-2753358
  hypo
gctgaacctgaaacttcgcccctgcagatct

SEQ ID NO: 31801 - DNA, 37 bp, Homo sapiens
  chr19:2754664-2754701
  hypo
tggggttggagggtatcggtggcgccaaggtcaacac

SEQ ID NO: 31802 - DNA, 30 bp, Homo sapiens
  chr19:2757808-2757838
  hypo
cgggacagcctgaccgccacccccactgca

SEQ ID NO: 31803 - DNA, 30 bp, Homo sapiens
  chr19:2774182-2774212
  hypo
caggcatctcaggacgcacctcagtcctcg

SEQ ID NO: 31804 - DNA, 117 bp, Homo sapiens
  chr19:2795369-2795486
  hypo
tcccccggatgctcctcgcagtatgcagtggggcctttgctgttgatgtcacatgatcaggagagacccagagaccctcctgctgctgttcatcctcttaggcgaggacccctggga

SEQ ID NO: 31805 - DNA, 600 bp, Homo sapiens
  chr19:2796367-2796967
  hypo
ggagtgctgcgtcccggggagtgctggactcagggagtgcttgggcacagggagtgctgggtgccgggagtgctgggtgtgaggagtgctcggtcccagggagcactgggcatggggagtactgagctcagggagtgcttgggcttggggagtgctgggtggggggagtgctcggtcccagggagtactgggtgtggggagtgctcagtctggggagtactcggcatggggagtactgggcacggggagtgctcagtcctggggagtgctcagttgcggggagtgctgggctcagggagtactgggtgcggggagtgctgggcgtggccagtggagcttctgtggccccctgcccctgcctcctcgggagcgtccccccttcagggctgacccccggcctgatgtccatctttcttctgcctgaggacctgaactctggcaaggcaggtccacacagacatggggcgcagaggctcggtaacgaggggagcccctccacccactgcccggtgtgcctgatgtgggcgtctcaggggtgacatgagttagttggtgcagagctgggagcgcagcgctgaagtcaagcgtagtgtgttagca

SEQ ID NO: 31806 - DNA, 31 bp, Homo sapiens
  chr19:2808307-2808338
  hypo
cgccagatcgccatcgcggccatggtggcca

SEQ ID NO: 31807 - DNA, 188 bp, Homo sapiens
  chr19:2812072-2812260
  hypo
tccgtgtcttcccatacgagtccttccgggatctgcgtgatcggcctcagagccatgggctgagacagacccttctctggagaaggcttggcgtttgccattcatttgctcctccaacctccagtttcctcactatgaagtgcggccgttacgccatgtgagcctgtgcctcccgctgacttggtgtg

SEQ ID NO: 31808 - DNA, 147 bp, Homo sapiens
  chr19:2919930-2920077
  hypo
taccttatttttatactaaacattttcttttgttctcttagtactgcttatggttctgtgtgcagacacaaccatgacagcctatgcaccagccaaaaagcgcgcacacacacgtttgatcgtgtacagcatcgctgaatgactact

SEQ ID NO: 31809 - DNA, 31 bp, Homo sapiens
  chr19:2934559-2934590
  hypo
gtttctctacagtctgcgttttcataggagg

SEQ ID NO: 31810 - DNA, 11 bp, Homo sapiens
  chr19:2938053-2938064
  hypo
caggggtttgt

SEQ ID NO: 31811 - DNA, 27 bp, Homo sapiens
  chr19:2938993-2939020
  hypo
tgctctccaggacgcagtgagggaatg

SEQ ID NO: 31812 - DNA, 31 bp, Homo sapiens
  chr19:2941877-2941908
  hypo
catggggctgtgtgtgcgcctttcccctcat

SEQ ID NO: 31813 - DNA, 836 bp, Homo sapiens; identical to SEQ ID NO: 11933
  chr19:2944613-2945449
  hypo

SEQ ID NO: 31814 - DNA, 206 bp, Homo sapiens; identical to SEQ ID NO: 11934
  chr19:2950448-2950654
  hypo

SEQ ID NO: 31815 - DNA, 83 bp, Homo sapiens; identical to SEQ ID NO: 11935
  chr19:2950919-2951002
  hypo

SEQ ID NO: 31816 - DNA, 31 bp, Homo sapiens; identical to SEQ ID NO: 11936
  chr19:2977482-2977513
  hypo

SEQ ID NO: 31817 - DNA, 62 bp, Homo sapiens
  chr19:2996847-2996909
  hypo
tgggtaaccaccaggccgagttccccttgcctctgagatatcgcatccgccattctcctctt

SEQ ID NO: 31818 - DNA, 30 bp, Homo sapiens
  chr19:3002423-3002453
  hypo
gtgcaggatctccacgttgctactctccat

SEQ ID NO: 31819 - DNA, 43 bp, Homo sapiens
  chr19:3055855-3055898
  hypo
gtgggatgagcaaagccgtgttcgggcccgagggcagccagtc

SEQ ID NO: 31820 - DNA, 88 bp, Homo sapiens; identical to SEQ ID NO: 11938
  chr19:3094303-3094391
  hypo

SEQ ID NO: 31821 - DNA, 174 bp, Homo sapiens; identical to SEQ ID NO: 11939
  chr19:3094776-3094950
  hypo

SEQ ID NO: 31822 - DNA, 356 bp, Homo sapiens
  chr19:3105579-3105935
  hypo
cggaagaagctgatcccgcctcccaacaccactgtcttaggggtgagaattttaacataggaatttggggggatcacagacattcattgctatgggtgggaccacttggtgcgttgcccttggggtggcggtgtggtcagtggtccattcctgcccagcgccgagcagcggtctgtgcgtggggtctttgcacccgtgcacctgctgaagggtctctggagctttggctttttggcttttacgagtaaagctgccgtggtgcttggtgtgcggtgaggagtggacagaaggctctgtcctggcaggtgccctgcagtggcctgagaccgggagatgagggccggcaaggggctgtg

SEQ ID NO: 31823 - DNA, 109 bp, Homo sapiens
  chr19:3106269-3106378
  hypo
tccactgtgtgtggacccctgcgtcccagctccaagacgctgtgtgacgggaggcggcagcagctgagttggcgcggggagacagggcgatttgaaaagcaggctggga

SEQ ID NO: 31824 - DNA, 30 bp, Homo sapiens
  chr19:3107775-3107805
  hypo
ccagggttcagcaccggtcagtagagctga

SEQ ID NO: 31825 - DNA, 58 bp, Homo sapiens
  chr19:3109621-3109679
  hypo
gcagtgtggccgtggccgctgagcaaagctctggggaagggggcgcccagcccttggg

SEQ ID NO: 31826 - DNA, 125 bp, Homo sapiens
  chr19:3113405-3113530
  hypo
accctgtgggaggacccgggcatccaggaatgctacgaccgcaggcgcgagtaccagctctccgactctgccaagtagtaagtgcggccgcaccgctggcggcctggggacggcagctgcgggcc

SEQ ID NO: 31827 - DNA, 31 bp, Homo sapiens
  chr19:3114233-3114264
  hypo
ggtctgagcaggcacccggcctcttacaacc

SEQ ID NO: 31828 - DNA, 98 bp, Homo sapiens
  chr19:3114745-3114843
  hypo
ggaggctcgtatcccgaccccagggtctccattggcccgagccctccgggctgcttcagacactgccgtaggtggcgcagtgcgcggtccaccccctc

SEQ ID NO: 31829 - DNA, 64 bp, Homo sapiens
  chr19:3118998-3119062
  hypo
ttctcgtcgccctcagcgaatacgaccaagtcctggtggagtcggacaacgaggtgggccctgc

SEQ ID NO: 31830 - DNA, 30 bp, Homo sapiens
  chr19:3121225-3121255
  hypo
ttccacggagcctgcggctgccgggcgggt

SEQ ID NO: 31831 - DNA, 396 bp, Homo sapiens
  chr19:3148405-3148801
  hypo
tggggaaaccaaggcacagagcggcaaagccgctagcctagggtcactgagtgaggtcccggctgcaccggggtttgaacccaggaggcctggcgtggagttgggggtgtctgacgtggggttgggggtgtcgggggtgggagtcccgtggagggctgagcggttctgctgctccatccccaggcccaggcgagagcgggaagagcaccttcatcaagcagatgcggatcatccacggcgccggctactcggaggaggagcgcaagggcttccggcccctggtctaccagaacatcttcgtgtccatgcgggccatgatcgaggccatggagcggctgcagattccattcagcaggcccgagagcaaggtgagccgccagggcaggcaggggccca

SEQ ID NO: 31832 - DNA, 144 bp, Homo sapiens
  chr19:3155757-3155901
  hypo
gggttgggggtgtcacggagcaggctcctgagctctgaaagggggcacctcggttccctgtaggatcgtggacgtcgggggccagaagtcagagcgtaagaaatggatccattgtttcgagaacgtgatcgccctcatctacct

SEQ ID NO: 31833 - DNA, 31 bp, Homo sapiens
  chr19:3192318-3192349
  hypo
gaccctgggagcttctcgaatcggtggtctt

SEQ ID NO: 31834 - DNA, 183 bp, Homo sapiens
  chr19:3196410-3196593
  hypo
aaacctcctgtggctccgctggcagctgcaggaacccaaactcctcacatggccggggagtcgctctgtggagtgcccaggcccctgccagcccccggcccatctccttccttccatcatggacccccacacaccaagccgctgcctcccaccccagggcctttgcaccggctgcccctccca

SEQ ID NO: 31835 - DNA, 30 bp, Homo sapiens
  chr19:3201206-3201236
  hypo
catgtagcttctcccgggcgcgggccgagc

SEQ ID NO: 31836 - DNA, 12 bp, Homo sapiens
  chr19:3218880-3218892
  hypo
gggcgcggcggc

SEQ ID NO: 31837 - DNA, 178 bp, Homo sapiens
  chr19:3219524-3219702
  hypo
agtcgccgcgccctgccactcccacgcgctttacttcctcagtaacatccatggcacgggcatcctgcagtgaccgatgcccaccagactgcatccgctaacaagacagggagaccggcctgtggtacccagatgtgcccaagctcacagcctcactattctccgtgctcacagcctc

SEQ ID NO: 31838 - DNA, 223 bp, Homo sapiens
  chr19:3296494-3296717
  hypo
atcttctgaaccaacttgtttcgatattccagagtttgataattgtttcgagactctcctctagcgtgcctgtgttccgtgtgtccccgtgtgcaagcgtgtgccatgccaatctgcctcgagggggcctcacccgtgtccgcggcgcccgccgaggcccccgagggcctgcttgggagtgtgtgccggtgtgcagttgtacgtgtctttctggtccatgttt

SEQ ID NO: 31839 - DNA, 101 bp, Homo sapiens
  chr19:3336854-3336955
  hypo
ctgccacccgcccccacggctgcctgggaaacgccacggcctaatcctggctcaagaggacacgttgtaccagagattatataaaccgacctctccctttg

SEQ ID NO: 31840 - DNA, 31 bp, Homo sapiens; identical to SEQ ID NO: 11940
  chr19:3361306-3361337
  hypo

SEQ ID NO: 31841 - DNA, 55 bp, Homo sapiens; identical to SEQ ID NO: 11941
  chr19:3367361-3367416
  hypo

SEQ ID NO: 31842 - DNA, 30 bp, Homo sapiens
  chr19:3381511-3381541
  hypo
tctcctgggtcccccgggccttttgcgtgc

SEQ ID NO: 31843 - DNA, 30 bp, Homo sapiens
  chr19:3449009-3449039
  hypo
aggcatctcgtccccggtgaagaagacaga

SEQ ID NO: 31844 - DNA, 30 bp, Homo sapiens
  chr19:3456448-3456478
  hypo
tgtgtgacgcctggcggtggccaccctctc

SEQ ID NO: 31845 - DNA, 30 bp, Homo sapiens
  chr19:3463226-3463256
  hypo
agggccgacaggcgcgacacccagcaaggc

SEQ ID NO: 31846 - DNA, 140 bp, Homo sapiens
  chr19:3464750-3464890
  hypo
ccccaagagaggttcgccatcctctggcctcgagcccttggtccctccgtccgtctgtcctcggggcccgctcccccggtggcccttggggatcaaagcgtgggccgctctccgggagggcgggcgggggagggggtggt

SEQ ID NO: 31847 - DNA, 30 bp, Homo sapiens
  chr19:3465694-3465724
  hypo
tggtccctaggccacgggccggcccccaga

SEQ ID NO: 31848 - DNA, 862 bp, Homo sapiens
  chr19:3491030-3491892
  hypo
agctctgcccctggcttccctcgcgatcctcccctggctcccctcgcgatcctcccttggcttccctcgcgatcctcccctggcttccctcgcgatcctcccctggcttccctcgcgatcctcccctggcttccctcgcgatcctcccctggcttccctcgcaatcctcccctgtcctgagccgggcatcccagagcctcccgcagagtcccaccccaagcctggaaacttccacgctacagccctgcgccaggccccgaggagcagtcaggggactcagggagtcacagcacaacggcagctcctcggtcccagacggaggagggggacagcaaccatgcgcccagcaagacacaagcgatgacaccgatttacacacacccggtttagacgccaaagctctgcgggggaggagcggccctcaagagtcctccgggagctccgggtgagggtggggccctaggagggggccccgcgcagctgctccaggccgtccgcgtactggaaggcccgcccggtctcgtgctcatacatgtccagagccacctcgcagctctcacgcaccacgcgctctgggtcgtccgcgtgagcctgcagcgcggccaggcaggcgggccgggcaatggcgcccagggcctccgcgcactcgtgccgcaccatggggttctcggtgcatcgggccagggcggccgccagctggggcaccgccgcctcgtgctgcagctgtcccaggacgtagccgacctcgtggcggaagagggcgctcccacagtgcagacctgcaggggagagggacactcgctggggccaggaggggtgggaaggggagctctgtcttttcgaagacatggggtcttgctat

SEQ ID NO: 31849 - DNA, 234 bp, Homo sapiens
  chr19:3531589-3531823
  hypo
gtcgttagggaaaccgtcccagagccctggtgaggagagagcctggcgcgaccaacgccaggacgggcacagtccccgggccagacctgacaccggtgctctgcccatgccttccatcctaggggaacctggtggcggtgggcacacacaagggcttcgtgcagatctgggacgcagccgcagggaagaagctgtccatgttggagggccacacggcacgcgtcggtgaggagc

SEQ ID NO: 31850 - DNA, 31 bp, Homo sapiens
  chr19:3532514-3532545
  hypo
tgctggcctcggggggcggcacagctgaccg

SEQ ID NO: 31851 - DNA, 30 bp, Homo sapiens
  chr19:3535090-3535120
  hypo
acattggacggtcccggctcagaccgtctg

SEQ ID NO: 31852 - DNA, 156 bp, Homo sapiens
  chr19:3571350-3571506
  hypo
ggattacaggcgtgagccactgcgcccggcccatggcggataatattctgttgtaaggatatatcccgtcatcgatccatgcatcattagcagacgtttgagttgttttcactttttggctattatgaatcacgctgctaccgacgcttgtgtaca

SEQ ID NO: 31853 - DNA, 67 bp, Homo sapiens
  chr19:3577590-3577657
  hypo
tcaccccacctccccacgcccccgtcacccatccctccccacgccccgctgacgcctgagccccctc

SEQ ID NO: 31854 - DNA, 39 bp, Homo sapiens
  chr19:3578040-3578079
  hypo
atcgagcgcgaccccgcccagcacgagaagctcatcgtc

SEQ ID NO: 31855 - DNA, 30 bp, Homo sapiens
  chr19:3578298-3578328
  hypo
cggcgggacccactcgggggcaccagaact

SEQ ID NO: 31856 - DNA, 83 bp, Homo sapiens
  chr19:3600527-3600610
  hypo
gcagaaggaggcggcgaaccagggcgaggcgatcagccgtctctcctccagggtaatgtttgtgggccggaaacagggcccca

SEQ ID NO: 31857 - DNA, 30 bp, Homo sapiens
  chr19:3613558-3613588
  hypo
gcacgtcctggtggcgctcacgcagcctgg

SEQ ID NO: 31858 - DNA, 164 bp, Homo sapiens
  chr19:3638706-3638870
  hypo
gtgcgtgtgggcgtgtcgtgagagtgctggctggtgagagagcatgtgggtgggtcgacagggcacactcacgtgcctgtgtgcaggtgtgtgtatgcggtgtgcacacggtggagcgtgtgtgagagagagtccggttgacgagccggcggcaggaggagccc

SEQ ID NO: 31859 - DNA, 30 bp, Homo sapiens
  chr19:3648675-3648705
  hypo
gcggccgttcacagcggggatcccgcccat

SEQ ID NO: 31860 - DNA, 45 bp, Homo sapiens
  chr19:3691223-3691268
  hypo
gatgggagagatggacgcgtcctccgctgccggaacacggagcgc

SEQ ID NO: 31861 - DNA, 64 bp, Homo sapiens
  chr19:3694882-3694946
  hypo
ctgggcaaacatcttccgtaaaggaccgggcagcaagtgttttcggcttcgtgggacacgtagc

SEQ ID NO: 31862 - DNA, 103 bp, Homo sapiens
  chr19:3709702-3709805
  hypo
ggagcaggcttgcttgagattcgggagtccgtgggggtgggcgacatggatcccaccttgcctgggttttgagagcaaacccgtggactcagttagatctggc

SEQ ID NO: 31863 - DNA, 96 bp, Homo sapiens
  chr19:3739004-3739100
  hypo
ttccacgtgctggacacgctgcaccccggccccgggcagagccacgcacgaggaggccactggctggcggtgcgcatgggtcgtgacctgcgggag

SEQ ID NO: 31864 - DNA, 387 bp, Homo sapiens
  chr19:3740466-3740853
  hypo
gctccgaggggtaggacgaggacgtctttggggccaccatgctgctgaccccagtgctcagtactgtcccctcttctccccagggcggagcagctggccagcctggaagctgcccagagggccgtgggagtcgggcccggctcctccgcgggctccaatgctcgggccgagttctggcggctgcggggtcttcgtcgaggagccaagaagaccactcagcggagccgtgaggacctctcagctctgacccgacagggccgctacccgccctacgaacgagtggtgttgcgagaaggtggggcccggagctggaggggccctggggaggcctcacacacagctcctggtgcacctgttcactaacattcagcctctaaaaggcacagt

SEQ ID NO: 31865 - DNA, 328 bp, Homo sapiens
  chr19:3747811-3748139
  hypo
caacctagacctccctcaccacggcctggccgacagctccgctgacctcagctgcgacagccgcgttaacagcgactacgagacggacggcgagggcggcgcgtacacggatggcgagggctacacagacggcgagggggggccctacacggatgtggatgatgagcccccggctccagccctggcccggtcctcggagcccgtgcaggcagatgagtcccagagcccgagggatcgtgggagaatctcggctcatcagggggcccaggtgcgtcggacatggggggcaggcctgggaagggtctccggaggggatgccagcacagag

SEQ ID NO: 31866 - DNA, 30 bp, Homo sapiens
  chr19:3751531-3751561
  hypo
gacgtctgcgacttcgtctcctgtggggcg

SEQ ID NO: 31867 - DNA, 43 bp, Homo sapiens
  chr19:3754227-3754270
  hypo
tgcgcgtgctggtgggcgggttccgttccgacaccagctgggt

SEQ ID NO: 31868 - DNA, 308 bp, Homo sapiens
  chr19:3767180-3767488
  hypo
ctctgcccgaggtgcccgggacaccagggagcccaggggtcaccgtgtagctctgattcctgcccgcacccccgtcaggctgttcgagatgaacttgggtcccccaaagaccctggaggagctggaccccgagagccgggagtactggcggcggctgcggaaacagaacatctggcgccacaaccggctgagcaagaacaagaggttgtagcatggagggcccggcatcgctgacccccacgccgagggcttgccgttttcccggaggacgtggacttttgtgagacaagaggcggctccccagcctg

SEQ ID NO: 31869 - DNA, 30 bp, Homo sapiens
  chr19:3770844-3770874
  hypo
cgggcgaacggcagcgctggggcctcgggg

SEQ ID NO: 31870 - DNA, 158 bp, Homo sapiens
  chr19:3778075-3778233
  hypo
gaggatgacttgcccgcctggaccctccttgggcctggtcagtgcccccacgccgcactctccactctctcggtcctctggggccaagggccccaccgggtggggtcagggctcctggcttcggggcgaggtggagccgtcggcgtcctgccctgaga

SEQ ID NO: 31871 - DNA, 51 bp, Homo sapiens
  chr19:3779390-3779441
  hypo
agctgagcggtgttcacgagggctcgaccccgggtccgcagaaagttcacc

SEQ ID NO: 31872 - DNA, 345 bp, Homo sapiens; identical to SEQ ID NO: 11944
  chr19:3785490-3785835
  hypo

SEQ ID NO: 31873 - DNA, 179 bp, Homo sapiens; identical to SEQ ID NO: 11945
  chr19:3785864-3786043
  hypo

SEQ ID NO: 31874 - DNA, 16 bp, Homo sapiens
  chr19:3786583-3786599
  hypo
gcgcggcggggaccgg

SEQ ID NO: 31875 - DNA, 290 bp, Homo sapiens
  chr19:3792995-3793285
  hypo
ctccccccagccaggggactccgggattgaggggaggaacgctggctctttcgaggaagaacgctgcatcactcattctgcaaccagtcgctgtctgcccggccattctcgattccttgaacgaagggcctcttggggcgagctgctttgggcgtctttgctggaaaacccttgccccgtcttcctcgtccttaagacgcagccggacaggttgttttccagccacacttgcaggtttcatccgtggaaactgggtctgtgtcacatccggccttaaaagcttcccggct

SEQ ID NO: 31876 - DNA, 53 bp, Homo sapiens
  chr19:3816848-3816901
  hypo
gggacaaagccacagacgtgcgccatcagcggagagacgcggggtaccccagc

SEQ ID NO: 31877 - DNA, 30 bp, Homo sapiens
  chr19:3821080-3821110
  hypo
cggcagtgtccctgcgtctacggaggccct

SEQ ID NO: 31878 - DNA, 7 bp, Homo sapiens
  chr19:3822134-3822141
  hypo
cgttgaa

SEQ ID NO: 31879 - DNA, 234 bp, Homo sapiens
  chr19:3855419-3855653
  hypo
tcccgggcgatccggcggcagattcattgagtcattggataaatacttcctgggtgctagtggggaccagctgctgtcatgggcgctgtcacagcagcggggaataaccagaccaaagtcccgtcctccaggagggtgctgcgcgatagtccagggagacacggggtcagcaaaataattcaacgcgatctgatggttctcatgccgccgggaaggacgcggcaagggggtgtg

SEQ ID NO: 31880 - DNA, 602 bp, Homo sapiens
  chr19:3907668-3908270
  hypo
agcaggagggcaggagatatccggactctggcgtccatgcgactctccgccacctgcttctagacgacacccccgtggccaccgccaagaacatgcccggggacagcgcggatctatttggggacggcacgacggaggacggcagcgccgccaacgggcgcctgtggcggacagtgatcatcggggagcaagagcaccgtatagacctgcacatgatccggccttacatgaaagtggtcacccacggaggtgagacccgccccccggtgcccccttggggctccagcccggcccactgggcaacagggggttcgtcagtgcccctctctgatgcacggggatgttaagccgtcaactcgcttcgggtggacggactgtgggcaaggcgtgcatggtcagggaggcgcactgggggcccctgatggtcgctgtcactcctcagcgaaggcagagactggctaaggggtcgccggctgctgtggctcggagccatgccctcccgagcgtgtgggcaccgggacgtggtgggtggtgcgcgggaggcagctcagggctgggagaggactctgacgttgccgatcggctgcctctcctcagggtac

SEQ ID NO: 31881 - DNA, 291 bp, Homo sapiens
  chr19:3966566-3966857
  hypo
gaggggagccaccaggcactgcgggtggcacataagccccgtcattcactctgccagggcgcctcctccatgctggagtggacttcggccccggggacacagggcaccatatgcaccagcacccagtcacacctgcggccgctgcacacctggacaacctggttctgtaaaccacgcctttccctgttttgctattgccaaccagatttcaggttctgccactgagtcctcctacagcaacagcagaccacagccgcccacctccagacagcccccggtctcactggccac

SEQ ID NO: 31882 - DNA, 30 bp, Homo sapiens
  chr19:3978128-3978158
  hypo
ttcactgaccgtctcgcggtacgagacgac

SEQ ID NO: 31883 - DNA, 30 bp, Homo sapiens
  chr19:3979973-3980003
  hypo
caggaactggtccacgcccacgaggcccac

SEQ ID NO: 31884 - DNA, 30 bp, Homo sapiens
  chr19:3982642-3982672
  hypo
gggctgggtcaagtcggatgaaaacattcc

SEQ ID NO: 31885 - DNA, 30 bp, Homo sapiens
  chr19:4043285-4043315
  hypo
gactgaggcggcagcggtcgtaacaggctg

SEQ ID NO: 31886 - DNA, 48 bp, Homo sapiens
  chr19:4047770-4047818
  hypo
gttaccgtcggtggcggccccggggccacctccgctgtcacctcctcc

SEQ ID NO: 31887 - DNA, 30 bp, Homo sapiens
  chr19:4048060-4048090
  hypo
gcaggtggtcggagcggacgaaggtcttgc

SEQ ID NO: 31888 - DNA, 1665 bp, Homo sapiens; identical to SEQ ID NO: 11950
  chr19:4053793-4055458
  hypo

SEQ ID NO: 31889 - DNA, 59 bp, Homo sapiens; identical to SEQ ID NO: 11951
  chr19:4064871-4064930
  hypo

SEQ ID NO: 31890 - DNA, 13 bp, Homo sapiens
  chr19:4093666-4093679
  hypo
acagagtgagact

SEQ ID NO: 31891 - DNA, 54 bp, Homo sapiens
  chr19:4096410-4096464
  hypo
agaaggcccagggaggtggcccggcctggtcacgtggccaacaggaccttgggg

SEQ ID NO: 31892 - DNA, 31 bp, Homo sapiens
  chr19:4111004-4111035
  hypo
gatgtcatgcttagtgcgagatgccagacac

SEQ ID NO: 31893 - DNA, 30 bp, Homo sapiens; identical to SEQ ID NO: 11954
  chr19:4198043-4198073
  hypo

SEQ ID NO: 31894 - DNA, 106 bp, Homo sapiens; identical to SEQ ID NO: 11956
  chr19:4304578-4304684
  hypo

SEQ ID NO: 31895 - DNA, 754 bp, Homo sapiens
  chr19:4361146-4361900
  hypo
gagccaccccatggggaccctcgatcccatcctgttaaggctgcgggactcgagggtaggcagtgggccgggcccccgtcgggtcaggacggaggtgggggctgccccagaggaacattagtgtttctaagagcaccttagtgttgccccgcctcggccagctgggcgagaagttggggagcgggggaggaggctggcgccatggagtggggaagggagccgtcaccgttgggagtcagcgctagtgtaaacaggcatccccacccacccagataagcccccccacccaagtgtggggtcctgctcagggagtacctcaagggccggggcccaggtggcgccggcaggctcagacaccgccctggcagcaggggctccgtggaatgcaggagacccagcagggggtgccggccagtgtggacggaggggcggggcggggacacgggtgagtcactgcggcaggggcacaagcacctccacgtagctgagcgggaagaagcccgactggccgtccagcatgccctcgtaccagttctcatcgatctggttggtcagcgtgatgacgtcgccctcatggaagcccagctccccgtcgttctcgggctcgaagtcgtacagcgccttgcagctcggctggtccaggggcgctgggggcgggagcgggctgtggggctggggctgctacgcctcaccccgcccagtctggggtctcagacctgctgtgacctggagcgtgtgggtgggcatgggcctc

SEQ ID NO: 31896 - DNA, 234 bp, Homo sapiens
  chr19:4371715-4371949
  hypo
cacagcagagttcacgggtcctccctcggctggggagcgggtctctggctggtgtctgcctgcccgtcggcatcggtggtgctgtggtgctgcacgctgtgctacagagccatctccgcgtccctccctgcagtcctcctcagcggaatctgtgagcgcacagaccacaggggcctcgcccagtgccaggcacagagcggagaaatggcaggtgggcacggctggtcaaccgca

SEQ ID NO: 31897 - DNA, 31 bp, Homo sapiens
  chr19:4409230-4409261
  hypo
ggcaataaatggccagcgagaagacactggg

SEQ ID NO: 31898 - DNA, 62 bp, Homo sapiens
  chr19:4429585-4429647
  hypo
ccctgggcccaggacacggtgagctagccccagagtgcctccgtccccgtacctcctcactg

SEQ ID NO: 31899 - DNA, 149 bp, Homo sapiens; identical to SEQ ID NO: 11957
  chr19:4432844-4432993
  hypo

SEQ ID NO: 31900 - DNA, 31 bp, Homo sapiens
  chr19:4443067-4443098
  hypo
gagcagatacttgaaccgactcaattcctgt

SEQ ID NO: 31901 - DNA, 267 bp, Homo sapiens
  chr19:4446470-4446737
  hypo
ctctgctccgcggacgtcaggcccacctgagcctctgctcccgcttgatctcctctgctgtgaggttgaagaagtccccaggcagttcgaactgcgaggccaggggcgagggctggaagacgcggcgctgcctgtccagcttggcgcgcacgggctccgcagccagcagctgttccttgtgcctctccaggctctggggctgggccaaggtggtctcgctcagcacgtagaactcctcggggtcctctacagcgtggcaggacatgg

SEQ ID NO: 31902 - DNA, 30 bp, Homo sapiens
  chr19:4475259-4475289
  hypo
ctctcactgcagatcgacgacatcgcggat

SEQ ID NO: 31903 - DNA, 30 bp, Homo sapiens
  chr19:4483166-4483196
  hypo
agacagggccctgtcgcttgggccacgaag

SEQ ID NO: 31904 - DNA, 30 bp, Homo sapiens
  chr19:4502010-4502040
  hypo
gaggagagctgagccgcgggcagccaggcc

SEQ ID NO: 31905 - DNA, 38 bp, Homo sapiens
  chr19:4544027-4544065
  hypo
aggagggaggatgaagcggaggccgggagcagggggtg

SEQ ID NO: 31906 - DNA, 207 bp, Homo sapiens
  chr19:4550801-4551008
  hypo
ggttctcaccggggtcgaggcacctgatcctccggcaccggcgtccagatggactcgggggacttctgctctcggaagcggccttcaaacacagctgccacctgtgtcaggtcaaaggcgcagacagccgagccagggatgctgaggggttgggatgaaagagtttggtgagcccggtgggaggccccatctcggacaagtgcgtgc

SEQ ID NO: 31907 - DNA, 30 bp, Homo sapiens
  chr19:4554409-4554439
  hypo
tagttaaactccatcgcaatctcccggaag

SEQ ID NO: 31908 - DNA, 42 bp, Homo sapiens
  chr19:4555984-4556026
  hypo
agtctgaagactcacgctgtagttggcgcacaccgggttgaa

SEQ ID NO: 31909 - DNA, 114 bp, Homo sapiens
  chr19:4670764-4670878
  hypo
caagatgtgtgtgcatcgatattcaaaattagcagagggaaagtaggatgagaagcaggatgcttgcttttgtttccctcttgttgcccaggctggagggcagtggcgcgatct

SEQ ID NO: 31910 - DNA, 135 bp, Homo sapiens
  chr19:4675527-4675662
  hypo
tggggaggggacagccgccactgaccagcagagcgtggaagttcggtgcgtttcagtgcctgcctgaaagcttggggacaggagggctgtccacaggtggtgccccccgcgggccctggccgcttctcctgtggg

SEQ ID NO: 31911 - DNA, 642 bp, Homo sapiens
  chr19:4676078-4676720
  hypo
ccggcctgtcttttaaataattatgaaaaatatccccccaaacaaaacacaaacatcaagttggggaggctggccgggggggacaggcaattgcatgcttgggtgctggggacggtggctggccgggccaggggactgagaggtcacagggagccccaggcggaaggcagcccgctcctctgagtctcttctggcctctccagtgcccatcagcgtgtgacctcctcctcccagaaggcggggagaggaggggctggcccgagaccaccatctctctgtctcggcaaccaagaagcagcggacataaaacccaagagcgtttaaaaaaggataaaaggcgtcggggcggtgaaggcagcggctcctcggggctggccagcgctgggcgggacaaagtgcctcactggggcccgcgggccactcagtccctcccgcctggttccccgcggaggctgcagccacttgtgctgtgatgtggcggctcccggtgggcaggctcagaggtattcctgtagaaagtgcagcaacgtgacttcatagtgctcgcccgactcggggcagcgaatactgtgtctctcgttggggtagatctgcggggagacaggaggcagggctggggggcgtggccggaccacccccgtg

SEQ ID NO: 31912 - DNA, 30 bp, Homo sapiens
  chr19:4682712-4682742
  hypo
gggcagcttctccacgtgcagggccacgga

SEQ ID NO: 31913 - DNA, 75 bp, Homo sapiens
  chr19:4683996-4684071
  hypo
gaatggctggtgccatcgccgttgtcactaccagccacatccccaccaccgccactgccacgatttcaatgctgg

SEQ ID NO: 31914 - DNA, 30 bp, Homo sapiens
  chr19:4685800-4685830
  hypo
gctatctggctgcccggggaagccacatcc

SEQ ID NO: 31915 - DNA, 31 bp, Homo sapiens
  chr19:4693048-4693079
  hypo
cccctgtgttgggggacgccttggctgctgt

SEQ ID NO: 31916 - DNA, 39 bp, Homo sapiens
  chr19:4798320-4798359
  hypo
attaagatgcttaaggacagccgggcgcggtggcagacg

SEQ ID NO: 31917 - DNA, 31 bp, Homo sapiens
  chr19:4817457-4817488
  hypo
gggcctgcagacccctcggtgcactccactg

SEQ ID NO: 31918 - DNA, 150 bp, Homo sapiens
  chr19:4817866-4818016
  hypo
tcccagagggcaaagccgaggatggtgggaggcagcccagattggactggagcgtccggatgctccctggatccccagcaatgtcccacccacaccggtttcgggcctcatcctgaagttcccccagccggtggtcgtccctggagctga

SEQ ID NO: 31919 - DNA, 30 bp, Homo sapiens
  chr19:4818344-4818374
  hypo
tagaatgtcgaaggcgctaggaagtgatgg

SEQ ID NO: 31920 - DNA, 57 bp, Homo sapiens
  chr19:4835701-4835758
  hypo
tttcctttttaattcgcataggccagagttcagcaaactgtttgttgtaaaggacca

SEQ ID NO: 31921 - DNA, 102 bp, Homo sapiens
  chr19:4851494-4851596
  hypo
attaaagaagaatatcaaataaacagtgcagggagtgcgaatatgtgaccgagatgactggagtgggatgtctggcctggcgggaacaccagcattgttgtc

SEQ ID NO: 31922 - DNA, 30 bp, Homo sapiens
  chr19:4902561-4902591
  hypo
gtggctgttggcctcgtccttaccctccac

SEQ ID NO: 31923 - DNA, 30 bp, Homo sapiens
  chr19:4903937-4903967
  hypo
cttaatctgaacatcgacaccatcaggaag

SEQ ID NO: 31924 - DNA, 30 bp, Homo sapiens
  chr19:4941965-4941995
  hypo
cggggagaccagagcgccccctacaaatcc

SEQ ID NO: 31925 - DNA, 85 bp, Homo sapiens
  chr19:4944383-4944468
  hypo
atgtaccatcgtcccgtccaaccactacggacccatcccggggatccccgtgggcaccatgtggcggttccgagtccaggtacct

SEQ ID NO: 31926 - DNA, 114 bp, Homo sapiens
  chr19:4962294-4962408
  hypo
gagacccaggagatgacggtgacgggctgaggtcctaaccgcagcctgggaggtgctgggctgttcactttgcagcgtcaagttgcaggggtcagcaaacgacagccaatggga

SEQ ID NO: 31927 - DNA, 278 bp, Homo sapiens
  chr19:4986474-4986752
  hypo
gtccctgatagcagaagacagcgaaggcacctgccccctgccatggcaggtcggcgggcacagaggagggctcgggaggctgtgtcctccagcgtctccatgtttactgtgccaggccaggtgctgaggggccggcgaggaagacgtgaggactggagagagcctggattagggccctcgaggggcggcgctgctttagccgggggaacagggagggcctctcccagcaggtgacattcagtcagagacctctgagcgactcacacctgcccaccttt

SEQ ID NO: 31928 - DNA, 89 bp, Homo sapiens
  chr19:4990664-4990753
  hypo
aaacactgaactagttctggtcgcctctccggcctttgttttggggagaatattcgatgagatggcccgtaattctaacactgtgcatt

SEQ ID NO: 31929 - DNA, 43 bp, Homo sapiens
  chr19:4991093-4991136
  hypo
actcctgcctgggcgacagagtgagactcggtctcaaaaaata

SEQ ID NO: 31930 - DNA, 451 bp, Homo sapiens
  chr19:5023258-5023709
  hypo
agcagagaacgttctcgtgccaaggttttctctttcctgcctgagggccctttatgtagatcagaccagagacaagtgaatcccggtcttgccaggggaggcatttggagctgctcgtgggacgtggtgatgcggtgccaggccacatgcccggggctggggccgagtggcgttctcgtgctgcctctgtggccaggtttcacttgggaacctggctgcatcgcgggttcctcctgggccttctggtggcttggggctcctctgtcctcggtccctgctgggaaccgtgctttggcagcaggaaccagcgagatggcagcacaggggctggaggccggctgggactcactggggccgcatggggcttcacctgatgcccagccctcctgggacagggaccagtgggagcaggaggtgggacaagaggacgagggctcgagggagcccccac

SEQ ID NO: 31931 - DNA, 74 bp, Homo sapiens
  chr19:5037634-5037708
  hypo
attagtgtttctcttcgcttggcactgtggacttggggccgcatcgttctctggggtggcgccatcctgggcat

SEQ ID NO: 31932 - DNA, 30 bp, Homo sapiens
  chr19:5037979-5038009
  hypo
cttcactgatgtgatcgctgggtccttggg

SEQ ID NO: 31933 - DNA, 30 bp, Homo sapiens
  chr19:5038228-5038258
  hypo
gtggcagccccggagcggctgggagggcct

SEQ ID NO: 31934 - DNA, 96 bp, Homo sapiens
  chr19:5058358-5058454
  hypo
agagcagtgccaggcccgggagcccttgggatggaggcagggagaatggggggctctgaggactgagggaggaggggagcccggtgaggggaggat

SEQ ID NO: 31935 - DNA, 130 bp, Homo sapiens
  chr19:5060970-5061100
  hypo
cctttaattgcaggcgtgacatggcttgcctcggcgagtctgctcctaattaaagtgggctggcggtgtatgaagttcgcacggatcctcagggtgctgacccagccccggttccggagggccagtgtga

SEQ ID NO: 31936 - DNA, 164 bp, Homo sapiens
  chr19:5080432-5080596
  hypo
tgagcagacgcgttacgaaggagctgcaggaacgaaagccatggttcagtgcccagcatcggtagaagtcagaggcagccagctgggagacaccgccagccccaggacggccacgtcagaacaccgccaccagatgccagtgaggagggcgcagctgcacgctg

SEQ ID NO: 31937 - DNA, 30 bp, Homo sapiens
  chr19:5094979-5095009
  hypo
ctgcagctcgggggcggcgccgggggcggg

SEQ ID NO: 31938 - DNA, 37 bp, Homo sapiens
  chr19:5102566-5102603
  hypo
aggggaggaatggggccggggccggggtggcatctgg

SEQ ID NO: 31939 - DNA, 30 bp, Homo sapiens
  chr19:5107646-5107676
  hypo
ccttttcatgggcacgtggctcccacaggc

SEQ ID NO: 31940 - DNA, 30 bp, Homo sapiens
  chr19:5112695-5112725
  hypo
tgtcttccccacctcgcggcctctctcgga

SEQ ID NO: 31941 - DNA, 30 bp, Homo sapiens
  chr19:5138078-5138108
  hypo
ctggtaggtccttgcggtcgaggcccaccc

SEQ ID NO: 31942 - DNA, 30 bp, Homo sapiens
  chr19:5148115-5148145
  hypo
agatgcttctgagacgtgccgggcaagacg

SEQ ID NO: 31943 - DNA, 516 bp, Homo sapiens
  chr19:5238077-5238593
  hypo
gggggaagcagggggaggccacgacagagagaccacgccggtggaggccacaccagggaaggccacgctgggctgagcggagccagggaggcaggtgaggtggggagacggcagaaggggcctgtccagctccgagtttagagaagtcagggagagagggtggcggtgacccacagccaactgccaggtgaagggtgactcgctccaaacagggaggccgggccggcacagcagagaactccagagatttgagccccgagtggggacctgcatgcccccacgaaacctggcctcggctccgattccaccccctccccaccctcgggaactgggacctcgtcctggggtcttgagagccaaggctccctgcccgggggaggaagaccgacggggaaggtgggttcgtctctgtgtcctttgctctgagaatgatggggtgcgagccgtgaccacagcctcacggtaccctcaaaatgcctgggaaatgggcacaacgtggcccttcaatcagccccc

SEQ ID NO: 31944 - DNA, 30 bp, Homo sapiens
  chr19:5239036-5239066
  hypo
accacgtaggaagtcgtcgggtcgaaggtc

SEQ ID NO: 31945 - DNA, 30 bp, Homo sapiens
  chr19:5240209-5240239
  hypo
ctcccggccatggtcgccttcccggaagag

SEQ ID NO: 31946 - DNA, 420 bp, Homo sapiens
  chr19:5245670-5246090
  hypo
actgaagccaagagggtaactcggaggtgctcccacgctgcctcccacctgtgcctgaagtcggggatcgactccagcctgcccctccacctacgagccccatgggccctgctcacatttcaccgtgatctgagcaaccgcctcaatgacgcccaggctggacatggccacgcaggtgtagttggccgagtccttgacatctgtgagttccagcacgttccgacccacgggcatgtcatcctcgggggtcaggtcctcggccccctgcatccacttcacgtatggcatgggcgagcccacggccacgcaggtgatgttcacgttgccccctggcatgatctcgtggctcatgggcaggatggagaagcgcggggccacgcggcggactggggagggggcggcagtggcggcgggagggag

SEQ ID NO: 31947 - DNA, 101 bp, Homo sapiens
  chr19:5274367-5274468
  hypo
tggaaagaagggggggcgctgatgggtccaggcatctggctaggataccaaggagccacgaaaacctgcattccatgccctgcccacggaagtgccatgtg

SEQ ID NO: 31948 - DNA, 210 bp, Homo sapiens
  chr19:5334918-5335128
  hypo
gcagagggcctggcacggggcgccaactctaaatagtcggagcagctgttattatccccccgacatcccctcatttgctgatcacgggggttaattataagcggcattaaattatacacacacagacgcgccaacctcgcttccccagaacccctgaatttccgcaaactctcaattacccacgtgacagcgcgacgatgggccatcctc

SEQ ID NO: 31949 - DNA, 30 bp, Homo sapiens
  chr19:5455482-5455512
  hypo
ggccttcaaagacacgacgcatgccgctct

SEQ ID NO: 31950 - DNA, 759 bp, Homo sapiens
  chr19:5587165-5587924
  hypo
tttaaaaagatcccccaagttcgagggaaccctggctaccagattcaacagtgcgtctgcccacccgaaaactcgcagcgagtgggacttagtagcggcgggtgaagtgggggtacggggggggatgagggtgtgggtgagggactctgctgccccggtcctggctggccactccgccaccttccagtccgccacctggcaccacgtggccctgggaatgtccaccttgtgcaaagccgcctcgcctaggaacaaagtcagacaatttttttccccttgaagtgctcagcgttttcatcgtaacatgggttcagtaacggtcccgcagcctttagagcgcttgggttttttttccaggtgagaaaaatcatcatcgcacattgtattccaggtaactcaagagcgttatttgcataaattgcaaagagctgctttttgctttgttttcataacatccaacccagccagctgatcaaacatgcaaaaaagggagaggaagtgaggagcaggagtgaaccaccgtcctccacggacgacacaccttaccccgccactccaccgcggcttgccatgtgccccggccccgagggcccagacaggcccctctcgccacctagaagagaagaagggtctgcaaacactccgttcctggggaagcccctggacacatgtgggggccacagccaccctcgtccctggagccagccccgtaccttgccacctggcgtgctcccggctagccgcgcctgcgtccatggc

SEQ ID NO: 31951 - DNA, 30 bp, Homo sapiens
  chr19:5588193-5588223
  hypo
ccagaaatgccaatccgagccacaccgaga

SEQ ID NO: 31952 - DNA, 30 bp, Homo sapiens
  chr19:5593917-5593947
  hypo
gcctccgcccgggccgccgctcctgctcgt

SEQ ID NO: 31953 - DNA, 740 bp, Homo sapiens; identical to SEQ ID NO: 11970
  chr19:5608065-5608805
  hypo

SEQ ID NO: 31954 - DNA, 36 bp, Homo sapiens
  chr19:5609544-5609580
  hypo
ctttaggtgatacgcccgcctcggcctcccaaatta

SEQ ID NO: 31955 - DNA, 30 bp, Homo sapiens
  chr19:5661767-5661797
  hypo
gctatgagcaggagcggcggcccgcggtgc

SEQ ID NO: 31956 - DNA, 30 bp, Homo sapiens
  chr19:5677980-5678010
  hypo
cctgctagggttgtcgggagagggtggaat

SEQ ID NO: 31957 - DNA, 30 bp, Homo sapiens
  chr19:5683383-5683413
  hypo
gtgtctccagagagcgagctgtctcttggc

SEQ ID NO: 31958 - DNA, 30 bp, Homo sapiens
  chr19:5684954-5684984
  hypo
gctgtcctgtcctccgcccagagtgaccac

SEQ ID NO: 31959 - DNA, 30 bp, Homo sapiens
  chr19:5694577-5694607
  hypo
caacacaatgggcacgggaaggtggggtga

SEQ ID NO: 31960 - DNA, 297 bp, Homo sapiens
  chr19:5695909-5696206
  hypo
tctggtgtgtctctcacggccccatctgctcctcggccgcaggtcccacctgtctctcccgggcccaggagctcccagaggcacggcctctgcaggctctggggggcgccccctgctctgggaaggggacagcagtggggaggggctgggcttacctccgcaatggccagcttctcctgggccacgtagcccgacacgttgatcatctccatacggtctcgcagcggctcggggatggtgtccgtgacgttggccgtgcagatgaacagcacctgggggcggcggcaaggtgctggg

SEQ ID NO: 31961 - DNA, 30 bp, Homo sapiens
  chr19:5712053-5712083
  hypo
ctgggagctggacccggctgaggcctccct

SEQ ID NO: 31962 - DNA, 9 bp, Homo sapiens
  chr19:5759792-5759801
  hypo
aagggagtc

SEQ ID NO: 31963 - DNA, 41 bp, Homo sapiens
  chr19:5785226-5785267
  hypo
ttggccttgtgcttcggcaagaaggcgaagctggggggcac

SEQ ID NO: 31964 - DNA, 31 bp, Homo sapiens
  chr19:5785479-5785510
  hypo
gatcctctgtgggagccgctccagcagcccc

SEQ ID NO: 31965 - DNA, 1122 bp, Homo sapiens
  chr19:5789243-5790365
  hypo
tgaccacgtcctcatccgtcaggggcccgcaggtccgcacggggctgctgggaggggtgctagtgcccggccctgcggggacctgctgggcaccacagttttcctgcctgggagcgccctcggctgccgtgccctcggggacagcggcagcgggtgtggggccctggctgaaccggcgcagggcctgctcagctcgctcgaagcggacctcgcgcttccgcagctgctgctgcagggctttgtccaggccgttgcggatggacgggggctgggtcccgcgggccgccaactcctcctgcaccaggttctgtccctcgggcctcaggtgggccccagcgaagcggcaggtcacgccgtaggggcaccggccgaaggtctcgaagagcacgcagcgggggcccaggtcggccggcttggtctccaggtagcgccccacgtcgtgcagaaagcggcagcgatcaccgaagaaacacttagcagccgactcctgcgaggaaacagggaagcagtgagggaggacagggagaccccggggcagcccagcagccagggttcaaactctagatcacccctcctggctcttgtgtccctgagcaagtcaggcacctcaccgtgcctctgcatctccatttatacaatgagaacaatgacaagccctacaatgtatcccgaggagaatgaagacggaatggcatcagagcaagctcactgctcgttgctgaaggcccaggagctttctaacaattacccgctgccaggaaacacaccctgctcctgcctgccccggcaggaatgctcacgtggccgcacttgcctggattagggagggacacagcctgttcttgtcgtagttcgtgggcttcacatggggccggcccttgttttgtccccgggccctcttctgagtctgtagctgctccccgggctctgctgcctcctccgtctgcccgtccgccgtctgtccatcctccagtcggatccgcttagcctcaggctcagccagctcattgccagcagggtctcctacctcggtttcccggcaagtcttctcctgccctttggcttccaggaattggtgaaactgctccttggtggtgaggtatctgccgacagaaagggaaa

SEQ ID NO: 31966 - DNA, 49 bp, Homo sapiens
  chr19:5805004-5805053
  hypo
ccaccgcccccagccccgcccccggccccgcccccggccccgcgccggc

SEQ ID NO: 31967 - DNA, 408 bp, Homo sapiens
  chr19:5825332-5825740
  hypo
acatgtccatgcgtgcgcctgcgcgggcatctgaggcgtggatgccggcagggtgcgtgtgcagcgcctttgggtgtgggccacgagtacgcccatgtgcgcgtctgcgcccgcccctgccagcccacacaatcctcttttcttgtccttacaatgcacaagggtggcctccagcacgagctccacttctgtcctcccaccacttccctctctgcaagcggcgtgaagtccttcctaggactctgggacagagacccgggcgggacccccaaaatccagtgctccaggacttggggtgcggggggcaaagcacgaatggaggaatttcaggcactgcggagggtcagggcccatgggcgggtgcctgtctgccctactgcaaaaagcgagtggccactgactccccaa

SEQ ID NO: 31968 - DNA, 38 bp, Homo sapiens
  chr19:5826123-5826161
  hypo
cgacagagcgagactccgtctcaaaaaaaaaaaaaaga

SEQ ID NO: 31969 - DNA, 30 bp, Homo sapiens
  chr19:5831156-5831186
  hypo
aagtccccaacagccgaggtccccagtagg

SEQ ID NO: 31970 - DNA, 39 bp, Homo sapiens
  chr19:5834508-5834547
  hypo
gagaaagagaaaccttcaggccgggtgtggtggctcacg

SEQ ID NO: 31971 - DNA, 483 bp, Homo sapiens
  chr19:5844285-5844768
  hypo
tggccgagaggttgagcggtgggtgggcaggctggccggaccacggctccagccagccgtagggcgtgaagatgtcggagtcgctgcggtaggacatggtgagattgaagtatctgtccagggcttccaggtgctggcagttagggggtggctccaagttgaaccagatccagcgctgcccctgcggcctcggggaaggtgggaggcgtgacttagggttggacatgatatcccagtggtgcacgatgaccatgtctgcctgtgggtacaccttgcggtcggcagtgatgtggcagtcggctgtgccgggcaccatctctgaacagcgggacagagccacagggatgtggaaaggccatgtccgtagcaggatcaggagggtggggcgggtgggagtggtgtcctgtcgggaggacccactgggagccctaggggatccagtggcatcgtctcgggacacacgcaggtaggagaagaaacaca

SEQ ID NO: 31972 - DNA, 31 bp, Homo sapiens
  chr19:5895544-5895575
  hypo
gcgtacgccctgccctcgcaccctccctctc

SEQ ID NO: 31973 - DNA, 31 bp, Homo sapiens
  chr19:5895851-5895882
  hypo
ctcctccaggtgacctcgggccacttaattc

SEQ ID NO: 31974 - DNA, 31 bp, Homo sapiens
  chr19:5896208-5896239
  hypo
gagcagtgaggaggcccgtgtggctggagca

SEQ ID NO: 31975 - DNA, 116 bp, Homo sapiens
  chr19:5910338-5910454
  hypo
caagcactctctacagcgattgcatctaatcttcgagtttccctgtagacacaggctttgtcctcattttacagctgtggaaagtgaggcccaggccgggcgcggtgtctcacgcc

SEQ ID NO: 31976 - DNA, 30 bp, Homo sapiens
  chr19:5914453-5914483
  hypo
gcacagtgcctgtcccgcggggcctcgggc

SEQ ID NO: 31977 - DNA, 858 bp, Homo sapiens
  chr19:5914801-5915659
  hypo
gaggatgctgagatgcggagacggggactcctccctaagagctgctgttaagaggcgcctgctggggcatacagccccagtgctctgcacagcgtcttgggggtttgggtgtgctacccaccacccccagtcaccacctcctgtcccagccccccatgtcccaggcccgggaggctgtcatcgcagctgcatttgccaagctggaccgcagtggggacggcgtcgtgacggtggacgacctccgcggggtgtacagtggccgtgcccaccccaaggtgcgcagtggggagtggaccgaggacgaggtgctgcgccgcttcctggacaacttcgactcctctgagaaggacgggcaggtgggtggctgcgcggggggccccctccccaggcagttcctcggccgtgccccctcacggccctctgttcccaggtcacactggcggaattccaggactactacagcggcgtgagtgcctccatgaacacggatgaggagttcgtggccatgatgaccagtgcctggcagctgtgagcagctccggctcagccctgctgccctggcctgtcactccccacccctgccggagacctcccttccctgggccccttctctcctgggcagccacaccacagagcggggaggggcaggtgggggaatggaggctgcaggactggctagaccaggtccctgccggtccaccaggcggaggtgggacaaaggtcctaacaggagtcactggctcaggaccccagggagaaacgctctccccacccacgccatgctgaccagagatcttgcagcccctgtggatgcccccgccgaggtcccccgatccccgcacccggactgctgctccc

SEQ ID NO: 31978 - DNA, 30 bp, Homo sapiens
  chr19:5917299-5917329
  hypo
gcggggtgaaggaacgaggtctccagtccc

SEQ ID NO: 31979 - DNA, 226 bp, Homo sapiens
  chr19:5925830-5926056
  hypo
gctgcatggagctgctcggagccatgaaccctctcctgtacccgcctgtgtgtgtgcgcgtgcatgtgctggggggcagggctataatcaactccatcaccttttgctttaacagttaggatggaaagagagctcatgaagctccaaggagccttttccaccttgttacaaaaccacgccttgttataaaaccacgcctaagctggcctctcggtcaatgcttcat

SEQ ID NO: 31980 - DNA, 151 bp, Homo sapiens
  chr19:5927749-5927900
  hypo
agtcactgcaggtgagggctccgaagcctgggctgctggtggggaagtgccagggcccagcacacgcacaccagcagcagactgtgccgtgagccatggggctgcctcgctaacaccttctttgtcccacgctcccctcccctgttaaaag

SEQ ID NO: 31981 - DNA, 327 bp, Homo sapiens
  chr19:5938100-5938427
  hypo
aatgccttgttgaaacggggccatcaactcaatgctgagagttataagaacccacctcttcccttgacacggacatcacgccagcagctaacttatctcacaatgcttttgaagtcggcaatgaatttatatatggtaggttgggttacagaattcaggttgttaaactcgcttgttaaatcttttatgaggaatttcagccacgtgggagaaactttcaggaaaccttggagttggttctccagtgaaagaccaaaaaggcaggctccatattcttcagaaagggggagcggctttccttaaaattttaaagctgggggccagacg

SEQ ID NO: 31982 - DNA, 31 bp, Homo sapiens
  chr19:5960805-5960836
  hypo
gtgccaaggtgctgcccggagccttctggac

SEQ ID NO: 31983 - DNA, 30 bp, Homo sapiens
  chr19:5985386-5985416
  hypo
gcgcatgtgcaagttcggggggcattagtc

SEQ ID NO: 31984 - DNA, 628 bp, Homo sapiens
  chr19:5994789-5995417
  hypo
cccagagtgaccaggcggcatcttttggaacctcgaggaggcgccggccggggctgctagatgccctgcagggagtggttggggtcactgcgctcccgctttaccaggggctcacccaggctgcgggcgtctgggcccgcctcgctgccacgctgctcatcgcccatgtcatctgcggagggaggggtagggtcagtgtccatcatcaggagggcacgagagggagagaaggaagtgcacgttccgagaactgctccggcacgccaggcagggcaccgaggatacatggcagcctgtggaccccacctcggcctctgctccaggctgacctgtcctccccacctgccgttacccagaggtgcccccagctcgggccaggcgaaagagcctctgccctgtgcctccctttcccagcgccgacgggcctggggcctgctccccacagggctggggcctctggggtcctcccacccgcatgggacagagacggggcccgggggtccctctggcctgcctgtcccactctcctgctgggcgtgggcgcaggagaccaggggctgcctagtctgggcctggtgctgaggtccctgggcagcggctacccagaggccagcggcagtctgagccc

SEQ ID NO: 31985 - DNA, 30 bp, Homo sapiens
  chr19:5995632-5995662
  hypo
acagagaggcgagatcgttgaactgaaaga

SEQ ID NO: 31986 - DNA, 31 bp, Homo sapiens
  chr19:5996671-5996702
  hypo
tgattgtgcgctttcacgtggaaatctctcc

SEQ ID NO: 31987 - DNA, 50 bp, Homo sapiens
  chr19:5997142-5997192
  hypo
ctcgtcgtagagcaggcggatgaggtggaaggagccgaagctggcagcgc

SEQ ID NO: 31988 - DNA, 516 bp, Homo sapiens
  chr19:6001732-6002248
  hypo
tctgagctcaccagccgagccccctaccctctagaagtttctctcagagccccccacccgccagaattctctcggaggtctggtgggactaacctgtaaaaggaccatttcagcaagaactgccgggcggccttggggaagctggggctgccggcatgctgcttcaggacctgggtgaccacactgtccagccagctggcccactggtccagggagctctgctgctgcagggtcagcttgaaatcctgctccagccgctgcaccacactctcctcgcactggcacacccacgaggcctgctcctgtgggcagggcagaggccagtgtcagcaatgtggacccccagccacggcagccctccctggacctagccatgctcagggcgggacatcgtgctgtgcttgagccttctcgcccttgaccttgacagctgcaagccaagtcctgtgtctcccgtcacaggggcagaatagagagctgagggggatcgtacccggcttccggggactcataccc

SEQ ID NO: 31989 - DNA, 207 bp, Homo sapiens
  chr19:6003849-6004056
  hypo
tctcttttccacaagtcggccaaggttctacatttcaaattcgactgatttgtggccaagattgcagcaataagggtcacagcaaggagattaaatttcccgaataagatgagcacagaaacacgcaatctgttctgaattgacccaaagatgtgacatcaaatgacatcttctgttgttccccttcctgccagcactgacgcgtca

SEQ ID NO: 31990 - DNA, 101 bp, Homo sapiens
  chr19:6004120-6004221
  hypo
cgctctctgggacacagtggtcctcatgctgtcctggactggagcccctcccagccatcgttggggagcccaggccccaccccggacgcaccttggtctgg

SEQ ID NO: 31991 - DNA, 159 bp, Homo sapiens
  chr19:6004424-6004583
  hypo
gagccacacaggcgacggggaaccgaggacacttagaaacgggaagaaccaggcatggcccagcgctgctggtcaccacccactgcctatgcgggtctcacaggggcgattctgccccaggggacactgggcaatgtctggggacgttaatggtggtca

SEQ ID NO: 31992 - DNA, 31 bp, Homo sapiens
  chr19:6005507-6005538
  hypo
ggcccgagggctccctcgtggtgggtgctgt

SEQ ID NO: 31993 - DNA, 31 bp, Homo sapiens
  chr19:6006014-6006045
  hypo
accttctagaaagcaccgagcccagcccagc

SEQ ID NO: 31994 - DNA, 483 bp, Homo sapiens
  chr19:6006878-6007361
  hypo
tggcatgagccaccgcgcccggccacttttgggttttctgtgaaagcgatggtctgaggtggctgaagacgtacatgtaagaaaggacagaggaggcaggaagagaggatggagcagcgccgggcggggccgtgggtcacttactggggaccggcctcagcacgtcggggatgagaatctccaccagcgcctggtagaggatgtggtcgcagctcctcatccacctgaggatggggtcgcactgacacagggagataagcttgtccttgggcaggacggcgccctcggggtcttcgtcactgtggagggaggggggacaggtgagctgtggcctggcccaggtgggctcactcagccacgggagcgagcagagagccgggctgcgggacttttgcccaacagtggggctggggttttgctccccatccctgagcctcgatgggtcccctccctccatgttgctcccggcgcctccgtgtttcc

SEQ ID NO: 31995 - DNA, 354 bp, Homo sapiens
  chr19:6007875-6008229
  hypo
cgtcaagtgagcagccgtgatccgggctacagcggggtgccctggaatcccaagggaggccacagagaggagaggagcaggcgatggacatggatgcggaggggctgctgcttcagagaggatgcttgttggggggctcggggctccagctcctcagcgtcacccggggacgcctggcctgagcgctggcggttcccgggagggacacgcaggagctgcctgcctgggctggggcggtcacctcgcagtgccgtctgtacaccagctgcagggccttgacgtcgtgcagtgtgacgccgtcctgcagcaggaagctgcccaggtcgggcgctgggaactcggggaagacgtggg

SEQ ID NO: 31996 - DNA, 61 bp, Homo sapiens
  chr19:6012585-6012646
  hypo
gggtgatgctggctccgcggagggtcacgggtcatgagcaatgcaccgctgtgtgggggag

SEQ ID NO: 31997 - DNA, 47 bp, Homo sapiens
  chr19:6013008-6013055
  hypo
tgcatgggctgctgccgcatggccatgtactgcgtgtcctcctgcag

SEQ ID NO: 31998 - DNA, 399 bp, Homo sapiens
  chr19:6017219-6017618
  hypo
cgacagggcaagacttcgtctctttcaaaaaacgaaacaaaacaaaaagatgggctaaatgagtcccgagccaaggactatgcctcgagaggtgaacatccagttagaagggctgcgagaactgtccacacgaagagctcagtccccacactgggcatggacgcaaaggtggcctgcccaccaactgatgccctcacccaggtgccttaaagactgcggcttaattctggtttccacctctccctctgctatcgtctgtcccctgatccagagaggtctgctatgtgaatacaaaaggcttgcactgatgcctgcgatttgcagaaagacaggaattccacgcacagaagcgaggcccgagtccagatcccatgtcaagagcgtcgggggaaaccagct

SEQ ID NO: 31999 - DNA, 77 bp, Homo sapiens
  chr19:6018260-6018337
  hypo
gtgagccaccgcgcccggccttcatctcctttttatgaaatagtgctatggggtggttctgacgagccctgcaccag

SEQ ID NO: 32000 - DNA, 464 bp, Homo sapiens
  chr19:6024739-6025203
  hypo
gtgaggacgggatcacggtgaggacgggagtgaggacgggatcacggtgaggacgggagtgaggacgggatcacggtgaggacgggagtgaggacgggatcacggtgaggacgggagtgaggacgggatcacggtgaggacgggagtgaggacgggatcacggtgaggacgggagtcaggacgggatcacggtgaggacgggagtcaggacgggatcacggtgaggacgggagtcaggacgggatcacggtgatgactggggtccactgaaggggacttcttctctgatgtctgaattctcaagagaatgtcagagcccagtttaagtgctagagagcaactactagaaggacattctgacttcgatggcccgtcccagtgttaagatgccgaacacatttccagctatgtgcaaaaccgaatcaagagcgtttggggagaagtgaaagcgatgagtctgaggg

SEQ ID NO: 32001 - DNA, 183 bp, Homo sapiens
  chr19:6026068-6026251
  hypo
tacaggtgtgagccaccgcacctggttgccttcatttgtcttaaaaatgtctatgcaggttacaagcagagcagggacaggttgccaggtcagacgcacacttacatggctgttgagtaaaccgcttttgtgtgatgtgattccttcgcttttttggaggttttcaatcgccatttcaagcta

SEQ ID NO: 32002 - DNA, 346 bp, Homo sapiens
  chr19:6026958-6027304
  hypo
ggaggtggggagggaggtgggcggcaggtccacgcgatggaggaggcacacagctgtgcgtggccactaaggcattcgcacgcatttggtttgtcctagactcgcacacggaaaacagcgacgtaaaatctgctgcagcccaccctgacgaccagaggactgaagcgggaggagatgaacttgaagtatatgcttcctttcttaaggaggccaaagacttgacacttctgcaaagagcaggttgagtgtgtatttcagagagcaggcgagcggagctgagttcaagaatgagagggtaactgcttctcccacggcctccgaccacggtggttctgccttctctcat

SEQ ID NO: 32003 - DNA, 31 bp, Homo sapiens
  chr19:6040257-6040288
  hypo
agaaagagagaagtcacgcatgggacgctgt

SEQ ID NO: 32004 - DNA, 288 bp, Homo sapiens
  chr19:6044461-6044749
  hypo
acctgggcagacacacggcaggtacgtgcaggcacacaaacaatgcacatacatacacaagtgtgcacatacactcagcccatgcaccacacatatgcacgaattgtgggcacacacacacgtatgcacacacacatacacggaagcacatgcaccttcacccgcccaggcagctttgcctctgtgggtctgtagtctgcagcaaggtgacactgatcgtccctagtacagaggggactgctggggccctctggatagccatccgcaccactgcgtgggagagcactc

SEQ ID NO: 32005 - DNA, 285 bp, Homo sapiens
  chr19:6044992-6045277
  hypo
gggtcaaagtgaactcgagtcgagggaggaacaggagtgttttgtgtgtttattgagagctggggctttcggagtcattggctgcagtgctgtgatttcccggcatgaaccctgaatgtcacaggtagcagtgactgccatatatacatcacgaggggtgatgggtgaggacacgccatcccctgtgttgcaggagtggagctaaggatgaagatggtgctaataaggatgccagcgcaagggcattctgattccaggtgagctgggcgccgtgtgcttggagaa

SEQ ID NO: 32006 - DNA, 170 bp, Homo sapiens
  chr19:6045509-6045679
  hypo
ctggcagggcgacggcgtctgatcctcacctcagatgggcttccaagacgccctccccactgccatatgtgcaagaaataaaagctaaagatgtctgaccatacacactacatcaaataaaccgcttcactgtctgcctttttgtttttgcggaattgtgtttttttgtt

SEQ ID NO: 32007 - DNA, 138 bp, Homo sapiens
  chr19:6046168-6046306
  hypo
gcttatttcattccacggtagaaatccaggagcagagaaagcctgaatgtgaaaattctctctctgcgaattttaaagaatatgttcattcaggtgctagattctattttgaacaaaatcttaagaattctaactcat

SEQ ID NO: 32008 - DNA, 22 bp, Homo sapiens
  chr19:6059281-6059303
  hypo
cgcctggccttgatttgactat

SEQ ID NO: 32009 - DNA, 73 bp, Homo sapiens
  chr19:6063034-6063107
  hypo
cacccacatcccctcccgtgagctgctgtgtctcgtatccctcctgtcctgccgctctcgctcttgctcctag

SEQ ID NO: 32010 - DNA, 154 bp, Homo sapiens
  chr19:6064107-6064261
  hypo
ccaaccccagaccctacgtagcacattgcctgcaaagatgctcaagacgtgttttgcaatgaacaagagaatgagcagcccgcctgctccgggctgctcacctgttctagccaccttcaccatgttggcctccagctcccgtcttcagctgagc

SEQ ID NO: 32011 - DNA, 26 bp, Homo sapiens
  chr19:6096746-6096772
  hypo
gcacctggcctcgtttcttataattt

SEQ ID NO: 32012 - DNA, 287 bp, Homo sapiens
  chr19:6105443-6105730
  hypo
aaggcatctagcttggcgatgaggtcaaagaggtattaggcttggcggggagtggagttaggggtgactttggcttttgctgcagatgagatgggagccatcggagggtttcgagctgaggggtatgaagtagaacttaacatgacgccgcctctcccagggttaacaggccccgtctggctgctgggctgagagactgccgagcaccagtggtggaatcatccgggctagatgctggtggctgggaccagaggggctggcagtggaggtggcgaggcatggtcagg

SEQ ID NO: 32013 - DNA, 39 bp, Homo sapiens
  chr19:6107002-6107041
  hypo
actataaaaatccacaggtgccggccgggcgcggtggct

SEQ ID NO: 32014 - DNA, 606 bp, Homo sapiens; identical to SEQ ID NO: 11975
  chr19:6110332-6110938
  hypo

SEQ ID NO: 32015 - DNA, 31 bp, Homo sapiens
  chr19:6214703-6214734
  hypo
tgcgtgcctggggtcccgctctgccagggat

SEQ ID NO: 32016 - DNA, 30 bp, Homo sapiens
  chr19:6215239-6215269
  hypo
atcaaaaggcgcttcgcgtgtggctcggtc

SEQ ID NO: 32017 - DNA, 30 bp, Homo sapiens
  chr19:6216390-6216420
  hypo
cccctggctcccaccgggccgtcacctgga

SEQ ID NO: 32018 - DNA, 30 bp, Homo sapiens
  chr19:6217626-6217656
  hypo
gaggtgacgccgtccgtccatggtccccag

SEQ ID NO: 32019 - DNA, 30 bp, Homo sapiens
  chr19:6230444-6230474
  hypo
ctgctgggtgctgccgtgtgacctgcgcct

SEQ ID NO: 32020 - DNA, 143 bp, Homo sapiens
  chr19:6414853-6414996
  hypo
agcagttcagaagtcccgcctgcgagtctcagcgctccccagcatcacgacagcggcacacaggaacaagcagccggcgcagggaggcctcttcgtttaacctctggacccagcgaatgcttccctggcggtgcgtggggact

SEQ ID NO: 32021 - DNA, 31 bp, Homo sapiens
  chr19:6425393-6425424
  hypo
gacatgggtgggtgttcggtgactgacactg

SEQ ID NO: 32022 - DNA, 234 bp, Homo sapiens; identical to SEQ ID NO: 11979
  chr19:6590324-6590558
  hypo

SEQ ID NO: 32023 - DNA, 285 bp, Homo sapiens; identical to SEQ ID NO: 11980
  chr19:6590846-6591131
  hypo

SEQ ID NO: 32024 - DNA, 31 bp, Homo sapiens
  chr19:6676636-6676667
  hypo
aacaaaaacaaaaaaccctggcggggcacgg

SEQ ID NO: 32025 - DNA, 30 bp, Homo sapiens
  chr19:6733676-6733706
  hypo
cacgtggaactgggcgggcggggagagagg

SEQ ID NO: 32026 - DNA, 30 bp, Homo sapiens
  chr19:6742892-6742922
  hypo
tccacctggaggtgcgtcctggggcatcag

SEQ ID NO: 32027 - DNA, 30 bp, Homo sapiens; identical to SEQ ID NO: 11983
  chr19:7087694-7087724
  hypo

SEQ ID NO: 32028 - DNA, 121 bp, Homo sapiens
  chr19:7100508-7100629
  hypo
agacaagttaaaggtggggagccaggggggccagatgcgaggtaggaggcggcaaaaggctcagagctctggtctccacactattgagtacaatcacttagatctgagaagcagatgttca

SEQ ID NO: 32029 - DNA, 30 bp, Homo sapiens
  chr19:7115751-7115781
  hypo
gctaccagcttatccgaacaggaaccttcc

SEQ ID NO: 32030 - DNA, 117 bp, Homo sapiens
  chr19:7116357-7116474
  hypo
caattcccaaagcatcaactccgcatggatactttgcacacacatcagccgtgtctaatggacacacacacgtgcatacacacgtgagcacacgccgggaccacagacccttatcca

SEQ ID NO: 32031 - DNA, 45 bp, Homo sapiens
  chr19:7194788-7194833
  hypo
gctggtacaggtgtgagccaccgcgccaggccagctttgctcttt

SEQ ID NO: 32032 - DNA, 118 bp, Homo sapiens; identical to SEQ ID NO: 11985
  chr19:7293748-7293866
  hypo

SEQ ID NO: 32033 - DNA, 148 bp, Homo sapiens; identical to SEQ ID NO: 11988
  chr19:7459680-7459828
  hypo

SEQ ID NO: 32034 - DNA, 470 bp, Homo sapiens; identical to SEQ ID NO: 11989
  chr19:7460086-7460556
  hypo

SEQ ID NO: 32035 - DNA, 184 bp, Homo sapiens
  chr19:7484063-7484247
  hypo
cagatgtacccacactcggcctctgtaccccgatgtacccacactcggcctctgtaccccgatgtacccacactcggcctccgcaccccaggtgtgcccacactcggcccccgcacctgggtgtgcccacacttggcccccacacccgggtgtgcccacacttggcccccgcaccccagatgcg

SEQ ID NO: 32036 - DNA, 180 bp, Homo sapiens
  chr19:7484790-7484970
  hypo
taccccagatacacccacactcggcctctgtaccccaggtgtactcacactcggccctcataccccaggtgcgcccacactcggcctccacacccacactcggcccctgcaccccaggtgcacccacactcagcccccacactcacgctaagccctgacgacagcctcaggccagctgag

SEQ ID NO: 32037 - DNA, 176 bp, Homo sapiens
  chr19:7493829-7494005
  hypo
ggaggtcaaggtgcagcgaggctgtgcaataaagtcgggagtgtggtgagctgtaaaggaagcccgcaggcctaggccacgggcccgagggcaggggcacgccatgcagaaggactctgacccggccccacagctggccagataagagagacgccttgagtcgaggggccgggggc

SEQ ID NO: 32038 - DNA, 30 bp, Homo sapiens
  chr19:7534774-7534804
  hypo
ccttctctcttccagcgtccttcgacctga

SEQ ID NO: 32039 - DNA, 317 bp, Homo sapiens
  chr19:7535297-7535614
  hypo
caaaccactgatgaccgcctggcaggggccagcctgtcggtgctctgggccttgcagctgtttctgtagggttagcggtggtgccggggtcactttctgaatctctttttttttttttcaaaaaggaaagtttttaatggaaagttgagccagaactaaaccagggagctgtctgaaatcatagcaccccatccgggtggcggggagatcaactccgagctgtttttccgaggcagtgaggaacggtgccggctctgcacggagctgaggacaggacagaccttgctttgagaaggagctgccggccggggccacgc

SEQ ID NO: 32040 - DNA, 25 bp, Homo sapiens
  chr19:7538928-7538953
  hypo
aaaaaagaaaaaagggctggacgca

SEQ ID NO: 32041 - DNA, 24 bp, Homo sapiens
  chr19:7539552-7539576
  hypo
cgcgcctggtctattttttcttca

SEQ ID NO: 32042 - DNA, 30 bp, Homo sapiens
  chr19:7604873-7604903
  hypo
gacctgaccgagggcgacctggctaactcc

SEQ ID NO: 32043 - DNA, 30 bp, Homo sapiens
  chr19:7615585-7615615
  hypo
cacacacatcatcccgggtaatccagggag

SEQ ID NO: 32044 - DNA, 30 bp, Homo sapiens
  chr19:7620582-7620612
  hypo
cggagcgttgtacgcggaggagcgcagcgc

SEQ ID NO: 32045 - DNA, 130 bp, Homo sapiens; identical to SEQ ID NO: 11992
  chr19:7660555-7660685
  hypo

SEQ ID NO: 32046 - DNA, 130 bp, Homo sapiens; identical to SEQ ID NO: 11993
  chr19:7660714-7660844
  hypo

SEQ ID NO: 32047 - DNA, 1167 bp, Homo sapiens; identical to SEQ ID NO: 11994
  chr19:7676863-7678030
  hypo

SEQ ID NO: 32048 - DNA, 236 bp, Homo sapiens
  chr19:7680038-7680274
  hypo
tggctggctggactcggcgtctgtccccaggatgaagacaagcctgaggacgagatggcccaaaagcgggccagcctgctggagcggcagcagcggcgagcagaggaggcgcggcggcgcaagcagtggcaggaggtggagaaggaacagcggagggaggaggccgcgaggtgaggccgggcctgcccgggacgcccgctccttggcctgtctgccaccgcggaccccgtgagcgg

SEQ ID NO: 32049 - DNA, 122 bp, Homo sapiens
  chr19:7682206-7682328
  hypo
tgcagggctccctccccgtcaggtctcatgtccccaagccgcctgcctggaagccgcgaacgggactgggaaaatggcagcaatgcctcctccccagcgtcagtgcccgagtacacaggtaa

SEQ ID NO: 32050 - DNA, 31 bp, Homo sapiens
  chr19:7682970-7683001
  hypo
ccctgtgtgctgcggccgccatcccctggag

SEQ ID NO: 32051 - DNA, 34 bp, Homo sapiens
  chr19:7685370-7685404
  hypo
gtgagctggctgactccgccgcagcccccaaccc

SEQ ID NO: 32052 - DNA, 30 bp, Homo sapiens
  chr19:7688286-7688316
  hypo
ggagaggccagaaacgaactatggcccttg

SEQ ID NO: 32053 - DNA, 110 bp, Homo sapiens
  chr19:7701076-7701186
  hypo
ggcttggtaccttcatcaacacggccgagcgaaggaaccagctcagaccagcaagagtctgtttgcacacatacctcgcaccttaaatcggagacctcattttgtatggg

SEQ ID NO: 32054 - DNA, 227 bp, Homo sapiens
  chr19:7711982-7712209
  hypo
ggggcactcctgaccccggaccccatgcctggggttcctcccctaacctgcctctcggccgccaggacgccgtggaggaccggctggacaggaacctgtggcccttcgtatccgaccccgcccccacggccagctcccaggccgctgtcaggtgaggccccggggccgcccccgcccacgcctgggtctgtgttaggtgggcggcctggcggcggtgagggcctcct

SEQ ID NO: 32055 - DNA, 31 bp, Homo sapiens; identical to SEQ ID NO: 11996
  chr19:7762517-7762548
  hypo

SEQ ID NO: 32056 - DNA, 16 bp, Homo sapiens
  chr19:7838386-7838402
  hypo
gcgcagtagcctgcca

SEQ ID NO: 32057 - DNA, 30 bp, Homo sapiens; identical to SEQ ID NO: 11998
  chr19:7853414-7853444
  hypo

SEQ ID NO: 32058 - DNA, 30 bp, Homo sapiens
  chr19:7966472-7966502
  hypo
ggtatcagggccgggcgctgtggctcatga

SEQ ID NO: 32059 - DNA, 30 bp, Homo sapiens
  chr19:7970451-7970481
  hypo
cagagctaggaggccggtggcaggcaggcc

SEQ ID NO: 32060 - DNA, 373 bp, Homo sapiens
  chr19:7972035-7972408
  hypo
aaaaaatttaaaaagcgtcttgaaggagttggggggggagagaagacagggccgccagggctctgagcgcagcgccagcctgtgtggggcatgcaggctgtgccccacgcctgtgttgggagagagagtagatggggtgcctggccctgtgagtggttgtgagtatgtgtgtccgagggcaagggggactctgtcccggctgcatgggtgttaggtccacggcatgccccgggtgtgtgttgtgcgtgcgtgcacttgcacggcatgtgcgtgcatgttgacatggcagccggtgcacctgtggctcctgtcggcagacacgtgccctccagcctctcgctctctctcatccgttctctttctcatcctcacc

SEQ ID NO: 32061 - DNA, 31 bp, Homo sapiens
  chr19:7989505-7989536
  hypo
gggcagcggtgggcaccggggcagggcgcgc

SEQ ID NO: 32062 - DNA, 35 bp, Homo sapiens; identical to SEQ ID NO: 12001
  chr19:7990147-7990182
  hypo

SEQ ID NO: 32063 - DNA, 257 bp, Homo sapiens; identical to SEQ ID NO: 12002
  chr19:7990904-7991161
  hypo

SEQ ID NO: 32064 - DNA, 349 bp, Homo sapiens
  chr19:7991850-7992199
  hypo
acagggcaggggttggccctgcgggggagtgtctccagctgccgcgcacccgcaacagcccgttgtcccctcccgggccagctggtcttgcagccgtcctggcagagctgggggcagagcccgcagtcttgttcccagaggtctggagttgccgcaggtggtgttgcggtgcctctgtgcctgatgacccaggccggggctacctggctccggcaccacactcagagaatctgctcggtgctggaggccgagatgtccaggagccgccaggccgcgtaggggttgagctcgtcctggtctcggcagagcgcccacacgtacagcatccgcagcaccttgtcctgcaggg

SEQ ID NO: 32065 - DNA, 30 bp, Homo sapiens
  chr19:7996730-7996760
  hypo
cccggaaggcactgcggtgctcaggctgct

SEQ ID NO: 32066 - DNA, 30 bp, Homo sapiens
  chr19:7999078-7999108
  hypo
cttgattttccggccgagatcacttttact

SEQ ID NO: 32067 - DNA, 98 bp, Homo sapiens
  chr19:8004777-8004875
  hypo
cagagtgagactctgtttcaaaaaaacaacagagaaacagtttaatgaatgatcatacaataatccaatcaggcggaaggggccgcctgtggtcaact

SEQ ID NO: 32068 - DNA, 23 bp, Homo sapiens
  chr19:8078955-8078978
  hypo
gtttgtttttttgagacggagtc

SEQ ID NO: 32069 - DNA, 379 bp, Homo sapiens; identical to SEQ ID NO: 12003
  chr19:8115229-8115608
  hypo

SEQ ID NO: 32070 - DNA, 192 bp, Homo sapiens
  chr19:8148276-8148468
  hypo
aatggggctggctggctgcttcgcgcctccaccgaggaatgtctccttctctctgcccagcagccgtctcctcggaggaaagtccagcctcccttccacaccggccactgcaccccagcccacgtggaccccatcctcaggctgcggatgacacctgagcccgcaggacacgcccatgaagcttccagggaa

SEQ ID NO: 32071 - DNA, 110 bp, Homo sapiens; identical to SEQ ID NO: 12005
  chr19:8274334-8274444
  hypo

SEQ ID NO: 32072 - DNA, 30 bp, Homo sapiens
  chr19:8382407-8382437
  hypo
ctcaaaacaaaagacgggctttccagagag

SEQ ID NO: 32073 - DNA, 30 bp, Homo sapiens
  chr19:8458778-8458808
  hypo
ttgtttttgccaaccgggcttgcctgctct

SEQ ID NO: 32074 - DNA, 30 bp, Homo sapiens
  chr19:8464613-8464643
  hypo
ctccaggcatctctcgactcctccacaccg

SEQ ID NO: 32075 - DNA, 30 bp, Homo sapiens
  chr19:8468434-8468464
  hypo
acctgtgacccctgcgcctccacccagcgt

SEQ ID NO: 32076 - DNA, 31 bp, Homo sapiens
  chr19:8501527-8501558
  hypo
catttaaggttattttcgtggcttaagggct

SEQ ID NO: 32077 - DNA, 30 bp, Homo sapiens
  chr19:8503785-8503815
  hypo
cgcttctctgcacccggcaggcccactttc

SEQ ID NO: 32078 - DNA, 160 bp, Homo sapiens
  chr19:8526867-8527027
  hypo
cagggcccctgagtgcggggctctgtacaattgcacgagttgctcacctgtgaagctggccctgcggccgtgtgtgcctgtgagcttataccttcgcatacgtgcgtccttgtatttatagcatgtgagctcagcccgatggcatcgcaatttgtatgca

SEQ ID NO: 32079 - DNA, 31 bp, Homo sapiens
  chr19:8528501-8528532
  hypo
agcatgaaaaaagctgcggaagtcctaaaca

SEQ ID NO: 32080 - DNA, 39 bp, Homo sapiens
  chr19:8539869-8539908
  hypo
attacaggcgtgagccaccgtgctcggcacctgccccca

SEQ ID NO: 32081 - DNA, 220 bp, Homo sapiens
  chr19:8554977-8555197
  hypo
caggcagctctgtgactttcccgcgccgggatccagggctcctgggtgagcgggcgctgggctggctggctgtcctggccccacgcctaccggtcttaccgtcccagggggagtggttggttttccaggggatctgccgaggaagcgtgacttccatggacccctctccccagaagcccaatagtgagcagcgcccccggggaatcgccagggtccctcc

SEQ ID NO: 32082 - DNA, 30 bp, Homo sapiens
  chr19:8576016-8576046
  hypo
catcagcttccgggcgcctagttcagtttc

SEQ ID NO: 32083 - DNA, 737 bp, Homo sapiens
  chr19:8576343-8577080
  hypo
cctccctggtggtcacctgcacgcacctgagggcgcgtcggagccgccctggggtcttcgggggctgctgccagcacctgcggtaaaggggcgggtcaagttcagagtcagggcgagcccagccagccctcctggaggcccccgaccccacactcaccttggctctttttccagacggcggcgctggaagccggcggcccgggtgcagcggccaggaaggggcgcaggcgcggggggcttaggccaaagggcgcagggttcaagtagggcaggaacggtccggtgggggcaggggcgggggtcgtgaagggttccagcagcgggaacggcaggcccggcgctgatgcggggtcaacctccggggggcgctccggcgcgggcggctctcggtccagggccgggggtggcggcggggctgggctctgcgcatgctccgcgcaaacatgcaggtgcttgaagagcgagcggtgcgtgcggaagcgcaggaggcagttctcacacctggaggtgggcagagggctgggctgggctgggcctccaggggcaccagggagagtgtcctgtgcaatgccacccgcccttcgagcgtgggaacggagcctgggcactaatcacctccccgctcctgtacaactgtggcagcgacccttcctgaccacttcgggtgggaacctggggaaacccggaaagaagtctcaattttaagttaggcggccggttttccacttgggaggtaa

SEQ ID NO: 32084 - DNA, 46 bp, Homo sapiens
  chr19:8587384-8587430
  hypo
cacaccaggcactggccgttgccccacgctgcgcttcctctgcatg

SEQ ID NO: 32085 - DNA, 31 bp, Homo sapiens
  chr19:8606744-8606775
  hypo
cttggggggttgtagccggaggtccccatgc

SEQ ID NO: 32086 - DNA, 31 bp, Homo sapiens; identical to SEQ ID NO: 12009
  chr19:9267730-9267761
  hypo

SEQ ID NO: 32087 - DNA, 45 bp, Homo sapiens
  chr19:9371592-9371637
  hypo
gctgccttttctaactcacactacggaaggaatggaacagataat

SEQ ID NO: 32088 - DNA, 418 bp, Homo sapiens; identical to SEQ ID NO: 12011
  chr19:9648913-9649331
  hypo

SEQ ID NO: 32089 - DNA, 30 bp, Homo sapiens
  chr19:9908244-9908274
  hypo
aggcgtgagccaccgcgcctagctgaatgt

SEQ ID NO: 32090 - DNA, 30 bp, Homo sapiens; identical to SEQ ID NO: 12013
  chr19:9942246-9942276
  hypo

SEQ ID NO: 32091 - DNA, 99 bp, Homo sapiens
  chr19:9961015-9961114
  hypo
tcataaacaatcacctgtgcccgctcccatctggctggcttcgggagcaatcgctcattcgcctgctgcctgcctgccggagcatttgtcattaggaag

SEQ ID NO: 32092 - DNA, 30 bp, Homo sapiens
  chr19:9965353-9965383
  hypo
gtatttgaccaccacgttgctctggtactt

SEQ ID NO: 32093 - DNA, 31 bp, Homo sapiens
  chr19:9981318-9981349
  hypo
gcctgctgccaatccccgcactctccccttc

SEQ ID NO: 32094 - DNA, 357 bp, Homo sapiens; identical to SEQ ID NO: 12016
  chr19:10197445-10197802
  hypo

SEQ ID NO: 32095 - DNA, 4 bp, Homo sapiens
  chr19:10231204-10231208
  hypo
cctg

SEQ ID NO: 32096 - DNA, 772 bp, Homo sapiens
  chr19:10246144-10246916
  hypo
agcctgctcctttagcgcgacggactgtccttctggctcaatctctgcctcaaaaacaaacagtaaggaaccagcatagggacgcagcctgactcggatgtctcagcactgtccctcctgtgggccgtcttcccactgagagtgatggggctacccggcagccagcaggcgtcctcccggaagtgactgcgctggccccagccccacctggtgacaggcacagaagcctccttcctgtccagacccagcgggcgccgccccactgacctgccggtgcttgtccaggatgttgccgaagagccggtaggtgtcagggaagccctgggagcgggcacactcccgcacgctcaccacacggtgctgctctgggtggagcacgcggccctgggggaaagaggcgcggtgggcgagggcagtagcacccaggccgggtcaccgtcggggacagggagggaaatggcactgtgacagcatacggccatggccttggcctatgagcttgtcccgtggacgtggaggggcaggaggcagaggccaggtgcctggggtcctggggtgctgtcccccacttggctaaacccacacttccacctagttaggccgccaagtacagggcctgacccaggccctcggatgccccctccccacctacctgcttgcccatgggctcggggttggtgacggttgtgctgaagaagccgtcccactcgagccttccatagaggccagcccagtggttgtgccggttcccggtgtggggcaggcaccaggg

SEQ ID NO: 32097 - DNA, 24 bp, Homo sapiens
  chr19:10253881-10253905
  hypo
gcccaggcactctacccgtttttt

SEQ ID NO: 32098 - DNA, 31 bp, Homo sapiens
  chr19:10265327-10265358
  hypo
tgctcatcactgtccccggcctcgtcataac

SEQ ID NO: 32099 - DNA, 142 bp, Homo sapiens
  chr19:10295677-10295819
  hypo
attccccaccagcgccgctcacatatgagcacctgctgaatgccaggccctgctccaggcaaagagctaagtgattagatgtaggtgtcactaggcagggacttcctgacttgctgtgtggttaggaaagaccattctgtag

SEQ ID NO: 32100 - DNA, 318 bp, Homo sapiens
  chr19:10370366-10370684
  hypo
aagctgctctggcaggactcacgttacagacccctctaccccttcagcctgccctacagcgacttcccccgacccctaccccacgctacccagggcccagcggccaccccgtaccactgttgatgtgaagcacctcttctgagccaggccgagcccctggccgacttgggagcctcaggcccacgcccacccttcgaggaaggtgtcacctggaccccttcattccacggaggaagctgaggccacagggagcggccatcgccattgggaaggggcgactccacggaaagcccagacgggcttctgcatccattccct

SEQ ID NO: 32101 - DNA, 30 bp, Homo sapiens; identical to SEQ ID NO: 12023
  chr19:10400293-10400323
  hypo

SEQ ID NO: 32102 - DNA, 356 bp, Homo sapiens; identical to SEQ ID NO: 12024
  chr19:10400588-10400944
  hypo

SEQ ID NO: 32103 - DNA, 30 bp, Homo sapiens
  chr19:10463022-10463052
  hypo
caggcttgagccaccgcgcctggcccagcc

SEQ ID NO: 32104 - DNA, 101 bp, Homo sapiens
  chr19:10464756-10464857
  hypo
cgtggtagagcgtgcgcagaatgtcaatctcctgcttccagcccgagcggtgctgggggccgcagtctgccttgagggctttcaccgccaccatctcgcca

SEQ ID NO: 32105 - DNA, 288 bp, Homo sapiens; identical to SEQ ID NO: 12030
  chr19:10530146-10530434
  hypo

SEQ ID NO: 32106 - DNA, 875 bp, Homo sapiens; identical to SEQ ID NO: 12031
  chr19:10530723-10531598
  hypo

SEQ ID NO: 32107 - DNA, 279 bp, Homo sapiens; identical to SEQ ID NO: 12032
  chr19:10531608-10531887
  hypo

SEQ ID NO: 32108 - DNA, 609 bp, Homo sapiens; identical to SEQ ID NO: 12034
  chr19:10624965-10625574
  hypo

SEQ ID NO: 32109 - DNA, 275 bp, Homo sapiens
  chr19:10665679-10665954
  hypo
gcaacaagaggttgacggagccaagactcaagcctgggcctgacaggctccccacccacgcttccccagccagcactgcttactcttctcggcagagtgacttgaagacctgccgctttttccatgagttctgggccttctggctgtacgcccgcttgtcccgcagctcctcctgctctgacctgcagacagatgcccctgtgttgggtgctctgggaagtgcccgaggctgcccgccctgccccctgcgcatgtggccccgccgcgccccgccc

SEQ ID NO: 32110 - DNA, 85 bp, Homo sapiens
  chr19:10685523-10685608
  hypo
agagaggggaacccaccgaagtcaaggggaggatcctccctgcctgcttctctcacctggatcccagagacggtgaagtagggga

SEQ ID NO: 32111 - DNA, 108 bp, Homo sapiens
  chr19:10687539-10687647
  hypo
acccagctaatttttgtacttttactagagacggatgttagccgtctctatgttagccaggctgggatttcaggcgtgagccactgcgcccagctcctcttaatattt

SEQ ID NO: 32112 - DNA, 160 bp, Homo sapiens; identical to SEQ ID NO: 12035
  chr19:10691750-10691910
  hypo

SEQ ID NO: 32113 - DNA, 31 bp, Homo sapiens
  chr19:10709085-10709116
  hypo
tatggcaactgtgtgtcgacctcctttgctg

SEQ ID NO: 32114 - DNA, 30 bp, Homo sapiens
  chr19:10745509-10745539
  hypo
ttcagacggatttccgggtgtacctgcact

SEQ ID NO: 32115 - DNA, 30 bp, Homo sapiens
  chr19:10747392-10747422
  hypo
atccgtgtgatactcgagtacctggatcag

SEQ ID NO: 32116 - DNA, 125 bp, Homo sapiens
  chr19:10792600-10792725
  hypo
attggcagagctctcgtggagacctgccatcgtgctgatccagagccaccttgctattctctctgtagaggagaaggcagagcccccccaggctatgaatgccctgatgcggttgaaccagctga

SEQ ID NO: 32117 - DNA, 30 bp, Homo sapiens
  chr19:10793760-10793790
  hypo
atagctgagtttgtcggtcttcttttctgt

SEQ ID NO: 32118 - DNA, 37 bp, Homo sapiens
  chr19:10794361-10794398
  hypo
cccaccccccaaccttcgagggcggggaagaggcggg

SEQ ID NO: 32119 - DNA, 30 bp, Homo sapiens
  chr19:10823280-10823310
  hypo
tgcgtcttccccacacggacagcggtgagg

SEQ ID NO: 32120 - DNA, 357 bp, Homo sapiens
  chr19:10823577-10823934
  hypo
atggaggggacagggcctggccgtgctgagctgtcccctgccgctctacaggcacagccgcgccttcctgcacgcactgctgcacagtgacaacacggccgcgctgcaccacctcacggtccacaacatcgcctaccaggtgagccagtgcccggggcaaggtgggcgggggtgtcctaggtgcgtatgccccacgctgacctcccctccccgcagctgcagctcatgagcgccgtccgcaccagcatcgtggagaagcgcttcccggacttcgtgcgggacttcatgggcgccatgtacggggatcccaccctctgtcccacctgggccactgacgctctggcctctgtgggaatc

SEQ ID NO: 32121 - DNA, 30 bp, Homo sapiens
  chr19:10824831-10824861
  hypo
ggagccgccacacccggtctactcttgcaa

SEQ ID NO: 32122 - DNA, 31 bp, Homo sapiens
  chr19:10859264-10859295
  hypo
ttctgctccaacagagcgacagagaagcccc

SEQ ID NO: 32123 - DNA, 156 bp, Homo sapiens
  chr19:10875503-10875659
  hypo
cactgtgctgcctgcctggaacgccctgttccctacctgccactgtctgctgctcacccgcacctggtcacttgccgccttcgttccccggtccccggcagcacgagttatcctgttcttgttttttctttttcttttttttttttttttgagatg

SEQ ID NO: 32124 - DNA, 156 bp, Homo sapiens
  chr19:10875958-10876114
  hypo
gcgccagcacacgagaacaggcatgcagatcggctctgcccagcacagggcctggcgccgagcaggtgctccgcatgcacggccgagtgaacgagctcaaagggctggtgctgtgccccttcttgcctactgggcgggaagtgatgggggttactt

SEQ ID NO: 32125 - DNA, 31 bp, Homo sapiens; identical to SEQ ID NO: 12036
  chr19:10929999-10930030
  hypo

SEQ ID NO: 32126 - DNA, 31 bp, Homo sapiens
  chr19:10940832-10940863
  hypo
catacacccccctggccggcccccagcagtg

SEQ ID NO: 32127 - DNA, 75 bp, Homo sapiens
  chr19:10941837-10941912
  hypo
ctggcctcttccttaacgctggccccggtccagggccggcccctgtgcctggctggacaccgcactgcgcaaagg

SEQ ID NO: 32128 - DNA, 30 bp, Homo sapiens
  chr19:10943182-10943212
  hypo
gcctagactttggccgggccatccctcatg

SEQ ID NO: 32129 - DNA, 31 bp, Homo sapiens
  chr19:10943884-10943915
  hypo
gactcctacagggcagcgggaggggaagggt

SEQ ID NO: 32130 - DNA, 30 bp, Homo sapiens
  chr19:10949224-10949254
  hypo
attctgaaacggcctcgttgtcttgagtaa

SEQ ID NO: 32131 - DNA, 259 bp, Homo sapiens
  chr19:11002986-11003245
  hypo
ctgatgtgctggggaagtgcccgttcagggccatggctgcagggctcctggacacccagctccggtgctggagtggggttgggattcgcccagaggccagggctgcgccagaggagcccagggtgacctcatggtcctcagatacccggggctgggcagcacagtggaacagctgctccagagcttctccgaggacgacatcggaggatccgactcaggttacggcaggagagggaggccaggccgggttagggttctg

SEQ ID NO: 32132 - DNA, 414 bp, Homo sapiens
  chr19:11004801-11005215
  hypo
gaattgggcctggtccgcatgcatcagcttccgtgctttccctcctctcagcgcttactgccagttcctgttgtccgtctcctcactgccctgctgggtgctgtctgcctcccactgtggactcccagcatgggagggccgggggtggctctctggttcaccgccaggtcctctgtgcctgcatgtggtccgggcagagcaggctgagcagagatgccagctgagtgggcttcagaaagcgtgtttttttttccgtgcctgtgggatgggagttggccacggggggtcggggtgtctccctctttttacctaactctcctcctttgatcgggaatattttcctctggaaggtgaagagcccatgttgtctttggcagcaggaggcgatttaatacaagacgtaccatttggaca

SEQ ID NO: 32133 - DNA, 198 bp, Homo sapiens
  chr19:11008195-11008393
  hypo
gccccagagcttcatcagggccgactgcagtgtggcaggccagcgagtagccccaggctgggtccaggggtggccaaagcgtaacactcagtccgggtttgtgttctttacgttccccgttggagactccacctggagatcccagtccctttccttttactgcagggtaaagaaatgctagctctgggccgggcacgg

SEQ ID NO: 32134 - DNA, 46 bp, Homo sapiens
  chr19:11017076-11017122
  hypo
ttgttgtgcaactgtcactaccgcccatctccagaacttgctcatc

SEQ ID NO: 32135 - DNA, 288 bp, Homo sapiens
  chr19:11029961-11030249
  hypo
agtgtgtcgctaccacggacaatctaattatacatgtaagtttgttgatgtgttcatgtatctggaggttaaactcctgtagtgccaaatcttttatgtggataaacacttgtcatttggagagctgtcacctgattgccctcggtggcgttgtgccggtcccctcctcacggcgtgtctgggaagagcaagctcgttttagctgcacagcctagaagccgtgggcagacctgggggaaggggcagggctctcccctcccatgctggccctggcgtcagatgccacgt

SEQ ID NO: 32136 - DNA, 30 bp, Homo sapiens
  chr19:11030493-11030523
  hypo
cttctctctcggcagcgcctgtctggcttc

SEQ ID NO: 32137 - DNA, 30 bp, Homo sapiens
  chr19:11034882-11034912
  hypo
cacagtcagggtcccgggccctgcactccc

SEQ ID NO: 32138 - DNA, 31 bp, Homo sapiens
  chr19:11083222-11083253
  hypo
tgcattcagcgctgttcgtatttgggggtag

SEQ ID NO: 32139 - DNA, 37 bp, Homo sapiens
  chr19:11117136-11117173
  hypo
atatttaaagccaggcgcggtgtctcacgcctgtaat

SEQ ID NO: 32140 - DNA, 22 bp, Homo sapiens
  chr19:11121908-11121930
  hypo
ttttttttttttgaaacggagc

SEQ ID NO: 32141 - DNA, 68 bp, Homo sapiens
  chr19:11129499-11129567
  hypo
aacacagtttctctgcccactcggagggctgtggccatgttggcctcgcccctgacagccagtggcta

SEQ ID NO: 32142 - DNA, 30 bp, Homo sapiens
  chr19:11145774-11145804
  hypo
cagcgactcactgacggagaagcagtggct

SEQ ID NO: 32143 - DNA, 31 bp, Homo sapiens
  chr19:11151829-11151860
  hypo
agtgtgtgttatgccccgagccagtcaagct

SEQ ID NO: 32144 - DNA, 185 bp, Homo sapiens
  chr19:11152796-11152981
  hypo
ccctgctccaagcctggagatcgctgtcctcacagacatgtcctatatacgaggcagcatgcggttccagctgtggccacggcccagcggcggatcataacgtgttggtggatcatgagtgccatttatatgtttttcatttactaatatccttttccgtgagcgactctatatgggtaccattt

SEQ ID NO: 32145 - DNA, 31 bp, Homo sapiens
  chr19:11159058-11159089
  hypo
caccatcatgcctggccggaatttttgtttt

SEQ ID NO: 32146 - DNA, 31 bp, Homo sapiens
  chr19:11161622-11161653
  hypo
ggctggatgagggcaccgagcagatgagccc

SEQ ID NO: 32147 - DNA, 31 bp, Homo sapiens
  chr19:11161939-11161970
  hypo
ctgaaaactagaatggcgtgtttaaggaaag

SEQ ID NO: 32148 - DNA, 51 bp, Homo sapiens; identical to SEQ ID NO: 12037
  chr19:11199929-11199980
  hypo

SEQ ID NO: 32149 - DNA, 264 bp, Homo sapiens; identical to SEQ ID NO: 12038
  chr19:11200921-11201185
  hypo

SEQ ID NO: 32150 - DNA, 160 bp, Homo sapiens
  chr19:11215984-11216144
  hypo
ttggacggctcagacgaggcctcctgcccggtgctcacctgtggtcccgccagcttccagtgcaacagctccacctgcatcccccagctgtgggcctgcgacaacgaccccgactgcgaagatggctcggatgagtggccgcagcgctgtaggggtcttt

SEQ ID NO: 32151 - DNA, 30 bp, Homo sapiens
  chr19:11289196-11289226
  hypo
cccgtccctcttggcggccacccaccactt

SEQ ID NO: 32152 - DNA, 557 bp, Homo sapiens
  chr19:11304135-11304692
  hypo
ttcacctgctcctccagctgccgcagcttccgcagggcacccgccatctgctcccgcacgtgggccaggtgcccggcactgggaggcaccggtgtggacagtcctgaactccgtggtgtcgggggtggcaaccccacgcccaccagggaggctgtcgagccggccgcactgggggtcagggagcccaggccggtgggtgtggccgcctggtcctcgagacggcgacgggcatccagcagcgtgcgctccacccgcggattgaagccaccgcgggtctccagagcaccatactgagggtagaagccacggccgcagtaggaataggctgagtggcggctgtccccactggcattggagcacagcgactcagtggacgtccaccaggagccagggccacggggcagcgagctcaggcgggggcggcgctgcactgccacgcgtcgcagcgtgtggcccttctcgatgtcatccacgtacttgaggaagtccaggtccaggcggtagccatagggggtctccacggagtagggtggatcggggtccttggcagggaaggc

SEQ ID NO: 32153 - DNA, 98 bp, Homo sapiens; identical to SEQ ID NO: 12040
  chr19:11308159-11308257
  hypo

SEQ ID NO: 32154 - DNA, 114 bp, Homo sapiens
  chr19:11339641-11339755
  hypo
gctggaggatggcctcgcgtacggcactgctgctgaccacccactgcagagccagctcctcgtgaagcagctggggacagaggcaggggtcacagagtgcgaggtgccacccct

SEQ ID NO: 32155 - DNA, 31 bp, Homo sapiens; identical to SEQ ID NO: 12041
  chr19:11465992-11466023
  hypo

SEQ ID NO: 32156 - DNA, 100 bp, Homo sapiens
  chr19:11473127-11473227
  hypo
cgtccacttgggttcggcgacttgcctccgctatccccctgaccagtccggctccccgcagatgtacgtgactctcgtgttccgcgtgaagggctcccgc

SEQ ID NO: 32157 - DNA, 28 bp, Homo sapiens
  chr19:11490376-11490404
  hypo
attttttttttttttttgagacggagtt

SEQ ID NO: 32158 - DNA, 651 bp, Homo sapiens; identical to SEQ ID NO: 12043
  chr19:11529450-11530101
  hypo

SEQ ID NO: 32159 - DNA, 185 bp, Homo sapiens
  chr19:11559277-11559462
  hypo
accctcctgtgtctgtcgtcctgggtcaggcactggcgtccccagctgccccttaaccgctccgcctccccttccaggaacctggagcaagagatttcttttgactttggccccaacggggagtttgcttacctgtacagccagtgctacgagctcaccaccaacgagtgcgtcccaggaatgca

SEQ ID NO: 32160 - DNA, 174 bp, Homo sapiens
  chr19:11559904-11560078
  hypo
ggattggccccgaccacgacaagttcagtgccatgaagtatgagcaaggcacgggctgctggcagggccccaaccgctccaccaccgtgagtgcctgcaaggcaggggagctggggcggggagacccaggcctggcccagccgaaccctctcgagcacccgtctgcccatcccc

SEQ ID NO: 32161 - DNA, 3 bp, Homo sapiens
  chr19:11565821-11565824
  hypo
ttt

SEQ ID NO: 32162 - DNA, 281 bp, Homo sapiens; identical to SEQ ID NO: 12046
  chr19:11590856-11591137
  hypo

SEQ ID NO: 32163 - DNA, 318 bp, Homo sapiens; identical to SEQ ID NO: 12047
  chr19:11592978-11593296
  hypo

SEQ ID NO: 32164 - DNA, 371 bp, Homo sapiens
  chr19:11605728-11606099
  hypo
gcagtaaaaggcagaggagggcggaatgcagatcatgggatggggcagccgagaggccactgcacgctgagagcctggccgacacttggtgggacggtcgttggcgggggcgcccacccggaacacctctcgcccccggcttcccctcggccagctgggatgccacctgctccgagatgccagccagcgcaggctcagccctggtgaccgccccaccctcagccctgacaggacgcctggcagtgtgccctacgctccttctccagccattgccgaacccctgaggctgccggcagccccctcaccactcaccggggccaactgagcctccctcactgagtccctgccccgtgggatgggaaggagagagg

SEQ ID NO: 32165 - DNA, 30 bp, Homo sapiens
  chr19:11649107-11649137
  hypo
tccctctgctgtgccgggcactgtgctggg

SEQ ID NO: 32166 - DNA, 119 bp, Homo sapiens
  chr19:11658622-11658741
  hypo
aggaaacaaggtgaacgtgggagtgaagtacgcagagaagcaggagcggaaattcgagccggggaagctaagagaagggcggaacatcattgggctgcaggtaccgccctgtcctcact

SEQ ID NO: 32167 - DNA, 282 bp, Homo sapiens
  chr19:11662353-11662635
  hypo
ggaggagaggaggcagagaagcgaggagcgcggcacggagctgtcttctccccagggagggcaggagttgaggctggaacgtggagacctgcggaggcagacaccagaagacccgcgcacagacgcacgcagcccctggggcctcgtaaaccggattccaggcgcttttggcctggctaccgcaagtcctgctccccctgggccggcgcggggaagctatgctgaggaggatccgggcctggcccagggccctgcctcctcgggaaaacagcaccatattag

SEQ ID NO: 32168 - DNA, 30 bp, Homo sapiens
  chr19:11666079-11666109
  hypo
aaaaaaaaaaaaagtcgaaataaggttgct

SEQ ID NO: 32169 - DNA, 30 bp, Homo sapiens
  chr19:11688231-11688261
  hypo
gcaggctgcccctgcgggaaccccttggtg

SEQ ID NO: 32170 - DNA, 31 bp, Homo sapiens; identical to SEQ ID NO: 12051
  chr19:11950106-11950137
  hypo

SEQ ID NO: 32171 - DNA, 762 bp, Homo sapiens; identical to SEQ ID NO: 12052
  chr19:11959421-11960183
  hypo

SEQ ID NO: 32172 - DNA, 30 bp, Homo sapiens; identical to SEQ ID NO: 12056
  chr19:12146614-12146644
  hypo

SEQ ID NO: 32173 - DNA, 46 bp, Homo sapiens; identical to SEQ ID NO: 12059
  chr19:12204538-12204584
  hypo

SEQ ID NO: 32174 - DNA, 24 bp, Homo sapiens
  chr19:12217685-12217709
  hypo
caccctgggcgacagagcgagact

SEQ ID NO: 32175 - DNA, 867 bp, Homo sapiens; identical to SEQ ID NO: 12060
  chr19:12266888-12267755
  hypo

SEQ ID NO: 32176 - DNA, 31 bp, Homo sapiens
  chr19:12347792-12347823
  hypo
cttcaagcccccctgacgggaccccaaagaa

SEQ ID NO: 32177 - DNA, 112 bp, Homo sapiens
  chr19:12418637-12418749
  hypo
actttactgcctatctaaccacgtcttttattacctgagcactctatgttccatggaccaacacgatgacacgtgggagcgagttagaaacgtggactctcacactctgtcc

SEQ ID NO: 32178 - DNA, 722 bp, Homo sapiens; identical to SEQ ID NO: 12062
  chr19:12595270-12595992
  hypo

SEQ ID NO: 32179 - DNA, 64 bp, Homo sapiens
  chr19:12729991-12730055
  hypo
gaagctgcaggctatccgttccaatggttgtggtgtttagactttttcacggttttgtttttgt

SEQ ID NO: 32180 - DNA, 121 bp, Homo sapiens
  chr19:12746885-12747006
  hypo
cacccggccaaagcaccattctctaaaatccccaccaagcctttgtctccttgcagttagctcctctctgggtgtgctgcctggtggaaccctgtaatgtattttctttctttctttcctt

SEQ ID NO: 32181 - DNA, 31 bp, Homo sapiens
  chr19:12787009-12787040
  hypo
cacagagggaggacaccgtagccaaacaggc

SEQ ID NO: 32182 - DNA, 82 bp, Homo sapiens
  chr19:12794667-12794749
  hypo
gcgtgagccactgcgcccggccgagggtcacttcttaagcgtcacccatggacaagatttcggtcaccaggcagagttagac

SEQ ID NO: 32183 - DNA, 52 bp, Homo sapiens
  chr19:12811289-12811341
  hypo
agtggttctcaccctgcgagctaggctaggataaggacggagacaccaccag

SEQ ID NO: 32184 - DNA, 30 bp, Homo sapiens
  chr19:12817327-12817357
  hypo
tcccagagggtggccgggggagagtggggg

SEQ ID NO: 32185 - DNA, 625 bp, Homo sapiens; identical to SEQ ID NO: 12070
  chr19:12900127-12900752
  hypo

SEQ ID NO: 32186 - DNA, 30 bp, Homo sapiens
  chr19:12920976-12921006
  hypo
agatgccctctacccggtggttagtgctgc

SEQ ID NO: 32187 - DNA, 30 bp, Homo sapiens
  chr19:13000767-13000797
  hypo
taccagtgcccaaccgtaggggatgcaccc

SEQ ID NO: 32188 - DNA, 31 bp, Homo sapiens
  chr19:13010498-13010529
  hypo
atttcccttctgaagtcgttcagatgtgttc

SEQ ID NO: 32189 - DNA, 451 bp, Homo sapiens; identical to SEQ ID NO: 12076
  chr19:13029852-13030303
  hypo

SEQ ID NO: 32190 - DNA, 472 bp, Homo sapiens; identical to SEQ ID NO: 12077
  chr19:13049976-13050448
  hypo

SEQ ID NO: 32191 - DNA, 829 bp, Homo sapiens; identical to SEQ ID NO: 12078
  chr19:13050857-13051686
  hypo

SEQ ID NO: 32192 - DNA, 932 bp, Homo sapiens; identical to SEQ ID NO: 12079
  chr19:13054372-13055304
  hypo

SEQ ID NO: 32193 - DNA, 60 bp, Homo sapiens; identical to SEQ ID NO: 12081
  chr19:13094489-13094549
  hypo

SEQ ID NO: 32194 - DNA, 30 bp, Homo sapiens
  chr19:13104659-13104689
  hypo
cacctggcagcaggcgggtgttttgtctca

SEQ ID NO: 32195 - DNA, 74 bp, Homo sapiens; identical to SEQ ID NO: 12082
  chr19:13106034-13106108
  hypo

SEQ ID NO: 32196 - DNA, 31 bp, Homo sapiens; identical to SEQ ID NO: 12083
  chr19:13106802-13106833
  hypo

SEQ ID NO: 32197 - DNA, 31 bp, Homo sapiens; identical to SEQ ID NO: 12084
  chr19:13107273-13107304
  hypo

SEQ ID NO: 32198 - DNA, 559 bp, Homo sapiens
  chr19:13108115-13108674
  hypo
ctgtgtgtagcccctgtgggccggccatgggcaggcctgcgtggcatggccgtgtgtgtggcccagggagcgggttttcctgtagaaagcaggcccaagtacgtgttggcgagggcgcaccggcatgcatacatgttgcagtgtgcatgcaggtgtgagcaggcaccctgagcaccatggcagtgtggggaacccccacatctgcacctccagttccacggccactccatgttgggcgcccctcacaacaactgcctacccagcggtgtctgagctgggcctctttggtgctacacttggctgggctgtgtggccgatgtttggggcctagtggaaccaagaccccacgctcaagcagccccttgcccaccaggctgccagcccggcctcccatgccaagcacgccagacatctgagcctgctcccccatggcttgggtgagacaccagcccctcagatttcacagcaccctgggagagaaaatgcctgtggatacgccggtgacatggctaggaaggggctggggcggctgcgagacccagggcgatggccggtgctt

SEQ ID NO: 32199 - DNA, 444 bp, Homo sapiens
  chr19:13109258-13109702
  hypo
ggcgagggggaagggcggggggaaaaatctccttctagaaaaagcatcgaaattcagggcggccgggtggggcggttcctggagctgctggagtccattgtagccacagtcctgagtctcaggcggagagaggggtggggggtggatggatggacccccatccccatcccaaccctgccaagaaacagagacacaaccaggatgtgaactcacgtacaccaccatcaccgccaagatggggatgtaagtgtcctgttcacaccgatgtccagacccacgaccatcgacgagcctacagacctacggacacaggaaaccgacgacttgtgttcacactgtcacacacacccattaacacacacgcacctcttgaaatgggacacgtatattggtgtaggcttagcgacacagcagtacctctttgacgcacgtatggacacagga

SEQ ID NO: 32200 - DNA, 21 bp, Homo sapiens
  chr19:13109988-13110009
  hypo
ctattttttttttttttgaga

SEQ ID NO: 32201 - DNA, 211 bp, Homo sapiens
  chr19:13110308-13110519
  hypo
cacacacacacacacacacacaaatatgcaccaatgcgtgcttccccctccttgccacagggataaaaaggcaaacatgccgacatttgctgacacacacaaagacatacatggccgcacacacggatacacccgctctcagacacgcagcgacctacgcccattttcctggccatacaagcagccgaacgttcctgtacttctgtatctg

SEQ ID NO: 32202 - DNA, 30 bp, Homo sapiens
  chr19:13110779-13110809
  hypo
gatgagctggggctccgtgagatgttttga

SEQ ID NO: 32203 - DNA, 344 bp, Homo sapiens
  chr19:13112074-13112418
  hypo
atgtctgtgtggcagcgtgtgtctgcccgggtccctctccatgcctctccatgtctcccagcgtccatcactgggtgctacctgcatgtgactccacggatcatcgcacgccctgtctcttgtgtatttggtagtgggggtcggggagcgtgccaccatgcgtgtcagtgtgccggatgtagtctctgtgtcacggtggcgctgcgcacgtcaacgggtattggtgtaccggtcaccatctttgtatctgcgctttgtatctggggtgacagtgtcccagcgacatgcgtcacatctacagcagtgtttttctgggtgtctgtgcgtcacggcaaagagtgtat

SEQ ID NO: 32204 - DNA, 118 bp, Homo sapiens
  chr19:13156411-13156529
  hypo
tggagaccttggcccacggtgctcagcagtctgttgccagggaggtaggagagaggggcagcaggcacactgggttgacaactgcactgtgttgaccccatggcgggcatcaggggac

SEQ ID NO: 32205 - DNA, 40 bp, Homo sapiens
  chr19:13179792-13179832
  hypo
tggccaaggcacctgtcggacacagcggctgggctcaggt

SEQ ID NO: 32206 - DNA, 81 bp, Homo sapiens
  chr19:13196306-13196387
  hypo
aggcatggagatgaggggaggcgtcgcatcacctttctctgcagcgctgcaaacccccacgctctgacctgcactgttacc

SEQ ID NO: 32207 - DNA, 54 bp, Homo sapiens
  chr19:13199712-13199766
  hypo
aagaagaaaaatcattcgagaggtcccaggtagacccggcgtgaaggacaggag

SEQ ID NO: 32208 - DNA, 89 bp, Homo sapiens; identical to SEQ ID NO: 12087
  chr19:13213673-13213762
  hypo

SEQ ID NO: 32209 - DNA, 3 bp, Homo sapiens
  chr19:13213789-13213792
  hypo
cgg

SEQ ID NO: 32210 - DNA, 90 bp, Homo sapiens
  chr19:13218630-13218720
  hypo
gtgggagagtgagacccggaagtcagcgtggaggagggccgacctggggaacagcagggattatgagggagatgccggactccttgaccc

SEQ ID NO: 32211 - DNA, 1230 bp, Homo sapiens; identical to SEQ ID NO: 12090
  chr19:13265820-13267050
  hypo

SEQ ID NO: 32212 - DNA, 31 bp, Homo sapiens; identical to SEQ ID NO: 12091
  chr19:13274044-13274075
  hypo

SEQ ID NO: 32213 - DNA, 56 bp, Homo sapiens
  chr19:13332534-13332590
  hypo
tgggcagtgcctgacacggttggtccccttcctcctgaagccgcccttttaaacat

SEQ ID NO: 32214 - DNA, 30 bp, Homo sapiens
  chr19:13397629-13397659
  hypo
agcggccgactccgcggtggccagcttgtt

SEQ ID NO: 32215 - DNA, 57 bp, Homo sapiens
  chr19:13873559-13873616
  hypo
tcggggacctgggcatcgtgcggcggaggtctcgggacgtcccggagagcccccagc

SEQ ID NO: 32216 - DNA, 31 bp, Homo sapiens
  chr19:13879830-13879861
  hypo
cgatgttaatggggtccggattgcagcacct

SEQ ID NO: 32217 - DNA, 22 bp, Homo sapiens
  chr19:13881105-13881127
  hypo
atagttcatgcactcagatgcc

SEQ ID NO: 32218 - DNA, 30 bp, Homo sapiens
  chr19:13889419-13889449
  hypo
ctgagcctgagagccgggaaagagtctttt

SEQ ID NO: 32219 - DNA, 74 bp, Homo sapiens; identical to SEQ ID NO: 12098
  chr19:13961396-13961470
  hypo

SEQ ID NO: 32220 - DNA, 31 bp, Homo sapiens
  chr19:13997267-13997298
  hypo
tgcggtgaagtggagtcgtctaccttggctg

SEQ ID NO: 32221 - DNA, 137 bp, Homo sapiens
  chr19:14001000-14001137
  hypo
tcaggcttgctgtcatcggccccttgttctgacaggtggtcttggctggccctctgtgaggcggacaaccccgtccccctgtctggagggtcatcaggctgagaatccccactgccgggcaccgcctgcacagggct

SEQ ID NO: 32222 - DNA, 30 bp, Homo sapiens
  chr19:14042825-14042855
  hypo
ccacgtggccgatgcggttgccctcgaggt

SEQ ID NO: 32223 - DNA, 1344 bp, Homo sapiens; identical to SEQ ID NO: 12100
  chr19:14073500-14074844
  hypo

SEQ ID NO: 32224 - DNA, 30 bp, Homo sapiens
  chr19:14093009-14093039
  hypo
tctgcaccaccagacgctgcgtgggaagag

SEQ ID NO: 32225 - DNA, 629 bp, Homo sapiens
  chr19:14181142-14181771
  hypo
catcaatcttcccgcgtccgccgattcctcctccttggtcgccgcgtccttggctggcgtcagaaaaatggctacaaacttcctagcacatgagaagatctggtttgacaagttcaaatatgacgacgcagaaaggagattctatcagcagatgaacaggcctgtggcaggtgcctcccgccaggagaacggcgccagcgtgatcctccatgacattgtgagagccagagagaacatccagaaatccctggctggaagctcaggccccggggcctccagtggccccagcggagaccacagcgagctcgttgtccggatcgccagtctggaagtggagaaccagagcctgcgtggcgtggtacaggagctgcagcaggccatctccaagctggaggcccagctgaacgtgctggagaagagctcgcctggccaccgggccacggccccgcagacccagcacgtgtctcctatgcgccaagtggagtccccggccaagaagccagcctcaccagcagaggatgacgaggatgatgacatcgacctgtttggcagcgacaatgaggaggaggacaaggaggcggcacagctgcgggaggagcggctacggcagtacgcggagaaggccaaga

SEQ ID NO: 32226 - DNA, 30 bp, Homo sapiens
  chr19:14181997-14182027
  hypo
taaatttgaggagcacgtgcagagtgtcga

SEQ ID NO: 32227 - DNA, 31 bp, Homo sapiens; identical to SEQ ID NO: 12103
  chr19:14205671-14205702
  hypo

SEQ ID NO: 32228 - DNA, 41 bp, Homo sapiens
  chr19:14225012-14225053
  hypo
ggctcatgagacctgccgtgtctgttcggctgtctgtcccc

SEQ ID NO: 32229 - DNA, 31 bp, Homo sapiens; identical to SEQ ID NO: 12105
  chr19:14306908-14306939
  hypo

SEQ ID NO: 32230 - DNA, 31 bp, Homo sapiens
  chr19:14388271-14388302
  hypo
tgacagtgtgctggcagccctcgcagccctc

SEQ ID NO: 32231 - DNA, 8 bp, Homo sapiens
  chr19:14509181-14509189
  hypo
ttaagaac

SEQ ID NO: 32232 - DNA, 30 bp, Homo sapiens
  chr19:14515259-14515289
  hypo
agggcactgggccaccgagggctgccaggt

SEQ ID NO: 32233 - DNA, 30 bp, Homo sapiens
  chr19:14515594-14515624
  hypo
tctgcctgtccatcccgtaccagttgtgag

SEQ ID NO: 32234 - DNA, 31 bp, Homo sapiens
  chr19:14517833-14517864
  hypo
gtgaggtgggggcccacgctgcaaccccgct

SEQ ID NO: 32235 - DNA, 31 bp, Homo sapiens
  chr19:14532655-14532686
  hypo
cctaaagaaaaacagtcgtactgaacagtta

SEQ ID NO: 32236 - DNA, 135 bp, Homo sapiens
  chr19:14552057-14552192
  hypo
tgcggcgggaaatccgcaaggagctgaagctgaaggagggtgctgagaacctgcggcgggccaccactgacctgggccgcagcctgggccccgtagagctgctgctgcggggctcctcgcgccgcctcgacctgc

SEQ ID NO: 32237 - DNA, 48 bp, Homo sapiens; identical to SEQ ID NO: 12110
  chr19:14607133-14607181
  hypo

SEQ ID NO: 32238 - DNA, 242 bp, Homo sapiens
  chr19:14663941-14664183
  hypo
gcccaagccaggagctcgtgcgtccgatgaccatcttccaaggctggattgctacctgctcgctcggggctctgctggatgggaacagcagctccagcttctccgggtcccgggctaccgctgcctctgcacctggccctggcctcggatccgagagcccagagacattggcattgagaccctggcacctctcgtcttgccagcacaggtagaagacaggagcagagcggtccagggacctg

SEQ ID NO: 32239 - DNA, 378 bp, Homo sapiens
  chr19:14664451-14664829
  hypo
ccgagagggctgagccgctgagccggagtccagatgaatgtgccggagtctctgcatttgtgatgggggcgaggtgatgggggcgaggtggccggcgtggctctgggcatgatcgggccaggcctccgacctctatgctgggcattggctggacagggagctcaggcgatgagtgcagcagcgcttgtgcccggcgcggggatggtgagtgcctggctggccagctgcaggacctgtcaggccctttgtgtctttacctggggccctggttgcactgaccagggctcgcacccccagccaggcctcttgtgccccagactcgggagatgcttcctaccaggaagtgcagtcccctgcggggtccgagagagcctgccg

SEQ ID NO: 32240 - DNA, 208 bp, Homo sapiens
  chr19:14863014-14863222
  hypo
gattacaggcatgagccaccacgcccagccgggctattatattaaggaatcaaatgccgcatcattccatgagccagcgtgtcctgcgtcaaggaagggagccctctggaacaccgctgtcaataccttgtgtccggtttgatcaattgccacgaggaagaggaggtgggccaggaagaggcagagcgagagctgcagatgcagtgag

SEQ ID NO: 32241 - DNA, 198 bp, Homo sapiens; identical to SEQ ID NO: 12113
  chr19:14887409-14887607
  hypo

SEQ ID NO: 32242 - DNA, 54 bp, Homo sapiens
  chr19:14913031-14913085
  hypo
gttttaatatgtccaatgggccgggcgtggtggctcacgcctgtaatcccagca

SEQ ID NO: 32243 - DNA, 30 bp, Homo sapiens; identical to SEQ ID NO: 12114
  chr19:15090227-15090257
  hypo

SEQ ID NO: 32244 - DNA, 30 bp, Homo sapiens
  chr19:15224899-15224929
  hypo
cacgggaccagtcgcgtgtatggctgagac

SEQ ID NO: 32245 - DNA, 418 bp, Homo sapiens
  chr19:15251999-15252417
  hypo
gttcagcagtggcatcaccaccgtgtagaacacagccaccaagcggtcctggtcggggttggccccggactccggacgcaagtagatgatggaggcgcagtcaaaatgtactacgaccacggtgacgtgggccacacaggtggagaaggccttgcgccggccggctgccaaggaaatcctcacgatggcagccacgatgaaggcataggagaagaggatcgggacgaaggacatcagcaccaccaggacgctcaggaaaaagatgcccagcgccttgctggcactcttggcgcagctgagcttcagcaccggggcgatgtcacagaagaagtgctccacgtggtctccgccgcaaaagggcgatgagaagatcatgctggtctcgatcaaggccaccgagaacccagagcagaaaacc

SEQ ID NO: 32246 - DNA, 30 bp, Homo sapiens
  chr19:15281185-15281215
  hypo
gtgaccagaggccacgtccttgtgcagtga

SEQ ID NO: 32247 - DNA, 573 bp, Homo sapiens; identical to SEQ ID NO: 12117
  chr19:15288254-15288827
  hypo

SEQ ID NO: 32248 - DNA, 294 bp, Homo sapiens
  chr19:15292358-15292652
  hypo
ctgctctccaagcagaggccccgcccacctggggctgcagtcgggcaggtcctgttcgcagtggaagcctccgtagcctggcgggcaggtgcaggtgaaggaggccacgtggtcggtacaggtgcccgggccgcaggggttgctcaggcactcatccacatcgcgggcgcatcgtgggccggcgaaaccagggaggcaggagcaggaaaaggagcccacgccgtcttggcacgagccaccgttcaggcatgggtctgcggacaggaggaaggcggtctggtcacctaccttgcc

SEQ ID NO: 32249 - DNA, 706 bp, Homo sapiens; identical to SEQ ID NO: 12121
  chr19:15342706-15343412
  hypo

SEQ ID NO: 32250 - DNA, 189 bp, Homo sapiens
  chr19:15352348-15352537
  hypo
gctggggcttgggtcacggccagggacctgaagtagagctggctggagaagacctgcctcagccccgataggtgcctggtgcacccgagtgctggctcttctaaatgccttgcatcccctgtctatcacccccaacaggagtccagccctgcttcgcatgagaacaggcacagccgcacagctgccagg

SEQ ID NO: 32251 - DNA, 30 bp, Homo sapiens
  chr19:15352957-15352987
  hypo
tcacagccctgcctcgttgcttgatttgca

SEQ ID NO: 32252 - DNA, 397 bp, Homo sapiens
  chr19:15375240-15375637
  hypo
gcttgatgatgtcacagtagtcgtgtaggcccagtgcctccacgtccacaggcttgtagaagggccaggcgtaggcggcgtgcttcttggcaaacatctccttgaggatgccgctgcagcacttgagctgctccgagaccttgctgctcttctctggtgctgggtgctgctgagagtcgggcacgtccttctttggaggtttcacaggccggctgctctcccgccgctggcccagcttggtggtcttgggctccgggggcagcgagggtggctcgtgaatggggtcaatggtggtgggggtggtggtgtctgctttcctcttcactcccttctttgtctgccaagaacacggacgccaacaggcacagtcagaagtggcagccggcacagctgccct

SEQ ID NO: 32253 - DNA, 30 bp, Homo sapiens
  chr19:15421709-15421739
  hypo
cccaaaatcagtttccgtgtggaggcagga

SEQ ID NO: 32254 - DNA, 31 bp, Homo sapiens
  chr19:15484900-15484931
  hypo
cagacttcagcagccacgaggcctgtccatg

SEQ ID NO: 32255 - DNA, 121 bp, Homo sapiens
  chr19:15506074-15506195
  hypo
cctcgtgatccgcccaccttgtcctcccaaagtgccgtgcccattgttttggtttttttgttttgttttgttttgtttttgagatgagtctcgcagattgctctgcgagtggcgcaatctc

SEQ ID NO: 32256 - DNA, 341 bp, Homo sapiens
  chr19:15538868-15539209
  hypo
gaggggctccagggcccgcagtgaggagggggcagctgaagcgagaacctacagaggttgagaggagacggctccacatcagaggcccagaaaatgccggcggctgcggcggccgagaggtcctgcttcccccaggggctggccatacccgcggccttcagcttggccttcttggccggcggtggggggggaagcaaggagagggccgcggaggtgggaggcggccgccccgggtgggccagggcgccgcgcctgggtgggaggcggatctggacgccgtccctcctgatgagcccgtggagcacgtctatgggggatcccttggcgtccggatcgctgac

SEQ ID NO: 32257 - DNA, 30 bp, Homo sapiens
  chr19:15547836-15547866
  hypo
taggtgggcccgggcgtggctggagaggcc

SEQ ID NO: 32258 - DNA, 512 bp, Homo sapiens; identical to SEQ ID NO: 12122
  chr19:15695277-15695789
  hypo

SEQ ID NO: 32259 - DNA, 30 bp, Homo sapiens
  chr19:15917817-15917847
  hypo
tgagtcaccacggaacgtaatttttaacaa

SEQ ID NO: 32260 - DNA, 188 bp, Homo sapiens
  chr19:16025605-16025793
  hypo
gtcctgcgtgcaacatcgggagatgaccgggactgggggatgcaaccgcaggctctccttaatgcacatggtcaggaagggcagctgggccaggtcgtccctaagaaaacaccccagccccaatcattatcaagggaacaaagacacaattctccagcttctctgtttccaagcgagactttttctcc

SEQ ID NO: 32261 - DNA, 794 bp, Homo sapiens; identical to SEQ ID NO: 12123
  chr19:16186825-16187619
  hypo

SEQ ID NO: 32262 - DNA, 639 bp, Homo sapiens; identical to SEQ ID NO: 12124
  chr19:16187640-16188279
  hypo

SEQ ID NO: 32263 - DNA, 37 bp, Homo sapiens; identical to SEQ ID NO: 12126
  chr19:16222616-16222653
  hypo

SEQ ID NO: 32264 - DNA, 31 bp, Homo sapiens
  chr19:16228440-16228471
  hypo
ggaaaggggatgaaagcgggaggtgagagac

SEQ ID NO: 32265 - DNA, 917 bp, Homo sapiens
  chr19:16232438-16233355
  hypo
gaaggtatcacagtggctgaacggtgagaaagccaggcatcccgggtagatgctccttgtctcctactgaggacagttattttcctttaatgttgctaatatcccttctcttcatgtttagggacacagccggtcaggaacggtttcggacgatcacaacggcctactacaggggtgcaatggtagggactttttgtttggttgtttttatctgctttttaagtcaacatgggagcgtcactgtgcattggttaccgaagcctagatgtttctgtggagcccgtgccccaactcctcagggctccttggtcccaagttagtcttaggaacaggctttgtgccccggcctacccccatgtacatacctccccttctggctgcagagacaatgcaaggtttaaataaagtggaaacataattctttgggaatgaagaaagacacaggaagccggttcttccaggtgagctcagtgcagttaaagccggcatgccccgacttttaggagctgtcacatgacctgcatctgtctctgaaatttgctaccaaaagcttgaagatcttccaggagctgacctgccctgggctgtcggccgttatatccgtcacccaggcctgaggcgggatgacgtgatgggaagactcagtcatcatccctcaaaacatttctcaagcaccttctctgggccaggccttaactagatgcagaaggcggccagggatgggacgaggtcctgtgtcaggggccctgtgtgtacatggcagggcattcaggggtagagggagcaggaggtggagcccctggacctgacctgagaccctggcttgcccactgagctccatctcctgacttggaaaagggaacggagcacagcactgtgtctcgggctgtgctgaggataaacggctgcctctcccc

SEQ ID NO: 32266 - DNA, 95 bp, Homo sapiens
  chr19:16235971-16236066
  hypo
catgaggggagccagccgggcttgtcagcgagtgcgtggcaggggctggcctgtgaggcagaagggtcacctcagcggcccggggggcaggacaa

SEQ ID NO: 32267 - DNA, 235 bp, Homo sapiens
  chr19:16243051-16243286
  hypo
ggagtcaaaatcacaccggaccagcagaagaggagcagctttttccgatgtgttcttctgtgaggaacaccgccttactctgagcctcgctcagcccagctgactgtgcctgttctgagtgagcccctcactcagccggggccctcccacctccaacgccccgcccacgccgcggccaccgggcccacggccaccagaatgcaattgagaaatcgtttattttagtaactgtctg

SEQ ID NO: 32268 - DNA, 171 bp, Homo sapiens
  chr19:16320830-16321001
  hypo
ctccatcactggagtcttcatcgtgttgtgattgtcacacgagtggcatcatatgtcaccgcagctgtctttctgagattgtcgtatgaatggcgtcatacagtcatgagctctcgagtctggctgctttaactcattctaattctttgcgattcatccaaatccaattgt

SEQ ID NO: 32269 - DNA, 83 bp, Homo sapiens
  chr19:16329044-16329127
  hypo
ttctgtttatcaccaccagctcgcccttgagttctttcctggctgaaaccaagaaccctcccgggctgtctcagttttggggc

SEQ ID NO: 32270 - DNA, 31 bp, Homo sapiens
  chr19:16338020-16338051
  hypo
agcccttggggagccccgagccatcccccag

SEQ ID NO: 32271 - DNA, 53 bp, Homo sapiens
  chr19:16343121-16343174
  hypo
agcctacagctctcatcgagagcagaattaaacccactcggctcaacgtgacg

SEQ ID NO: 32272 - DNA, 133 bp, Homo sapiens
  chr19:16485581-16485714
  hypo
cacccatatgagaatacgtgcacatgtgtgtaaatgtgtgtacacgtatgtaagcacagagtgtgcatgcccgggtgtgtatgagcacacacgcacgcatatgtgtgtgcacgtttgcatgcatgcattatgc

SEQ ID NO: 32273 - DNA, 31 bp, Homo sapiens
  chr19:16495005-16495036
  hypo
cctgcctgggggctgccgagaagggacagag

SEQ ID NO: 32274 - DNA, 85 bp, Homo sapiens
  chr19:16512163-16512248
  hypo
aagtgtggtgtttagagagcacgagcgctcactcttattccagggaggaagaggaatccatgacgtacagaggcccaggagcaga

SEQ ID NO: 32275 - DNA, 55 bp, Homo sapiens
  chr19:16513150-16513205
  hypo
ctctctgccagggagacgccttcgctcaggttggccaggtcggtcaggctggcac

SEQ ID NO: 32276 - DNA, 36 bp, Homo sapiens
  chr19:16550466-16550502
  hypo
actccagcctgggcaacagagcgaggctcaaaaaat

SEQ ID NO: 32277 - DNA, 26 bp, Homo sapiens
  chr19:16608170-16608196
  hypo
tttttttttgagacagattctcgctc

SEQ ID NO: 32278 - DNA, 85 bp, Homo sapiens
  chr19:16608435-16608520
  hypo
aggcgtgagccactgcgcccggcttggctactttcccttagcgtgatgtatttgagattcctgcgtgctgttatattagtatttg

SEQ ID NO: 32279 - DNA, 221 bp, Homo sapiens
  chr19:16620677-16620898
  hypo
gacagaccttccacaaacagccgagtctaggaaaaagtcgggcaggcacgtgacaagagtgcttgtgaaggacacagctgtgcagacgccagatcctgccttcacctacgagtggaccaagggtaagccttggggcccgtgggggccggggcagccgggacaggagctcagcgtgtggtttacagcatcctgggagacacgtgggagagctcaggttcctg

SEQ ID NO: 32280 - DNA, 44 bp, Homo sapiens
  chr19:16631182-16631226
  hypo
ggagcgggagtaggaacgggagcaggagcgcgaccttgaccttg

SEQ ID NO: 32281 - DNA, 31 bp, Homo sapiens; identical to SEQ ID NO: 12128
  chr19:16638140-16638171
  hypo

SEQ ID NO: 32282 - DNA, 84 bp, Homo sapiens
  chr19:16680106-16680190
  hypo
tacaagcgtgggccaccgtgcccagcctctccacccactctgtctgttacatcatccggtcccgttagtgtaccttagagcagg

SEQ ID NO: 32283 - DNA, 14 bp, Homo sapiens
  chr19:16680656-16680670
  hypo
aaaaacaaacactc

SEQ ID NO: 32284 - DNA, 31 bp, Homo sapiens
  chr19:16735747-16735778
  hypo
tcatacctccacagaacgagtgtcccaggca

SEQ ID NO: 32285 - DNA, 130 bp, Homo sapiens
  chr19:16756121-16756251
  hypo
cctcattgagacctccgcgccagtctgaataaggcaggaaggtttcttcacaccattcatctggcctgtgagggacccagccaagatcttggcgtgcctgttctgacagcgacaccggcctcagcaaagc

SEQ ID NO: 32286 - DNA, 210 bp, Homo sapiens
  chr19:16766707-16766917
  hypo
ctagtattatctagccgacaggattagtcacgtgcagcacaacctgtatacagggctgatccagcacagactagaaacattaaatgcttggtctgtttccaggaagttttgagaggcgctgctcagcaagacccttcccctagcgaaggatcgtgaaaacaggacctcccaccatcaacagatgccaatcaaacgttactcattccaggc

SEQ ID NO: 32287 - DNA, 30 bp, Homo sapiens
  chr19:16989666-16989696
  hypo
actccagggcaggacgccgcccccgtggct

SEQ ID NO: 32288 - DNA, 162 bp, Homo sapiens
  chr19:17160683-17160845
  hypo
catgacaagtccctccctgaacgagagagagagggcgggacttctgcctggctgcttgaagaaaaatcttcgcttgggctgatgaacgtggcctgagcgggggctgacgaggcacccgggttgtcgtcctcagacaggggcgtgttcttgggtgctccccca

SEQ ID NO: 32289 - DNA, 31 bp, Homo sapiens
  chr19:17161932-17161963
  hypo
ttcatgaacattctgccgttcatggatgaat

SEQ ID NO: 32290 - DNA, 373 bp, Homo sapiens
  chr19:17172582-17172955
  hypo
cctgggggtcagaatcgcccttgagtaagaactggttttaaggtgtggcaggcccagtctgatcccctggccacaccagcattcccagcttcatgcatggccttcaacccaattagatggggaaagactagcaggctggctctagtgtgcctgcttctcaaccacgcctgggaagggcatagcgcgaattctcacaaacatctacaccaggagtggcaaattgtagctcataggccaaatccagcccgcttcctttgcttgtaaatagttttattggcacacagctatacctgttcctctatgtctggtctggggttgtttttaatgttacaaacagcagagctgagtcttcttgttgatgttgttgagacgg

SEQ ID NO: 32291 - DNA, 42 bp, Homo sapiens
  chr19:17220149-17220191
  hypo
caagcatgagccactgcgcccggccatcattttctaataaga

SEQ ID NO: 32292 - DNA, 343 bp, Homo sapiens
  chr19:17240192-17240535
  hypo
cagagcgagacagtttcaacaacaacaacaacaacaacaaaaagaaacagcatcaaggctccgggaagtgagcagcccactctgtccaggcaggtccagggaggctcccagaggccaagacacctgagctgtggctaaacgtaaccaaacgtgtcagggcaggtgggcagggcatgggccaggaggggagccacggacgcgtcagcctcctgctcttggacttgagggagggcggcagacctttcagcacttctgtttcctcgtctgaaatggggatggcaggtctgcttcttaaaggaatgcgagttgaagagggagtctcgaatcccacagtatatgcccc

SEQ ID NO: 32293 - DNA, 297 bp, Homo sapiens
  chr19:17264699-17264996
  hypo
atgttagtagtggttcgcagagtagctattacttggcctccaaaaacaactattttcctcccaattttgacctgtaggaactaccatgtgttttattatttgttacttggggtcagcgaggaagagcgccaagaatttcagctcaagcagcctgaagattatttctacctcaaccaggtaaacagcctcaagcccgagccacaaacgccacctctgttcccggcctcaagctgtttatgtatagccgggaagtcagaggcagcctgccctggcccccgaacccgctcccagaaggca

SEQ ID NO: 32294 - DNA, 31 bp, Homo sapiens
  chr19:17335975-17336006
  hypo
aaaaaaatgccaagcacgattatgggatcac

SEQ ID NO: 32295 - DNA, 30 bp, Homo sapiens
  chr19:17336185-17336215
  hypo
ggctaggaaggaggtcgaggccacagtgag

SEQ ID NO: 32296 - DNA, 99 bp, Homo sapiens; identical to SEQ ID NO: 12135
  chr19:17355756-17355855
  hypo

SEQ ID NO: 32297 - DNA, 57 bp, Homo sapiens; identical to SEQ ID NO: 12136
  chr19:17392598-17392655
  hypo

SEQ ID NO: 32298 - DNA, 30 bp, Homo sapiens
  chr19:17405180-17405210
  hypo
gtggtagacctcgtcgccctcgggccagta

SEQ ID NO: 32299 - DNA, 38 bp, Homo sapiens
  chr19:17412027-17412065
  hypo
ggggccaagcggccatcgctgcccgccggatctgccag

SEQ ID NO: 32300 - DNA, 69 bp, Homo sapiens
  chr19:17415175-17415244
  hypo
aatcctctcataagtttgctacgcaggtaaagcactcatcatagtgtcgtgcatataacaaatgctcca

SEQ ID NO: 32301 - DNA, 123 bp, Homo sapiens
  chr19:17422952-17423075
  hypo
cccaggtcacacaaccagggacgggctaagccaggattgagagcagaatgcccggagtacctgcacctctcgccactcagccaccgggccctgtgtgagcccggccagggttcagtcagccct

SEQ ID NO: 32302 - DNA, 31 bp, Homo sapiens
  chr19:17430595-17430626
  hypo
ccaacctcataggagccgatgtatttatttt

SEQ ID NO: 32303 - DNA, 324 bp, Homo sapiens
  chr19:17435941-17436265
  hypo
ggtgccagcagggaccctgggcgcttgggccgttcaggcccgtggccacccgcagtgctgcccttggccttggcagaggccttctcggaggaggtggcagggtccagcccagagccctcggccctcgcctcctctcggccaccagaatcatgctcccgccgggcatggtgctctgcatggcgctgtcgctcctcctcctcccgccgcctgcgctgctgctgctggtagcgatgctgggcctggcgctcgtgtctctgcaggtagagccaagccgttacaggactaagaagaaagggtgttagcgggtgccagctgaggctggtg

SEQ ID NO: 32304 - DNA, 105 bp, Homo sapiens
  chr19:17438234-17438339
  hypo
cgccggccccacctcgagcactaccaccgacacgatggctgcctccgggctcagccaggggaagaggcgctgcagctgcccgcactggccgattaagtagcagtt

SEQ ID NO: 32305 - DNA, 31 bp, Homo sapiens
  chr19:17447345-17447376
  hypo
aaaatattgagcagggcgaggtaagggggta

SEQ ID NO: 32306 - DNA, 30 bp, Homo sapiens; identical to SEQ ID NO: 12140
  chr19:17501242-17501272
  hypo

SEQ ID NO: 32307 - DNA, 30 bp, Homo sapiens
  chr19:17597654-17597684
  hypo
gcgggcatggaggccgcgctgctcaacgtg

SEQ ID NO: 32308 - DNA, 191 bp, Homo sapiens
  chr19:17688089-17688280
  hypo
gccttccctggaggcggggcgggggctggagggcccttgtttgcaggggctgatctggctggggactctccgggctgcaggtcttcatgatcaacctgaggcggcggcaggaccggcgggagcgcatgctgcgggcgctgcaggcacaggagatcgagtgccggctggtggaggccgtggacggcaagtga

SEQ ID NO: 32309 - DNA, 382 bp, Homo sapiens
  chr19:17691243-17691625
  hypo
tcagagaacgtctgcgtgatcctgctctccccagctccagatcctccatggctccctcacgccctttggaaaaactcactcttctcccccatgaccgccagacccctgggctcctgcattcactccatccagtcacagagctctgcaaacatgctgagcctgctcccatcccaggacctgacggggtaactagatccctggctttctgggcaagctccctccggagggcgggaggagagtgacaggcccgatcttgcaccccagctatgtgggccggaagcggatgcaggtggagcaccccgagaaggctgtgcctcgcgtgaggaacctggtggaggccgactattcctactggaccctggcctacgtgatctccctgcaa

SEQ ID NO: 32310 - DNA, 31 bp, Homo sapiens
  chr19:17692025-17692056
  hypo
gccttctctgtggagccgctgctcatctacc

SEQ ID NO: 32311 - DNA, 30 bp, Homo sapiens
  chr19:17693867-17693897
  hypo
ccttcagcctgaatcgaatgtcagaaccag

SEQ ID NO: 32312 - DNA, 1043 bp, Homo sapiens; identical to SEQ ID NO: 12144
  chr19:17716508-17717551
  hypo

SEQ ID NO: 32313 - DNA, 431 bp, Homo sapiens
  chr19:17759180-17759611
  hypo
tgcaagccccggggctccccacgccaacccgtggccctgcgctcaggccctgcgctcacgctgcaggcagtcggcgttgagcaggtcctggcacttctcgtggcacttgacaccgcactcggtgcagcgcatgccctgcctcgcgatgccccacagcagcccctcgcactcgtagcagtaggtgggcgtggtggccgtccacacttcgaagttgtgtggcgtcgtgcacgagatggggtagattaaggcttgcagggtcttcttgtaaacgtggtttttctgcagggagggatggggtgcggtttgggggcgcctaacctggcgctgtccctgtcctgccccattccgccccatcactgagcgcggtaaagtcccaggccctcccctgcctccacgctgtcggaatccacgctgccttctgccagtctgtg

SEQ ID NO: 32314 - DNA, 30 bp, Homo sapiens; identical to SEQ ID NO: 12147
  chr19:17798831-17798861
  hypo

SEQ ID NO: 32315 - DNA, 30 bp, Homo sapiens; identical to SEQ ID NO: 12148
  chr19:17799313-17799343
  hypo

SEQ ID NO: 32316 - DNA, 30 bp, Homo sapiens
  chr19:17836626-17836656
  hypo
cctccatacagatccgggacatcctggcca

SEQ ID NO: 32317 - DNA, 492 bp, Homo sapiens
  chr19:17838566-17839058
  hypo
cccaccctgtctgactcggatcccgtgcccctggcccccggtgcggcagactcagacgaagacacagagggctttggagtccctcgccacgaccctttgcctgaccccctcaaggtccccccaccactgcctgacccatccagcatctgcatggtggaccccgagatgctgccccccaagacagcacggcaaacggagaacgtcagccgcacccggaagcccctggcccgccccaactcacgcgctgccgcccccaaagccactccagtggctgctgccaaaaccaaggggcttgctggtggggaccgtgccagccgaccactcagtgcccggagtgagcccagtgagaagggaggccgggcacccctgtccagaaagtcctcaacccccaagactgccactcgaggcccgtcgggtgagtactggagctggggccctgggctgggttagcagctgcttaggctggagagcatagctcgtccccctgttttt

SEQ ID NO: 32318 - DNA, 132 bp, Homo sapiens
  chr19:17881556-17881688
  hypo
tgagtatcgccctcccatccccgtttcctccctgtgctttgtaggcggagactaaaaccaagaaggcggcagagagcctgcggcgctcagtggaaaaatacaactcagcccgagctgactttgagcagaaga

SEQ ID NO: 32319 - DNA, 106 bp, Homo sapiens
  chr19:17994704-17994810
  hypo
tggccttgggcgccacgctgtacccacccagcgagcagaccatgagggtcctgccatcgtcggctgcccgctgcgtggctctctcagtcaacgcctctggcctcct

SEQ ID NO: 32320 - DNA, 337 bp, Homo sapiens
  chr19:18053353-18053690
  hypo
ccagcacagagcctaaatcctcgttggctgagatgaaaactcgaaccccaggctagtgggtggcgcgggggtgtggggtcttctgcctgaccatgcacgccgcccccgcaggaggagaaggagaagcggcgcctcgaccagctggaacgtaagaaggagacgcagcgcctactggaggaggaggactccaagctcaagggcggcaaggcgccgcgggtggccacgtccagcaaggtcacccgggcccagatcgaggacacgctgcgccgagaccatcagctcagggaggccccggacacaggtcgggcggcatcccgctctggagctgcacttttgc

SEQ ID NO: 32321 - DNA, 591 bp, Homo sapiens
  chr19:18054209-18054800
  hypo
cccaggggtggagctggtcatcgggggcggggctacctgggggcggggccgggcttttcggggcaaggctgcgcccaaggccccctgacgctcatgtccacccccagcgtggcggaggaggcggccgaccggcacccagaaagacgcatgcgggcagccttcacagcctttgaggaagcccagctgccgcggctcaaacaagagaaccccaacatgcggctgtcgcagctgaaacagctgctcaagaaggagtggctccgctctcctgacaaccccatgaaccagcgggccgtgcccttcaatgcccccaagtgagcccagaacttggggagccagttcacccacgggtggtccaggtcacgactctgcacgcccttaggccaggtcagctgcgagggtcacagagcgttccgggggccaaggcgccgggccccggggccatgctcttatcaccagccacccgtcctcccgccagagggtccctgccccgagtgacaccccatcccctcccatcccccggcgcgtgtgtgtagagcctcagggctgagtgcccaataaaggtggcggcaaggctgcggtgaggcacttgaa

SEQ ID NO: 32322 - DNA, 644 bp, Homo sapiens
  chr19:18084482-18085126
  hypo
ggatggtaaacccacgtgtcagcactctgggccactcccaaacttagaacgttctgggttggccgggatggtccttgcctttctggtcagtaagctggaccctgctgtgaccatgtccctctgtgcccttgcaggtcagtgcaggagcccagccgctgagccatgccgggccccgggcggcctgcagcgagcccaacccctgcacccaggtagtcatgaacagccacagctacaatggcagcgtggggcggccgctgggcagcgggccgggcgccctgggacgagaccctccggaccctgaggccggccaccccccacaacccccgcacagcccgggcctccaggtggtagtggccaagagtgagccagcccggccctcacccggcagcccccgggggcagccccaggaccaggacgatgacgaggatgatgaggaagatgaggccggcaggcagagagcctcggggaaaccctcaaatgtgggccaccgcctgggccaccggcgggcgctcttcgagaagcggaagcgcctcagcgactatgccctcattttcggcatgtttggcatcgtcgtcatggtgacggagaccgagctgtcctggggggtgtacaccaaggtaggcgtggtcctcccccaggcactc

SEQ ID NO: 32323 - DNA, 30 bp, Homo sapiens
  chr19:18092557-18092587
  hypo
ccatgacctgcgagcgcgtgttcctcatct

SEQ ID NO: 32324 - DNA, 250 bp, Homo sapiens; identical to SEQ ID NO: 12155
  chr19:18118063-18118313
  hypo

SEQ ID NO: 32325 - DNA, 385 bp, Homo sapiens; identical to SEQ ID NO: 12156
  chr19:18118522-18118907
  hypo

SEQ ID NO: 32326 - DNA, 177 bp, Homo sapiens; identical to SEQ ID NO: 12157
  chr19:18118965-18119142
  hypo

SEQ ID NO: 32327 - DNA, 288 bp, Homo sapiens
  chr19:18123644-18123932
  hypo
atggctagatggggagcggtatttctgaatttctgtttccagtgttctctgaggcttaatgggaacatttctcttaggaggatccaaacccactcttgggggacatgaggccgcgctgcatgacttgctgaacggcacagggacccctcgaggaacaaggttgcacaccagctttcagccaccatgactgtggggagtggctggaccaagggctgacctccccgactgcatcaaagttggggaaccaagtctcagagtgaggcgggggcctttcggatatcacatggg

SEQ ID NO: 32328 - DNA, 31 bp, Homo sapiens
  chr19:18207918-18207949
  hypo
gggtgagatcctcactcgcctcaccctagaa

SEQ ID NO: 32329 - DNA, 119 bp, Homo sapiens
  chr19:18241243-18241362
  hypo
ctgtagtgcctgctggggcctcgatctccggtcccagcaagcctggccctctgtccccagggccgtctacctggtgcggcaccgtgacacacggcagcgctttgccatcaagaagatca

SEQ ID NO: 32330 - DNA, 39 bp, Homo sapiens
  chr19:18273279-18273318
  hypo
ctagcaagatccagggcgagtacacgctgaccctcaggt

SEQ ID NO: 32331 - DNA, 30 bp, Homo sapiens
  chr19:18307033-18307063
  hypo
tgagtttcctcaaccggaacacacccatga

SEQ ID NO: 32332 - DNA, 30 bp, Homo sapiens
  chr19:18368468-18368498
  hypo
cctggaaccagcttcggtcagacatgaccc

SEQ ID NO: 32333 - DNA, 384 bp, Homo sapiens
  chr19:18368712-18369096
  hypo
gtagccacggacgcccgcctggatagtgatcactgcgaggatgcggatctcctctgcagcctgcatggacaccattggctccccggaccgcctgggaggcaccaccgccttgttgcgccaggtgtcccaggacgcagcacccctggctggctcccatgcgcggttccacgattggccaccaaccacaccagcgtccgcggggccctggagtatagtggagttcagggatgccttgtgactaacggcaggattctgggggctataggagtcctgccgtctccacggtgactcctggttaaaaaggggtggcagggaaccacttggggaagactcatagcctagagacaccctccgaactcccggggccagcggaggaatgaccga

SEQ ID NO: 32334 - DNA, 254 bp, Homo sapiens; identical to SEQ ID NO: 12161
  chr19:18420496-18420750
  hypo

SEQ ID NO: 32335 - DNA, 30 bp, Homo sapiens
  chr19:18492959-18492989
  hypo
cccaggtgtcagtgcggttcagaaagcaac

SEQ ID NO: 32336 - DNA, 80 bp, Homo sapiens
  chr19:18496194-18496274
  hypo
tgacataagccaccatgcctggcccccagaattatgaatcctgtgaggatggcttcaaggtgagcgctgagccagacaaa

SEQ ID NO: 32337 - DNA, 452 bp, Homo sapiens; identical to SEQ ID NO: 12164
  chr19:18548687-18549139
  hypo

SEQ ID NO: 32338 - DNA, 30 bp, Homo sapiens
  chr19:18553980-18554010
  hypo
tcctggagcctgctcggcccttccccggcc

SEQ ID NO: 32339 - DNA, 30 bp, Homo sapiens
  chr19:18555395-18555425
  hypo
ggcttgcagccacccgccagggccagacgt

SEQ ID NO: 32340 - DNA, 68 bp, Homo sapiens
  chr19:18557167-18557235
  hypo
tgggtgaaccgccgcgtgatgcgctcaatgcgggcgtgcaggtcgcggtactcgctgtactcggcatt

SEQ ID NO: 32341 - DNA, 30 bp, Homo sapiens
  chr19:18561249-18561279
  hypo
tagagccccggcaacgccctcctgcctggg

SEQ ID NO: 32342 - DNA, 114 bp, Homo sapiens
  chr19:18600783-18600897
  hypo
ccacgctgtggagcccgtgctggtccctcaagcctccagccacctgcacgcggggccagccaggccaggtgagacacagccttgcttacacgccagctgcgtctgagagcagag

SEQ ID NO: 32343 - DNA, 82 bp, Homo sapiens
  chr19:18675983-18676065
  hypo
tgggataaaatcttgacgtaagtttatttactgattgattaattgatcgagacagagttttttttttttttttggagacgga

SEQ ID NO: 32344 - DNA, 81 bp, Homo sapiens
  chr19:18688457-18688538
  hypo
tttagaattgagggcaaacaccgggcacctgtcggccatttaaaagcgacaagtgccgccgcctgactaaagacacagatg

SEQ ID NO: 32345 - DNA, 30 bp, Homo sapiens
  chr19:18757683-18757713
  hypo
cgagagagtagagcacgtccagcgtgagct

SEQ ID NO: 32346 - DNA, 236 bp, Homo sapiens
  chr19:18757926-18758162
  hypo
tcctcccctccttgtcggcaggtcccaagagctctgggagtggaattgctctgaaagcactcacttcaacctgaatcgtgcagtgcgatcgtcacagctggactgtttccacctggtagctgtgacccccgggacggcctccttgtcgttgtccgtagttaccggggaagaaaggctttattaccctccgccataatcgcaccatctccagggagcccctgcgaatgtcatcccac

SEQ ID NO: 32347 - DNA, 76 bp, Homo sapiens
  chr19:18771032-18771108
  hypo
cctgggcctggctagggtgcccgatgacattgctggggggatacagcggcaagcgggtgtcagaatggcccctagc

SEQ ID NO: 32348 - DNA, 30 bp, Homo sapiens
  chr19:18782359-18782389
  hypo
ctgctgtatctaaccggatcgattgtgcat

SEQ ID NO: 32349 - DNA, 30 bp, Homo sapiens
  chr19:18798489-18798519
  hypo
gcatgtcactcatgcgtgtctgttcacagt

SEQ ID NO: 32350 - DNA, 35 bp, Homo sapiens
  chr19:18830680-18830715
  hypo
gatgggcacaggcccgctccgggaaggccccaggc

SEQ ID NO: 32351 - DNA, 733 bp, Homo sapiens
  chr19:18856003-18856736
  hypo
catggctccggaaggcgcctgtacttggctctggtggtgcctggagtgcctggaggaggctgcgggggagggtgtgtgggggccgcgtctcaatcaagagcagccctgggctccacaaggaagcctcccaggaactcgcgcttggccaggtgggccccgaaacagtcctgggctggaagcccctgggctgtctcttggcaggcccctccagggatgacgtaggtgggggtaggaggccgtccaggcccggagagagagggcggaggcctgtctgcacctggtgagactggggaggagggctgcctaggccggctacatccctggcacccggcgggcgctggccccgagcttgtgccgctctgcctggcctgtgcatgccagctgcactgcacgcccctgccaccctggctcccgggaccccagctcacaccccctccctaccccccagtgcttggagagccagggagctggggctgaaggaagaagcccatcccaggctgtggagcgatggccgagggtgctccagagtggggggccctgcgatcagactctggggccagcgctggggccacagctggtaaccattgtttggatttctctctctctgtttccatctcctcctcccccagacccccttccaatcctcgggcctggacaccagccggaccacccggcaccatgggctggtggacagggtgtaccgggagcgtggccggctcggctccccacaccg

SEQ ID NO: 32352 - DNA, 66 bp, Homo sapiens
  chr19:18870979-18871045
  hypo
cagcaccggcaacctcgcggccaacctgacgcacctgggcatcggtggcgccggccagggtaaggc

SEQ ID NO: 32353 - DNA, 114 bp, Homo sapiens
  chr19:18872819-18872933
  hypo
agatagacagggccaggcaggcggcatccacacgcacctgcgcagaaccagaaagctgaaggtcagcgctggggctgcaggtacccctgccccgcatagaagccaccatctccc

SEQ ID NO: 32354 - DNA, 30 bp, Homo sapiens
  chr19:18882238-18882268
  hypo
tctgtcatcgcaggcgccggctctgcagca

SEQ ID NO: 32355 - DNA, 30 bp, Homo sapiens
  chr19:18883786-18883816
  hypo
caggaattaggagtcgagccagtttctctc

SEQ ID NO: 32356 - DNA, 37 bp, Homo sapiens
  chr19:18963996-18964033
  hypo
ctctccctggtggaagcgacggcgtgggttaaaatgg

SEQ ID NO: 32357 - DNA, 31 bp, Homo sapiens
  chr19:18964686-18964717
  hypo
tcctgggagaagacaccgcgggtcagactca

SEQ ID NO: 32358 - DNA, 30 bp, Homo sapiens
  chr19:18965878-18965908
  hypo
cccatgggccgggacgcaagcggaggctgc

SEQ ID NO: 32359 - DNA, 30 bp, Homo sapiens
  chr19:18967261-18967291
  hypo
aattagggacatctcgctgcctggaacacg

SEQ ID NO: 32360 - DNA, 31 bp, Homo sapiens
  chr19:19017312-19017343
  hypo
tgccctggacatggcccggagtcacatccta

SEQ ID NO: 32361 - DNA, 31 bp, Homo sapiens
  chr19:19040158-19040189
  hypo
cagtccctttccaggacgaatgggcccaact

SEQ ID NO: 32362 - DNA, 188 bp, Homo sapiens
  chr19:19109238-19109426
  hypo
gtgtaagccaccgcacacctttttttatcctgttaatcttcttattgtcagttcatttcaacaggcttagacttggaccttcaaaggcggagggaaattccctttgttctcttcagaggcatctccgagggtattatataaagtagctgtgtgtgtgtatgcatgtgtgtgtgcgtgtgtgtatgcat

SEQ ID NO: 32363 - DNA, 282 bp, Homo sapiens
  chr19:19114949-19115231
  hypo
caactgtgccgacaggcgggcactcaccttttggctcctggatgagacacactctcttgggagctggaatcatgccaaccttcaatgacttgctgctgatcctcttccgagggaagcaggtacctgaggaggcctgtgacaaggcaggtgctccagccaggtcgtcctcggcagcctcgccgggaaggccgtcggcaggggtgctgccctcagacttgcccgcccctccaggagcgggggcctcctctcccccatcctcatcgtcctcgtcctcctcctcag

SEQ ID NO: 32364 - DNA, 31 bp, Homo sapiens
  chr19:19121157-19121188
  hypo
aacaaaacaagcataacgggacatttatgaa

SEQ ID NO: 32365 - DNA, 241 bp, Homo sapiens
  chr19:19156741-19156982
  hypo
gagccactatgcccggcctattatgctaaattcttaaaatatgttctcttaatctgtgctcagcccatcttgctggtgaggtatctgaggcttcccaaggatcagtgaccacgcccctgcaccccgaaaggtcagctggtgagaggcagagctggtacccggatccaggaagcaaagcactgaaaggccgttctaccagcagtacaggaaactccgtgtttgtttataacattcgctcctt

SEQ ID NO: 32366 - DNA, 30 bp, Homo sapiens
  chr19:19335260-19335290
  hypo
ggacccggcccctccgcctctctttgagta

SEQ ID NO: 32367 - DNA, 195 bp, Homo sapiens
  chr19:19416789-19416984
  hypo
gccccaggcctgtccgcctgctgatgagcagggacctcttcccagcgctgggggtgggtgtgctgggaggggcgctgggcgcactggtcggggcgtctggtatagaaggaaggatatgcgcactcgggatctgcagggcacctctcccggcttccgacctaacctaggtgctgtgggccccgggggagctgggtc

SEQ ID NO: 32368 - DNA, 691 bp, Homo sapiens
  chr19:19446447-19447138
  hypo
gtggaagccccagagcgagccagtaaccaggtgccaggtgtttgcctgagaattaatcgttgttttctttctttttcagtggttgatatcacagcaagtatcctttccgtgttggtatggttccctttaaggaattctccacttaaataaaaagaatgtatcaaagcttgaatcccacctcccgacatgccctgtgagttgaggctcggcccacagagcacctggagtgtcccccacctggccctctgctgcccttgggcgctgtgctcctctttgtgcttctcttcgtaccttgcatccagctccaagccctgccctgcagcaagctcaaggttcactgggggaacaggaaaacttggaatttcagggcaggcagggacgtgtgtgccctgcagaccttggcagggtaggagccccaagctgtggccctttcaaaccgacctttttcgcagtgtctgtacttccttaactggacgtcactagatcccgcagttcgaagatgttaaatttgaagcagcaagtctgttgtctgaattgtactgtcaagaggtaagaacatattaaggtttctgaaagcaaagtgtctctccgtgtcgctaagacatgacagcacattggtaaattggggttccgggagttggaatccctccggctttttttgtttttttggtcggggtgggaggacagggtc

SEQ ID NO: 32369 - DNA, 181 bp, Homo sapiens
  chr19:19494667-19494848
  hypo
ttacaggcgtgaaccaccgcgcccggcctgggttgcttttctaaaaaggtctaactcaccgcattgtcctagggctgaggcgtcagaaagtcgaagtttcaggaaaaggggaccccttcctcccacactcagatgctgcttagaaaagcacatggagcacaactccctcgcatttttcttt

SEQ ID NO: 32370 - DNA, 281 bp, Homo sapiens
  chr19:19576175-19576456
  hypo
acacggagtcagaaacgagcgcttgaacgggacccaacagaggacgatgtggagagcaagaaaataaaaatggagagaggattgttggcttcagatttaaacactgacggagacatgagggtgacacctgagccgggagcaggtccaacccaaggattgctgagggcaacagaggccacggccatggccatgggcagaggcgaagggctggtgggcgatgggcccgtggacatgcgcacctcacacaggtgagtgggaggagccagcgggaggggctggaa

SEQ ID NO: 32371 - DNA, 30 bp, Homo sapiens
  chr19:19576874-19576904
  hypo
tcctcggagcgggtacgggatgctcactcg

SEQ ID NO: 32372 - DNA, 31 bp, Homo sapiens
  chr19:19605784-19605815
  hypo
ttaattttgtgttatacgtttgccttgttag

SEQ ID NO: 32373 - DNA, 30 bp, Homo sapiens
  chr19:19613150-19613180
  hypo
gctgtcccggggttcggccacgacgccccg

SEQ ID NO: 32374 - DNA, 41 bp, Homo sapiens
  chr19:19625744-19625785
  hypo
gtagccatgggcctggcggccgaagccgaagtcggtgagct

SEQ ID NO: 32375 - DNA, 178 bp, Homo sapiens
  chr19:19637009-19637187
  hypo
agggattggaaccctgatctacgggcactggagcataatgaagtggaaccgtgagcgcaggtagggcccctggtgggcgttgtctgaaagtgcccccccggcgagttgtcggggtcctgtagcattccgctgttgtctgtgctggcgaggggtgaacgggccccttggacttggctgt

SEQ ID NO: 32376 - DNA, 418 bp, Homo sapiens; identical to SEQ ID NO: 12177
  chr19:19729111-19729529
  hypo

SEQ ID NO: 32377 - DNA, 162 bp, Homo sapiens; identical to SEQ ID NO: 12178
  chr19:19729585-19729747
  hypo

SEQ ID NO: 32378 - DNA, 30 bp, Homo sapiens
  chr19:19737725-19737755
  hypo
agcagtgtggccaccgacgcagtgaggctt

SEQ ID NO: 32379 - DNA, 30 bp, Homo sapiens; identical to SEQ ID NO: 12179
  chr19:19738577-19738607
  hypo

SEQ ID NO: 32380 - DNA, 149 bp, Homo sapiens; identical to SEQ ID NO: 12180
  chr19:19739478-19739627
  hypo

SEQ ID NO: 32381 - DNA, 30 bp, Homo sapiens
  chr19:19749053-19749083
  hypo
gggacccctgggagcgtgcccgcaggtcct

SEQ ID NO: 32382 - DNA, 30 bp, Homo sapiens
  chr19:19778579-19778609
  hypo
tgtgaccggtgttccggaaaaagaagcagg

SEQ ID NO: 32383 - DNA, 669 bp, Homo sapiens; identical to SEQ ID NO: 12182
  chr19:19843294-19843963
  hypo

SEQ ID NO: 32384 - DNA, 26 bp, Homo sapiens
  chr19:20153115-20153141
  hypo
gccacgtgtctgcctttaaaagaaaa

SEQ ID NO: 32385 - DNA, 901 bp, Homo sapiens; identical to SEQ ID NO: 12193
  chr19:20162580-20163481
  hypo

SEQ ID NO: 32386 - DNA, 121 bp, Homo sapiens
  chr19:21261375-21261496
  hypo
ctgggattacaggcgtgagccaccgcccccggcggataattttttataataaaaatgttctttatgtttgccccttaccatttttttttttttttttttttgagatgaagtttttgctctt

SEQ ID NO: 32387 - DNA, 30 bp, Homo sapiens
  chr19:21386946-21386976
  hypo
ttactagcaacagaacgccgcactcgggtg

SEQ ID NO: 32388 - DNA, 19 bp, Homo sapiens
  chr19:21513268-21513287
  hypo
tttttatttttttagacgg

SEQ ID NO: 32389 - DNA, 275 bp, Homo sapiens
  chr19:21623089-21623364
  hypo
gaattggcaagcccctcttgccgccccaagcctctctgggtcggactactagttacaccccgggaggtgatcaggctccccttccgtccttacgggacgggtcctgccttggtccccaataacttaccgtggttcctaaagtgcgctatttctggaatcatcctgtagcccttctcaggctccgttgcactgctgggtagggatgccgggtcatgggagagctgatttcccctccgggctgaagttctcccggcggtgcctgggtcccaggtttc

SEQ ID NO: 32390 - DNA, 16 bp, Homo sapiens
  chr19:21627222-21627238
  hypo
ttactacatttttcaa

SEQ ID NO: 32391 - DNA, 27 bp, Homo sapiens
  chr19:21645488-21645515
  hypo
tggtagccccaaaaccacaaacgtcgg

SEQ ID NO: 32392 - DNA, 19 bp, Homo sapiens
  chr19:21647161-21647180
  hypo
caaaaagaaataagaaaaa

SEQ ID NO: 32393 - DNA, 30 bp, Homo sapiens
  chr19:21654950-21654980
  hypo
aaaccaagtctcaccgagttgcaggagcca

SEQ ID NO: 32394 - DNA, 13 bp, Homo sapiens
  chr19:21760987-21761000
  hypo
agtttaagggatt

SEQ ID NO: 32395 - DNA, 34 bp, Homo sapiens
  chr19:21792702-21792736
  hypo
cagcagtgactcccaacgacgaacagtggattag

SEQ ID NO: 32396 - DNA, 32 bp, Homo sapiens
  chr19:22606208-22606240
  hypo
actttaaaaacaaggaacacacggggcacggt

SEQ ID NO: 32397 - DNA, 30 bp, Homo sapiens
  chr19:22815184-22815214
  hypo
tgtttgtttgagacagaatctcgctctgct

SEQ ID NO: 32398 - DNA, 101 bp, Homo sapiens
  chr19:22815453-22815554
  hypo
ttacaggcgttaggcaccgtgcccagccaagccttaactcctgaatgagaccatacgtctttttattttagccccaattcggtacatggcatgtttttaat

SEQ ID NO: 32399 - DNA, 30 bp, Homo sapiens
  chr19:22824868-22824898
  hypo
acaggcgtgagccagcgcgcccggccacgc

SEQ ID NO: 32400 - DNA, 30 bp, Homo sapiens
  chr19:22825460-22825490
  hypo
gagtacaggcgtaagcgaccgcgcacggcc

SEQ ID NO: 32401 - DNA, 28 bp, Homo sapiens
  chr19:22880323-22880351
  hypo
cccccccgccaaaaaaaaagaaatgaat

SEQ ID NO: 32402 - DNA, 28 bp, Homo sapiens
  chr19:22966070-22966098
  hypo
aaactccgtttcaaaaaaagaaagaaaa

SEQ ID NO: 32403 - DNA, 34 bp, Homo sapiens
  chr19:23084163-23084197
  hypo
taggattacaggcgtgagccactgctcccagtct

SEQ ID NO: 32404 - DNA, 293 bp, Homo sapiens; identical to SEQ ID NO: 12209
  chr19:23258305-23258598
  hypo

SEQ ID NO: 32405 - DNA, 31 bp, Homo sapiens
  chr19:23690008-23690039
  hypo
cactgtgcccggcctatgttctaacattttt

SEQ ID NO: 32406 - DNA, 147 bp, Homo sapiens
  chr19:24270270-24270417
  hypo
ttcagaaataagatggcggctgcgctgacagccagacccccaggagtcctgtttcttccctgcgcagtgactgtgccctgtcctggagccctctctgggcagctgtggacccgcagccccgcgtctctcccagattgttcagggacc

SEQ ID NO: 32407 - DNA, 30 bp, Homo sapiens
  chr19:28296829-28296859
  hypo
acataggaccaccacggcctcggccacgct

SEQ ID NO: 32408 - DNA, 36 bp, Homo sapiens
  chr19:29930744-29930780
  hypo
agacccaatgagaggtgacaacgtgctggtggccct

SEQ ID NO: 32409 - DNA, 121 bp, Homo sapiens
  chr19:29930899-29931020
  hypo
gctttccgggaggtgaggagggagaggcgcaggtgggaagtgcgggaactggggctgcgcggctctcgggggccagcgtgagttccaggtgggcttgggcctggtgggcccgcactctgag

SEQ ID NO: 32410 - DNA, 202 bp, Homo sapiens; identical to SEQ ID NO: 12228
  chr19:30015760-30015962
  hypo

SEQ ID NO: 32411 - DNA, 904 bp, Homo sapiens; identical to SEQ ID NO: 12229
  chr19:30016024-30016928
  hypo

SEQ ID NO: 32412 - DNA, 58 bp, Homo sapiens; identical to SEQ ID NO: 12230
  chr19:30017451-30017509
  hypo

SEQ ID NO: 32413 - DNA, 144 bp, Homo sapiens; identical to SEQ ID NO: 12231
  chr19:30017577-30017721
  hypo

SEQ ID NO: 32414 - DNA, 850 bp, Homo sapiens; identical to SEQ ID NO: 12232
  chr19:30017765-30018615
  hypo

SEQ ID NO: 32415 - DNA, 530 bp, Homo sapiens; identical to SEQ ID NO: 12233
  chr19:30019080-30019610
  hypo

SEQ ID NO: 32416 - DNA, 270 bp, Homo sapiens; identical to SEQ ID NO: 12234
  chr19:30019660-30019930
  hypo

SEQ ID NO: 32417 - DNA, 304 bp, Homo sapiens; identical to SEQ ID NO: 12235
  chr19:30019993-30020297
  hypo

SEQ ID NO: 32418 - DNA, 80 bp, Homo sapiens
  chr19:30102074-30102154
  hypo
caacggccaaatagcctcccacgctccagaagacgcttaaagtatgccatgctgttcccggccccactcaggagatcagc

SEQ ID NO: 32419 - DNA, 341 bp, Homo sapiens
  chr19:30185995-30186336
  hypo
gaaatcctgccactccgccacccagacaccgaacacccagacacctaacacacagacacctgacacccagacacctggacacctgacacccggacacccagactacctgacacccggacacctggacacccgatcacccagacacctgatacccagatacccggacacccagacacctgacacccagatactgagacacctgacacccagacacctgacacccagacatccagacacccggacacctgacacccagacacctgacacccggacacctggacacccggacaccgagacacctgacacccagacactgagacgcctgacacccagacacctag

SEQ ID NO: 32420 - DNA, 114 bp, Homo sapiens
  chr19:30314981-30315095
  hypo
gcttgaagctgtggagggccacggtggcgtggctctcctcgcaggtgttctgggctccgttgtaccaagtggagcaggtggttgcgggcaagcgttgtgcagagcccatagcca

SEQ ID NO: 32421 - DNA, 17 bp, Homo sapiens
  chr19:30534903-30534920
  hypo
ttatttttatttttttg

SEQ ID NO: 32422 - DNA, 43 bp, Homo sapiens
  chr19:30536064-30536107
  hypo
tgggttccttaataagaaagtcgctgtaggaaaagctgtccat

SEQ ID NO: 32423 - DNA, 115 bp, Homo sapiens
  chr19:30637462-30637577
  hypo
cccatgagcaccacattctggcggactcaccgtgcacgggcattcagcgagactcgatgcgaaggcaaggcaagcacgtgacatccagtactacgtgaggtgctgacagccccca

SEQ ID NO: 32424 - DNA, 462 bp, Homo sapiens; identical to SEQ ID NO: 12241
  chr19:30716307-30716769
  hypo

SEQ ID NO: 32425 - DNA, 3038 bp, Homo sapiens; identical to SEQ ID NO: 12242
  chr19:30716952-30719990
  hypo

SEQ ID NO: 32426 - DNA, 914 bp, Homo sapiens
  chr19:30935127-30936041
  hypo
cccggccggacctgaagcccccgccgcacgcccagcaggccccgctggccgcctgcaccctggccctgcaggctaaccacagcgttcccgacgtggcccacccggtgccctcgcccaagcctgccagcgtgcaggaggacgcggtggccccggcggcgggcttccgctgtaccttctgcaagggcaagttcaagaagcgcgaggagctggaccgccacatccgcatcttgcacaagccctacaagtgcacgttgtgcgacttcgcggcttcgcaggaggaggagctcatcagccacgtggagaaggcacacatcacggccgagtcggcccagggccagggccccaacggcggtggcgagcagtcggccaacgagttccgctgcgaggtgtgcggtcaggtgttcagccaggcgtggttcctcaagggtcacatgcgcaagcacaaagactcctttgagcactgctgccagatctgcggccggcgcttcaaggagccctggttcctcaagaaccacatgaaggtccacctcaacaagctgtcggtgaagaacaagtcccccagcgaccccgaggtgcctgtgcccatgggcggcatgtcccaggaggcccacgccaacctgtactccaggtacctctcctgcctgcagagtggcttcatgaccccggacaaagccggcctgagcgagcccagccagctctatggcaagggcgagctgcccatgaaggagaaggaagcgctggggaagctgctgtctcccatctccagcatggcccacggcgtcccggagggggacaagcactccctcctgggatgcctcaatctcgtgccgccgctgaaatccagctgcatcgagcggctgcaggcggctgccaaggctgcggagatggaccccgtgaacagctaccaggcttgg

SEQ ID NO: 32427 - DNA, 338 bp, Homo sapiens
  chr19:30936340-30936678
  hypo
gaacatgaaggagaagcccaccgagtgccccgactgcggccgggtgttccgcacttaccaccaggtggtcgtgcactcccgtgtccacaagcgggaccgcaagggcgaggaggatgggctgcacgtgggcctggatgagcggcgtggctcgggcagtgaccaggagtcccagtcggtgagccgctccaccacgccgggctcctctaacgtcaccgaggagagcggggtcggaggcggcctctcccagaccgggagtgcccaggaggacagcccgcacccctcctcgccatcctcctcaggtaggttagctgagaagcggggagaagcagcttgtacag

SEQ ID NO: 32428 - DNA, 261 bp, Homo sapiens
  chr19:31217749-31218010
  hypo
gattggatggagaaagccaggcgctgctgagcgcttaacgacaaccagccttctccccagaaccggctgtgagcacagctaagaatagacctgggccaggacggtggagtctctctgtgcgagagttctctgcgggaatattctaaactccgcagtggagccggctctgcctcagccttgccgagcagggggccaagcgtgtctgagtcagttcagctgctgtaacaaagcaccgtgatcggggtagcttataaacaacag

SEQ ID NO: 32429 - DNA, 450 bp, Homo sapiens
  chr19:31767996-31768446
  hypo
tgggggttccagtttgactggcggcccttcctcttctgggcgggcgtcgactcctcagcctcctccagagtggccccgtcaatgtcagacttctcggagatgctggaaggagtggaggattttgacgtgtggctctctgtcaagttcttcagcatatcggatatatctgacaaggcattctcgcgtagcggcgagtttgacatgaatgatacgacggcagatgtctttgccgttgtcaccgtggatgaggaggttgccggggctgtggacgtgggtgacagaagcactgaacccaaggagcagcctttgtcactcttcccttttgtcaagtctatgggctggtcgttgttgacgtggtagaaatagcggtcgaggtggtctgccttcttggactgcaggggcggcggggtggccacagcagccttctccgccaggctgttgctcatcttg

SEQ ID NO: 32430 - DNA, 352 bp, Homo sapiens
  chr19:31770316-31770668
  hypo
tggagaggaagttgttgtacacggccttcatctgctccaggctatccgacacagtcgtgtcttccagtgggaccgtgacctccttggtctcctcttcgttcttgatggagccgctttcaaagtcagccattcggtcactggtctcactgatgtgtgactcgctgtccatttcatggcaggaaaactcggcggccggggagttctggtagctggggcaggccctggcgagctccttctccgggcacatgtacttggccgagggctctccatctgccgtatgctcctctgggtctaaaccttcgtccaccagggcagcagcctttaactcttcggaaacataggctgccatgat

SEQ ID NO: 32431 - DNA, 183 bp, Homo sapiens
  chr19:31794154-31794337
  hypo
aagatggtggagctgctgacccgcaggcctgagtgttgtaaagggacctttctccactacgctaaggaatacgcccgggtctgcactgcgacattggtcgtgctgcaacacaggacagagacggcagcctctgagatggcatagacctggctcaccggagacgcacttggtccacataggcac

SEQ ID NO: 32432 - DNA, 3 bp, Homo sapiens
  chr19:31839562-31839565
  hypo
gct

SEQ ID NO: 32433 - DNA, 90 bp, Homo sapiens; identical to SEQ ID NO: 12245
  chr19:31839837-31839927
  hypo

SEQ ID NO: 32434 - DNA, 182 bp, Homo sapiens; identical to SEQ ID NO: 12246
  chr19:31839941-31840123
  hypo

SEQ ID NO: 32435 - DNA, 36 bp, Homo sapiens; identical to SEQ ID NO: 12247
  chr19:31840722-31840758
  hypo

SEQ ID NO: 32436 - DNA, 30 bp, Homo sapiens; identical to SEQ ID NO: 12248
  chr19:31841146-31841176
  hypo

SEQ ID NO: 32437 - DNA, 30 bp, Homo sapiens
  chr19:32323971-32324001
  hypo
gaacagcaccctgttcgcttggtcagtgtt

SEQ ID NO: 32438 - DNA, 75 bp, Homo sapiens
  chr19:32672522-32672597
  hypo
atgaattattgcagcccgggaagtggccactcaagaggggttgcttggccaggtgcacatcggagtcgtgggctg

SEQ ID NO: 32439 - DNA, 138 bp, Homo sapiens
  chr19:32835110-32835248
  hypo
atctcttaccttttatcgaaaaaaaaattactcaacattttattttttcacagctatttggtctaattggcaaaggattctgtggaatagcagaattctaactttgcagccgggcgcggtggctcacgccggtaaccc

SEQ ID NO: 32440 - DNA, 148 bp, Homo sapiens
  chr19:32845532-32845680
  hypo
ccaaaacgcttcagacgatgacattttgaaagagttgcaggacaacgcccagtgccaacccaacagcgatacaagtttgtccggaaacaatgtggtggaatacatcccgaatgctgaacgaccctaccgttgccgcctgtgtcactac

SEQ ID NO: 32441 - DNA, 30 bp, Homo sapiens
  chr19:32850267-32850297
  hypo
ctttgtataataccacggattttactttta

SEQ ID NO: 32442 - DNA, 180 bp, Homo sapiens
  chr19:32850566-32850746
  hypo
tttagtaacatggctacttttcgttggatccatgtctcctgcgtttcggagagctgcatattcatgtcagtcataacctttgtccctgtaacctgtcagttaactagaaagaattatacattgcatagcacttaaaaatttgcggccgcttttcctttcttgttgcgttggtagctgacg

SEQ ID NO: 32443 - DNA, 410 bp, Homo sapiens
  chr19:32898171-32898581
  hypo
ccccccacccattactcccaccgacgctccctgggatagcagctgccctgattggcacacccccgcagtcatcaccactgaggcgtattcctgaagctgccagtgtgaattgttttatagaacactggtgttaaaattcaggtacctgagacaaaacaatattttaattcttcaaaatccggttgtcaacacatttactatggagtatctcccacgtggccacttctgtgggaggtactgaagacctactaccgcctatggaagtagaaaataatatacaactgtgtagttacgtgacgcattgcgtggtaactgctatggctcagggagggagaagatcagccggaactggaatgtcccaagatgttctggaagaaaagcagtggctcgtttgtgttgcttacctgtat

SEQ ID NO: 32444 - DNA, 175 bp, Homo sapiens; identical to SEQ ID NO: 12251
  chr19:33166793-33166968
  hypo

SEQ ID NO: 32445 - DNA, 499 bp, Homo sapiens; identical to SEQ ID NO: 12252
  chr19:33166988-33167487
  hypo

SEQ ID NO: 32446 - DNA, 455 bp, Homo sapiens; identical to SEQ ID NO: 12253
  chr19:33167496-33167951
  hypo

SEQ ID NO: 32447 - DNA, 31 bp, Homo sapiens
  chr19:33357609-33357640
  hypo
aagtgctgcagcccatcgtctacctcctggg

SEQ ID NO: 32448 - DNA, 211 bp, Homo sapiens
  chr19:33415225-33415436
  hypo
catgagaaagtgtcttactagcgtcatcagtctgcagagcttcactggccattagccacaacacgaggtctgtcgctgggccggttttgatgcctaacagtctatgtctgtttcagctcccaacagtctgtgtgtgtgacacttcagctgagcctcctccatcagggcttttccagcttccgtgtcctgcgctgtcctttggtgagaatct

SEQ ID NO: 32449 - DNA, 86 bp, Homo sapiens; identical to SEQ ID NO: 12256
  chr19:33555883-33555969
  hypo

SEQ ID NO: 32450 - DNA, 95 bp, Homo sapiens
  chr19:33585138-33585233
  hypo
cctcgagtaaagagacggccacgccgacagaaacctggtgtgtatgttaattgattaactgttatcactgctgcagcgtactttttttttttttt

SEQ ID NO: 32451 - DNA, 98 bp, Homo sapiens
  chr19:33693708-33693806
  hypo
ccaaccaaagatgggccggcctttctcggcctcctctcccgacagcggcctgcagtgggaagctggagcagcacacggagcggcgtggggtcatctac

SEQ ID NO: 32452 - DNA, 95 bp, Homo sapiens
  chr19:33698373-33698468
  hypo
accctgggcccccactcgccagagccactgggggtctgcaggaaccccccgcccccctgctccccaatgctggaggccagcgatgatgaggccct

SEQ ID NO: 32453 - DNA, 216 bp, Homo sapiens
  chr19:33701376-33701592
  hypo
atgggcctgtggagtgcaggccgcctccagcgcagcagcagcaggcccaggatggtgacgccgtagcagaggtagttgatgaaggacacatagttgatgagcgtgtacgtgtcgcccacgagcatgatgacggctgtggccccgcactgggagaggacctggggctgacggctggcccctagcctgcctcctgacgcccctgcaggatgagccctg

SEQ ID NO: 32454 - DNA, 3867 bp, Homo sapiens; identical to SEQ ID NO: 12259
  chr19:33790838-33794705
  hypo

SEQ ID NO: 32455 - DNA, 82 bp, Homo sapiens
  chr19:33882201-33882283
  hypo
tctgggtagcctcccacgtcgtgcacgtcaatgcccaggaagtggccaagcccgtgaggcataaacacggcccccaggtgag

SEQ ID NO: 32456 - DNA, 179 bp, Homo sapiens
  chr19:33926620-33926799
  hypo
cgttagttctcaatcacgacaggactgggtgtcagaacctcccagggccatgggcagaggccgtgcagcccaacccacgctcccatggcgtccctggattggtcactgggatgctcaggtgagtctgaggccagggggtgccctccaggctctcagcaggtcctcggccttcccagggc

SEQ ID NO: 32457 - DNA, 153 bp, Homo sapiens
  chr19:33939088-33939241
  hypo
ggattttctaaaaaccggcaccaaacctcacagcataatcactactgcctgcctgttctgggagccaaacctcaataactgctcctgcggggctgctcctcactagatgcgcccaggacttggagccacgccttctcacgggcagaaccagac

SEQ ID NO: 32458 - DNA, 222 bp, Homo sapiens; identical to SEQ ID NO: 12260
  chr19:34112507-34112729
  hypo

SEQ ID NO: 32459 - DNA, 157 bp, Homo sapiens; identical to SEQ ID NO: 12261
  chr19:34113145-34113302
  hypo

SEQ ID NO: 32460 - DNA, 683 bp, Homo sapiens; identical to SEQ ID NO: 12262
  chr19:34113366-34114049
  hypo

SEQ ID NO: 32461 - DNA, 87 bp, Homo sapiens; identical to SEQ ID NO: 12263
  chr19:34114286-34114373
  hypo

SEQ ID NO: 32462 - DNA, 289 bp, Homo sapiens
  chr19:34177590-34177879
  hypo
ccctaggtcaaactggcttcccggtgtctgactcaggaggctgcaggaagcgcacccacaccgtggccagcttactcaggggctcgcgacagttgctttccagctggggccttgctggggaccatcgatggtatgtgtgcaggcactggccggcatgcacccgggcatgtatgcatatgtgtgttattgaacccgcgtctgcttaggtccgtgggtgcggtgcacatgtgaacaccgtccccatgaccgtgcaatagcagctgctcccgagagaccttgcaggttcttc

SEQ ID NO: 32463 - DNA, 30 bp, Homo sapiens; identical to SEQ ID NO: 12265
  chr19:34287110-34287140
  hypo

SEQ ID NO: 32464 - DNA, 358 bp, Homo sapiens
  chr19:34303910-34304268
  hypo
ttctgcctgtgtatacttggccgtgggcatgagaccgagggtgaggctggagggtccaaagctggcccagcgagcaccagggtcccaggtgtcatggcaacagaacgtgggatgctggaggcatgcctgcagaaggactgttgatgcgacccaaagatacagcggtgggatctctgctgccagctctcccagcccctcagcttcgcagcctggcgcagcatcctctgaggccccggggcctgttggggcggggttggaagagccgtctgcagctacttcagaggagctgtttatccctctccacgcggggcagactctggcgggtctcctagcgtccgagagatggcttattttctac

SEQ ID NO: 32465 - DNA, 89 bp, Homo sapiens
  chr19:34421530-34421619
  hypo
agatcctcccttctcagcctccggcctacagacacacgccaccacacccggataattttttaaaaaattttaagagacagggtctcgct

SEQ ID NO: 32466 - DNA, 31 bp, Homo sapiens
  chr19:34625925-34625956
  hypo
gtgcttcacctaaattcgcctaaattttcac

SEQ ID NO: 32467 - DNA, 90 bp, Homo sapiens
  chr19:34949545-34949635
  hypo
attttgccatctggacgggaatttttaagtcattttttattggatatctggtaaacgagattttagattgtatggcgtataaaattacag

SEQ ID NO: 32468 - DNA, 94 bp, Homo sapiens
  chr19:34963040-34963134
  hypo
ctgggattataggccctgagccgcgtgccctgtcctcaccctgctttgtagacacagttaacaatgtgttcccgatattttgtgtatgttcttt

SEQ ID NO: 32469 - DNA, 219 bp, Homo sapiens; identical to SEQ ID NO: 12274
  chr19:35168867-35169086
  hypo

SEQ ID NO: 32470 - DNA, 30 bp, Homo sapiens; identical to SEQ ID NO: 12275
  chr19:35169516-35169546
  hypo

SEQ ID NO: 32471 - DNA, 33 bp, Homo sapiens
  chr19:35497191-35497224
  hypo
ctccagcctgggtgacagcgcgactctttgtct

SEQ ID NO: 32472 - DNA, 30 bp, Homo sapiens
  chr19:35497809-35497839
  hypo
cagagctggtgatgccggggccatggaagg

SEQ ID NO: 32473 - DNA, 31 bp, Homo sapiens
  chr19:35551278-35551309
  hypo
ccgcatcgtgggaggccgggacaccagcttg

SEQ ID NO: 32474 - DNA, 35 bp, Homo sapiens
  chr19:35589876-35589911
  hypo
cgcgttgcctgcccgcgtggcgagccagcctggga

SEQ ID NO: 32475 - DNA, 30 bp, Homo sapiens
  chr19:35591102-35591132
  hypo
tgaagaacagcaacgccgggcgtgggagct

SEQ ID NO: 32476 - DNA, 175 bp, Homo sapiens
  chr19:35616250-35616425
  hypo
agccccttgtcaggctcaaggcggaggacctggctgaaggcgaagtcgctgcctaggatggccagctggtccctggcgatgagcagtggctggaagacgtgggcaccgcgcgagggaagttgctgcagcagacgaaacatggagccgtcccagcgcatgacctgtgggggtgtgg

SEQ ID NO: 32477 - DNA, 246 bp, Homo sapiens
  chr19:35617239-35617485
  hypo
ggcatagacatcctcggcctcggggatgtctgtgcgtctctcgaagcggccaccggtccagtggaagagcacgggccgctgggaagccgaggccagcagcaggtggggccggccgtccagctccagggcctcagcgtccgtgtcccggtgccaggcgtgcaggctctggtgcgggtaaaagccgggcccgtcgcggcacagcagcgtggtgctgcccgccttggaggcatcggccaccacgaagca

SEQ ID NO: 32478 - DNA, 42 bp, Homo sapiens; identical to SEQ ID NO: 12279
  chr19:35738943-35738985
  hypo

SEQ ID NO: 32479 - DNA, 194 bp, Homo sapiens
  chr19:35797938-35798132
  hypo
gtgtcggcgttccgccgacatccaggtcgaacactttgtcaccagagcaccagtggggctgtcttgagtggaagtgctttgaaaaagttttatgtctgtcggttcaggttcgctgttattaatgtactccgtggcgtgttagctggttaacgctatagcaagcatattgcagctctgcccgaacaggacttttt

SEQ ID NO: 32480 - DNA, 185 bp, Homo sapiens
  chr19:35842416-35842601
  hypo
ttgcacacaggagccgtgcaggccaggacggcggccccatggacctgcccccgcagctctccttcggcctctatgtggccgcctttgcgctgggcttcccgctcaacgtcctggccatccgaggcgcgacggcccacgcccggctccgtctcacccctagcctggtctacgccctgaacctgggc

SEQ ID NO: 32481 - DNA, 31 bp, Homo sapiens
  chr19:35889405-35889436
  hypo
gcttcccatcattctccggatatcattctac

SEQ ID NO: 32482 - DNA, 55 bp, Homo sapiens
  chr19:35983489-35983544
  hypo
ggcctgggtgatctagagcatcggtcaatccaacgctgtcttctgttttgctcta

SEQ ID NO: 32483 - DNA, 145 bp, Homo sapiens
  chr19:36041201-36041346
  hypo
aacagaaacaccctccagaagcggtcagctgtactccctgtcagagccccaccgccaccacaggtggcggctttcccgaggccagcccagaggactgcccaggcgctgctgctccaggaggtgcgaaccttgggaatgggggagg

SEQ ID NO: 32484 - DNA, 56 bp, Homo sapiens
  chr19:36042232-36042288
  hypo
tcaccatctggcactggcacccgctggcatttgccggctgttctaaaccacagtca

SEQ ID NO: 32485 - DNA, 136 bp, Homo sapiens; identical to SEQ ID NO: 12281
  chr19:36123861-36123997
  hypo

SEQ ID NO: 32486 - DNA, 30 bp, Homo sapiens
  chr19:36128478-36128508
  hypo
cccacctggccgggcgctggctcctccctc

SEQ ID NO: 32487 - DNA, 31 bp, Homo sapiens
  chr19:36167373-36167404
  hypo
gagccaccacgctgggtcccctctctgattt

SEQ ID NO: 32488 - DNA, 175 bp, Homo sapiens
  chr19:36222431-36222606
  hypo
ggtaatggagagcctccgggccggggcgggcgggagcgtctgatgtggcttggatgcaccaggcaagtaagaaagtggtaggactggccgtgctggagggagggcagttccccatggcgtgcaaagcctgcagcagaggcagagaggagatggcaaggagcgagtggggagaggc

SEQ ID NO: 32489 - DNA, 30 bp, Homo sapiens
  chr19:36297655-36297685
  hypo
accagcagcgagagcgcagggttcagtgag

SEQ ID NO: 32490 - DNA, 147 bp, Homo sapiens; identical to SEQ ID NO: 12284
  chr19:36336488-36336635
  hypo

SEQ ID NO: 32491 - DNA, 80 bp, Homo sapiens
  chr19:36388610-36388690
  hypo
ggaggcaggaaattttcggcagcagaagcagggcaagagtaggggctgtcagtgtaggcagcatgcgtgttggggtccca

SEQ ID NO: 32492 - DNA, 162 bp, Homo sapiens
  chr19:36435528-36435690
  hypo
gtgtatgaggacagcgccacggggctcacggccacgcggcctgtgggctgcgcccgcttctccaccgaacctgcgctgcggccatgcggggcgccgcacgctcccttcctgggcggcacgatgatcatcgcgctgggcggcgtcatcgtagcctcggtactg

SEQ ID NO: 32493 - DNA, 30 bp, Homo sapiens
  chr19:36531714-36531744
  hypo
tacgatgtgggagatcgtgcagccaagcga

SEQ ID NO: 32494 - DNA, 31 bp, Homo sapiens; identical to SEQ ID NO: 12288
  chr19:36544541-36544572
  hypo

SEQ ID NO: 32495 - DNA, 56 bp, Homo sapiens
  chr19:36604573-36604629
  hypo
cagcgtcctccccacgaggcaaataaacacagaaaactcacgcatggaatctggtg

SEQ ID NO: 32496 - DNA, 81 bp, Homo sapiens
  chr19:36632701-36632782
  hypo
tgatcccttgaaggggcggggaccaatggctggggtaggatgttgggaagacgggcatttaggaagcgggccatggagtag

SEQ ID NO: 32497 - DNA, 145 bp, Homo sapiens
  chr19:36641258-36641403
  hypo
gatctgcctcctgatctgacccgagagaggaggggtggctcgggctctgggtcctggggagcaggggaggtagtagattcgtccccagggctggatccgtggatttcctcgtctttttctcgtcggcattttttgtctcatcctg

SEQ ID NO: 32498 - DNA, 30 bp, Homo sapiens
  chr19:36673714-36673744
  hypo
ggactctctgatgtcgtgtgagctgtgcgt

SEQ ID NO: 32499 - DNA, 33 bp, Homo sapiens
  chr19:36870582-36870615
  hypo
aggctcagccgcggaggatttagaaagaagttt

SEQ ID NO: 32500 - DNA, 270 bp, Homo sapiens; identical to SEQ ID NO: 12295
  chr19:36909078-36909348
  hypo

SEQ ID NO: 32501 - DNA, 319 bp, Homo sapiens; identical to SEQ ID NO: 12296
  chr19:36909623-36909942
  hypo

SEQ ID NO: 32502 - DNA, 29 bp, Homo sapiens
  chr19:36931792-36931821
  hypo
aagactccgtctcaaaacaacaacaacaa

SEQ ID NO: 32503 - DNA, 27 bp, Homo sapiens
  chr19:36952281-36952308
  hypo
aaaactcttggctggacgcagtggctt

SEQ ID NO: 32504 - DNA, 31 bp, Homo sapiens
  chr19:36970716-36970747
  hypo
tttctttgtttgtttgcgtgtttgcttggtt

SEQ ID NO: 32505 - DNA, 380 bp, Homo sapiens
  chr19:37159073-37159453
  hypo
tcctgggctcaagcgatcctcccgtctcagtggccaaagtattggatgacaggtgtgagccaccgcgctgggtggtgaaacggttttgaggctttttgagaatggctgttctatatgcccgcgtggggctcatgcggcgagcgccgccactcccgcagtggcccctgtgggggtgatacgtgatgtggcttaaatgtgagaggccacctggacccgtgtgattgccacgtttgcaggagcgcagccacgtgcacagggatcttgtgacattctgtgtgaggctttttgcgctgggtccacccatgattagaggactagtgtgactgtggcggcccctgagaagggaagaagctggttgcgaccaggaaggtctgagatgg

SEQ ID NO: 32506 - DNA, 37 bp, Homo sapiens
  chr19:37179404-37179441
  hypo
gagggtaagattgggcccatgcgggccgggcgcggtg

SEQ ID NO: 32507 - DNA, 419 bp, Homo sapiens; identical to SEQ ID NO: 12300
  chr19:37263455-37263874
  hypo

SEQ ID NO: 32508 - DNA, 505 bp, Homo sapiens
  chr19:37504005-37504510
  hypo
gcctcttgtccaagatcaagacgaccaccccacacttaagcacattttttaaaggggtcgcagcctgatgtttaggagccgggcccatgtagacctggctaatgcaccttactcgcctctcactgcctgtcacttcgtccacagcagcccccgctcactattttttaaaggggccactgacgggattacaggagccaggcgcctgtcggccttgccaatgtgcatgctcgtggcgtgtgcaggttctcacgtcttaatgatcccctccatcgtctggggaatgggtccctgaggcttgccgatcacaatcactccgtggcagtgcatccgtgtcaaagcttttgcctgacctctcaacgtggttgacatgattgtctctggatgcccggatttgaggaggtcaccgaccaggatgaaaaaacctcatgcagagtcacggagaagcagcgcgggatcccagcttcaggggacagatggaatctccggactcccatttggatctgat

SEQ ID NO: 32509 - DNA, 328 bp, Homo sapiens
  chr19:37505283-37505611
  hypo
aataaccagccccatgggacccgatttctgcccataccttccaatccggaatcggagcagaagagcagtcccgagtgcccacctcacggtctgaagcgcctcctcctccaccgggatccgaacacgaagtcggcttaaggaggccctgaggtcaggactcttagggtcctgcgctgcttgtcgcaagcagcctcctcccccaagccgccgccggtccatctctagcattttcctggggctgccgcctgacagccctgacattgcagcgcgcgcgagccgaccacgacaatgcgcatgcaccaaacgcgaggcaccagggcaagctctg

SEQ ID NO: 32510 - DNA, 31 bp, Homo sapiens
  chr19:37699579-37699610
  hypo
taactaaaagaaaaacgcgtcagaacaatta

SEQ ID NO: 32511 - DNA, 44 bp, Homo sapiens
  chr19:37702590-37702634
  hypo
ataataatagtcttggctggtcgtggtggttcatgcctgtaatc

SEQ ID NO: 32512 - DNA, 896 bp, Homo sapiens; identical to SEQ ID NO: 12318
  chr19:37959873-37960769
  hypo

SEQ ID NO: 32513 - DNA, 27 bp, Homo sapiens
  chr19:38009872-38009899
  hypo
aaaaattctgatagggctgggcgcggt

SEQ ID NO: 32514 - DNA, 30 bp, Homo sapiens
  chr19:38040325-38040355
  hypo
agcgttctttgtttcgctcttggttcctaa

SEQ ID NO: 32515 - DNA, 260 bp, Homo sapiens; identical to SEQ ID NO: 12321
  chr19:38182699-38182959
  hypo

SEQ ID NO: 32516 - DNA, 270 bp, Homo sapiens; identical to SEQ ID NO: 12322
  chr19:38183111-38183381
  hypo

SEQ ID NO: 32517 - DNA, 71 bp, Homo sapiens; identical to SEQ ID NO: 12323
  chr19:38210086-38210157
  hypo

SEQ ID NO: 32518 - DNA, 425 bp, Homo sapiens; identical to SEQ ID NO: 12324
  chr19:38210326-38210751
  hypo

SEQ ID NO: 32519 - DNA, 93 bp, Homo sapiens
  chr19:38287059-38287152
  hypo
gccacgctgctcctcccggattctgcctgtggtttcatcatcctggtcctaactccgccactcatggcatccggagaccatcccatcaacacc

SEQ ID NO: 32520 - DNA, 103 bp, Homo sapiens
  chr19:38309038-38309141
  hypo
tagattttgtgctgtaactttcgtggctcacagtttccttctaattaggttagatgcaaaatgaaagtattataatagaataaagtaattcggccgggcgtgg

SEQ ID NO: 32521 - DNA, 115 bp, Homo sapiens
  chr19:38347217-38347332
  hypo
aagtagttcttagtgctcccccgcagacacactgtttagggttttgttgtgtttttagtccactcactgccaaacacaacttttcaaaccgaccgcacactcccattgcctccct

SEQ ID NO: 32522 - DNA, 195 bp, Homo sapiens
  chr19:38446270-38446465
  hypo
gtcttttctgtaccaggcttccgtcacttagcataatgtttctgcgcttcctccaggtgatagctcatatcagtcgttcatttgttcttattgctgaataatattctattgtatgggtaaaccacattttgtttattcgttaaccatgaatggataatttcattaccattattcgttaatggatacttggattgt

SEQ ID NO: 32523 - DNA, 257 bp, Homo sapiens
  chr19:38481032-38481289
  hypo
gaaagcagccagtgagacaggcggggtcgtggggtgaatacctgtggaactttggcggaagccaggtccgatgggatctggagtaccagctttgacttcagagcgctctcttctggctgggcatggagacaaggaatagatacagcaatagccacataactgcaggtggacgatgagtacagctcttgctcagctagtcagcccacagcgagaaccccgccccagtctgggctaacgtgtcctctgctgccagcagc

SEQ ID NO: 32524 - DNA, 55 bp, Homo sapiens
  chr19:38500468-38500523
  hypo
tggttttctatgacggcgtgatatggatggttaatcatgtcgcaaagccctgctg

SEQ ID NO: 32525 - DNA, 73 bp, Homo sapiens
  chr19:38564441-38564514
  hypo
atgctcttagaaacctcgcacggagtcctaggagaggaccctgggccgaccaagcccacgtcctgtgcccact

SEQ ID NO: 32526 - DNA, 80 bp, Homo sapiens
  chr19:38564793-38564873
  hypo
ccctctgagtcccagaggctgcgggtgccactcagcctctgaatgtcacaggaagactcgactgcagctgctaggagaag

SEQ ID NO: 32527 - DNA, 43 bp, Homo sapiens
  chr19:38572015-38572058
  hypo
tcctggctcagctgtgcacagcgatggtggagaactggactcc

SEQ ID NO: 32528 - DNA, 31 bp, Homo sapiens
  chr19:38572719-38572750
  hypo
gcgagatcaccctcagcgagtgtgacgcgga

SEQ ID NO: 32529 - DNA, 52 bp, Homo sapiens
  chr19:38625642-38625694
  hypo
gtgtgatctctgctttgtagacgagaaaaccgaggcccagagtgaacaagtc

SEQ ID NO: 32530 - DNA, 24 bp, Homo sapiens
  chr19:38636780-38636804
  hypo
ggcgtgagccaccacacccaacct

SEQ ID NO: 32531 - DNA, 43 bp, Homo sapiens
  chr19:38639130-38639173
  hypo
tggaatctgggcaagcaggaacggaggtgatggctgctggggt

SEQ ID NO: 32532 - DNA, 47 bp, Homo sapiens
  chr19:38679258-38679305
  hypo
tgcaatagaaagtaagcctctcggccaggcgcggtggcgcatgcctg

SEQ ID NO: 32533 - DNA, 32 bp, Homo sapiens
  chr19:38679544-38679576
  hypo
agcgagactccgtctcaaaaaaaaaaaaaaag

SEQ ID NO: 32534 - DNA, 49 bp, Homo sapiens
  chr19:38689955-38690004
  hypo
acccagatgccatcagcggttgtagtgttgtttgcggaagacagagctg

SEQ ID NO: 32535 - DNA, 92 bp, Homo sapiens
  chr19:38691719-38691811
  hypo
ctgccctgcccctgatggtgccgccctcaacacacggcacacagggacgccttggtgtttttaacacctccgaggattccattgtctggctg

SEQ ID NO: 32536 - DNA, 658 bp, Homo sapiens; identical to SEQ ID NO: 12330
  chr19:38754870-38755528
  hypo

SEQ ID NO: 32537 - DNA, 262 bp, Homo sapiens
  chr19:38781915-38782177
  hypo
aaaagcatctgagctgaccagcgagactgcagtggggcagacactattaaatttgctggcacagctctgagtaccccctcgcttccaccctgacttcatcccgcagtagctctcagccctcccagcccctgcagggccacgtctttctctattgccggtcagcgtgtgtgtgcacaaagcccctaaggtttcatgtgtacacaccggtgctaagtgttttttacacccttgtgcatctctcggcctggggctcctgtgcagg

SEQ ID NO: 32538 - DNA, 214 bp, Homo sapiens
  chr19:38828110-38828324
  hypo
catgctggtggactcacccatcgacccgagcgaggtgaggggaccagggtcaagtgaaccagagggattttgaacccgcactccactcatttctggacgtgtggcctaacctctctttgcagaaatacctgggcttcccttactacctgaagatcaactactcctgcgaggaaaaggtgagtgggtgcagcacggataggctcattctatgagc

SEQ ID NO: 32539 - DNA, 30 bp, Homo sapiens
  chr19:38851408-38851438
  hypo
caagaggctcgtgcccgtggagcagcttct

SEQ ID NO: 32540 - DNA, 727 bp, Homo sapiens; identical to SEQ ID NO: 12332
  chr19:38852765-38853492
  hypo

SEQ ID NO: 32541 - DNA, 185 bp, Homo sapiens
  chr19:38873929-38874114
  hypo
ttgccagccagcagcagaagccggaagacaccaccattccctccacagaactggccaaacaggtcatcgagtatgcccggcagctggagatgatcgtctgagccccccgggcactgggtggggcagggcacgagttatttaaaacagttacactgcagggtttcgcccaataaaggtggactgac

SEQ ID NO: 32542 - DNA, 30 bp, Homo sapiens
  chr19:38905670-38905700
  hypo
aggcagccggaaacccgcgcagccagccca

SEQ ID NO: 32543 - DNA, 617 bp, Homo sapiens; identical to SEQ ID NO: 12334
  chr19:38976231-38976848
  hypo

SEQ ID NO: 32544 - DNA, 30 bp, Homo sapiens
  chr19:39010003-39010033
  hypo
gcgagctgctggtgcgggacgagttctctg

SEQ ID NO: 32545 - DNA, 158 bp, Homo sapiens
  chr19:39026969-39027127
  hypo
ctacatggaccccaccctccacgtgccccaaatgtcacgccctggttgctgttctcttattaatgtccctaatccgggttaatcgcgtctcctctttgccgtgttgtgacgtgtctaacctttctacccggatcctcgctcctgcctttctacctcta

SEQ ID NO: 32546 - DNA, 596 bp, Homo sapiens
  chr19:39051722-39052318
  hypo
caccccactgacctccctgcccgcccccaggccatggacagccagaagcagttcagcggtccagaaatccagttcctgctttcgtgctccgaagcggatgagaacgaaatgatcaactgcgaagagttcgccaaccgcttccaggagccagcacgcgacatcggcttcaacgtggcggtgctgctgaccaacctgtcggagcatgtgccgcatgaccctcgcctgcacaacttcctggagctggccgagagcatccttgagtacttccgcccctacctgggccgcatcgagatcatgggcgcgtcacgccgcatcgagcgcatctacttcgagatctcagagaccaaccgcgcccagtgggagatgccccaggtcagggaacccgcgcgcgtgcaagctcgcctcctggggcttcgggcatgcgggtgctcacttcctgcaccctcagaccccacgggggctgtgcgtgcctcgcatatctgccctgctccggcaagcccacgcccacccttttgtacacatttcgtccagctgcgcccttgcacatccctggctcgcccctggccacttcttgcggacctggcccacacaaggat

SEQ ID NO: 32547 - DNA, 30 bp, Homo sapiens
  chr19:39087752-39087782
  hypo
gggcccccagagctcgcaccctccgctgtg

SEQ ID NO: 32548 - DNA, 29 bp, Homo sapiens
  chr19:39094704-39094733
  hypo
gcagtgagccatgatcgcgccactgcact

SEQ ID NO: 32549 - DNA, 27 bp, Homo sapiens
  chr19:39135434-39135461
  hypo
cagggcgagactccacctccaataaaa

SEQ ID NO: 32550 - DNA, 80 bp, Homo sapiens
  chr19:39144876-39144956
  hypo
acctgacccagggaaggatcccgcctcctccagaaagtgaaatcgccgggtgtggtggctcacgcctgtaatcccagcac

SEQ ID NO: 32551 - DNA, 35 bp, Homo sapiens
  chr19:39159903-39159938
  hypo
gcgtgagtcaccgcgcccagccaaaatccagcttt

SEQ ID NO: 32552 - DNA, 30 bp, Homo sapiens
  chr19:39182246-39182276
  hypo
aaaatccatcctttggcctggcgcggtggc

SEQ ID NO: 32553 - DNA, 31 bp, Homo sapiens
  chr19:39211843-39211874
  hypo
tgctacctttctaagccgtgctaccacggcc

SEQ ID NO: 32554 - DNA, 30 bp, Homo sapiens
  chr19:39222244-39222274
  hypo
gtctacctcagaggcgatttctaaagctga

SEQ ID NO: 32555 - DNA, 33 bp, Homo sapiens
  chr19:39238368-39238401
  hypo
ttttttgggacagtctcgcctcgtcacccaggc

SEQ ID NO: 32556 - DNA, 184 bp, Homo sapiens
  chr19:39277438-39277622
  hypo
ttacatccagccacagtgaagcgatcactaaaaagttgagttcctgggaaacacggtacacagcatgaggcgtcagtaatgtgaggagtgtgttctttagaatggtcaataatgttagaatgatggagttcaccattcaagggaacattctcgggaactaactgagctgcgctggtggtgtgat

SEQ ID NO: 32557 - DNA, 179 bp, Homo sapiens
  chr19:39279302-39279481
  hypo
actgaggacttcccatgaacccggcacactccaggacccaggggtgcagcactgagccaaccaggccgccctccgaccctgtgaagtccccctgtctggcactatcgtcgttgttgtggctgctgttccactggagacttagaagcagggatttcagcgcagacatttccagtctaggc

SEQ ID NO: 32558 - DNA, 105 bp, Homo sapiens
  chr19:39289870-39289975
  hypo
ctttccttgtggtaagctttgcggaaagattctttgtttatattggtgaaatgcacaaatctaaaatgtacagttggctgggcacagcgactcacgccggtaatc

SEQ ID NO: 32559 - DNA, 55 bp, Homo sapiens
  chr19:39305847-39305902
  hypo
ccagagggaccccagcgacttttgctcactccctccgccccggaattccttgtgc

SEQ ID NO: 32560 - DNA, 433 bp, Homo sapiens
  chr19:39306226-39306659
  hypo
ggctggggcctgggacgcgagggctctcagagcttggagaaggtgacggttttcagttccttgttctcagtcgtggcctggaccgacttcacgaggtcttgggtctgcagcatgctcatgttccaggacgcctggtaccgagggtgttgagagagaacgaggagagagattagcaggggccaatcaggataaagcatgagagcaccctgcaccctggttggtcgcctggggttagaggagggctgtgattggtcggagcgtgcaccttaccacgtagttgaggctctcggccaccgaatggtcgcgggaatacagcaggttgaccttggtgctctgcaccgccacggggctcttgctggaaatctcggccgccagcgctaaggcagcatccagcatgacctctttgtctgggaacacccggctgcagtgaaag

SEQ ID NO: 32561 - DNA, 29 bp, Homo sapiens
  chr19:39309628-39309657
  hypo
gtgtgtgtgtgtgtgtgtgtgcgggcacg

SEQ ID NO: 32562 - DNA, 23 bp, Homo sapiens
  chr19:39310979-39311002
  hypo
gtgagccacggcgcccggcaatc

SEQ ID NO: 32563 - DNA, 11 bp, Homo sapiens
  chr19:39364460-39364471
  hypo
ggtccagctga

SEQ ID NO: 32564 - DNA, 270 bp, Homo sapiens
  chr19:39406483-39406753
  hypo
ctgctggttactctccaggagcgcgatgagaaggcgggggacagcacaggcggtggcgttcacctgtgagacagccatgctcggaactggcgcccaccccaagctgagcccggggaggagccaaggtgggtgggtctagggcggcagaggctgcgggcgagggcacgcgggcaggaggctgtgcgggcctcaccgtgtgggcaaactgcagctccccagcctcggtctggaacatgatgtggaggcggcggctctggaagtctgtgcagt

SEQ ID NO: 32565 - DNA, 43 bp, Homo sapiens
  chr19:39596012-39596055
  hypo
tgacaattttgaaaagcacagcgagttgttttgtggaatttcc

SEQ ID NO: 32566 - DNA, 246 bp, Homo sapiens
  chr19:39597517-39597763
  hypo
agcaggtcatttctgcttccccgcgggtcctccacctgctctgggtctgatcagttctccccgccccagggctgtgaggagcggctgacgccctttgctgtcttcccgaggccctggagtgccgtgcgtgtgaaggagtacgggtatacgcggctgcacatcctcaacgggacccacatccacatccagcaggtgtcggacgaccaggtcagtgaggggcaggccgaagtcacctgactgtacagc

SEQ ID NO: 32567 - DNA, 51 bp, Homo sapiens
  chr19:39650849-39650900
  hypo
gacttgtgtctgtctcggccccatccccgtgccctgcgcctcctcagggac

SEQ ID NO: 32568 - DNA, 60 bp, Homo sapiens
  chr19:39653249-39653309
  hypo
tcctttctgattgctgcgttattttctatgtcagcatttctcacccgacttagtagatgt

SEQ ID NO: 32569 - DNA, 30 bp, Homo sapiens
  chr19:39663616-39663646
  hypo
gtttgagaacatgtcggtgacacgctccaa

SEQ ID NO: 32570 - DNA, 271 bp, Homo sapiens
  chr19:39664415-39664686
  hypo
cccccgctcaccacagcgggagccacagcgagtatcccatgagcagttccgggctgccctgcagctggtggtggacccaggcgacccccgctcctacctggacaacttcatcaagattggcgagggctccacgggcatcgtgtgcatcgccaccgtgcgcagctcgggcaagctggtggccgtcaagaagatggacctgcgcaagcagcagaggcgcgagctgctcttcaacgaggtgcgggcgctgctgccctgccgccctgctggtcct

SEQ ID NO: 32571 - DNA, 31 bp, Homo sapiens
  chr19:39670669-39670700
  hypo
gccaggagtgagcctccgtccccaaagccag

SEQ ID NO: 32572 - DNA, 18 bp, Homo sapiens
  chr19:39671781-39671799
  hypo
ctatgttgcctaggctgg

SEQ ID NO: 32573 - DNA, 120 bp, Homo sapiens
  chr19:39671858-39671978
  hypo
caggcgtgagccaccgtgcccagcccgctcactgcagtttgaaggcatggctttgggtggcgtggggtgaaagctgcccgaggccccgttcctccccacgtggctgcctcctgccagagc

SEQ ID NO: 32574 - DNA, 311 bp, Homo sapiens
  chr19:39672581-39672892
  hypo
tcactgggagcttactggacacgcaaataaatccctgtgtgccaccccagctgcatcagatgctggtggggcccagtgatctgtatttaacacaccctccgggggatgccggtgcccactcacgtttgagaacccctgcgatccacgactgccctcccgtgtaaaaggcccacctctgtgggactccaagtcatcagcaccctagggtccttccgtctttttccttcctcctgggacacctgcctctcccatgtcgtattagagaattccttatgctcccaagtgggcacggggagaggaaggcactcctc

SEQ ID NO: 32575 - DNA, 274 bp, Homo sapiens; identical to SEQ ID NO: 12341
  chr19:39754958-39755232
  hypo

SEQ ID NO: 32576 - DNA, 133 bp, Homo sapiens; identical to SEQ ID NO: 12342
  chr19:39755264-39755397
  hypo

SEQ ID NO: 32577 - DNA, 162 bp, Homo sapiens
  chr19:39816930-39817092
  hypo
agtcccccaagtctagggcaccgactcaaaacttagggagcttggatctgtgggcgtttataggataggttggtggaactagaggaggcggtccccagtttgtactgcctctccagggaatctccccaaacccgaagacacgtcccattgtgctgactcctc

SEQ ID NO: 32578 - DNA, 41 bp, Homo sapiens
  chr19:39934200-39934241
  hypo
ttgttgtttttttttttgagacggagtcttgctcttttgtc

SEQ ID NO: 32579 - DNA, 54 bp, Homo sapiens
  chr19:39964613-39964667
  hypo
aatatgagtatgctttcgatgatgagcccaccccgtccccgcaggcctatgggg

SEQ ID NO: 32580 - DNA, 185 bp, Homo sapiens; identical to SEQ ID NO: 12349
  chr19:39993471-39993656
  hypo

SEQ ID NO: 32581 - DNA, 170 bp, Homo sapiens; identical to SEQ ID NO: 12351
  chr19:40006277-40006447
  hypo

SEQ ID NO: 32582 - DNA, 166 bp, Homo sapiens
  chr19:40015703-40015869
  hypo
cccaaaaaaactttgtgcacgcaggcccagatagctttcccagctaggaatactctgcgtatcaccacaaatccatgtgccagaaaactgatgtgtcctgcctccacagggagaggacgtggaaactgtgcactgggaccatcccagacctcgccatgtgtgtgtt

SEQ ID NO: 32583 - DNA, 121 bp, Homo sapiens
  chr19:40019819-40019940
  hypo
ggagtgagccacacccggccccatgactcaaagtctagaaaccgcaaaagaaataaactgaatatacacagctacattaaaaatttttttctctttttttttttttgagacggagtctggc

SEQ ID NO: 32584 - DNA, 274 bp, Homo sapiens
  chr19:40020326-40020600
  hypo
taagaatatggacagatagttcgctgagaaatgaaaacaaatggctcttaagcatttgaaaacatgcgtcctcactcgtaattagagaaattcaaattaaaaccatagtgagaaaccatcttttactgtcagatgcttccaaagctgtcagattagccaggccgtggcgagaggcacaactatccctggctgaatggaaggtaaactggttgagccccaaggacagcactctggtgacacattaaaaataccaaggtggggccgggtgcggtgg

SEQ ID NO: 32585 - DNA, 176 bp, Homo sapiens
  chr19:40316372-40316548
  hypo
gctctggggtacaccacggaggcccaggtgaggccccagagtggcagggtcatcaggaggcgggaggggtggacgacctccagtcatccgagtccggagggctgaggcagccgggtgctggggggcaggcgctgggtgaggtggggagcagtcagcagggccgcccaccaggctca

SEQ ID NO: 32586 - DNA, 30 bp, Homo sapiens
  chr19:40317479-40317509
  hypo
catactccagcatgcgcagcaccaggtcct

SEQ ID NO: 32587 - DNA, 77 bp, Homo sapiens
  chr19:40322484-40322561
  hypo
ccatggcccggtgggacggccatggtgggctcagagggccgcaggggagcgaggcctggagcgggagcccggccggg

SEQ ID NO: 32588 - DNA, 30 bp, Homo sapiens
  chr19:40325390-40325420
  hypo
catctttttcacttcggaggcaaacacggc

SEQ ID NO: 32589 - DNA, 30 bp, Homo sapiens
  chr19:40362758-40362788
  hypo
gctgcctgacaggccgccgtgtaggctgcc

SEQ ID NO: 32590 - DNA, 30 bp, Homo sapiens
  chr19:40411955-40411985
  hypo
acaggacaccaggccgccctcctggcagtg

SEQ ID NO: 32591 - DNA, 30 bp, Homo sapiens
  chr19:40441596-40441626
  hypo
tcctctggtgtgggcgcaggccaggctgca

SEQ ID NO: 32592 - DNA, 121 bp, Homo sapiens
  chr19:40474757-40474878
  hypo
tgtccaccgctgctgtctgctgccatggcagctgtggcagacctgccgctgacttccacccctccggatccgggtgtccactgcacttctgatccagcgaggcggcacccattgccgctcc

SEQ ID NO: 32593 - DNA, 13 bp, Homo sapiens
  chr19:40660762-40660775
  hypo
cagatcacaaggt

SEQ ID NO: 32594 - DNA, 30 bp, Homo sapiens
  chr19:40708309-40708339
  hypo
cagatgtgtcctgccgcggcttcgcaggac

SEQ ID NO: 32595 - DNA, 30 bp, Homo sapiens
  chr19:40711851-40711881
  hypo
cggcacaggagcagcgcttccaggaggagc

SEQ ID NO: 32596 - DNA, 166 bp, Homo sapiens
  chr19:40741639-40741805
  hypo
ctccctaagtgccactgtggacgttttcaggggctgtgtggggacgacacactgcgaccctacaagcgagcacccttgtggacgctgccccctccaggccgcagggacagtggcagcagctggcgctgggctgggtggggccgacgccagccctcacctctgcttg

SEQ ID NO: 32597 - DNA, 43 bp, Homo sapiens
  chr19:40744254-40744297
  hypo
atggaggcaaaaagaagcacacgtcatgaccaagtaacaatag

SEQ ID NO: 32598 - DNA, 162 bp, Homo sapiens
  chr19:40745939-40746101
  hypo
agggcaactcacagtgaggaacgggtgcctggtgttctggaggacccggctctcggtgactgtgtgagcgacttcatcctgcagacagactgcgggtgaggggctggtgggcaacaccacacctgcccactccgccccgacgaaggggagcaaggccttgtg

SEQ ID NO: 32599 - DNA, 21 bp, Homo sapiens
  chr19:40749071-40749092
  hypo
caagagcgatcaccaatttcc

SEQ ID NO: 32600 - DNA, 90 bp, Homo sapiens
  chr19:40753480-40753570
  hypo
gacacccagccagggagcccacgggaaaagcaaaggaagaactctcctcgtaagccatgatctgcacccgcttttcagagaggggccccc

SEQ ID NO: 32601 - DNA, 27 bp, Homo sapiens
  chr19:40756120-40756147
  hypo
acatcaaggccaggcacggtggctcac

SEQ ID NO: 32602 - DNA, 170 bp, Homo sapiens
  chr19:40828671-40828841
  hypo
gtacctggtcctaggccggcagtgctagggacacagtgatgaccaagacagcctcagcgctgcccgcatggggctcacagtccagtggggaagacaggcttggcatcagaaatgacacaaataattctgcaagaatgacagtaacgcattctagacggagaaggacagct

SEQ ID NO: 32603 - DNA, 440 bp, Homo sapiens
  chr19:40829079-40829519
  hypo
ggaagtgagcaagcccgagttgctgcaccctgcagagcaggacactggcaggcaggaaacgcagctgggaggctctgcaatagttcaccaacaggcgccgcacaccccagcaccatgcggggatgatcttaactctacagccatccttggaggtgggtctatacagatgaggaggctgaagtacaaaggacttaagtgacatggccaaagccacgcagtcaggcccctgtgggcttcagggtgtactctgagctacacaccaggcctggggcctgtgggactgcgggccgcggcaggaagtacaggctgcatcatgggcacagtgaagagcctctgcagggcttccagtgaggggacgggccctgtcctgtgggccgcacacactgctgctgtggggataggggctggggtccatggtaactgtgcgagaccattcagga

SEQ ID NO: 32604 - DNA, 204 bp, Homo sapiens
  chr19:40829787-40829991
  hypo
aggctggaaaggcaggttagacggccctgggccgagtgaggttgagatgtgttaaagagtcaggagcaccgctcagggaagacaacagctcgcacgcccagaatcgctcccccatccccactcactttactccctgtcgtggtgtctgccttggtctcggcgccgaggcggtcaaacacagacgtcctatggagacctgggagg

SEQ ID NO: 32605 - DNA, 27 bp, Homo sapiens
  chr19:40852718-40852745
  hypo
caccacgcccagccaaggacccattct

SEQ ID NO: 32606 - DNA, 110 bp, Homo sapiens
  chr19:40873916-40874026
  hypo
caggtgtttgcaagcagctgtcgtcacgtggctctctggactgggggcgtttgtcacggtcatctgtaggcctctgaatgtcagggtgcgggtttggttacaagggatta

SEQ ID NO: 32607 - DNA, 30 bp, Homo sapiens
  chr19:40885226-40885256
  hypo
gagcgcagggccagcggggtgcagccccct

SEQ ID NO: 32608 - DNA, 52 bp, Homo sapiens
  chr19:40900950-40901002
  hypo
gtgaccagctccacctcggggatcttaagctgcacagcggtggactcagcct

SEQ ID NO: 32609 - DNA, 114 bp, Homo sapiens
  chr19:40928721-40928835
  hypo
caaccattccagcacgagggctcagcgccctggccccggcggtcgctccagtgcctgtgtgcccaccagcacatccatgaggtagtccaattcggcctcgtccagctccggagc

SEQ ID NO: 32610 - DNA, 44 bp, Homo sapiens; identical to SEQ ID NO: 12359
  chr19:40939938-40939982
  hypo

SEQ ID NO: 32611 - DNA, 13 bp, Homo sapiens
  chr19:40951186-40951199
  hypo
ttgccgggcgcag

SEQ ID NO: 32612 - DNA, 31 bp, Homo sapiens
  chr19:40952443-40952474
  hypo
cctcaccaactgtccacgcaggctcccaggc

SEQ ID NO: 32613 - DNA, 30 bp, Homo sapiens
  chr19:40953819-40953849
  hypo
ggtgctgtgtccgtcgtactcatcggtggt

SEQ ID NO: 32614 - DNA, 45 bp, Homo sapiens
  chr19:40995691-40995736
  hypo
gcgtggttatcaggttcgaagtggggcgcccgtggaaggggcaga

SEQ ID NO: 32615 - DNA, 629 bp, Homo sapiens; identical to SEQ ID NO: 12363
  chr19:41025293-41025922
  hypo

SEQ ID NO: 32616 - DNA, 303 bp, Homo sapiens; identical to SEQ ID NO: 12374
  chr19:41190145-41190448
  hypo

SEQ ID NO: 32617 - DNA, 129 bp, Homo sapiens
  chr19:41292679-41292808
  hypo
ggcccgagtgggagcgaagggcaggcccgggggtctccaggcaaccaatgctgacctctccccttccccacaggcgagctagacccggagaggatgggctctggcattcagtacggggatgcgtccctc

SEQ ID NO: 32618 - DNA, 22 bp, Homo sapiens
  chr19:41294369-41294391
  hypo
gacagagcgagactcttaaaaa

SEQ ID NO: 32619 - DNA, 42 bp, Homo sapiens
  chr19:41616325-41616367
  hypo
ttacaggcgtgagccaccatgcccagccgtagattttcattt

SEQ ID NO: 32620 - DNA, 30 bp, Homo sapiens
  chr19:41630531-41630561
  hypo
cgcctccccacacacgcacacacctcttat

SEQ ID NO: 32621 - DNA, 99 bp, Homo sapiens
  chr19:41665354-41665453
  hypo
cagagttaaggctttactgcacgtggccctacttctgccaatgaacttggagcttacgtagcatcttttttttttttctttttgagatggagtttcgct

SEQ ID NO: 32622 - DNA, 343 bp, Homo sapiens
  chr19:41675690-41676033
  hypo
cgaaaatttttcaataaaaataaacttaaagaataccagcgcttccgccacggctgccattggagagcagcagccatggctctgcgcgaccctgtggccgtgggccccaaggtgaccaaggacgtgagcaagcccaggcacagctgccgccccggacgtctgaccaaacacaccaggtttgtgcgggacatgatccgggaggtgtgtagcttcgtctcgtacaagcggctcgccatggagttgctgaaggtccccaaggacaaacggtccctcaagttcatcaagaaaaggatggggacgcacatccgcaccaagaggaagcggaaggagctgagcaaggtgc

SEQ ID NO: 32623 - DNA, 31 bp, Homo sapiens; identical to SEQ ID NO: 12385
  chr19:41859851-41859882
  hypo

SEQ ID NO: 32624 - DNA, 31 bp, Homo sapiens
  chr19:41872642-41872673
  hypo
catgagccactgctcccggctgaggtcttca

SEQ ID NO: 32625 - DNA, 121 bp, Homo sapiens
  chr19:41881464-41881585
  hypo
gagccactgcgcccggcccgtgagcccgtttctttatctgcaaaacagggattaaaaacaagccaacaccccttcagcactcctccgcaaaaaaacaccccaaaacaaaataggccaggcg

SEQ ID NO: 32626 - DNA, 471 bp, Homo sapiens; identical to SEQ ID NO: 12387
  chr19:42028282-42028753
  hypo

SEQ ID NO: 32627 - DNA, 27 bp, Homo sapiens
  chr19:42282955-42282982
  hypo
taagagtcaaggggctgggtgcggtgg

SEQ ID NO: 32628 - DNA, 242 bp, Homo sapiens
  chr19:42398489-42398731
  hypo
gcttagcctggtcttcctccccgccctctcacaggtgatggggaaccggcggtcggacgagcctgccaagaccaagaaggggctgagcagcatcctggatgccgcccgctggaaccggggagagccccagggtaaggcggctctggcctctgccctcccctgtcttccccagctgctcccactcactgtctcattctctctcgtttcagttccagattttcgacacctcaaagcagaggttg

SEQ ID NO: 32629 - DNA, 165 bp, Homo sapiens
  chr19:42400435-42400600
  hypo
cctccaccccacaggtgctgacgcccccctggagctgggggactcatccccgcagggcccaatgagcctggagtccttggcgcccccagagagtaccgacgagggggccgaaaccgagaggtgcccaggctggggtgcaggggcgggaggtgtggcttactgggc

SEQ ID NO: 32630 - DNA, 30 bp, Homo sapiens
  chr19:42407456-42407486
  hypo
aagagcccacagaacgggagaaagtggagc

SEQ ID NO: 32631 - DNA, 353 bp, Homo sapiens
  chr19:42408202-42408555
  hypo
agaagaaattggtccacgagggcccactgacgtggcgggtgactaaggacaaggcagtgggtgagtgccagagcagctgcctagtgcagggtgttggggcagtgagccaagggcggggagggggtcgcgcgggggcacgccgtgtgagcactgctcgccccgtagaggtgcatgtgctgctgctggacgacctgctgctgctgctccagcgccaggacgagcggctgctgctcaagtcccatagccggacactgacgcccacgcccgatggcaagaccatgctgcggcccgtgctgcggctcacctccgccatgacccgcgaggtggccaccggtgagtgcagccactgcatg

SEQ ID NO: 32632 - DNA, 30 bp, Homo sapiens
  chr19:42409102-42409132
  hypo
cacaaagccttctacgtcctttttacctgg

SEQ ID NO: 32633 - DNA, 395 bp, Homo sapiens
  chr19:42460887-42461282
  hypo
gggcttgtgatgggacggcgctgtgggcccgagcagcagagccgtgcaggacaggcatgggcaggggtggggcagctggcccgggaggccggcaggtcccagaagacacctcacacgggttccatctgcagctcctccccgtccacagcctcaatctggtggaaggcagcgtgggagccgatgaccaccagggtggctcctgcaggaaagccggcagctcagggccacactcctgcacctggctcccaccatccaccccagctgctcagaccctgtactcacccagcacccagaagacggccgagcccgcaccagccagccagaagaaggggaaggagatgcctccagccagagcatactgatgcgctgggctcacctctcggcctgggggcaga

SEQ ID NO: 32634 - DNA, 30 bp, Homo sapiens
  chr19:42509931-42509961
  hypo
ggttgcagttgaggcgccggtggtattcgt

SEQ ID NO: 32635 - DNA, 393 bp, Homo sapiens
  chr19:42722505-42722898
  hypo
tgtacatctcgatggcgtccatcacgacccccatcacagtcagatgtctccacccagagccaaaacggcccctccgtaaccccttccaatctctgccctccagggtcgcccagatacccgctccctaacttgcaacaactagagagggtctgtcagggagtctaggctgtggtgtatgcgtgtccccttaccgcggggccttgggtgtgacggtcgccacgccccccacttaggtgactcaaggtcaggacctgcatgtacttgagacaagtcccctccctggacctcttcccacccccgcaattaactcctcttgggagtcgggagatctgggtcctgcctagcactggcccagtactggctctgcctgagctgtagcagtgaattcaaaag

SEQ ID NO: 32636 - DNA, 32 bp, Homo sapiens
  chr19:42723737-42723769
  hypo
agtgagactccgtctcaaacaaacaaacaaac

SEQ ID NO: 32637 - DNA, 376 bp, Homo sapiens
  chr19:42791225-42791601
  hypo
cggccccctggagccacatgccctgagagcccaggacccggacccccacaccctttgggggtggtggaatctggtaagggtccgcctcccaccacggaggaggaggcctccggccccccaggagagccccggctggacagtgagacagagagtgaccatgatgatgcgtgagttccctgaggcctgggacttgggggtgggatggccagagacatggccctcactgtccctgctgccccgccgcagcttcctctccatcatgtctcctgagatccagttgcctctaccgcccggaaaacgtcggacccagtccctcagtgccctacccaaggaacgggactcatcttctgagaaggatggacgcagccccaacaag

SEQ ID NO: 32638 - DNA, 159 bp, Homo sapiens
  chr19:42873809-42873968
  hypo
cgccacagtgaatgcgctggtgttggggcgcgtgaccactgcttgctctgccgcaaccacaccaaggtgggccgcccggagcctcagacccccgaccctgggacccaggccctcacttgccttcatcccacgctcaggcggctcgcatctcatcctgag

SEQ ID NO: 32639 - DNA, 30 bp, Homo sapiens
  chr19:42893088-42893118
  hypo
tcgttgcagcagtccgtgagacctgtgtgc

SEQ ID NO: 32640 - DNA, 109 bp, Homo sapiens
  chr19:42906982-42907091
  hypo
gtggtaataagaagttgacatcggagggtgtggaggggctaagtgtctcagctgacagcgacatctcgggggtgtccgacgacgtctcggagtttcccctcaggctcaa

SEQ ID NO: 32641 - DNA, 30 bp, Homo sapiens
  chr19:42909504-42909534
  hypo
ggctgggcatgtgacgggagtgaatcactc

SEQ ID NO: 32642 - DNA, 30 bp, Homo sapiens
  chr19:44005891-44005921
  hypo
ccgctgctggcggccgcgctgctccgaggc

SEQ ID NO: 32643 - DNA, 130 bp, Homo sapiens; identical to SEQ ID NO: 12403
  chr19:44144216-44144346
  hypo

SEQ ID NO: 32644 - DNA, 716 bp, Homo sapiens
  chr19:44222770-44223486
  hypo
aaggaaaggctggaggccctgcgcacagcctttgagtcgggtgacctcccccaggccgcctctcacctccaggagctgctggcctccacggaaagcatccgcctggaggtgggcgtcacgggcgagtcgggcgcgggcaagtcctccctcatcaatgccctgcgtggcctggaggccgaggaccctggcgcggctctcacgggcgtcatggagaccacgatgcaaccgtcgccctatccacacccacagttccctgacgtgaccctctgggacctgccaggagccggctctccaggctgcccggctgacaagtacctaaagcaggtagacttcagccgctatgacttcttcctgctggtctccccccgccgctgcggggccgtcgagacccgcctggccgctgagatcctgtgccagggcaagaagttctactttgtgcgcaccaaggtggacgaggacctggcggccacgcgcacccagcggccgtcgggcttcagagaggccgctgtcctgcaggagatccgagaccactgtgccgagcggctgcgggaggccggcgtggctgaccctcgcatcttcctggtgtccaacctctcgccggcccgctacgactttcccacgctggtgtccacctgggagcacgacctgccctcccaccggcgccacgctggcctgctgtcgctccccgacatctcgctggaggccttgcagaagaa

SEQ ID NO: 32645 - DNA, 30 bp, Homo sapiens; identical to SEQ ID NO: 12408
  chr19:44511186-44511216
  hypo

SEQ ID NO: 32646 - DNA, 45 bp, Homo sapiens
  chr19:44564103-44564148
  hypo
acctttgtcagttaccgcggtgatctgaaccgcaaattaccaaca

SEQ ID NO: 32647 - DNA, 38 bp, Homo sapiens
  chr19:44575623-44575661
  hypo
ctgttgagccgcttttcgtgttttttttttttttctct

SEQ ID NO: 32648 - DNA, 57 bp, Homo sapiens
  chr19:44578498-44578555
  hypo
tgcatcctctgcctcccggtctcaaaaaaaaaaaatatttaacgttttattttcata

SEQ ID NO: 32649 - DNA, 566 bp, Homo sapiens; identical to SEQ ID NO: 12417
  chr19:45004315-45004881
  hypo

SEQ ID NO: 32650 - DNA, 94 bp, Homo sapiens
  chr19:45108542-45108636
  hypo
agcaagactctgtctcaaaaaatgtatatattttagagggttttcatcgacacgcttgttcccagggcccctagcgtgtcgcacacttgttccc

SEQ ID NO: 32651 - DNA, 151 bp, Homo sapiens
  chr19:45149596-45149747
  hypo
cagagtaataatgcagcgtttcatggatttgaagacccaagatttctccccgttttctacattggggttattctaacccctaatggcaagttgtgctataaatgacaacagtcatggtatgtgaaacctacgacactggtgcgatgaaaaa

SEQ ID NO: 32652 - DNA, 242 bp, Homo sapiens
  chr19:45150498-45150740
  hypo
cgtcgtcgtgcaggcgcccacccaggtgcccggcttcttgggcgactccgtgacgctgccctgctacctacaggtgcccaacatggaggtgacgcatgtgtcacagctgacttgggcgcggcatggtgaatctggcagcatggccgtcttccaccaaacgcagggccccagctattcggagtccaaacggctggaattcgtggcagccagactgggcgcggagctgcggaatgcctcgctga

SEQ ID NO: 32653 - DNA, 186 bp, Homo sapiens
  chr19:45164647-45164833
  hypo
cgtcttcagatgcccacggcccggcctcaggagcctgggtcttttctcctggtgcctcgagcagcatttcccaacccttcctgctgggcggaatcccctgtagagtttgctaagacgcagccccagacagtctggtctgtgatggggccagggaatctgcattttaatatccgctctctcccccct

SEQ ID NO: 32654 - DNA, 148 bp, Homo sapiens
  chr19:45186850-45186998
  hypo
ttgggggctgtggggccgatgaggtggactcagccaaagactcagcagcacatggggcaggtgtcctggcagggggacaggagactgtaacaggcccaggtccttgtgcagcccgtgaatgcacgcccgccttcggtctgttccttca

SEQ ID NO: 32655 - DNA, 30 bp, Homo sapiens; identical to SEQ ID NO: 12419
  chr19:45207312-45207342
  hypo

SEQ ID NO: 32656 - DNA, 44 bp, Homo sapiens
  chr19:45211219-45211263
  hypo
aggacctgctggtctacgcctggtaccgcgggcctgcctccgag

SEQ ID NO: 32657 - DNA, 138 bp, Homo sapiens; identical to SEQ ID NO: 12421
  chr19:45312125-45312263
  hypo

SEQ ID NO: 32658 - DNA, 230 bp, Homo sapiens
  chr19:45314551-45314781
  hypo
ggactgcacccctacgggaacccacgaccattatatgctggaatggttccttgtgagtgcttggggctggggggcctggagtcagggcacagcagggcagcaaaggttcattctctcatcagtgcctaaggcctgtagagatccaccaagccacactccttgttacagatggggtcactgagtcccactgaggggaagggatctgcaaggtgccccgtgtctaggcacag

SEQ ID NO: 32659 - DNA, 179 bp, Homo sapiens
  chr19:45315557-45315736
  hypo
gcccaggtgggcgacgagcgagactacgtgtgcgtggtgagggcaggggcggcaggcactgctgaggccactgcgcggctcaacgtgtttggtaagtgtcctcgggcatcccccgaagggaggcaggcagggaggggcgcagggcaggggctcctgacgtgaacgtctttttcacagca

SEQ ID NO: 32660 - DNA, 79 bp, Homo sapiens; identical to SEQ ID NO: 12422
  chr19:45348195-45348274
  hypo

SEQ ID NO: 32661 - DNA, 454 bp, Homo sapiens; identical to SEQ ID NO: 12423
  chr19:45349514-45349968
  hypo

SEQ ID NO: 32662 - DNA, 49 bp, Homo sapiens
  chr19:45368824-45368873
  hypo
ggctcacggtggaggacgagggcaactacacttgcgagtttgccacctt

SEQ ID NO: 32663 - DNA, 31 bp, Homo sapiens
  chr19:45377066-45377097
  hypo
tcctgccaacccgccccgtttctttagcatt

SEQ ID NO: 32664 - DNA, 73 bp, Homo sapiens
  chr19:45390078-45390151
  hypo
cttgagcctaggagctcgagaccagcgtgggcaacatgggctacccagcaacattttgcgtctacaaaaatac

SEQ ID NO: 32665 - DNA, 30 bp, Homo sapiens
  chr19:45412584-45412614
  hypo
gtccccgccccagccgtcctcctggggtgg

SEQ ID NO: 32666 - DNA, 31 bp, Homo sapiens
  chr19:45465160-45465191
  hypo
tgtctaagacagcccccgtgtccattctccc

SEQ ID NO: 32667 - DNA, 30 bp, Homo sapiens
  chr19:45496281-45496311
  hypo
aggtcagggcccagcgtgtgatgtaggggc

SEQ ID NO: 32668 - DNA, 102 bp, Homo sapiens
  chr19:45546674-45546776
  hypo
aaaaaaaaaaaaaaaaaattttttccattcatacgtatatgcacatacccagctctgtgagactggggactaattatatttgggtcacgtttgtaccctagg

SEQ ID NO: 32669 - DNA, 213 bp, Homo sapiens
  chr19:45567706-45567919
  hypo
cgttccggccgccacgcccgctcccggtcccgctcctggtcccgctcccgctcccgctcccggcgctattcccggtcccgtagccgtggccggcggcactcaggtgggggctcccgagacggacaccggtactcccgctcgcccgcccggcgtggtggttacgggccccggcgcagaagcaggtgtgtgtggctgggcgtggaggtgggaggg

SEQ ID NO: 32670 - DNA, 40 bp, Homo sapiens
  chr19:45569128-45569168
  hypo
ggtgctggctaagtgccgttaatatcgtcagcatcattac

SEQ ID NO: 32671 - DNA, 1124 bp, Homo sapiens
  chr19:45574504-45575628
  hypo
ccctttgcccagggcctctggcgacaggtccgggcctctccccgccctcgcctcagcccctgccctggcctcgcccgcactaggaactgggagcgcagctttctgtgccagtcctgctgcgccccaggcactgggggctggccgttccctcaccccctcactccaaaccggtctgtccagccgtccaccccacggaggggaagcctcctgccccacctcatgcaccccaagaaagccagagtccagacgggtgtaaataaaagggaaaatttacttggagaaggcgggcaaaaacgaggaggtcaatgggtgttggcagcggtaccagggacagtgaggggggctttcctgggctcaggcctcgccggccgcctcagggtgcttctgccgcaggtgtttgtccagggtggctcgcaggccgaagggcacatggcagtgggggcactcgaagcgggtgctgccaggcgtcatgccgtgcatgcggcggtggcggttgagcttactgctctgggcgcaggcgtagttgcagaactcacaggtgtaggggcgctccccggtgtgtgagcgccggtgcaccgtcaggttgctgctgttggtaaaatgcttcccgcagaactcacagctgcccccgggcccgcggctcttgccccctgacttgggcatctttttgggtgatgccttctggctgtttgcagggtcagttctttgttccgtggtgatggctccccaagtgtctccaccagggccggcttgagccccactgccaggagccccgggttcctggacacctgctgtggcggcggctccagccccctcaccaccgctgcatggaagggtgctggtgggggcagcagcatggacagccggctccggaggggctgcagaggcctgctcctggctggtgtcggccatgagggggctctggggcggcacctgccggtgggtcttcttgtggcggttgagcttgctgctctgggcgcaggcgtagggacactggtcgcaagcatagggccgctcgcctgtgtgtgagcgcatgtgcactttgaggttgctgaaggagctgagggtcttcttgcacacaggacaggtggggctccgccgggtgaggccgctgccacttgcac

SEQ ID NO: 32672 - DNA, 30 bp, Homo sapiens
  chr19:45601444-45601474
  hypo
ctgccaggctgggcacgtgggtgcccgtgg

SEQ ID NO: 32673 - DNA, 239 bp, Homo sapiens
  chr19:45603141-45603380
  hypo
tttagcacccattctgactcccggaagagcacgcgaagctggcccccagctggcactcggtaaccagccttcagtgcgtcagcgggagtgcgtgtgcacttgtttctgggagcgagtactggggctctgcgaaccttcacaggcatccgactccaagaggattaagaaccgtggggccaaatgccctgtgttggacggactgcagctggagcagtcactgagcacggaggccagaaacc

SEQ ID NO: 32674 - DNA, 398 bp, Homo sapiens
  chr19:45603840-45604238
  hypo
aaatccaggcagccagcctggcgccgaagcctgcgcagtaataacccctgtgcggcggctgagtgcttggacgcattcggtgcaacgtgccatacggtctcttcatctataacccagaatcgtttataaaatagaggcaacagtgctggctttgcggtgttgtggcagggaggagaaacagaaacaggtggggtaagggcccagccttggtgggcacgcaggagggggtcactgtggttcgtggacagcttgagtccctggagatttgtgctgctcctctgtcctcagcattgcctgctgttctgacccttggcctctgggacgtgttcttcctgtgctactcagtgtctggtatgtgataggcgctcaatatattcttgctgcgtgagtgacttggt

SEQ ID NO: 32675 - DNA, 256 bp, Homo sapiens
  chr19:45626630-45626886
  hypo
gctgagggcaggacccgctctccacatcctggaaacccaacagagaaagacagtctctctggcagcctccctgtcttgaagttcgagaaggctgcatttctaggctcccacaacctgtctgtccggtttgaagccggggcctgagggcttcagggtactgatgcaggacagacagctctggttcaaacctccctctgtccgctcccacaggtgtggcctcagaagaccattccctctgtagcgtggtagaggctgg

SEQ ID NO: 32676 - DNA, 31 bp, Homo sapiens
  chr19:45678817-45678848
  hypo
gaggaagggattgttacgctaagatctgaag

SEQ ID NO: 32677 - DNA, 45 bp, Homo sapiens
  chr19:45810101-45810146
  hypo
tgcacctgttctacttcggacgagcccagccgatcagcgttggac

SEQ ID NO: 32678 - DNA, 31 bp, Homo sapiens
  chr19:45851389-45851420
  hypo
atgctcaacatcctggcgctggtgtaccggt

SEQ ID NO: 32679 - DNA, 30 bp, Homo sapiens
  chr19:45866859-45866889
  hypo
cagacaaggtcccacgtgcctcgcccagct

SEQ ID NO: 32680 - DNA, 263 bp, Homo sapiens; identical to SEQ ID NO: 12433
  chr19:45959072-45959335
  hypo

SEQ ID NO: 32681 - DNA, 201 bp, Homo sapiens
  chr19:45997522-45997723
  hypo
cctcttccagcaatggctcttcgggcccagagttcgaatctcgcgatcgggatggggacggagtaccggcctggggtgtcccagagcccggactgagctggggagtcaagacctcgggcgatgagggctgagcaagtcggagtcgtaggtccagttctgatacggtagagagaggaggccgtgagctttcttcttggaggt

SEQ ID NO: 32682 - DNA, 632 bp, Homo sapiens; identical to SEQ ID NO: 12435
  chr19:46001720-46002352
  hypo

SEQ ID NO: 32683 - DNA, 275 bp, Homo sapiens; identical to SEQ ID NO: 12436
  chr19:46002431-46002706
  hypo

SEQ ID NO: 32684 - DNA, 30 bp, Homo sapiens
  chr19:46056769-46056799
  hypo
tcctatttcttggacgcaggcactgcgtgg

SEQ ID NO: 32685 - DNA, 25 bp, Homo sapiens
  chr19:46234862-46234887
  hypo
gcgcccggcccgtcccctcctttct

SEQ ID NO: 32686 - DNA, 30 bp, Homo sapiens
  chr19:46236875-46236905
  hypo
agaaaccagaacggcgggggcagcctcacg

SEQ ID NO: 32687 - DNA, 60 bp, Homo sapiens
  chr19:46307535-46307595
  hypo
gcacccagttggccatggagtcgaccagctccagcacggggatgccctcgaagtccgggt

SEQ ID NO: 32688 - DNA, 60 bp, Homo sapiens
  chr19:46308096-46308156
  hypo
ggtagctgcgtttgattcccaggatcttgccccagaagcgacaggtgtggatgggctgct

SEQ ID NO: 32689 - DNA, 30 bp, Homo sapiens
  chr19:46315868-46315898
  hypo
tagattctaggatccgaggaaggagcaggt

SEQ ID NO: 32690 - DNA, 322 bp, Homo sapiens
  chr19:46321115-46321437
  hypo
tccaccgggctccctccggggtcagacgggggaaggggagggcaagcaggctagaagctgctgtctgcagcctggaggcggggtggccggggatgggttacctgcttcatgatgaggcgggacaggatgttcatgacgaagccccccaggcgggggtacatggtcagggactggatgacggtcctcatgagcagcatgggcagggggctctgctccatcagctgctgcatcaccacggccagcacctctgacgtgtacacgttccgctccgcaaagcacaggttggtggctgcgaggaggcggagagtgggcctgtcctctc

SEQ ID NO: 32691 - DNA, 31 bp, Homo sapiens
  chr19:46330697-46330728
  hypo
ttactcaggatagaggcggcctctgcaagct

SEQ ID NO: 32692 - DNA, 150 bp, Homo sapiens
  chr19:46356446-46356596
  hypo
ggctgatgaaggagccgaacgggttctcacacaggaatgctaaccctgccagtctctgaactccaactgcctcctgctctgaaccatgcccagcccaagtgtcccatgtcgtcttctgcctttgcacacacttctgtgccctcagcttga

SEQ ID NO: 32693 - DNA, 31 bp, Homo sapiens
  chr19:46404483-46404514
  hypo
aaaaggcttgcaacagcgcaggcacacagcc

SEQ ID NO: 32694 - DNA, 418 bp, Homo sapiens; identical to SEQ ID NO: 12451
  chr19:46519206-46519624
  hypo

SEQ ID NO: 32695 - DNA, 31 bp, Homo sapiens
  chr19:46885653-46885684
  hypo
gttttcatctttagggcgagacagtcttttg

SEQ ID NO: 32696 - DNA, 31 bp, Homo sapiens
  chr19:47111850-47111881
  hypo
cagccctctccaggggcggctctgagactga

SEQ ID NO: 32697 - DNA, 43 bp, Homo sapiens
  chr19:47113194-47113237
  hypo
ctaacatcccatgccgctccctcctcacgatgcacccaccgcc

SEQ ID NO: 32698 - DNA, 255 bp, Homo sapiens
  chr19:47200355-47200610
  hypo
tgggaaagtttgtgggcacagcgggaagtccgagggagctgaaagcccggaggcttaccttatagtatctgttggtcgtgttgttctggaagagcgtgatacacttgcagtccaggcgccaatagtgccgctttctctgcagagatgtttgaagagtcacgtgaaccgccagactttcctgcccagtccctatcccgtggagctgcttggggctccaggtgcctggagcaccacgtgcacgccgtaactctagca

SEQ ID NO: 32699 - DNA, 122 bp, Homo sapiens
  chr19:47223787-47223909
  hypo
ctcacctcagccccacctgcccggccctacaccccagccagcgtggcggccagggcagggccaggtgggcatcatacgaagaccttggccagggcatcagcgccagcactggcaatgagggc

SEQ ID NO: 32700 - DNA, 30 bp, Homo sapiens
  chr19:47284568-47284598
  hypo
cccaagtccgggcgcggtggctcacgcctg

SEQ ID NO: 32701 - DNA, 31 bp, Homo sapiens
  chr19:47350196-47350227
  hypo
taggcatgggccaccacgcccagtcagccag

SEQ ID NO: 32702 - DNA, 31 bp, Homo sapiens; identical to SEQ ID NO: 12467
  chr19:47363344-47363375
  hypo

SEQ ID NO: 32703 - DNA, 31 bp, Homo sapiens
  chr19:47384471-47384502
  hypo
taggcgtgagccactgcgtccagctcaagtg

SEQ ID NO: 32704 - DNA, 30 bp, Homo sapiens
  chr19:47425476-47425506
  hypo
agctggggcccatccggaagaaagaggagg

SEQ ID NO: 32705 - DNA, 41 bp, Homo sapiens
  chr19:47502321-47502362
  hypo
cccaggcacacagtgccgcccttcagcgggggcctgggaca

SEQ ID NO: 32706 - DNA, 31 bp, Homo sapiens; identical to SEQ ID NO: 12471
  chr19:47523252-47523283
  hypo

SEQ ID NO: 32707 - DNA, 193 bp, Homo sapiens
  chr19:47646677-47646870
  hypo
gtattttttgttcttctgtgattctgcaagctcactgttctgtatcatcaggttaacaatgtttgtcttacaggctgcgggcctctcgggtgcttcttgtcggcttgaaaggacttggggctgaaattgccaagaatctcatcttggcaggagtgaaaggactgaccatgctggatcacgaacaggtgcgctg

SEQ ID NO: 32708 - DNA, 31 bp, Homo sapiens; identical to SEQ ID NO: 12472
  chr19:47729938-47729969
  hypo

SEQ ID NO: 32709 - DNA, 30 bp, Homo sapiens; identical to SEQ ID NO: 12473
  chr19:47730015-47730045
  hypo

SEQ ID NO: 32710 - DNA, 294 bp, Homo sapiens; identical to SEQ ID NO: 12474
  chr19:47731297-47731591
  hypo

SEQ ID NO: 32711 - DNA, 30 bp, Homo sapiens
  chr19:47763928-47763958
  hypo
cagggaggccgggccggcatgggccgagca

SEQ ID NO: 32712 - DNA, 31 bp, Homo sapiens
  chr19:47777369-47777400
  hypo
agagggaaaagctgaccgttggggaggagct

SEQ ID NO: 32713 - DNA, 31 bp, Homo sapiens; identical to SEQ ID NO: 12476
  chr19:47778088-47778119
  hypo

SEQ ID NO: 32714 - DNA, 30 bp, Homo sapiens
  chr19:47843872-47843902
  hypo
tgagccaccacacccggcctagaattccaa

SEQ ID NO: 32715 - DNA, 138 bp, Homo sapiens
  chr19:47868800-47868938
  hypo
gcccggcctataaaggtttttaaatgagtattgggtgaactcatagacggcatcaaggcttggtcagcagggaggaaggagcagcagctgcttgcaggtggacgccagaacttctagtgccctcggatcaaagccagg

SEQ ID NO: 32716 - DNA, 25 bp, Homo sapiens
  chr19:47910558-47910583
  hypo
gcccgggctctcgccccgggccggc

SEQ ID NO: 32717 - DNA, 83 bp, Homo sapiens
  chr19:47976276-47976359
  hypo
ctacacccttaactgctgcaccgcacaattccccaggctgaggacgggtcaggtcaagaagagacttgcaggctgggtgcggt

SEQ ID NO: 32718 - DNA, 103 bp, Homo sapiens
  chr19:47995718-47995821
  hypo
gtgggaacatgagaggcggcgcccgcccctctctcccagggggccagctgcctgcctttttctcggccatcacccagggctccgtgcacgctggggggacccc

SEQ ID NO: 32719 - DNA, 672 bp, Homo sapiens
  chr19:48003442-48004114
  hypo
aagccaggttgggctaatttccgctcctttttcggcagcaactcctacctggctggtctcagaatcctccccgccccccacaccgctcccttctgcatgttaattctgacaacagaacagattttcctctctccccggcaggcggtgggtctgcaatggaactcccactcccaaatgctccgggattgggaaggggtgatcagctgcaccgacaccaccgacacggtagataggggggcggagacttgagcagggcgcgaatgccaactggaaggaagagagccagttctaaagtcaacgctcactctgcctcaggcacgcccctgccagcctatcacatgtcggccactggaaaaaccagagccgccaggaaacctgaggaatcaatgcagggtgctaggatggcgctccggacagccagcccgtgtggcccgcagaggccctcaccttgggggtcggctttcttgaatgcgttgccagcgtccacaaagcaggtggctgcgtcgtgcttgctctggagctgcaggtgcagctgtgcagcctggcagaacgcgtttccagcagctggaacagaagagaagggcagtcctggcctcagtggggctccacactttatgaagccacagagacactgccctgggaggtgggtcgggctctcgagaatgcggaaag

SEQ ID NO: 32720 - DNA, 232 bp, Homo sapiens
  chr19:48012649-48012881
  hypo
acaggcctggcctcagcgccagctcatcgtgtgccagcctgcgtttccttatgtgtaactaggcataagactccacaccttgcagggctgctgaagcacgagcaatcttgcaggcagcaccccacggcgtgcccagcagagagctggccacaccacgggcgttcagtaaacgagagcatccctctcatcaggccccgcagaggaccgattccaggcacgcttccctacttca

SEQ ID NO: 32721 - DNA, 168 bp, Homo sapiens
  chr19:48137146-48137314
  hypo
attgctgggtgtctcagaacccgccgaggggcgttctgtgcgttcaccctgtccccctccaaagcctgaaaaacccctcatttcagaacacgtctcactccagaggtttccactaaaagatcgtggagccatgtgaatgtaaattccgtttccccctcttcatacatc

SEQ ID NO: 32722 - DNA, 40 bp, Homo sapiens
  chr19:48145666-48145706
  hypo
aaactgcccacctgggcgcagtggctcacacctgtagtcc

SEQ ID NO: 32723 - DNA, 168 bp, Homo sapiens
  chr19:48151214-48151382
  hypo
gtgctcctggcatttcctgggcgggaactactggtgtagacctactggattaacttgctcctgggtcggtgtgcgggatagggggagggtgcatcagtctttgtggagcgtctgccttctctccgtctccctgttttcctgttaccgtctccccgtccctctctctgt

SEQ ID NO: 32724 - DNA, 39 bp, Homo sapiens
  chr19:48393223-48393262
  hypo
aaaaattttttttttttgaaacggagtctcgtgctcagt

SEQ ID NO: 32725 - DNA, 43 bp, Homo sapiens
  chr19:48675138-48675181
  hypo
gggccgagttcagccgcttcttcgacgcgtggtgccagcagcg

SEQ ID NO: 32726 - DNA, 31 bp, Homo sapiens
  chr19:48681748-48681779
  hypo
actacataccaggccccgggcagtctgtgtt

SEQ ID NO: 32727 - DNA, 31 bp, Homo sapiens
  chr19:48685674-48685705
  hypo
agtgatgtgaccagggcggtggtggttcctc

SEQ ID NO: 32728 - DNA, 65 bp, Homo sapiens
  chr19:48685940-48686005
  hypo
tcctactgcaagggccgcgaccacggcgtcctggacgccctgcacgtgctcgagggcctcttccg

SEQ ID NO: 32729 - DNA, 159 bp, Homo sapiens; identical to SEQ ID NO: 12487
  chr19:48823577-48823736
  hypo

SEQ ID NO: 32730 - DNA, 30 bp, Homo sapiens
  chr19:48844377-48844407
  hypo
gtgaatgatcgcgtacgacagatgcttcac

SEQ ID NO: 32731 - DNA, 290 bp, Homo sapiens
  chr19:48857795-48858085
  hypo
acaagcgtgagtcactgtgcccggccaaatttcacttctgtaccttgttgctggtctcttcctcagtagaacagagcctgtgaggtacatctctcatgctgtccactgtctcccagagcctcaagccattccagagacacagtaggtgctcaataaatatttactgagcgaactcaatgaatgaatgaatcagcgaaaaaagatcagagagaggtcacccgccaaggtcacccgcaccactagtgaacaaccaagctattgtttgaaccgaggctatgctgcttctttcc

SEQ ID NO: 32732 - DNA, 145 bp, Homo sapiens
  chr19:48889257-48889402
  hypo
gatgctgctgggaaacgaacccattaaattgatgcccattcaactctcacccctggggttgcccttagggaacagagtcaccgtttaaagagagacagaaggtctgttgctttttttttttttttttcctgaggccgagtttcac

SEQ ID NO: 32733 - DNA, 642 bp, Homo sapiens; identical to SEQ ID NO: 12490
  chr19:48901492-48902134
  hypo

SEQ ID NO: 32734 - DNA, 288 bp, Homo sapiens
  chr19:48908062-48908350
  hypo
gaggagtatgactggacgtcctttgtagccgtgaccactcgtgcccctggccaccgggccttcctgtcctacattgaggtgctgactgacggtagtctggtgggctgggagcaccgcggagcgctgacgctggaccctggggcgggcgaggccgtgctcagtgcccagctccgcagtgtcagcgcgcagatccgcctgctcttctgcgcccgagaggaggccgagcccgtgttccgcgcagctgaggaggctggcctcactggatctggctacgtctggttcatggtg

SEQ ID NO: 32735 - DNA, 35 bp, Homo sapiens
  chr19:48953830-48953865
  hypo
gtctgcaacaaggggccgggcgcttagactccaag

SEQ ID NO: 32736 - DNA, 30 bp, Homo sapiens
  chr19:48957853-48957883
  hypo
tccatgcaaggcaccgctgagccatcccct

SEQ ID NO: 32737 - DNA, 30 bp, Homo sapiens
  chr19:48958879-48958909
  hypo
ctggtgaaggttcccgttggctttgggaag

SEQ ID NO: 32738 - DNA, 30 bp, Homo sapiens
  chr19:48965278-48965308
  hypo
tcctggctgctcttcggcctggccttctgg

SEQ ID NO: 32739 - DNA, 31 bp, Homo sapiens; identical to SEQ ID NO: 12492
  chr19:48996514-48996545
  hypo

SEQ ID NO: 32740 - DNA, 30 bp, Homo sapiens
  chr19:49012396-49012426
  hypo
cagaatccgatggacgcagggacggatgga

SEQ ID NO: 32741 - DNA, 30 bp, Homo sapiens
  chr19:49131201-49131231
  hypo
cctgcctaacagcccggtatcccacttcag

SEQ ID NO: 32742 - DNA, 30 bp, Homo sapiens
  chr19:49132843-49132873
  hypo
cagcctgggctgtccgcagctgggctacgc

SEQ ID NO: 32743 - DNA, 51 bp, Homo sapiens
  chr19:49173721-49173772
  hypo
gcgggggggccgggcacgggcggcacagcgggcagcgtggccatgacactg

SEQ ID NO: 32744 - DNA, 30 bp, Homo sapiens
  chr19:49174376-49174406
  hypo
cggctgcatggaagcgaggaaaatagttcc

SEQ ID NO: 32745 - DNA, 30 bp, Homo sapiens
  chr19:49180279-49180309
  hypo
ctacctgtagtcccagctactcgggaggct

SEQ ID NO: 32746 - DNA, 142 bp, Homo sapiens
  chr19:49183848-49183990
  hypo
ccttcgtgggggtccacgtgcgccggggggactatgtccgtgtcatgccgcgcgtatggaagggggtgctggccgaccggctacctgcagcgggccctggactggttccgggcctgctgccgcctcccggtctttgtggtca

SEQ ID NO: 32747 - DNA, 2 bp, Homo sapiens
  chr19:49207387-49207389
  hypo
gt

SEQ ID NO: 32748 - DNA, 30 bp, Homo sapiens
  chr19:49221484-49221514
  hypo
tctctggacatatgcgcctttttgtatact

SEQ ID NO: 32749 - DNA, 21 bp, Homo sapiens
  chr19:49232013-49232034
  hypo
gtctcaaaaacaaaagcaaac

SEQ ID NO: 32750 - DNA, 31 bp, Homo sapiens
  chr19:49246878-49246909
  hypo
ttcctagatggtcagacgaaggcacaggacc

SEQ ID NO: 32751 - DNA, 27 bp, Homo sapiens
  chr19:49278471-49278498
  hypo
actccatctcaacgaacaaatatatac

SEQ ID NO: 32752 - DNA, 89 bp, Homo sapiens
  chr19:49281056-49281145
  hypo
ccggccagctttgccattttcacacgtggcctccaaggtctctctggatgtgggacgcaggctcccaggtgaaccgcaatgatccccac

SEQ ID NO: 32753 - DNA, 21 bp, Homo sapiens
  chr19:49329359-49329380
  hypo
agccaccgtgcccagcccaac

SEQ ID NO: 32754 - DNA, 21 bp, Homo sapiens
  chr19:49335057-49335078
  hypo
tggacacagttgcccacgcct

SEQ ID NO: 32755 - DNA, 39 bp, Homo sapiens
  chr19:49402038-49402077
  hypo
gggggttctgaacacgaatgccgtgtgggggttccttaa

SEQ ID NO: 32756 - DNA, 30 bp, Homo sapiens
  chr19:49419279-49419309
  hypo
ttcatctcgcacaaccgaaaccgtatccat

SEQ ID NO: 32757 - DNA, 43 bp, Homo sapiens
  chr19:49463918-49463961
  hypo
catgtttacaatttttgaagccgacttcaattgtgggtggcag

SEQ ID NO: 32758 - DNA, 30 bp, Homo sapiens
  chr19:49465032-49465062
  hypo
taataaacctccttcgggacacacttcggc

SEQ ID NO: 32759 - DNA, 31 bp, Homo sapiens; identical to SEQ ID NO: 12505
  chr19:49466992-49467023
  hypo

SEQ ID NO: 32760 - DNA, 30 bp, Homo sapiens
  chr19:49472809-49472839
  hypo
cgtgacagcgagggcgacggtggcaccgag

SEQ ID NO: 32761 - DNA, 30 bp, Homo sapiens
  chr19:49494756-49494786
  hypo
gtgagggcaggccccggccgaggtccatag

SEQ ID NO: 32762 - DNA, 34 bp, Homo sapiens
  chr19:49525577-49525611
  hypo
atcctagccagggggacggcgagttagtcagaac

SEQ ID NO: 32763 - DNA, 31 bp, Homo sapiens
  chr19:49606779-49606810
  hypo
ggcccccaggagttgccgagccccccccatc

SEQ ID NO: 32764 - DNA, 405 bp, Homo sapiens; identical to SEQ ID NO: 12510
  chr19:49660927-49661332
  hypo

SEQ ID NO: 32765 - DNA, 640 bp, Homo sapiens; identical to SEQ ID NO: 12511
  chr19:49925605-49926245
  hypo

SEQ ID NO: 32766 - DNA, 30 bp, Homo sapiens
  chr19:49964945-49964975
  hypo
gctgggccccttcccgggaatcctgaatgt

SEQ ID NO: 32767 - DNA, 30 bp, Homo sapiens
  chr19:49967835-49967865
  hypo
cgcatccggcctcgcgtgccccttgcatcc

SEQ ID NO: 32768 - DNA, 31 bp, Homo sapiens
  chr19:49969561-49969592
  hypo
gggccagctgggcaggcggggtggggctcag

SEQ ID NO: 32769 - DNA, 408 bp, Homo sapiens
  chr19:49971402-49971810
  hypo
tgagagtccgtctcaaaaaaaaaaaaaaagaaaggcggttatgcaggatgtttctcaccgcccgaacccccgtggaatgattcactttgaccagcgtctgcgaaatggcaggggcttccacaatggtgcggtttgggccaacaccaagtgttggggagaatgtagaggaactggatctctcatttactgcgggcggggctcccctgccccacacgtgacccacctgtccctgcaggtagccgggctgagaggccctgtgctgcgcctgcgggagccgctgggtgtgctggctgtggtgtgtccggacgagtggcccctgcttgccttcgtgtccctgctggctcccgccctggcctacggcaacactgtggtcatggtgcccagtgcggcctgtcctctgctggccct

SEQ ID NO: 32770 - DNA, 132 bp, Homo sapiens
  chr19:49978919-49979051
  hypo
ggctcccccagcacccgctcccctgcagacctatctcctcctgctgctgctgctgagctcgggactcagtgggacccaggactgctccttccaacacagccccatctcctccgacttcgctgtcaaaatccg

SEQ ID NO: 32771 - DNA, 30 bp, Homo sapiens; identical to SEQ ID NO: 12518
  chr19:49990679-49990709
  hypo

SEQ ID NO: 32772 - DNA, 30 bp, Homo sapiens
  chr19:50027929-50027959
  hypo
cttccacgcctcgtcgtcactaacagtcaa

SEQ ID NO: 32773 - DNA, 208 bp, Homo sapiens
  chr19:50028454-50028662
  hypo
cccactgcactggcacagccccgccttgccgctgctgatccattgccggtgtgaccgcggccgctcgtgctgtagctggttcttacgtccaacctgggggcagtctgcccagatcgcctgcctggcctcgcctctgcccatcagacacttggtgctggaatctccgaggctgggagggactgggagcgccccagttctgtgtcctgac

SEQ ID NO: 32774 - DNA, 248 bp, Homo sapiens
  chr19:50059841-50060089
  hypo
aggctgtcgcgggtcacggcacacacgtagcgctcgctgcgggtgatgagccccacgcggtccacggagctgtctagcggtgtgaagtgcacgggcgtcaggtccgacatgcgcaggggcttccctgacatggggcaggtcaccgtgcgggactgcaaggggcagagagaggcgggctcagtaggcagggctggcgcaggtggagagcgcgtggtccctgtgcgtgaggaggacggtggggaaccctg

SEQ ID NO: 32775 - DNA, 237 bp, Homo sapiens
  chr19:50060290-50060527
  hypo
ccgcccagcccgcggcgccccgccccccaacccacaagaagcccaacctgagtcacctgggctggtgcccgagagggccttggctgtgaaagggttgaggggccggctcacgatagccgactccttctccaggaagccccgcacatggtcctgcgaggccgcccgctgaagctccttctgctcctcgcgccgggtgccccgctgcttctcgtaggcctgcgtcggggaaagtgggct

SEQ ID NO: 32776 - DNA, 173 bp, Homo sapiens
  chr19:50060911-50061084
  hypo
agtgcatgccccagcccgtgtttgggacgggggatgtagacttcagatctaagggaatgctgaggagcccatgtctatggacggacagtgagtgaggacgggagaagtgaagccatgacctgagctcagccctgcctggcgcacagcagttgcctgggcggtgctgcagttcc

SEQ ID NO: 32777 - DNA, 164 bp, Homo sapiens
  chr19:50061335-50061499
  hypo
ccatggaaggccaggccgggttcccagtaacacgccttgagaatgctcatctgcgtgtacctcccaggtgccctgctgtgtcctctgatttggccgtcagcccgttttacagacgatgaaactgaggcccagaaaaaatgaggtgatgtcaattcacgtagcac

SEQ ID NO: 32778 - DNA, 191 bp, Homo sapiens
  chr19:50063174-50063365
  hypo
cctgttcccagctcacgtgacaacaggatcgtggcaaggctgcagggagagacaacagcagtcgaagtccttcacggcatcccggctcagtcgaatgttctgggtcccatagcccgaggccgctggggacagagatgggcagagtgatggaggggcggagcaacaggagacatgtccgtctccaaagcccc

SEQ ID NO: 32779 - DNA, 31 bp, Homo sapiens
  chr19:50092048-50092079
  hypo
tggttttggcgactgtcgctctgtctggatc

SEQ ID NO: 32780 - DNA, 30 bp, Homo sapiens
  chr19:50097732-50097762
  hypo
tggcctccaccacgcgggctcagcagggcc

SEQ ID NO: 32781 - DNA, 30 bp, Homo sapiens
  chr19:50098345-50098375
  hypo
tccgctgccgccgccgctgccgagcagtcc

SEQ ID NO: 32782 - DNA, 30 bp, Homo sapiens
  chr19:50119400-50119430
  hypo
aacgctacagcaggcgggggcccaccaggc

SEQ ID NO: 32783 - DNA, 142 bp, Homo sapiens
  chr19:50129650-50129792
  hypo
gtgtacacacaaccagccaaacgaaaacccaacggcaaacactttaccggcaggctggagtgcctctgtcctgcggcgctggagtgggtggcagtggtagcaggggcagaggttctggaacgggactttcccagagccctgg

SEQ ID NO: 32784 - DNA, 30 bp, Homo sapiens
  chr19:50130465-50130495
  hypo
gtgagccactgcgcccggcctcaagtcctg

SEQ ID NO: 32785 - DNA, 35 bp, Homo sapiens
  chr19:50130773-50130808
  hypo
caggttggctgggcacggtggctcacggctataat

SEQ ID NO: 32786 - DNA, 30 bp, Homo sapiens
  chr19:50154362-50154392
  hypo
tccaccgcctgctccggagcaaaagtacga

SEQ ID NO: 32787 - DNA, 169 bp, Homo sapiens
  chr19:50208472-50208641
  hypo
tttgctgatgggaatgcgccccttatgctctgcccagtacgagaagatcttcaacaccacgcggattccaggggtccaaaaaggtgagaccctctcctgtccccactgatggaggcagaacaatatagtggctaagagcatgttttctggagtccgcctgactgagctg

SEQ ID NO: 32788 - DNA, 31 bp, Homo sapiens
  chr19:50223822-50223853
  hypo
aaatgcatgcttatgacgcttatttcactgt

SEQ ID NO: 32789 - DNA, 88 bp, Homo sapiens
  chr19:50274627-50274715
  hypo
tgaatgtactaaagaacgctgaattgttcactgtaaaagggtcaattttatggtatgtgaattgtatctctttttttttgtgacagtc

SEQ ID NO: 32790 - DNA, 40 bp, Homo sapiens
  chr19:50303026-50303066
  hypo
agtgctgtggggtgcgggctggactcttgggtctgaggca

SEQ ID NO: 32791 - DNA, 147 bp, Homo sapiens
  chr19:50303125-50303272
  hypo
cctgggtctccagatgggggcagtggtgagcccagatccaggtgagtgaaagcccgacatggcctgcggcacactctctctcacacgccccggcggcaggtcctgaaggtggccatcctggccgagaagtacgccgtggactacagc

SEQ ID NO: 32792 - DNA, 30 bp, Homo sapiens
  chr19:50305327-50305357
  hypo
ctggtggacgtcttcgatggcccggccgcc

SEQ ID NO: 32793 - DNA, 121 bp, Homo sapiens
  chr19:50319633-50319754
  hypo
tacaggcatgagccatctcgcccggccgaagattatgttttaaaatatttactggccattcaaaattttgtgtgtgtgtttgtgtgaaactagtcaggtttctttttatttatttattttt

SEQ ID NO: 32794 - DNA, 52 bp, Homo sapiens
  chr19:50320053-50320105
  hypo
ttctttctattaaaacaaatataaagtggcagggcacgatggctaacacctg

SEQ ID NO: 32795 - DNA, 58 bp, Homo sapiens
  chr19:50331698-50331756
  hypo
cctgcaggttcatgggcgggggtggtgagagctgcagcctcatcgcggaaggactcag

SEQ ID NO: 32796 - DNA, 30 bp, Homo sapiens
  chr19:50353544-50353574
  hypo
ggacgtggtctgattcggtcgtcgccgagc

SEQ ID NO: 32797 - DNA, 30 bp, Homo sapiens
  chr19:50361778-50361808
  hypo
gctgggggtcccctcgcttccccgcagacc

SEQ ID NO: 32798 - DNA, 103 bp, Homo sapiens
  chr19:50364907-50365010
  hypo
aagcagcggcaggggacgcccgcggctcgggcacactggacgtacctgtgggggaaggagctggatgtgcaggccccgcccaccccgccgcaggccacctacg

SEQ ID NO: 32799 - DNA, 30 bp, Homo sapiens
  chr19:50365744-50365774
  hypo
acacaggccagggtcgggctcgggcgcggg

SEQ ID NO: 32800 - DNA, 30 bp, Homo sapiens
  chr19:50366037-50366067
  hypo
ccccgcagcggtagcgggtccctggggctg

SEQ ID NO: 32801 - DNA, 205 bp, Homo sapiens
  chr19:50406381-50406586
  hypo
acaacaaaacaaaaaacggttggtttgtcaagatgcaaatcacagtccatattgcatttgagtgacattgtcttggtcagtaagtgtcactatcagttctgtggattcaagggaactagggtatctgaggtgaccccagggcaccaggctagtccccatcacggcagcgcacccggtctgcttcttgcctcgggaaacctttggc

SEQ ID NO: 32802 - DNA, 27 bp, Homo sapiens
  chr19:50415435-50415462
  hypo
ttttttttgagacgggagtctcgctct

SEQ ID NO: 32803 - DNA, 201 bp, Homo sapiens
  chr19:50423972-50424173
  hypo
gggaagagcctagagctgaaacgctctggttggcggtgcaggcacaggacatcaaggcctggagagggactgaggcatcagggctgagggactctgagagcagcggacaggcgtgtgtggcgggggaggaacggcgcacacctgtgccccatccgcagcccctcttcttgtcaacatcagcttccccggggagaggcagtg

SEQ ID NO: 32804 - DNA, 31 bp, Homo sapiens
  chr19:50705047-50705078
  hypo
tagaggcgtgagccaccgctcctggccagta

SEQ ID NO: 32805 - DNA, 23 bp, Homo sapiens
  chr19:50764002-50764025
  hypo
tgcgtgtgtgtgtgtgcgtgcat

SEQ ID NO: 32806 - DNA, 31 bp, Homo sapiens
  chr19:50766646-50766677
  hypo
acactggcagtggtggcggctgtttaccaag

SEQ ID NO: 32807 - DNA, 179 bp, Homo sapiens
  chr19:50784839-50785018
  hypo
cctcccctcagctttccgagtggcggcggcgccaggaggaggaggcaggggcactggaggcaggggaggaggcacggcgccgggcagcccgggaggccgaggccctgacccagcgcctggcagaaaagacagagaccgtggatcggctggagcggggccgccgccggctgcagcaggag

SEQ ID NO: 32808 - DNA, 776 bp, Homo sapiens
  chr19:50826193-50826969
  hypo
ctccacctgtgcccccgatccctgacgcccaggctcacctgcccggttgatctcaatcacctcctcctgagccaacgggcaaggctcgccgggggctggcagaggaggcagccccatgatccccagcccacccgctccccccctgagcagcccggggtgcgtgtggggccccgctgggtaggccccggccacagtcacccccatggagggtggggtgatgggtggcggcgggctgatgcccccgctgccgtggtgcgggtggggcgggggtggcgggggtgggtcaggcttgcagtagttgggcgagcccggttgcgggggccgggggatgtgtttgttcttcttcttgggcagcttctgcttggccatggccagcgaatagtacatgccaaagttgttgacaatgacgggcacaggcatggcgatggtcagcacccccgccagggcacacagcgccccgaccagcatccccgaccacgtcttggggtacatgtctccatagcccagggtcgtcatggtgaccacagcccaccagaagccaatggggatgttcttgaagtaggtgtggttggagcccaggatgtcatcggggtcggcgccaatgcgctcagcgtagtaaatcatggtggcgaagatgagcacccccagggccaggaagatgatgagcagcaggaactcgttggtgctggcgcggagcgtgtgtcccagcacgcgcagccccacgaagtgccgggtcagcttgaagatgcgcaggatgcggacgaagcggaccaccc

SEQ ID NO: 32809 - DNA, 30 bp, Homo sapiens; identical to SEQ ID NO: 12534
  chr19:50831796-50831826
  hypo

SEQ ID NO: 32810 - DNA, 14 bp, Homo sapiens
  chr19:50871400-50871414
  hypo
caagactccctctc

SEQ ID NO: 32811 - DNA, 13 bp, Homo sapiens
  chr19:50878666-50878679
  hypo
cccggtccgagac

SEQ ID NO: 32812 - DNA, 17 bp, Homo sapiens
  chr19:50898558-50898575
  hypo
ataaatagtgtaggccg

SEQ ID NO: 32813 - DNA, 35 bp, Homo sapiens
  chr19:50898814-50898849
  hypo
tgggagacagagcgagactccgtctccaaaaaaaa

SEQ ID NO: 32814 - DNA, 31 bp, Homo sapiens
  chr19:50914693-50914724
  hypo
tcttttctctctcagccgcttccctctgtca

SEQ ID NO: 32815 - DNA, 479 bp, Homo sapiens
  chr19:50919572-50920051
  hypo
ccccaggccccatgaccaccccgtgtccaccccggtgccctttccctggctgcccgggtgtgactgccatgtggccgcaggacccgctgttcgtgctggagcacagcctgcccattgacacgcagtactacctggagcagcagctggccaagcccctcctgcgcatcttcgagcccatcctgggcgagggccgtgccgaggctgtgctactgcgtacgggggcaccaggggactgggggcaccctgggggggcagaggagatcaccggcccaccacctgcctcctctcctgcagggggggaccacacgcgctgcaagacggtgctcacgggcaaggtgggcggcctcctggccttcgccaaacgccgcaactgctgcattggctgccgcacagtgctcagccaccagggtgagcggccctggccactgggcccccactggccctcaacctgctctgccgtcaccccagatcctagacac

SEQ ID NO: 32816 - DNA, 30 bp, Homo sapiens
  chr19:50938693-50938723
  hypo
ccctcggctggcatcggctccggtcagctg

SEQ ID NO: 32817 - DNA, 45 bp, Homo sapiens
  chr19:51098420-51098465
  hypo
ttataggcatgagccatcgcgcccggccaacttatctttttatta

SEQ ID NO: 32818 - DNA, 628 bp, Homo sapiens; identical to SEQ ID NO: 12546
  chr19:51227640-51228268
  hypo

SEQ ID NO: 32819 - DNA, 270 bp, Homo sapiens; identical to SEQ ID NO: 12547
  chr19:51228368-51228638
  hypo

SEQ ID NO: 32820 - DNA, 201 bp, Homo sapiens; identical to SEQ ID NO: 12548
  chr19:51228702-51228903
  hypo

SEQ ID NO: 32821 - DNA, 53 bp, Homo sapiens
  chr19:51293639-51293692
  hypo
tgggctgagctcagcgtctgggctgggtggaaatggccggcctggggttttgg

SEQ ID NO: 32822 - DNA, 106 bp, Homo sapiens
  chr19:51302698-51302804
  hypo
gggcccctcagacccccgggtgtcaaaggtcccggggggcaccgtgtcctcagtggcagtcggagcccagtgctggacatcatggaggccccggtgccctcacccc

SEQ ID NO: 32823 - DNA, 152 bp, Homo sapiens
  chr19:51303005-51303157
  hypo
gtgtttctctggaaaacgggactagagatgcctgcagacaggcacatctgtggggttcagtgagaggacggggccaaacccttctgcttgggcctcccatgcctaacgggatacccctcaatcgcctctgctgcccccggcccagctcttct

SEQ ID NO: 32824 - DNA, 270 bp, Homo sapiens
  chr19:51303431-51303701
  hypo
gtgtccaagagccacccgtggccagtggctgccagactggacaaggcgaggaacatttctatctggacagtcgtaaggaaggcgccggcccagaatccacaaatgctacgtgtcccttctgtctccctatcccgcatcagctctgtcgtctcacctctcacacatccctacccaactggcaccgacaccactcatgtccccaagaatcccctctaagccagccatgacaaacgctcagctccattcactaccccacagaggatctcggat

SEQ ID NO: 32825 - DNA, 118 bp, Homo sapiens; identical to SEQ ID NO: 12555
  chr19:51527587-51527705
  hypo

SEQ ID NO: 32826 - DNA, 96 bp, Homo sapiens
  chr19:51535324-51535420
  hypo
gtgccggatctgctcggtccagtcgagctggctgaggctgtgttcccccaggcgcacccagtacctgctgccggtggcgacggctgagcgggtggc

SEQ ID NO: 32827 - DNA, 30 bp, Homo sapiens
  chr19:51582826-51582856
  hypo
cagcagcatgaggtcgttgtcgtgggtccg

SEQ ID NO: 32828 - DNA, 30 bp, Homo sapiens
  chr19:51607417-51607447
  hypo
agccggctgtgctgcgggccacggcgtcca

SEQ ID NO: 32829 - DNA, 30 bp, Homo sapiens
  chr19:51607824-51607854
  hypo
attgcgggaggggtcggcttctcctagaca

SEQ ID NO: 32830 - DNA, 239 bp, Homo sapiens
  chr19:51754290-51754529
  hypo
tgtaaagtaagcccatgcagccgctgattggctgcgggtggatgcactcacctaaggatgcgagctagcaggtcttgcagcggctatcacgcccctcacgccgctatctctgtgcagccgactgaggatccctagtcgcataaggctgtgcctggcctgttggcgtccctggcagttgttgggttctggcggttgttgggtccctggcagttgttggcggttgttgggttccttcattg

SEQ ID NO: 32831 - DNA, 204 bp, Homo sapiens; identical to SEQ ID NO: 12558
  chr19:51830798-51831002
  hypo

SEQ ID NO: 32832 - DNA, 5 bp, Homo sapiens
  chr19:51831120-51831125
  hypo
cgcct

SEQ ID NO: 32833 - DNA, 42 bp, Homo sapiens
  chr19:52026930-52026972
  hypo
cagtaaacacctcaaaccttccgttaggactcaagaagggtt

SEQ ID NO: 32834 - DNA, 303 bp, Homo sapiens
  chr19:52058086-52058389
  hypo
gctttacataggaactggtggcgacatcagtgaaggcctctctgggcaacttccggttcacattggcgtccaggcgtgatttcttcagcatgtccattgacgcgcatgttcaatatcacttttggagctatgctctgcagatagttatcatggtgtaacgcggtggagggcgtgtccgttatttccattgtaaacttttcttcagcggctttgtcaggagaacaacatggtcgtgcccagatagagttggtcactggaggacgccatcttcaaaagatggtcgttccatacagccagggaagg

SEQ ID NO: 32835 - DNA, 30 bp, Homo sapiens
  chr19:52101646-52101676
  hypo
ccatttataacccacgtatataagagcagc

SEQ ID NO: 32836 - DNA, 598 bp, Homo sapiens; identical to SEQ ID NO: 12566
  chr19:52207128-52207726
  hypo

SEQ ID NO: 32837 - DNA, 172 bp, Homo sapiens; identical to SEQ ID NO: 12567
  chr19:52222623-52222795
  hypo

SEQ ID NO: 32838 - DNA, 39 bp, Homo sapiens
  chr19:52289293-52289332
  hypo
ttttatttatttattttttttcgagacggagtttcgctc

SEQ ID NO: 32839 - DNA, 255 bp, Homo sapiens
  chr19:52343054-52343309
  hypo
ttccctgaagccttcttacaccgcaaacctccacaagtaccccatgctggtcgcatccggtcaaggaccccaacagcgctgggaaactcaccctacagctggagtcgcacaaacattcgcttgaggactagcaggtttccgtaacctcttcactcactgccgtagtcacgctcttgtgcagactcagtagcaccttcgcggaacacaagatgtctacagactttgaaaccaggcgtgcacatggaagcagcagtc

SEQ ID NO: 32840 - DNA, 30 bp, Homo sapiens
  chr19:52405682-52405712
  hypo
cctcctcctcaggttcgattaatttgctgg

SEQ ID NO: 32841 - DNA, 8 bp, Homo sapiens
  chr19:52406039-52406047
  hypo
catgtagg

SEQ ID NO: 32842 - DNA, 153 bp, Homo sapiens
  chr19:52406166-52406319
  hypo
aggcgacctactagagcgatgtgaaaataataaaagtgagatcgttcatggcaaagttatctcggggtaaatgctccagctgcaagcaccaaaggtgagtattctcagggcaaatgggaaaaggaataaaggatattacgaaggatacagatg

SEQ ID NO: 32843 - DNA, 19 bp, Homo sapiens
  chr19:52406783-52406802
  hypo
aatcatagctaggcgcgat

SEQ ID NO: 32844 - DNA, 26 bp, Homo sapiens
  chr19:52431824-52431850
  hypo
ggtaaggtggcctggcgcggtggctc

SEQ ID NO: 32845 - DNA, 25 bp, Homo sapiens
  chr19:52432149-52432174
  hypo
aaaaacaaaacgaagaaaatgataa

SEQ ID NO: 32846 - DNA, 121 bp, Homo sapiens
  chr19:52479227-52479348
  hypo
tgtcagcaaactcatgactgctccggctgatgaaggtttgctggaggcaatcactccctggcgccgttatctactgcgacatctagagaatgcagtcttgcaagactactctggacccctg

SEQ ID NO: 32847 - DNA, 30 bp, Homo sapiens
  chr19:52530499-52530529
  hypo
gcccatgtactggttcgaaagtctctgtaa

SEQ ID NO: 32848 - DNA, 654 bp, Homo sapiens; identical to SEQ ID NO: 12568
  chr19:52531317-52531971
  hypo

SEQ ID NO: 32849 - DNA, 219 bp, Homo sapiens
  chr19:52569173-52569392
  hypo
ttataaggtttctctccggtatgaattttccgatgacgtgctaggcatgagtagtaactgaagaccttgccgcattcgttacactggaaaggtttctctccggtatgacttcgcctatgaattgaaaggtttccactgtcaatgaagaccttgccacacacattacatttgtaaggtttctctccggtatgcattctttgatgacgtgctaggcatgaa

SEQ ID NO: 32850 - DNA, 31 bp, Homo sapiens; identical to SEQ ID NO: 12570
  chr19:52643470-52643501
  hypo

SEQ ID NO: 32851 - DNA, 161 bp, Homo sapiens; identical to SEQ ID NO: 12571
  chr19:52715131-52715292
  hypo

SEQ ID NO: 32852 - DNA, 37 bp, Homo sapiens
  chr19:52718577-52718614
  hypo
tgggattataggcatgagccatcgcacttggcctatt

SEQ ID NO: 32853 - DNA, 23 bp, Homo sapiens
  chr19:52780422-52780445
  hypo
gtcatgttggccgggcgcggggg

SEQ ID NO: 32854 - DNA, 121 bp, Homo sapiens
  chr19:52780744-52780865
  hypo
gagaagcccagaagaggaaagcagaggagtcaggcatgccacttactcaggtaaagtgatattctcagtagattgttctgtttcttatttcttcctgaaatgccgggtgctggagttgaga

SEQ ID NO: 32855 - DNA, 36 bp, Homo sapiens
  chr19:52801590-52801626
  hypo
ggggaagaggcaagaccgggcacagtggctcacgcc

SEQ ID NO: 32856 - DNA, 32 bp, Homo sapiens
  chr19:52861438-52861470
  hypo
ttttgctttctttttttgagacggagtcccac

SEQ ID NO: 32857 - DNA, 609 bp, Homo sapiens; identical to SEQ ID NO: 12575
  chr19:52872924-52873533
  hypo

SEQ ID NO: 32858 - DNA, 183 bp, Homo sapiens
  chr19:52917255-52917438
  hypo
atagaacttgaaacaactgcacgtagtgtttttttcaacagacaagttctgccccacgttaccctgattcagaaaacttcccgttcgcagtactttagagcaccgacctcatatcgctcccagtacctcttcagggcactgaccttatatccgctgccagccgactcatccaggtttccccat

SEQ ID NO: 32859 - DNA, 77 bp, Homo sapiens
  chr19:53027351-53027428
  hypo
aattttctctgtcttctgaagcggtatgttatttgagacagagtttcgcgcttgtagcccacgctggagtggaatgg

SEQ ID NO: 32860 - DNA, 16 bp, Homo sapiens
  chr19:53027667-53027683
  hypo
gaagtggaattttttt

SEQ ID NO: 32861 - DNA, 23 bp, Homo sapiens
  chr19:53028922-53028945
  hypo
attgatttatttatttagagacg

SEQ ID NO: 32862 - DNA, 30 bp, Homo sapiens; identical to SEQ ID NO: 12579
  chr19:53030943-53030973
  hypo

SEQ ID NO: 32863 - DNA, 159 bp, Homo sapiens
  chr19:53089792-53089951
  hypo
ccaccacacgtagccagtcctggcattttgtagaaggatggccaacgcagcctgttgacccttcctggccatcacatgaaaatcagcgactcttccttcttacaaaactcggagcttctcaggataacttggtgaaacgtcccccgctgtgaacctcag

SEQ ID NO: 32864 - DNA, 283 bp, Homo sapiens
  chr19:53228952-53229235
  hypo
tacaaggcagagcaaaactcacgcgcctcggtaggacctttactccacgtgatccacttccgggtttgctgcgcaggacagaagccagtcccgggtggggcccccgaacatggtggcggggcctgggtgggacagaggcggggcgcgaggcggagagaccttgccctttagaacaggcaaagggcggggccgggaccagacctgtgcatctctccgcctcgcacccagcgcctctgtttttcgggtgtttggaggtgagagcggccaggaaggctgaggcatg

SEQ ID NO: 32865 - DNA, 79 bp, Homo sapiens
  chr19:53241621-53241700
  hypo
agacagagctcccaagtccttcggaaatacattcctgggtcattaagctaaaaagcggtttagttagtttctaaaaaaa

SEQ ID NO: 32866 - DNA, 27 bp, Homo sapiens
  chr19:53362266-53362293
  hypo
tacttcgctttttaaatgttgaaaaaa

SEQ ID NO: 32867 - DNA, 30 bp, Homo sapiens
  chr19:53429034-53429064
  hypo
caatccgacagaaaccgacatcagcagtaa

SEQ ID NO: 32868 - DNA, 38 bp, Homo sapiens
  chr19:53438069-53438107
  hypo
caggcaagagccacggcgcctggccaggactagtgctt

SEQ ID NO: 32869 - DNA, 443 bp, Homo sapiens; identical to SEQ ID NO: 12587
  chr19:53445370-53445813
  hypo

SEQ ID NO: 32870 - DNA, 30 bp, Homo sapiens; identical to SEQ ID NO: 12588
  chr19:53446037-53446067
  hypo

SEQ ID NO: 32871 - DNA, 35 bp, Homo sapiens
  chr19:53463665-53463700
  hypo
ttacgaatcagctcggataacgggctggagtttgt

SEQ ID NO: 32872 - DNA, 154 bp, Homo sapiens
  chr19:53477543-53477697
  hypo
cagcttatagcttgcagtgaacgccaagaatgaagtactcagataattccagctgagtggggcggggagcaaaccttctgagagagtgctgccccagaatccgtcctccaagtatttattgaaagggcttgtttagaccggtcgcggtggctca

SEQ ID NO: 32873 - DNA, 25 bp, Homo sapiens
  chr19:53479270-53479295
  hypo
aataataataatggctgggcacggt

SEQ ID NO: 32874 - DNA, 24 bp, Homo sapiens
  chr19:53479534-53479558
  hypo
cccgagtgacagagtgagacttca

SEQ ID NO: 32875 - DNA, 287 bp, Homo sapiens
  chr19:53507229-53507516
  hypo
tgctctgagcccgtccggacttccccgatcccagccttctctcctttgaaaacactaagaatgacatcactgcatcagtttttactagagccaatcacctgtcgtgcctggaacagggatcgtacccagattgccctcagtcctgataatcaggaagcgcacatctataagaagcatgggagccagcgagtgaaagctcgtgaactcagtgagcacaatggacatatcacaggcattcactgggctcccaagagcgaccgcatcgtcacttgcggggtagactgcaa

SEQ ID NO: 32876 - DNA, 30 bp, Homo sapiens
  chr19:53550008-53550038
  hypo
attaagaagacctaggctgggcgcattggc

SEQ ID NO: 32877 - DNA, 94 bp, Homo sapiens
  chr19:53667652-53667746
  hypo
agtgctgggattacaggcgtgagccaccacgcccggcgtcctttgtaaggtttctatccactatgaattcttcgatgttttgcaaggtttgaat

SEQ ID NO: 32878 - DNA, 30 bp, Homo sapiens
  chr19:53682616-53682646
  hypo
cgagattccgtctcaaaaaaaaaaaaaaaa

SEQ ID NO: 32879 - DNA, 50 bp, Homo sapiens
  chr19:53685320-53685370
  hypo
ttgaatataagtaatgaaggccgggcgcggtagttcacgcctgtaatccc

SEQ ID NO: 32880 - DNA, 160 bp, Homo sapiens
  chr19:53685609-53685769
  hypo
cgagactctgtctcaacaaaaacaacaaaaaaaaggagtttggagtcagaaacacagtgactcacttgttcggcatcaaatgcaaatataaatgaggtgacaaagctttccccacagtcgtctcattttacagcatttcgtgggtgcttgtacacactaa

SEQ ID NO: 32881 - DNA, 635 bp, Homo sapiens; identical to SEQ ID NO: 12600
  chr19:53696029-53696664
  hypo

SEQ ID NO: 32882 - DNA, 21 bp, Homo sapiens
  chr19:53745484-53745505
  hypo
ggaatgtgtatttcaaaagca

SEQ ID NO: 32883 - DNA, 41 bp, Homo sapiens
  chr19:53756648-53756689
  hypo
gtagaaagcatttaggccaggcgcggtggctcacgcctgta

SEQ ID NO: 32884 - DNA, 259 bp, Homo sapiens; identical to SEQ ID NO: 12603
  chr19:53757919-53758178
  hypo

SEQ ID NO: 32885 - DNA, 35 bp, Homo sapiens
  chr19:53821073-53821108
  hypo
ggattacaggcgtgagccaccgcgcccggccttgc

SEQ ID NO: 32886 - DNA, 30 bp, Homo sapiens
  chr19:53886323-53886353
  hypo
gtgtaataaatgtggcgaggtttttaatca

SEQ ID NO: 32887 - DNA, 327 bp, Homo sapiens
  chr19:53886594-53886921
  hypo
caatcaacaagcacacgttgcacgtcatcatagaattcatactggagagaaaccttagaaatgtgaagaatgtgacaaagtttacagtcgcaaatcaaacctcgaaagacaggagaattcatactggagagaaaccataaaaatgtaagagtttttgacaaggctttcggacgtgattcacacctggcacaacatcccagagttcacactggagagaaaccttacaagtgtaatgagtgtgtcaaagcctttagtgggcagtcaacacttattcaccatcaggcaatccgtagtgtagggaaacttgactaacgtaatgattctcac

SEQ ID NO: 32888 - DNA, 140 bp, Homo sapiens
  chr19:54081058-54081198
  hypo
atgtgggaagagctttagtcacggccatcagcttacacaacatcagaaaacgcacagtggggcgaaatcctacgaatgtaaggagtgcgggaaggcatgtaaccacctaaaccatctccgagaacatcagaggatccaca

SEQ ID NO: 32889 - DNA, 249 bp, Homo sapiens
  chr19:54109839-54110088
  hypo
ggccaagaagcagatgaagatcgaggtcacagtgcccaaggggatggagcggtgagggtggaggcggtgagggtggagggcttcttctcctgcgggacaggtatatgcaccgggcggtgagggtggagggcttcttctcctgcgggacaggtatatgcaccgggcggtgagggtggagggcttcttctcctgcaggacaggtatacgcactgggccaggaaaatgcacggaagtgaaggtacaaaaccc

SEQ ID NO: 32890 - DNA, 27 bp, Homo sapiens
  chr19:54115041-54115068
  hypo
atttgaggtgaactggctgggcgcagt

SEQ ID NO: 32891 - DNA, 141 bp, Homo sapiens
  chr19:54120020-54120161
  hypo
aaaatagaggccgagaatggcccttgctgccaccaacatggagactttgtaccgtgtcccgttcttagcgcttgaatgtcccaacctgaagctgaagaagccgccctggctgcacatgccgttggccatgactatgtatgc

SEQ ID NO: 32892 - DNA, 234 bp, Homo sapiens
  chr19:54135320-54135554
  hypo
atccctggacctgaacccaggcgcacatctggattagaagatgccaggctcagaggatcttcgtaaaggtaagccagaaaaaatgagaaccgaagcaaagacacgtgaagaagtggaaagcagctggcggcgggaaaaggcagagggaccaggcggccgaagctggtgcttcgtccacgtgggtggcagggacttcccacagaggctgtcatcgtttttgttgttgttgttttg

SEQ ID NO: 32893 - DNA, 30 bp, Homo sapiens
  chr19:54151509-54151539
  hypo
tcttccggtgccaacgcggcaggtcagtat

SEQ ID NO: 32894 - DNA, 46 bp, Homo sapiens
  chr19:54153202-54153248
  hypo
acactctagcctggtcaacaagagcgggaaactccatatcaaaaaa

SEQ ID NO: 32895 - DNA, 34 bp, Homo sapiens
  chr19:54161841-54161875
  hypo
gtgcctctccatggctgggtgcggtggctcacgc

SEQ ID NO: 32896 - DNA, 31 bp, Homo sapiens; identical to SEQ ID NO: 12608
  chr19:54206967-54206998
  hypo

SEQ ID NO: 32897 - DNA, 23 bp, Homo sapiens
  chr19:54224258-54224281
  hypo
ccgtcaaaaagaaacaaaaacaa

SEQ ID NO: 32898 - DNA, 15 bp, Homo sapiens
  chr19:54271403-54271418
  hypo
tttgttttgttttgt

SEQ ID NO: 32899 - DNA, 241 bp, Homo sapiens
  chr19:54271717-54271958
  hypo
caggagcaggtttagctgacaaccgtgcgatctcctcgtgggctcttccttggcggcccctatggcggagctaacctgcctcttgggcatcctggtggcggagagggcgcgtgccggctgtctgcgggccgcggctgccgagagccttggcgaagctgggctgcctggcggctgcggctcctcccgccgcccgagctgctgagacccacagcggggtcggtgggagaaccgaatggaaccc

SEQ ID NO: 32900 - DNA, 407 bp, Homo sapiens
  chr19:54313978-54314385
  hypo
ggcaccagggtccctgaggatcgtggaaagaaggcttgagctcatcgaagccgtcgatgatgaaaaggaggcgctcgggaactcggatgagctcctggagaggcgcgctgggctcaggccagcagctgaagatgaggtcttgcatgctgcattccgtggcactctggttcatctccctgcagttgatgtagaagagataatcaaatctgccttggaagagcttcccgtccgcccagtccagcatcaccttgtgtgccagcatggacttgcctatccctgccgcgccttgcatgaccacggtgcgcggtggctcggggcgctcctcgtctggctcaaagagggtctctatcttgatggggctagcctggtgtcccacggtcctcgcgtgtccccggcctgtgtccaga

SEQ ID NO: 32901 - DNA, 30 bp, Homo sapiens; identical to SEQ ID NO: 12609
  chr19:54372591-54372621
  hypo

SEQ ID NO: 32902 - DNA, 30 bp, Homo sapiens; identical to SEQ ID NO: 12610
  chr19:54373028-54373058
  hypo

SEQ ID NO: 32903 - DNA, 30 bp, Homo sapiens; identical to SEQ ID NO: 12611
  chr19:54382650-54382680
  hypo

SEQ ID NO: 32904 - DNA, 30 bp, Homo sapiens; identical to SEQ ID NO: 12613
  chr19:54411653-54411683
  hypo

SEQ ID NO: 32905 - DNA, 31 bp, Homo sapiens; identical to SEQ ID NO: 12614
  chr19:54415929-54415960
  hypo

SEQ ID NO: 32906 - DNA, 30 bp, Homo sapiens
  chr19:55606063-55606093
  hypo
ggaggctgtggggacgtttggcttcgctgg

SEQ ID NO: 32907 - DNA, 41 bp, Homo sapiens
  chr19:55609522-55609563
  hypo
gtgctttccaggggcacgtactcccccgagctcctgacagc

SEQ ID NO: 32908 - DNA, 105 bp, Homo sapiens
  chr19:55740667-55740772
  hypo
tcctgttagctgagcgagcccccaggtgacctccaagccaactgccaccccagtgaggacgctgtcctcatggcccggtccacacgctccggtttcccagcgccg

SEQ ID NO: 32909 - DNA, 15 bp, Homo sapiens
  chr19:55775353-55775368
  hypo
tgagatggagtctca

SEQ ID NO: 32910 - DNA, 30 bp, Homo sapiens
  chr19:55798635-55798665
  hypo
ctccacgacgtctacgagaacaagaaatat

SEQ ID NO: 32911 - DNA, 30 bp, Homo sapiens
  chr19:55799280-55799310
  hypo
gaggggacagccctcgtgttcccccccggc

SEQ ID NO: 32912 - DNA, 30 bp, Homo sapiens
  chr19:55824448-55824478
  hypo
gctaccgtgacagacgcggagcccggcctg

SEQ ID NO: 32913 - DNA, 16 bp, Homo sapiens
  chr19:55838910-55838926
  hypo
gccaaaaagttaaatt

SEQ ID NO: 32914 - DNA, 94 bp, Homo sapiens
  chr19:55848033-55848127
  hypo
tgcccagccattgtatgtgtttcaaaacttcgtgtcaatggcattgtagacttctgcaactacgggttgtcccgggtgatatatgggacactgg

SEQ ID NO: 32915 - DNA, 30 bp, Homo sapiens
  chr19:55853653-55853683
  hypo
tggaggctgcgtaccgggccctgacgctgg

SEQ ID NO: 32916 - DNA, 37 bp, Homo sapiens
  chr19:55858738-55858775
  hypo
cttctccccacccaagcgcctacggctggtggtcagc

SEQ ID NO: 32917 - DNA, 30 bp, Homo sapiens; identical to SEQ ID NO: 12628
  chr19:55866330-55866360
  hypo

SEQ ID NO: 32918 - DNA, 405 bp, Homo sapiens
  chr19:55872207-55872612
  hypo
gggttgatcttaccaggcaagcggatttgggtgtgagttctgtcggggcgggggtctgagtgggacctgcaggagcaataccgtgggactttggtggcatctgggctggggtctcccaccttctcccacccacccaccggcaacaagaccccacgcccacttcttttctgcaggtttcttcctgacgtcagcatgctccagctgcgaccagatgaggggcacagagtcgcccacggcctgagacttgaaactgcgcttgagcgcctggagtgggtgaggaagggacggttagacaggggcagccccttgggcccacaccaccccgccggctcaccttggccttcctctgtctctgagcagccaccgtcttatgcggaaagttgcgctcagcaaccctgactggga

SEQ ID NO: 32919 - DNA, 30 bp, Homo sapiens
  chr19:55903269-55903299
  hypo
ctccaggtctgccccgccgtcctgtggggc

SEQ ID NO: 32920 - DNA, 213 bp, Homo sapiens
  chr19:55912228-55912441
  hypo
gatcagatgattcaaggggaccgaaccttggcccagtccagaaccagacagacgaggcgagcctcatgccagactgctggcacctggccgtcctgagcaggaacaccactgccacaccaacgtggccattattctagagggagaagtatagggcagtgccgctcaggccaccaggagcagctccaggtcctcgccccattttagattggaaat

SEQ ID NO: 32921 - DNA, 418 bp, Homo sapiens
  chr19:55986209-55986627
  hypo
ttgtaatgcctctgcgtgggcaggtaaatgaggggggctgagctgagggcccctttcactactgcagagaccaaaatggcccgaggcaagggggacggaagtgggatccgcacctctgggctttcctagcctggcagccagctgggcagtgcattcccatccacgtctccaccctgcatggcagccgctttgtgtggttaatgctgacgtgaaaggaatgttgggctgagctggatgccaagggtttttacacgcacgaatgcacggagacatcagcaccaagaccctgtaaggtaggggtgggtccacaccaccgcagatcagccctgagttccagcctgcttgtggacttgggaaacggtgtgggaggctggaaaaatccactcattcaacaaacaagtaccgtctgcttctccat

SEQ ID NO: 32922 - DNA, 134 bp, Homo sapiens
  chr19:55993944-55994078
  hypo
ccttcaagggctcctccgggctgcgctaccacctgcgggaccacacgggcgagcggccctaccagtgtggcgagtgcggcaaggccttcaagcgctcctccctgctggccatccaccagcgggtgcacacgggc

SEQ ID NO: 32923 - DNA, 30 bp, Homo sapiens
  chr19:55998066-55998096
  hypo
gggcccgggtcacccgcctgtctgtctctc

SEQ ID NO: 32924 - DNA, 39 bp, Homo sapiens
  chr19:56115322-56115361
  hypo
ggggaagaacaggaggaactgcgtgagagtggggcaagg

SEQ ID NO: 32925 - DNA, 30 bp, Homo sapiens
  chr19:56128012-56128042
  hypo
cccaccagggcggccggcccttccgctgct

SEQ ID NO: 32926 - DNA, 30 bp, Homo sapiens
  chr19:56164027-56164057
  hypo
cctggacgacgagacgctcaagaaggtgca

SEQ ID NO: 32927 - DNA, 30 bp, Homo sapiens
  chr19:56170602-56170632
  hypo
agcgcagccacagccgctctcggagccggg

SEQ ID NO: 32928 - DNA, 46 bp, Homo sapiens
  chr19:56176630-56176676
  hypo
atgcacggcagttctacgacacagggattggcgctgtcctaagtgc

SEQ ID NO: 32929 - DNA, 79 bp, Homo sapiens
  chr19:56176925-56177004
  hypo
aagtgccctccatgcacggcagttctacgacacagggattggcaggttacaactgagagtccaacgctggcccactgcc

SEQ ID NO: 32930 - DNA, 30 bp, Homo sapiens
  chr19:56177778-56177808
  hypo
ggaactcaagactccgagaagattcctttg

SEQ ID NO: 32931 - DNA, 150 bp, Homo sapiens
  chr19:56179001-56179151
  hypo
agatcagagcagctaatgctgcggatgctgttctgagacttcccgggcagccgcggctgctcatcgtgtcgtgccacccctgtgagggcagttgcacccctgcagtggcacctgcagttctgacagggcgtgaagggaagggactgagct

SEQ ID NO: 32932 - DNA, 31 bp, Homo sapiens
  chr19:56179584-56179615
  hypo
ctttgtgcctttggagcgttctggaggatgt

SEQ ID NO: 32933 - DNA, 273 bp, Homo sapiens
  chr19:56199238-56199511
  hypo
cggtgcaggtggggccgccagacagctgcctgctgcggctccgggcaaggggagccagggcctgctcgtcagggagaggcctgggcctggggagtgggttgggtggggacacaagtacaggacacaggtgcaaggcggcgtcttggagctggagcagacagaacttgctgaccagtgcacagtggttgggagggcggggcaggagaggcagggtccgccctggggctttggaggctggggcaatggccctgtgctcggcgggcctagggcctg

SEQ ID NO: 32934 - DNA, 30 bp, Homo sapiens
  chr19:56199715-56199745
  hypo
gaaccaagggctcctcgctagcccactccc

SEQ ID NO: 32935 - DNA, 308 bp, Homo sapiens
  chr19:56201637-56201945
  hypo
cagggaggagggtgcagggctcgccccatctgtcacactttgtcgggcacctccttggtgccaggccgtgtgctgcacacccagggcctgttggtgagcgaggaggcatggtcccgccctcgcgaacactgtttctgtggcgtccccatgctctgcagctgagtagcaaaccctcccacaaccttgtgcttccaggtcacgcttcagtacttccctgtgacgggcccgctggctggttgtttcgtgtcatggctgaggtcactcatgcctctgggcccggggtgtccgcactggccttgccctccagc

SEQ ID NO: 32936 - DNA, 163 bp, Homo sapiens
  chr19:56227937-56228100
  hypo
tgatgagcaactgaggcgtgggaaaggaactcaggtctagctacggattccgcattctgctgcacccctcagtgagcaccgcgttgctttgataatgggtggatccaggtgcacgcttcagaaatctccgaacgtgcttcccgcagaccaacttacatcagcc

SEQ ID NO: 32937 - DNA, 422 bp, Homo sapiens
  chr19:56538795-56539217
  hypo
gctccctgagtccttcctgatcgtcaccgtcagagacgtgggcacagagaagctcaagtcagaggtcgtgtctccccgttacctgttagttagaggaatctccggggaacaaagaatccacttgctccttgagcgcgggattggtgagcatcagaagacacaagggttgcgtgcgatcatgaacaaccgtgagctgctcgaccagtgccaggtgcccgccgtgggctctctcatctgcgtggccctgcagctgcaggacgtggtgggggagagcgtcgcccccttcaaccaaacgctcacaggcctgcacgccgcttttgtgtttcatcagctcacccctcgaggcgtggtccggcgctgtctcaatctggaggaaagagttgtcctgaagcgcttctgccgtatggctgtggagggagtgt

SEQ ID NO: 32938 - DNA, 271 bp, Homo sapiens
  chr19:56564932-56565203
  hypo
tgctgaaccttctcccgctgttccactttcctcgagagaggcagactctctctattccccgcctcttgcaggttggtaaagtgtcatctcaccgccgcgtgctgtgagagtctgtcctgtgtgatctcgaggagcagacacctgaagagcctggatctcacggacaatgccctgggtgacggtggggttgctgcgctgtgcgagggactgaagcaaaagaacagtgttctggcgagactcgggtaacttcctggggcgcctctttgcgggc

SEQ ID NO: 32939 - DNA, 30 bp, Homo sapiens
  chr19:56599652-56599682
  hypo
caggagcccggccccgtgcccgaagccctt

SEQ ID NO: 32940 - DNA, 35 bp, Homo sapiens
  chr19:56615754-56615789
  hypo
accgggagggtccctacgcacgccgccgacccgtg

SEQ ID NO: 32941 - DNA, 514 bp, Homo sapiens
  chr19:56617296-56617810
  hypo
ccacggcagtcaccgcgcattcccccctccgcgcccacggcagtcaccgcgcattcccccctccgcgcccacggcagtcaccgcgcattccgcattcccccctccgcgcccacggcagtcaccgcgcattccgccctccgcgcccacggcagtcaccgcgcattcccccttccgcgcccacggcagtcaccgcgcattcccccgccgcgccctgcagcctctgaactcctttccgtccctctggacttgctgccgtgtgctctgcacaggagagggacagcatctgttcctgcgtgtctgactcttccacacagcatggtgctgcggcgtgccagcgtgtcgctcctctctcgggctgaaccccactccactgtacggcggccacagtggtccatgcacccacccatcgctggaggacaactgtgagctgcttccacagcgggcattgtgtatactccagcttcaacgccgcgtccatccatttatttctgtggacgttcgcgttcatctctct

SEQ ID NO: 32942 - DNA, 229 bp, Homo sapiens
  chr19:56658487-56658716
  hypo
agcgcgctgcccgccgacacgcaggcctgggtgtgcagccggcagccgcagagcggggaggaggcggtggccctgctggaggagctctgggtgagcctggcgggactgcaagcggggaagggagaggggaaggtgccagggaagccaccaggaagcccagggaggagcaccactgaacccctgaaaaccagtgtgactcgcggtggggaggctgcggtacaggctgcgg

SEQ ID NO: 32943 - DNA, 146 bp, Homo sapiens
  chr19:56688271-56688417
  hypo
ttaattgcttgcacacgtccaaactcctcaagatgtgtacattaaatgtgcgccatttttgtatctcgatgatgcctccataaagctaaaaaataaattcctctgtccttatcggaaatgcacctggcccccgcttcggaaaatga

SEQ ID NO: 32944 - DNA, 130 bp, Homo sapiens; identical to SEQ ID NO: 12634
  chr19:56728658-56728788
  hypo

SEQ ID NO: 32945 - DNA, 31 bp, Homo sapiens
  chr19:56733401-56733432
  hypo
ggtgactgactgggctcgcagggcctgggga

SEQ ID NO: 32946 - DNA, 217 bp, Homo sapiens
  chr19:56806988-56807205
  hypo
aaacaaacagaagagatgggaatggcgtggcggcttccttcccagcctaaccttgctgcggtgcaaatcctgcaagtcactgcacgtccctccaacccacacgaagcagcctctgactgttctgcgctgttcactgtggcatgtcctgactactcagcacgacccacccagggctccgctctcctgtgctcccatcgctctgtcttctgatgttgtg

SEQ ID NO: 32947 - DNA, 30 bp, Homo sapiens
  chr19:56807607-56807637
  hypo
aggagtggcttggggcgagcctgctggacc

SEQ ID NO: 32948 - DNA, 541 bp, Homo sapiens; identical to SEQ ID NO: 12636
  chr19:56879474-56880015
  hypo

SEQ ID NO: 32949 - DNA, 167 bp, Homo sapiens; identical to SEQ ID NO: 12637
  chr19:56904536-56904703
  hypo

SEQ ID NO: 32950 - DNA, 577 bp, Homo sapiens; identical to SEQ ID NO: 12638
  chr19:56904723-56905300
  hypo

SEQ ID NO: 32951 - DNA, 809 bp, Homo sapiens; identical to SEQ ID NO: 12639
  chr19:56915126-56915935
  hypo

SEQ ID NO: 32952 - DNA, 43 bp, Homo sapiens; identical to SEQ ID NO: 12640
  chr19:56987611-56987654
  hypo

SEQ ID NO: 32953 - DNA, 172 bp, Homo sapiens; identical to SEQ ID NO: 12641
  chr19:56988111-56988283
  hypo

SEQ ID NO: 32954 - DNA, 122 bp, Homo sapiens; identical to SEQ ID NO: 12642
  chr19:56988383-56988505
  hypo

SEQ ID NO: 32955 - DNA, 30 bp, Homo sapiens
  chr19:57133366-57133396
  hypo
ggggagaagccctacgcgtgcggggactgc

SEQ ID NO: 32956 - DNA, 41 bp, Homo sapiens
  chr19:57134084-57134125
  hypo
gcaacacgaacctgacgcgccacctgcggattcacacctga

SEQ ID NO: 32957 - DNA, 1406 bp, Homo sapiens
  chr19:57175021-57176427
  hypo
gagcccaggtgttgagtcaggcgtgggagctgggcaaaggcgtcccgaactgtctgcatgcgtcctctggtgtcggatgagcgcggaggagaagctgaaggccttcccgcagccgctgcactcgtagggcttctccccggtgtgcacgatgtggtgctggatcaggtaggagcggttgctgaaggccttgccgcactcggggcaggtgtagggccgctcgcccgtgtgcgtgcgctggtgcagggcgagcgaggagccctggctgaaagctttgccgcactcgccgcacttgtagggccgctctccggtgtggatcttctggtgctctataagcgaggacacgtggctgaaggcggccccgcattgcaggcacctgtagggccgctcaccggtgtgcacgaggcggtgctggaggaggtgggagcggttgctgaagcgcttgccgcagtcgtggcaggggtaaggccgctctccggtgtgcgtgcgctggtgctgcgtcaggtgcgacacctgggtgaaggccttggcgcactggccgcacgcgtagggcttctcgcctgtgtggatgcgccggtgctcggccagagaggcgctctggctgaagagcgcgccgcagtcctggcacgtgtagggcttctcgcccgtgtgcacgcgccggtgctgggtcaggtgcgcgatctgcgcgaaggccttggcgcactggccgcagcggtagggcttctcctccgtgtggatgcgctggtggcggatgagcgctgaggagaagcggaaggccttggcgcacgcggagcactcgtagggcttctcaccggtgtggatgcgctggtgctctatcagggacgagcggttgcggaacgccttggcgcactgggcgcacgcgtagggccgctcgcccgtgtgcacgcgccggtgctgggtcaggtgcgtgacgcgcgtgaaggccttgccgcagtcggcgcagcggtgcggcttctcgcccgtgtgcgtgcgccagtgggacgccaggtacgagccctggctgaaggccttgccgcactcgtggcaggcgtagggcttctcgcccgtgtgcgtgcgctggtgcagggtcaggtgcacgctctggctgaaggccttgccgcactcggggcacgcaaatggcttctccccggtgtggattctctggtgtaagatgaacgctgaacagtagctgaaggccttcccgcagtccccgcatttccacggcttcttggggcctccacctctctcccgctggcggctgtcaggatgcctctccttcgggctctccccaggcgcgctgcacctccgggaactgctgtcgtcggggacactggcttgggtagcagcagggctcgatatggttcttgggattcggctgaattcatcgcgttcctgcatgctgtccccag

SEQ ID NO: 32958 - DNA, 31 bp, Homo sapiens
  chr19:57229771-57229802
  hypo
gcccagccattgaccacgacctgtccatggt

SEQ ID NO: 32959 - DNA, 72 bp, Homo sapiens
  chr19:57491445-57491517
  hypo
cccaggtggaggccctggtcccgcctttacgaatgggtagaaagggcttccgtctactgagacaggggtctt

SEQ ID NO: 32960 - DNA, 17 bp, Homo sapiens
  chr19:57509118-57509135
  hypo
tttttttttttttttga

SEQ ID NO: 32961 - DNA, 17 bp, Homo sapiens
  chr19:57509374-57509391
  hypo
tccccaggtgctgggat

SEQ ID NO: 32962 - DNA, 77 bp, Homo sapiens
  chr19:57604470-57604547
  hypo
aaaatcacacagtgtgtactccgttgagcccaggcgccttgagctcacaatcatgtttgtgaaatcgatgcatgtgg

SEQ ID NO: 32963 - DNA, 31 bp, Homo sapiens
  chr19:57617000-57617031
  hypo
taatgttggcggggggcgggggatgctgggg

SEQ ID NO: 32964 - DNA, 38 bp, Homo sapiens
  chr19:57689866-57689904
  hypo
acatggtgaggtccatcgctcttgtcatcaggataagc

SEQ ID NO: 32965 - DNA, 459 bp, Homo sapiens; identical to SEQ ID NO: 12657
  chr19:57831527-57831986
  hypo

SEQ ID NO: 32966 - DNA, 329 bp, Homo sapiens; identical to SEQ ID NO: 12658
  chr19:57832024-57832353
  hypo

SEQ ID NO: 32967 - DNA, 12 bp, Homo sapiens
  chr19:58038572-58038584
  hypo
cgcggcggactg

SEQ ID NO: 32968 - DNA, 369 bp, Homo sapiens; identical to SEQ ID NO: 12668
  chr19:58038923-58039292
  hypo

SEQ ID NO: 32969 - DNA, 31 bp, Homo sapiens
  chr19:58054994-58055025
  hypo
aacatgaacatgaaaacgttttacctctgcc

SEQ ID NO: 32970 - DNA, 814 bp, Homo sapiens; identical to SEQ ID NO: 12669
  chr19:58070514-58071328
  hypo

SEQ ID NO: 32971 - DNA, 729 bp, Homo sapiens; identical to SEQ ID NO: 12672
  chr19:58125364-58126093
  hypo

SEQ ID NO: 32972 - DNA, 413 bp, Homo sapiens; identical to SEQ ID NO: 12679
  chr19:58238325-58238738
  hypo

SEQ ID NO: 32973 - DNA, 222 bp, Homo sapiens; identical to SEQ ID NO: 12680
  chr19:58238987-58239209
  hypo

SEQ ID NO: 32974 - DNA, 40 bp, Homo sapiens
  chr19:58316855-58316895
  hypo
aatttttttttttttttgagacggagtctcgctctgtcgc

SEQ ID NO: 32975 - DNA, 246 bp, Homo sapiens; identical to SEQ ID NO: 12685
  chr19:58385531-58385777
  hypo

SEQ ID NO: 32976 - DNA, 31 bp, Homo sapiens
  chr19:58416014-58416045
  hypo
acggattttgtaatctcgtaactttccaagc

SEQ ID NO: 32977 - DNA, 34 bp, Homo sapiens
  chr19:58472251-58472285
  hypo
aaaaccaagccacaggccaggcgcggtggctcac

SEQ ID NO: 32978 - DNA, 22 bp, Homo sapiens
  chr19:58548346-58548368
  hypo
cggccacaaaaggttattttaa

SEQ ID NO: 32979 - DNA, 162 bp, Homo sapiens
  chr19:58551436-58551598
  hypo
cctgaaccctgcttcagcagtcgtcctctgtgcactctgtgcacacagccccggggggcttggggagcagagggctcacagtgctcgggcctccctagttagtcagtgctgcagtgtgtgtcctcgtgggcttctggaggcgcacaggggtgtggagtatga

SEQ ID NO: 32980 - DNA, 291 bp, Homo sapiens
  chr19:58556343-58556634
  hypo
gaacaagaagctggaggaaggcggccctgtgtacagcgcccccgcagagatggtggtgaagtcccgggggcagagagggtgctgggcgagctgaggcactactaccatggcttccgcctgctacggatccacaccaagatcgcagcacgcatgctctggcgcatcctcaactgccacaccctgacccgccaggcgcgcaggcagttgctccggttctgtgccgacctcttccgcctggtgccgttcctcctgttcgtggtggtgccgttcgtggagtttctgctgcctgtt

SEQ ID NO: 32981 - DNA, 319 bp, Homo sapiens
  chr19:58557756-58558075
  hypo
aaaaagggtgcagcagataatcgggcagatcaacggcttgatctcgcagctggagatggaccagtgggccagcaagctggccccggccaagggcgtgcccatgggggagaacgtcatcagtgttgccgagctcatcaacgccatgaagcaagtcaagcacattcccaaaagcaagctcaccagcctggccgcagcactgaatgaaaataaggatggcaaggtcaacgtcgaccacctcatcaaggtgattgagctggtggacaaagaagatgttcacgtctccaccagtcaggtggccgagattgtagcaacactggaa

SEQ ID NO: 32982 - DNA, 228 bp, Homo sapiens
  chr19:58564763-58564991
  hypo
ctacaggtgacccatctccctcgccctccacagggtcccgggcccgcttgcctctgaagccgagtatctgggacgagcctgaggaccttctcgcagggccctcctcagacctgcgggcagaagggactgtgatctcgagccccaagggtccaagtgctcagagaatcagtccccgaaggagaaacaggaacactgaccagagcggccgccaccagccatccctcaagc

SEQ ID NO: 32983 - DNA, 36 bp, Homo sapiens
  chr19:58593732-58593768
  hypo
tgagccaccgcgcccggccaatctgtgcactatttt

SEQ ID NO: 32984 - DNA, 87 bp, Homo sapiens
  chr19:58598367-58598454
  hypo
ttcagcttctgaaacattagtcgtggctgagacctcccacctgccctagagaagggaggacccgccgcagccccacagccacaggag

SEQ ID NO: 32985 - DNA, 13 bp, Homo sapiens
  chr19:58609346-58609359
  hypo
cccggcccctgcc

SEQ ID NO: 32986 - DNA, 53 bp, Homo sapiens; identical to SEQ ID NO: 12690
  chr19:58609472-58609525
  hypo

SEQ ID NO: 32987 - DNA, 318 bp, Homo sapiens; identical to SEQ ID NO: 12691
  chr19:58609712-58610030
  hypo

SEQ ID NO: 32988 - DNA, 29 bp, Homo sapiens
  chr19:58623721-58623750
  hypo
aaaaacatactcaaggctgggcgtggtgg

SEQ ID NO: 32989 - DNA, 591 bp, Homo sapiens; identical to SEQ ID NO: 12692
  chr19:58661716-58662307
  hypo

SEQ ID NO: 32990 - DNA, 542 bp, Homo sapiens; identical to SEQ ID NO: 12693
  chr19:58665952-58666494
  hypo

SEQ ID NO: 32991 - DNA, 238 bp, Homo sapiens; identical to SEQ ID NO: 12694
  chr19:58666550-58666788
  hypo

SEQ ID NO: 32992 - DNA, 43 bp, Homo sapiens; identical to SEQ ID NO: 12695
  chr19:58694818-58694861
  hypo

SEQ ID NO: 32993 - DNA, 418 bp, Homo sapiens
  chr19:58830637-58831055
  hypo
aaaggagaccctgtacgtgcgaagagtgtggcaaggcctttggacagagaagtcaccttgttcagcacaccagtgagaagctgtatgcatgccaggaatgtgggtgtaccttcagcaacaattcatctctagtcaagcactggcacgtccacacaggcgagaagccctacatgtgtggccactgtggcaagtgcttccgagagagctcatcccttgccaagcaccagcgtgtgcacacaggtgagaagccatacgtgtgtggtgagtgtggacgcaccttcagcgagagcacacaccttgtacagcactggtgattccacaccggggaaaagccatttgcctgccaagagcagcaaagcctttgctgacttctcggccctccttgcatgccacggaacctacacgggtgagaggccct

SEQ ID NO: 32994 - DNA, 30 bp, Homo sapiens
  chr19:58831297-58831327
  hypo
gagaagccgtacatacgtggtgagtaaagg

SEQ ID NO: 32995 - DNA, 166 bp, Homo sapiens; identical to SEQ ID NO: 12699
  chr19:58858590-58858756
  hypo

SEQ ID NO: 32996 - DNA, 27 bp, Homo sapiens
  chr19:58858901-58858928
  hypo
cgaaggtgacgtcggggatgggtccct

SEQ ID NO: 32997 - DNA, 30 bp, Homo sapiens; identical to SEQ ID NO: 12701
  chr19:58859150-58859180
  hypo

SEQ ID NO: 32998 - DNA, 103 bp, Homo sapiens
  chr19:58872645-58872748
  hypo
tctgtaagggcaacacggggatccttcgtgatggaaatattctgcatctcagttgtgatattgtactctagtttttctttctcttctctttttttgagacaga

SEQ ID NO: 32999 - DNA, 30 bp, Homo sapiens; identical to SEQ ID NO: 12702
  chr19:58874307-58874337
  hypo

SEQ ID NO: 33000 - DNA, 121 bp, Homo sapiens
  chr19:58874822-58874943
  hypo
acgagactccgtctcaaaaaaaaaaaaaaaaaattgagtcgggatctcagaagctaagcagggtcgggcctggttagtacttgggagaccgtctgggaacaccgagtgctgttggctaaaa

SEQ ID NO: 33001 - DNA, 119 bp, Homo sapiens
  chr19:58878555-58878674
  hypo
ggaaccctttctgccgcgactaccgagctgccagggccgggacaggcagaagcctgccccgaggtctcacctctggagggttacgagctgtgccaggccggctacggtagagggtgtgc

SEQ ID NO: 33002 - DNA, 33 bp, Homo sapiens
  chr19:58915037-58915070
  hypo
ttacaatgttaacaaatgggccgggtgcggtag

SEQ ID NO: 33003 - DNA, 32 bp, Homo sapiens
  chr19:58915309-58915341
  hypo
agagcaactccgtctcaaaaaaaaaaaaaaaa

SEQ ID NO: 33004 - DNA, 167 bp, Homo sapiens; identical to SEQ ID NO: 12705
  chr19:58951233-58951400
  hypo

SEQ ID NO: 33005 - DNA, 554 bp, Homo sapiens; identical to SEQ ID NO: 12706
  chr19:58951525-58952079
  hypo

SEQ ID NO: 33006 - DNA, 32 bp, Homo sapiens
  chr19:58964229-58964261
  hypo
tgtgggaaagaaattgcgggagcgctgagatc

SEQ ID NO: 33007 - DNA, 30 bp, Homo sapiens
  chr19:59028749-59028779
  hypo
accctgcgccacaacgagcgaaccgctgta

SEQ ID NO: 33008 - DNA, 30 bp, Homo sapiens
  chr20:276873-276903
  hypo
ctggaaagtgcaaacggcccaagtcagtgg

SEQ ID NO: 33009 - DNA, 23 bp, Homo sapiens
  chr20:338667-338690
  hypo
gcgaaactccatctcaaaaaaat

SEQ ID NO: 33010 - DNA, 31 bp, Homo sapiens
  chr20:371969-372000
  hypo
tatgcgcggctgcccccgcacaagcatgtgg

SEQ ID NO: 33011 - DNA, 30 bp, Homo sapiens
  chr20:377335-377365
  hypo
accaccctactacacgctcagctgccaaca

SEQ ID NO: 33012 - DNA, 30 bp, Homo sapiens
  chr20:398167-398197
  hypo
aggctgtgggtgagcgtggaggatgctcag

SEQ ID NO: 33013 - DNA, 30 bp, Homo sapiens
  chr20:401115-401145
  hypo
ccaccagccctggcccgggccctgccctgc

SEQ ID NO: 33014 - DNA, 434 bp, Homo sapiens
  chr20:401566-402000
  hypo
agaggagcctggtgctgaacacggagcccgccgagtgccccgtgtgctactcggtgctggcgcccggcgaggccgtggtgctgcgtgagtgtctgcacaccttctgcaggtgcggcccccagtcccacccccggcaatgcagcttaatcaaagccgccaattacgcagggctggacgtgggtggggccctgtgctctgatacctcattggacgcccgcgaaaacctacgaggtaggctccgtctccccatgttgcggacgaggaacctgagggaaagagaggcccagcgccttaccccaggcccacggctcatgagagaagcagcctagacgtgagcgcaggcgtggggggagactcccttcccctctacctttcgccgcccgggctcctgcagccacgctgctctcagcctcgctgtgggcatctgccagttt

SEQ ID NO: 33015 - DNA, 117 bp, Homo sapiens
  chr20:413053-413170
  hypo
ccatgctgcagtggtgcggaggagcagggagctgtgtagggccaaccccggttcctgcctcagctccacccgccttgcacctgcaagtgaaaggtcttaagacgagcaggcccaggg

SEQ ID NO: 33016 - DNA, 150 bp, Homo sapiens
  chr20:488506-488656
  hypo
cagaataccgtcatgcgttatttaatgacattctgagaaatgtgttaaacatcagagtgtttacacaaacctacatggtatggcatattacatacctagggtatggcctacggctcctaggatacaaatgtgtaccgtaataaatacttt

SEQ ID NO: 33017 - DNA, 30 bp, Homo sapiens
  chr20:688395-688425
  hypo
ttcattattatgatcgggcccataaatctt

SEQ ID NO: 33018 - DNA, 350 bp, Homo sapiens; identical to SEQ ID NO: 12718
  chr20:708551-708901
  hypo

SEQ ID NO: 33019 - DNA, 472 bp, Homo sapiens; identical to SEQ ID NO: 12719
  chr20:708944-709416
  hypo

SEQ ID NO: 33020 - DNA, 81 bp, Homo sapiens
  chr20:926438-926519
  hypo
gcaaagaattaggttgtgttccgtccattcactcacggctctgctcccacgcatggctgcgctatgcacactgccctgcag

SEQ ID NO: 33021 - DNA, 37 bp, Homo sapiens
  chr20:1276609-1276646
  hypo
cgtagagtagaagactcggtgccggcagtcaggaggc

SEQ ID NO: 33022 - DNA, 30 bp, Homo sapiens
  chr20:1286615-1286645
  hypo
ccttgcactccatccgcaggatcagctgcc

SEQ ID NO: 33023 - DNA, 31 bp, Homo sapiens
  chr20:1323451-1323482
  hypo
gcaggacacccaaacacgtatgcaatgcgta

SEQ ID NO: 33024 - DNA, 30 bp, Homo sapiens
  chr20:1425545-1425575
  hypo
ctggggcttgtctcccgctgtcacccacag

SEQ ID NO: 33025 - DNA, 30 bp, Homo sapiens
  chr20:1426332-1426362
  hypo
gcaccagcctcccgccgtctgcaagccgaa

SEQ ID NO: 33026 - DNA, 193 bp, Homo sapiens
  chr20:1435436-1435629
  hypo
ccaaatcttggtttcacgttaaagggtgagataaactacactcgtgttccgcacagaagaccaagtaagcaaatgaaaaaaagaaaaaaatcagtcactaccggggtgaagaaggtggcattcccagttctggaatctcagtcctgtgggcacagacaatgacccttatactcactctcggtttactggtctc

SEQ ID NO: 33027 - DNA, 244 bp, Homo sapiens; identical to SEQ ID NO: 12723
  chr20:1784061-1784305
  hypo

SEQ ID NO: 33028 - DNA, 31 bp, Homo sapiens
  chr20:2143498-2143529
  hypo
ccaccacccattcacccggcccactggctct

SEQ ID NO: 33029 - DNA, 669 bp, Homo sapiens; identical to SEQ ID NO: 12725
  chr20:2187753-2188422
  hypo

SEQ ID NO: 33030 - DNA, 305 bp, Homo sapiens
  chr20:2308757-2309062
  hypo
gcctccaggggtgttccagtgcggccccgcttcggtcattggtgttcgagagggtgatgtgcagctgaacttcgacatgccctttatcttcgcggaggttaatgccgaccgcatcacctggctgtacgacaacaccactggcaaacagtggaagaattccgtgaacagtcacaccattggcaggtacatcagcaccaaggcggtgggcagcaatgctcgcatggacgtcacggacaagtacaagtacccagaaggtaggagggacgctggcggggcagtgccgcgagaggttctattgtgggagg

SEQ ID NO: 33031 - DNA, 30 bp, Homo sapiens
  chr20:2321545-2321575
  hypo
agggactctccaaacgggatacaggagaga

SEQ ID NO: 33032 - DNA, 30 bp, Homo sapiens
  chr20:2444479-2444509
  hypo
gccagcagccctgccgatccctgggccccc

SEQ ID NO: 33033 - DNA, 30 bp, Homo sapiens; identical to SEQ ID NO: 12726
  chr20:2489270-2489300
  hypo

SEQ ID NO: 33034 - DNA, 28 bp, Homo sapiens
  chr20:2645502-2645530
  hypo
ctggacaacatagggagacctcgactct

SEQ ID NO: 33035 - DNA, 31 bp, Homo sapiens
  chr20:2751260-2751291
  hypo
ctccctctgcaatgcccggcagcaacactaa

SEQ ID NO: 33036 - DNA, 193 bp, Homo sapiens
  chr20:2820434-2820627
  hypo
tggagtcccccaagatgaccacgaacttgttgtgtagcagctgctggacttccgaggcctggaagtggaccatgtcgcttcgcagcgggcggcgcggctcctcgctcgacagacagaagaccatgccgccaccagcaacgacaggctgcagggagaggccactaagcagcgcgatggtggggactctgggcag

SEQ ID NO: 33037 - DNA, 179 bp, Homo sapiens
  chr20:2939674-2939853
  hypo
attgtatatggggggtcgggaagtcacaggagtttgcctcaaagtctttctcggagacggatgaggttttcactgtgattttcctggtcgtggtctatggatatagtacctgttagtgacatggatcttcttaacttctgatgtgtcttttcctccctagtgtacgcataccaattctc

SEQ ID NO: 33038 - DNA, 30 bp, Homo sapiens
  chr20:3019131-3019161
  hypo
gttctcagagctctcgaggaaagtggttgt

SEQ ID NO: 33039 - DNA, 16 bp, Homo sapiens
  chr20:3073375-3073391
  hypo
acgcagccagacaccc

SEQ ID NO: 33040 - DNA, 327 bp, Homo sapiens; identical to SEQ ID NO: 12737
  chr20:3073560-3073887
  hypo

SEQ ID NO: 33041 - DNA, 296 bp, Homo sapiens; identical to SEQ ID NO: 12739
  chr20:3154660-3154956
  hypo

SEQ ID NO: 33042 - DNA, 31 bp, Homo sapiens
  chr20:3175799-3175830
  hypo
ggggtggctagccttgcgtctggcacaggct

SEQ ID NO: 33043 - DNA, 30 bp, Homo sapiens
  chr20:3202213-3202243
  hypo
ccgggtgtggctggcgagggcgcgtggccc

SEQ ID NO: 33044 - DNA, 30 bp, Homo sapiens
  chr20:3204883-3204913
  hypo
ctcgaccccactcggcgtgatcgccacagt

SEQ ID NO: 33045 - DNA, 42 bp, Homo sapiens
  chr20:3208778-3208820
  hypo
ggcacccaccccaacccgcccattctccgcccctaggtggga

SEQ ID NO: 33046 - DNA, 941 bp, Homo sapiens; identical to SEQ ID NO: 12741
  chr20:3220009-3220950
  hypo

SEQ ID NO: 33047 - DNA, 299 bp, Homo sapiens; identical to SEQ ID NO: 12742
  chr20:3229180-3229479
  hypo

SEQ ID NO: 33048 - DNA, 187 bp, Homo sapiens; identical to SEQ ID NO: 12743
  chr20:3229526-3229713
  hypo

SEQ ID NO: 33049 - DNA, 437 bp, Homo sapiens; identical to SEQ ID NO: 12744
  chr20:3451348-3451785
  hypo

SEQ ID NO: 33050 - DNA, 30 bp, Homo sapiens; identical to SEQ ID NO: 12746
  chr20:3632574-3632604
  hypo

SEQ ID NO: 33051 - DNA, 128 bp, Homo sapiens; identical to SEQ ID NO: 12747
  chr20:3641419-3641547
  hypo

SEQ ID NO: 33052 - DNA, 113 bp, Homo sapiens; identical to SEQ ID NO: 12748
  chr20:3641773-3641886
  hypo

SEQ ID NO: 33053 - DNA, 278 bp, Homo sapiens; identical to SEQ ID NO: 12751
  chr20:4129523-4129801
  hypo

SEQ ID NO: 33054 - DNA, 96 bp, Homo sapiens; identical to SEQ ID NO: 12752
  chr20:4130006-4130102
  hypo

SEQ ID NO: 33055 - DNA, 30 bp, Homo sapiens
  chr20:4665554-4665584
  hypo
ttgtaaaatggcctcgctgcctagtgctca

SEQ ID NO: 33056 - DNA, 1285 bp, Homo sapiens; identical to SEQ ID NO: 12753
  chr20:4803136-4804421
  hypo

SEQ ID NO: 33057 - DNA, 106 bp, Homo sapiens
  chr20:4966923-4967029
  hypo
atagagagacccctttcgccacaaaaagaaaaaacaaaggttatgtggtgtggtatgaaacctttttatttttttgcccaagctggagtgcagtggcacgatctcg

SEQ ID NO: 33058 - DNA, 30 bp, Homo sapiens
  chr20:4990305-4990335
  hypo
caacaggggctgcccgctgatgagaggtga

SEQ ID NO: 33059 - DNA, 54 bp, Homo sapiens
  chr20:5072893-5072947
  hypo
gaagatcatcttgagtcgatgttcagaatgaggagtcctcgatcctgggccagc

SEQ ID NO: 33060 - DNA, 47 bp, Homo sapiens
  chr20:5178250-5178297
  hypo
accttgaagcagttctcggtgtgtagagtccacgtgacagtccccac

SEQ ID NO: 33061 - DNA, 790 bp, Homo sapiens; identical to SEQ ID NO: 12758
  chr20:5296191-5296981
  hypo

SEQ ID NO: 33062 - DNA, 42 bp, Homo sapiens; identical to SEQ ID NO: 12759
  chr20:5297005-5297047
  hypo

SEQ ID NO: 33063 - DNA, 193 bp, Homo sapiens; identical to SEQ ID NO: 12760
  chr20:5297225-5297418
  hypo

SEQ ID NO: 33064 - DNA, 168 bp, Homo sapiens; identical to SEQ ID NO: 12761
  chr20:5297672-5297840
  hypo

SEQ ID NO: 33065 - DNA, 30 bp, Homo sapiens
  chr20:5610256-5610286
  hypo
aggcgtgagccaccacgcctggcccatctt

SEQ ID NO: 33066 - DNA, 30 bp, Homo sapiens
  chr20:5610575-5610605
  hypo
cttagcaatacagttcggaagatagctcaa

SEQ ID NO: 33067 - DNA, 181 bp, Homo sapiens
  chr20:5734497-5734678
  hypo
ccaaatgggggagatccgttcggaacccccctccctctgcatgggagagcttttctcttttgcctattagactttcctctcttaaacacactccttgtgtgttagcgtctttgatttccttgtcatgagacagtgaaccttgggtattaccgcagacaaacgacgccgcttcagaagtgct

SEQ ID NO: 33068 - DNA, 43 bp, Homo sapiens
  chr20:5762461-5762504
  hypo
aaagctcctctgccttgttttcgggactctgtgtaatctgctg

SEQ ID NO: 33069 - DNA, 93 bp, Homo sapiens
  chr20:5765407-5765500
  hypo
taaaagctcaagaatgttatttgccacctgtgacatctctcgttgttcctcactcttaagtttcaagggcacgtgctatgggggaagaggctt

SEQ ID NO: 33070 - DNA, 19 bp, Homo sapiens
  chr20:5766163-5766182
  hypo
aggcacgatgtctcacgcc

SEQ ID NO: 33071 - DNA, 36 bp, Homo sapiens
  chr20:5801859-5801895
  hypo
tttaaacttattaaggctgggcgtggtggtggctca

SEQ ID NO: 33072 - DNA, 580 bp, Homo sapiens; identical to SEQ ID NO: 12762
  chr20:5891857-5892437
  hypo

SEQ ID NO: 33073 - DNA, 30 bp, Homo sapiens
  chr20:6019325-6019355
  hypo
ctgagcattagtgacgggtgagccacataa

SEQ ID NO: 33074 - DNA, 31 bp, Homo sapiens
  chr20:6021693-6021724
  hypo
ggtaatcatcaaaggccgggtttttgtaggc

SEQ ID NO: 33075 - DNA, 31 bp, Homo sapiens
  chr20:6022361-6022392
  hypo
ggggcttggggtgtggcgtgtgtcctctggc

SEQ ID NO: 33076 - DNA, 202 bp, Homo sapiens
  chr20:6022781-6022983
  hypo
agagtggtgctttggtcggactggcacactccgggcagctgggagagtgacagggaggctgagaaggggccgctggatcccgcagctggcgcgcacatagtgtctgctgccctggaggggaggccaaccagttagaagacgtctggcttcagggacacttctgcgcagagctttgaatcctcattgccgacgtcaccccctg

SEQ ID NO: 33077 - DNA, 31 bp, Homo sapiens
  chr20:6023267-6023298
  hypo
taataaaaatcatactcgggccggtgcgatg

SEQ ID NO: 33078 - DNA, 33 bp, Homo sapiens
  chr20:6302594-6302627
  hypo
gctttttttttttttttgagacggagtcttgct

SEQ ID NO: 33079 - DNA, 50 bp, Homo sapiens; identical to SEQ ID NO: 12763
  chr20:6748695-6748745
  hypo

SEQ ID NO: 33080 - DNA, 36 bp, Homo sapiens
  chr20:6861140-6861176
  hypo
aagaatgcatcttaggccaggcgcggtggctcacgc

SEQ ID NO: 33081 - DNA, 30 bp, Homo sapiens; identical to SEQ ID NO: 12766
  chr20:9112082-9112112
  hypo

SEQ ID NO: 33082 - DNA, 508 bp, Homo sapiens; identical to SEQ ID NO: 12767
  chr20:9487211-9487719
  hypo

SEQ ID NO: 33083 - DNA, 121 bp, Homo sapiens; identical to SEQ ID NO: 12768
  chr20:9487788-9487909
  hypo

SEQ ID NO: 33084 - DNA, 31 bp, Homo sapiens; identical to SEQ ID NO: 12785
  chr20:10491693-10491724
  hypo

SEQ ID NO: 33085 - DNA, 152 bp, Homo sapiens
  chr20:10515167-10515319
  hypo
cgtaaagaaggagcctcgagtcaagcctgagcctaggggaaggtggggtagaagaaggaatggggagctccttccagcagagccaaggtcctttctgctttgtcctgctccgtgttcagctcctggcgcagggctggcgtctggggtatgct

SEQ ID NO: 33086 - DNA, 232 bp, Homo sapiens; identical to SEQ ID NO: 12786
  chr20:10653792-10654024
  hypo

SEQ ID NO: 33087 - DNA, 536 bp, Homo sapiens; identical to SEQ ID NO: 12787
  chr20:10654668-10655204
  hypo

SEQ ID NO: 33088 - DNA, 157 bp, Homo sapiens; identical to SEQ ID NO: 12788
  chr20:10655444-10655601
  hypo

SEQ ID NO: 33089 - DNA, 415 bp, Homo sapiens
  chr20:11589405-11589820
  hypo
tgggtgactcctccactgtttcgtcctccttcaggctccaggaagccctccgtgtgcagcttactctggtacacaaagacgtccactgggggatcgagcgcgaccctggctagggcggtcatggacaggaagacaaaccccaagcccacgttgaaccgcttacagatgcccgcatcgtgcagcagctgaggcttgtccgccggcggggccgtgtcctccggcacctctttaggcgcctcctctgccaccttagcgcagccacctgctaactgctggttggacacggagcccagggtcgtcagctgagcccgcagccctgggtccctggttgggcggctgctggccccagagaagtccgaaggcttcaaccttcttcactacctatgttttcaacggctgtgtaaaagaatgcata

SEQ ID NO: 33090 - DNA, 66 bp, Homo sapiens; identical to SEQ ID NO: 12791
  chr20:11871661-11871727
  hypo

SEQ ID NO: 33091 - DNA, 271 bp, Homo sapiens; identical to SEQ ID NO: 12792
  chr20:11871950-11872221
  hypo

SEQ ID NO: 33092 - DNA, 30 bp, Homo sapiens; identical to SEQ ID NO: 12794
  chr20:12947867-12947897
  hypo

SEQ ID NO: 33093 - DNA, 43 bp, Homo sapiens
  chr20:13417378-13417421
  hypo
tggataatccctttccagcaacgcagccaactcaagactaacg

SEQ ID NO: 33094 - DNA, 31 bp, Homo sapiens
  chr20:14812495-14812526
  hypo
gttgtgagtttgtcatcgttttcgtttgttg

SEQ ID NO: 33095 - DNA, 161 bp, Homo sapiens
  chr20:16511124-16511285
  hypo
agccagcaggaaacaggggcccgctagcagcacgccagacagcctggcagggcacgctccccaagcccgcaccgggacatgatgatgagagatgactgggaagccgtctggcaccctgactgcagcgctaggggagagccggagtcagaggaccctgctca

SEQ ID NO: 33096 - DNA, 90 bp, Homo sapiens
  chr20:16543248-16543338
  hypo
ttctgagtgctcaggtcttcccggcacagttccaggccccggggaaacagccatgaacaagatctacacggtgactggctctcagagagt

SEQ ID NO: 33097 - DNA, 30 bp, Homo sapiens
  chr20:16552552-16552582
  hypo
agccaccgcgcccagcctaacaaatacttt

SEQ ID NO: 33098 - DNA, 13 bp, Homo sapiens
  chr20:16555032-16555045
  hypo
gtatcttaaggct

SEQ ID NO: 33099 - DNA, 30 bp, Homo sapiens; identical to SEQ ID NO: 12804
  chr20:17429350-17429380
  hypo

SEQ ID NO: 33100 - DNA, 152 bp, Homo sapiens
  chr20:17481232-17481384
  hypo
tgttactggtttatgtatttacgatactacactttttctcattattttggcgtgtagtcccacttttaacgagatgtttctggtaagacagtgacgccgcattaccccagccgcagcctcctacagctcacgtttcccacagctcttgattg

SEQ ID NO: 33101 - DNA, 58 bp, Homo sapiens; identical to SEQ ID NO: 12805
  chr20:17549961-17550019
  hypo

SEQ ID NO: 33102 - DNA, 179 bp, Homo sapiens; identical to SEQ ID NO: 12806
  chr20:17661563-17661742
  hypo

SEQ ID NO: 33103 - DNA, 43 bp, Homo sapiens
  chr20:17971880-17971923
  hypo
gtgtaagtgcataaaagaaagcgtcctcggctgggcgcagtgg

SEQ ID NO: 33104 - DNA, 226 bp, Homo sapiens; identical to SEQ ID NO: 12810
  chr20:18039722-18039948
  hypo

SEQ ID NO: 33105 - DNA, 21 bp, Homo sapiens
  chr20:18073435-18073456
  hypo
gggggataacgcggctttctt

SEQ ID NO: 33106 - DNA, 93 bp, Homo sapiens
  chr20:18489631-18489724
  hypo
tgggattacaggcgtgagccaccgcgcccggccgccagtgccttttaataaagaacgttttgagagagagacggttatttaatgaaatctgct

SEQ ID NO: 33107 - DNA, 57 bp, Homo sapiens
  chr20:18724826-18724883
  hypo
tccccgaaaagaagaccgcagtgccagcagcggggctgagggcgacgtgtcctctga

SEQ ID NO: 33108 - DNA, 30 bp, Homo sapiens; identical to SEQ ID NO: 12813
  chr20:19738506-19738536
  hypo

SEQ ID NO: 33109 - DNA, 489 bp, Homo sapiens; identical to SEQ ID NO: 12818
  chr20:20347220-20347709
  hypo

SEQ ID NO: 33110 - DNA, 485 bp, Homo sapiens; identical to SEQ ID NO: 12819
  chr20:20347736-20348221
  hypo

SEQ ID NO: 33111 - DNA, 1082 bp, Homo sapiens; identical to SEQ ID NO: 12820
  chr20:20348257-20349339
  hypo

SEQ ID NO: 33112 - DNA, 1275 bp, Homo sapiens; identical to SEQ ID NO: 12821
  chr20:20349568-20350843
  hypo

SEQ ID NO: 33113 - DNA, 173 bp, Homo sapiens
  chr20:20372435-20372608
  hypo
aggtggggaggcctcccgcacagggcccgcctttcccaggaccagcccacccatcataagccctgagttaggggctgcgtctctcgtgctgctgtcccttcccactgcagggcgttgctctgtacctggccgctgtgagaacaaagcctgcgcagtggcgatggactctggta

SEQ ID NO: 33114 - DNA, 622 bp, Homo sapiens
  chr20:20376668-20377290
  hypo
acagccttgccaaggcggctgccatccatcagagcgctctgggcagggcctggaccccagacccaggacagaaaggcaggctggggaggtcacacctgccatggccagcctatcctctgggtcctagaccgcagcccattcctaggtctccaccctctgcgctcccgcagcttttgtccgcttttccttccccagctgttccattcagcagcccccgccacaacctgccctccccgcatggaggtctcagaggcctccattaaggctggcggtcaaaggccggcccagcacgtgccgtgtcttatcggcccatctcaagaccctgctccttcaggcctgggcaacaaaaaagggggcggccccagcgcccgctggctccctgcagccccacacacaaaagggcaggcgacaaagacattttccgggatggcaggtgttggtgtcggattcctccccgagtgcacgggcagaagaaaggcaaggctgggcttccccgggcagcgcagacatgcaggggcaggagtgtgggcagggcccccggggaggggaaggcccaggagggcgaggagcactgatgcagggtccgctaccgagggcagccgattagaaaagtcccaccccc

SEQ ID NO: 33115 - DNA, 31 bp, Homo sapiens
  chr20:20380169-20380200
  hypo
aactgtggccaactggcggctcagacacaga

SEQ ID NO: 33116 - DNA, 223 bp, Homo sapiens
  chr20:20392200-20392423
  hypo
tgtaatgatggaccccgggacactgtccttccatgtctcctgcattaatccctgaccttcgaatctcggcagcataatccccatttagcattagtagcaacggcttccactgtgaggaactcttttttgataagtaagcactgattcgggcatcgcttttaaacagcatattcccagctcagcaagaaacccacactcctgaatgaaccggagcacattactg

SEQ ID NO: 33117 - DNA, 120 bp, Homo sapiens
  chr20:20392661-20392781
  hypo
gacactcacccgttccgctgagggagtagctgggagagggagaaaagacttgggctgcgaaatcctcgaatgtcattacttcgcggtggttctgaattattgcttcgagatacagagctc

SEQ ID NO: 33118 - DNA, 270 bp, Homo sapiens
  chr20:20421238-20421508
  hypo
caaagactagggaagaaagcccgcgctctggttggcagcagtcttggattctcgcccccggccatactgtgcaatcacgctgtttattccactgtaacaatcagacagcgagagcagagcacctggtactccccggcccgggccttccttggcagctgacgggcaacctcactgccaggtggtcgcgcttcaattacattagctagccattctagggttaacgaggacccactttcttcagaatgccccgggaaaatcagttattcataa

SEQ ID NO: 33119 - DNA, 237 bp, Homo sapiens
  chr20:20435757-20435994
  hypo
gtgtccctaggaagggtgttacgaatctaagccccggagctgctgcctccacagtcccgtgtaatgccacctaagtgctctgcctcgcatgacttgctgcaggctgccacggattagagctatcgatcgctgcctgcagaagggtctcgctgtgcgaaaggaaggtgagcgctagagacagacagctcaagtatcgatctgctctggcagaaggccgtggttccagatgcagagtgg

SEQ ID NO: 33120 - DNA, 31 bp, Homo sapiens; identical to SEQ ID NO: 12822
  chr20:20692668-20692699
  hypo

SEQ ID NO: 33121 - DNA, 30 bp, Homo sapiens
  chr20:21115989-21116019
  hypo
tgttacagttacttgcgtcaaaaatgcaga

SEQ ID NO: 33122 - DNA, 155 bp, Homo sapiens
  chr20:21371532-21371687
  hypo
ggagaaactgatgacggcagatttcctctgcagaactggcaggtgttccctcgctgagccggcttcaggccctgctccgtgacctcacccttgcttcttcctctccatccttagtcttcatctctttccaacttggttccgcgtttgaatcttcc

SEQ ID NO: 33123 - DNA, 39 bp, Homo sapiens; identical to SEQ ID NO: 12833
  chr20:21378678-21378717
  hypo

SEQ ID NO: 33124 - DNA, 67 bp, Homo sapiens; identical to SEQ ID NO: 12841
  chr20:21494664-21494731
  hypo

SEQ ID NO: 33125 - DNA, 256 bp, Homo sapiens; identical to SEQ ID NO: 12849
  chr20:21502443-21502699
  hypo

SEQ ID NO: 33126 - DNA, 336 bp, Homo sapiens; identical to SEQ ID NO: 12850
  chr20:21502837-21503173
  hypo

SEQ ID NO: 33127 - DNA, 350 bp, Homo sapiens; identical to SEQ ID NO: 12851
  chr20:21503594-21503944
  hypo

SEQ ID NO: 33128 - DNA, 193 bp, Homo sapiens
  chr20:21555353-21555546
  hypo
acccacgatcctctcgcgtccaatgtgcgtgacctctccgtccgatagcacaagcaattctcaaacagccacttgagctggacgcccccggacatgccctgcacttttccagctttacatcctggcctgtgttgccccctccatgtgtgatgccctccttgagtccggcatgggtgcacggctgcccgctcca

SEQ ID NO: 33129 - DNA, 1176 bp, Homo sapiens; identical to SEQ ID NO: 12855
  chr20:21686206-21687382
  hypo

SEQ ID NO: 33130 - DNA, 177 bp, Homo sapiens; identical to SEQ ID NO: 12867
  chr20:22563458-22563635
  hypo

SEQ ID NO: 33131 - DNA, 726 bp, Homo sapiens; identical to SEQ ID NO: 12868
  chr20:22563663-22564389
  hypo

SEQ ID NO: 33132 - DNA, 331 bp, Homo sapiens; identical to SEQ ID NO: 12869
  chr20:22564637-22564968
  hypo

SEQ ID NO: 33133 - DNA, 245 bp, Homo sapiens
  chr20:23092301-23092546
  hypo
gctctgagctcggggcgaaccaaagatgggagaggagcatcagtgcccccctccccatcaccacattagaatcctgcgggaactggctgggttctcgaaggcgttgttatcgccctgtgctcacacataaggaccctgagacccagggccactagggtgaggcgacagggcagggcctgatgcacctgtcgaaatccacttctagctcccaccctgcccccagagacatgcgccccatgggccgg

SEQ ID NO: 33134 - DNA, 74 bp, Homo sapiens
  chr20:23138480-23138554
  hypo
tagtgtcttctgagtcttccaagggttgggcaattttccctccggtcatggagctgagccgatttcactgtgct

SEQ ID NO: 33135 - DNA, 31 bp, Homo sapiens
  chr20:23490570-23490601
  hypo
agggagggcttgagttcgggggcccctaggt

SEQ ID NO: 33136 - DNA, 30 bp, Homo sapiens; identical to SEQ ID NO: 12879
  chr20:23618040-23618070
  hypo

SEQ ID NO: 33137 - DNA, 121 bp, Homo sapiens
  chr20:23969311-23969432
  hypo
ctccctcaggtttaaaaggcgcgttgcccggcagcagaagaaactgctggcttcgcctttggccgagttggcggctggacgaggacgcagagcccagctctcgagagttcaagcaaccgac

SEQ ID NO: 33138 - DNA, 30 bp, Homo sapiens
  chr20:24524050-24524080
  hypo
ggccgccgactgctgcgagaccaccttcat

SEQ ID NO: 33139 - DNA, 31 bp, Homo sapiens; identical to SEQ ID NO: 12884
  chr20:24564177-24564208
  hypo

SEQ ID NO: 33140 - DNA, 231 bp, Homo sapiens
  chr20:24570953-24571184
  hypo
gggtaggggtaactaacaaggcggggccaacaggggcagaccccgagactctttaggctgtgaccgagcggggcttccactttgggataagaagcctcgggggtttgagcggaggagaagcccctgtggccacatgctcccgggagccttcagagaacagggcggagggggaggcgcagggcgacgacggcagtggtcaaacgcagaaccgtggagtcctgtgctgcagga

SEQ ID NO: 33141 - DNA, 189 bp, Homo sapiens
  chr20:24944572-24944761
  hypo
cttctccggaaggcaccgctgtcgctgagttctaggacgaggctgtaccgcggcacaaacttcatcaccgtctcttgactaaagagctagagggaagcacagtgcagggaaagttcaccagctggccaagaacactgtgcgcagatcaaccgtgccgcccccaccatccaggaacggtctgactccttc

SEQ ID NO: 33142 - DNA, 31 bp, Homo sapiens
  chr20:24947028-24947059
  hypo
agacatgaaagaaccacgtccaggtggagac

SEQ ID NO: 33143 - DNA, 38 bp, Homo sapiens
  chr20:24950216-24950254
  hypo
acagctggactccattcgggaaccgcagctggtccaat

SEQ ID NO: 33144 - DNA, 30 bp, Homo sapiens
  chr20:25040599-25040629
  hypo
actcttccttcccacgcctgcaccgcctgc

SEQ ID NO: 33145 - DNA, 30 bp, Homo sapiens
  chr20:25042641-25042671
  hypo
ttggccctgcatcccgaaggaccctcagag

SEQ ID NO: 33146 - DNA, 190 bp, Homo sapiens
  chr20:25187923-25188113
  hypo
ccccctggggacagctgcagacgggcacgaggtcttctacgggatcatgtttgatgcaggaagcactggcacccgagtacacgtcttccagttcacccggccccccagaggtacccgcctctcatggcagggctctcgggatctcctcccctgtgctacagtgttggccgggtcccctgccacagactca

SEQ ID NO: 33147 - DNA, 19 bp, Homo sapiens
  chr20:25212064-25212083
  hypo
tttataagaacctactggg

SEQ ID NO: 33148 - DNA, 157 bp, Homo sapiens
  chr20:25223053-25223210
  hypo
gtctgtgttcatttgcaaacacgaaattgaccagcacagatctgccagtggcgttgctgggatcccagagagattttccctccgcacctgcggtctcaagggccggcggtgcttctgagtcactcatttcaccagcgatcaatgagacactcttcag

SEQ ID NO: 33149 - DNA, 17 bp, Homo sapiens
  chr20:25230503-25230520
  hypo
attctgagtcttgccct

SEQ ID NO: 33150 - DNA, 75 bp, Homo sapiens
  chr20:25230759-25230834
  hypo
caggcgtgagccaacgcacccgacccgcaacatcatttttattgtctaagtggcggatggcaaggacatagctct

SEQ ID NO: 33151 - DNA, 30 bp, Homo sapiens
  chr20:25276724-25276754
  hypo
gctatccctatcgtcgtcctgggggccatg

SEQ ID NO: 33152 - DNA, 14 bp, Homo sapiens
  chr20:25278877-25278891
  hypo
gtcatgtgtgcctg

SEQ ID NO: 33153 - DNA, 34 bp, Homo sapiens
  chr20:25284745-25284779
  hypo
catgggctgccaggaccggcggagcctgggctct

SEQ ID NO: 33154 - DNA, 127 bp, Homo sapiens
  chr20:25320326-25320453
  hypo
taacctcgtatcaggaaagagcggcctcctcaggcctcccgatccgtcttctgtgagacaactgcaggcaggcgtaggttacttattagctcctggtaggaagcacgtagaccaaggacatcaacag

SEQ ID NO: 33155 - DNA, 15 bp, Homo sapiens
  chr20:25344141-25344156
  hypo
cgcacctggctgaca

SEQ ID NO: 33156 - DNA, 30 bp, Homo sapiens
  chr20:25392097-25392127
  hypo
gattgcttctctttcgattgttggcagacc

SEQ ID NO: 33157 - DNA, 31 bp, Homo sapiens
  chr20:25451905-25451936
  hypo
gccaccacgcccagcccgctttatgtattat

SEQ ID NO: 33158 - DNA, 30 bp, Homo sapiens
  chr20:25657013-25657043
  hypo
tatcgttaaaccttcgcccacactcctggc

SEQ ID NO: 33159 - DNA, 197 bp, Homo sapiens
  chr20:25971829-25972026
  hypo
cctagtacccttcccacttgccgcctcggactgtaccgccaccccagtcgccgcagtcagctgtgttgcagccattttttaaagggtccgcagcctgactctccggagcaagggcggagtcggcctctccagtgagcatgctcgacgactgagccaccactttggtaacagtgtccgccactgttgcccagaaatag

SEQ ID NO: 33160 - DNA, 21 bp, Homo sapiens
  chr20:30110867-30110888
  hypo
ttatgagacagagtctcgctc

SEQ ID NO: 33161 - DNA, 30 bp, Homo sapiens
  chr20:30134173-30134203
  hypo
gccttgtccctaatcggcagcaattttatg

SEQ ID NO: 33162 - DNA, 155 bp, Homo sapiens
  chr20:30139495-30139650
  hypo
catgccatggaagcactggctcgtggcgacaggcagtcgttgggggagactgggggagattccactcaggggatcaagaaacagctgtctttctcgtgactcactctaccactgcggacagcctttctccctgcgttgaggagagcttcatggcc

SEQ ID NO: 33163 - DNA, 31 bp, Homo sapiens
  chr20:30169440-30169471
  hypo
ccatttgcaccctggtcgcaagagtcagtca

SEQ ID NO: 33164 - DNA, 1267 bp, Homo sapiens; identical to SEQ ID NO: 12895
  chr20:30192833-30194100
  hypo

SEQ ID NO: 33165 - DNA, 30 bp, Homo sapiens
  chr20:30232723-30232753
  hypo
tctccctgaggctccgccctggctgggagc

SEQ ID NO: 33166 - DNA, 36 bp, Homo sapiens
  chr20:30334934-30334970
  hypo
ttgttgtttgagaaggagtctcgctctgtcccaggc

SEQ ID NO: 33167 - DNA, 30 bp, Homo sapiens
  chr20:30407130-30407160
  hypo
cgcctctgcccacccggcccaatcccttac

SEQ ID NO: 33168 - DNA, 19 bp, Homo sapiens
  chr20:30468302-30468321
  hypo
ttttttttttttgagacgg

SEQ ID NO: 33169 - DNA, 42 bp, Homo sapiens
  chr20:30468560-30468602
  hypo
attacaggcgtgagccactgcgcccagcctccatcttacttc

SEQ ID NO: 33170 - DNA, 174 bp, Homo sapiens; identical to SEQ ID NO: 12902
  chr20:30555513-30555687
  hypo

SEQ ID NO: 33171 - DNA, 571 bp, Homo sapiens; identical to SEQ ID NO: 12903
  chr20:30555944-30556515
  hypo

SEQ ID NO: 33172 - DNA, 41 bp, Homo sapiens
  chr20:30713762-30713803
  hypo
gcaccgggctagattatttcatttatcgttattagatgtca

SEQ ID NO: 33173 - DNA, 79 bp, Homo sapiens
  chr20:30720983-30721062
  hypo
accatggtgagctgttcgtgtccatcctgtggttgcagagaagaaagaatagtgccagttaccccggaactctgcctct

SEQ ID NO: 33174 - DNA, 31 bp, Homo sapiens
  chr20:30807275-30807306
  hypo
ataaatcactacaaaacgtagtagcataaca

SEQ ID NO: 33175 - DNA, 8 bp, Homo sapiens
  chr20:30946145-30946153
  hypo
acacaccc

SEQ ID NO: 33176 - DNA, 111 bp, Homo sapiens; identical to SEQ ID NO: 12905
  chr20:30946218-30946329
  hypo

SEQ ID NO: 33177 - DNA, 290 bp, Homo sapiens; identical to SEQ ID NO: 12906
  chr20:30946345-30946635
  hypo

SEQ ID NO: 33178 - DNA, 84 bp, Homo sapiens; identical to SEQ ID NO: 12907
  chr20:30954185-30954269
  hypo

SEQ ID NO: 33179 - DNA, 30 bp, Homo sapiens; identical to SEQ ID NO: 12908
  chr20:30955515-30955545
  hypo

SEQ ID NO: 33180 - DNA, 110 bp, Homo sapiens; identical to SEQ ID NO: 12909
  chr20:30956816-30956926
  hypo

SEQ ID NO: 33181 - DNA, 387 bp, Homo sapiens; identical to SEQ ID NO: 12910
  chr20:30959965-30960352
  hypo

SEQ ID NO: 33182 - DNA, 296 bp, Homo sapiens; identical to SEQ ID NO: 12911
  chr20:31015929-31016225
  hypo

SEQ ID NO: 33183 - DNA, 105 bp, Homo sapiens; identical to SEQ ID NO: 12912
  chr20:31017139-31017244
  hypo

SEQ ID NO: 33184 - DNA, 154 bp, Homo sapiens; identical to SEQ ID NO: 12913
  chr20:31017702-31017856
  hypo

SEQ ID NO: 33185 - DNA, 360 bp, Homo sapiens; identical to SEQ ID NO: 12914
  chr20:31019122-31019482
  hypo

SEQ ID NO: 33186 - DNA, 107 bp, Homo sapiens; identical to SEQ ID NO: 12915
  chr20:31020681-31020788
  hypo

SEQ ID NO: 33187 - DNA, 635 bp, Homo sapiens; identical to SEQ ID NO: 12916
  chr20:31021085-31021720
  hypo

SEQ ID NO: 33188 - DNA, 4889 bp, Homo sapiens; identical to SEQ ID NO: 12917
  chr20:31022233-31027122
  hypo

SEQ ID NO: 33189 - DNA, 30 bp, Homo sapiens
  chr20:31046821-31046851
  hypo
gcctggctggggatcgacaggcactagtgc

SEQ ID NO: 33190 - DNA, 30 bp, Homo sapiens
  chr20:31055945-31055975
  hypo
tcaagaccatacttcggggaagggccggcc

SEQ ID NO: 33191 - DNA, 182 bp, Homo sapiens
  chr20:31115769-31115951
  hypo
actgggccctgaggccggggcaaggggtcaggacgggcaatgcctccgacagtgggtcttggggtggggaggggagggagcctaccgagggggctccctggagggggacgccagagtcagggtggctgcagctatgaaatctaccagcaacaatgggcagagaacggcgacaacgaaaatac

SEQ ID NO: 33192 - DNA, 57 bp, Homo sapiens
  chr20:31146688-31146745
  hypo
ccactgcagcctggaccggagcaggggcagcggaggggccgccgagaaccagtgcaa

SEQ ID NO: 33193 - DNA, 30 bp, Homo sapiens
  chr20:31332338-31332368
  hypo
aaatgtcttctacccggcccggcgcggtgg

SEQ ID NO: 33194 - DNA, 163 bp, Homo sapiens; identical to SEQ ID NO: 12920
  chr20:31351104-31351267
  hypo

SEQ ID NO: 33195 - DNA, 69 bp, Homo sapiens
  chr20:31367768-31367837
  hypo
ggcggcagacgggccgggacaggcaggtcctaaatggcattgtttgaaggggccggctaattgcacaga

SEQ ID NO: 33196 - DNA, 31 bp, Homo sapiens
  chr20:31547891-31547922
  hypo
gtataagcccaaggaacgcttgcagaatacc

SEQ ID NO: 33197 - DNA, 31 bp, Homo sapiens
  chr20:31629661-31629692
  hypo
tcctgcatcagggaggcgttggggtgcttgg

SEQ ID NO: 33198 - DNA, 30 bp, Homo sapiens
  chr20:31699289-31699319
  hypo
gtcccagagaggctcggcctggaaacagtc

SEQ ID NO: 33199 - DNA, 82 bp, Homo sapiens
  chr20:31900462-31900544
  hypo
actgggattacaggcatgagccaccgcgccgggccccagttttctttttcttcaaaataacggtaacaaccagcagcctctg

SEQ ID NO: 33200 - DNA, 38 bp, Homo sapiens
  chr20:32151829-32151867
  hypo
gttccccccactccgcgacctcccgctggaaaattgtt

SEQ ID NO: 33201 - DNA, 31 bp, Homo sapiens
  chr20:32301636-32301667
  hypo
gcattaaacactagaccgcaacccgttttct

SEQ ID NO: 33202 - DNA, 30 bp, Homo sapiens
  chr20:32311134-32311164
  hypo
aaccagatgcttaacgggaagattgggata

SEQ ID NO: 33203 - DNA, 30 bp, Homo sapiens; identical to SEQ ID NO: 12926
  chr20:32342006-32342036
  hypo

SEQ ID NO: 33204 - DNA, 165 bp, Homo sapiens
  chr20:32370538-32370703
  hypo
cagctgggtctgtgcccgtgaccaacgctctaccaaaatgaatgaatgtgtgaatacatgcccttcttttgcctggactggaaagagattttcacttctgtgttttctggctttaaaaaaattacctttcatacaaaaattagctgggtgtggtggtgggcgcct

SEQ ID NO: 33205 - DNA, 90 bp, Homo sapiens
  chr20:32376800-32376890
  hypo
aggggggtgggtagcgggacagattctccaggggtgctgctggggagggtgggacagatgtcaggcctgagggcaggcctctcctttttt

SEQ ID NO: 33206 - DNA, 20 bp, Homo sapiens
  chr20:32377129-32377149
  hypo
tgagccactgtgcctggcca

SEQ ID NO: 33207 - DNA, 124 bp, Homo sapiens
  chr20:32378558-32378682
  hypo
ggagaatggcaagtacaaaggcgcagagggaggagccagcgtggcatctctgaggagagcgagtgtggctggcgcagagagtggctggaagaaggcagacgacgagggtggagagagctggggc

SEQ ID NO: 33208 - DNA, 30 bp, Homo sapiens
  chr20:32379024-32379054
  hypo
gcggcagtggtgggcgcaaggtgctgaccc

SEQ ID NO: 33209 - DNA, 215 bp, Homo sapiens
  chr20:32413014-32413229
  hypo
ttgtacttttaatacccgttaattgagaagatcagatattaattcccttcaaccgatattcactatatacccaccgtctttcttccctaggattgtgtctgcgtaaatggtagatggtcacatggtagttgtttttattattgtgtgatatattcatcatttagtgcacaggcagggcacagttgggcacattcacagagcgctggagtgaccac

SEQ ID NO: 33210 - DNA, 256 bp, Homo sapiens
  chr20:32436252-32436508
  hypo
ctgttttctccctcacgcagcggccctccaggcactgaagcgtaagaagaggtatgagaagcagctggcgcagatcgacggcacattatcaaccatcgagttccagcgggaggccctggagaatgccaacaccaacaccgaggtgctcaagaacatgggctatgccgccaaggccatgaaggcggcccatgacaacatgtacgtgtccacccgcccctgcgccacagggcagtgctagtcccggaatgcctcgtac

SEQ ID NO: 33211 - DNA, 31 bp, Homo sapiens
  chr20:32441487-32441518
  hypo
ccaaagcagtagggccgcgttgctgctcact

SEQ ID NO: 33212 - DNA, 32 bp, Homo sapiens
  chr20:32584927-32584959
  hypo
ctgttttttttggagacggagtctcactccgt

SEQ ID NO: 33213 - DNA, 96 bp, Homo sapiens
  chr20:32677609-32677705
  hypo
aacatctagaatgacaagtttcgcactgtaggaaatagagtcgtgtgtccttctgcaggattgtgtccggtgatcggcatgtgtgacaagtgacat

SEQ ID NO: 33214 - DNA, 101 bp, Homo sapiens
  chr20:33085650-33085751
  hypo
gggattacaggcatgagccactacacccagccgtcattggtatttctgtagggattgcattgaatctgtagaaatttttaatagtacggttattagtggag

SEQ ID NO: 33215 - DNA, 140 bp, Homo sapiens
  chr20:33112447-33112587
  hypo
tgcattgtactctcacgtccacagagccctgtcattgtacccaggctccagatcttagaggcataagtccattttccacttttttttttgttttttttttttggaaatggagtcccagtcgcccatgctggagtgcagtg

SEQ ID NO: 33216 - DNA, 19 bp, Homo sapiens
  chr20:33112826-33112845
  hypo
ccccatttgccactttata

SEQ ID NO: 33217 - DNA, 245 bp, Homo sapiens
  chr20:33134795-33135040
  hypo
agggctggcgtcctgcgcacagtggaaggactggccttaggaacagggacagtgattccactcagcatagccagggagcggcccagatggcagggcaaggtctctgtggagtgagggcagcagggaaggtgcctcgcaggagaggagagaaaacatacacttccctggggacgcgggcggggagtttgacgggttcggcaggtggcccttttgcagcatctttttcagccgggggtgcagcagtc

SEQ ID NO: 33218 - DNA, 26 bp, Homo sapiens
  chr20:33179692-33179718
  hypo
tagaaatttactttggtaggccggcg

SEQ ID NO: 33219 - DNA, 94 bp, Homo sapiens
  chr20:33183816-33183910
  hypo
tggagcgagaccctgtctcaaaaacaaaacaaaacaaaaaaagttacagtggagaaacctggcagacactaacgtcaccaagtgatcaaggtaa

SEQ ID NO: 33220 - DNA, 30 bp, Homo sapiens; identical to SEQ ID NO: 12934
  chr20:33345729-33345759
  hypo

SEQ ID NO: 33221 - DNA, 253 bp, Homo sapiens; identical to SEQ ID NO: 12935
  chr20:33464405-33464658
  hypo

SEQ ID NO: 33222 - DNA, 22 bp, Homo sapiens
  chr20:33540535-33540557
  hypo
cgaggctttgtatttttaacaa

SEQ ID NO: 33223 - DNA, 30 bp, Homo sapiens
  chr20:33589977-33590007
  hypo
agcacaaggagtgacggcctgaccccctgg

SEQ ID NO: 33224 - DNA, 30 bp, Homo sapiens
  chr20:33665389-33665419
  hypo
ctagcataatgtctccgtgctctttccact

SEQ ID NO: 33225 - DNA, 460 bp, Homo sapiens
  chr20:33879775-33880235
  hypo
acttcagagagcaggctgaggcggtctggcccggaggcctcctgcccctgagcctcgctgagctcagggcccccgcgcacatggctggtcatgtagtccacatccagggcgctcaggaagggcagctcccgctcctcggagatgacccgcaggtaggcagcctcaccccgctccaggagggcgtcggccgccagccgagccgcctcgctgtgccgcagcaccagcggtgagctctcccgccaccacggcagcttcagctcttccacccggccccgcaggggtcccgccatgccctgggctcccaggaccccaggccccgggcctccgaacatgcctgccacgcggctgcctcacccgccggcagggcccatggcccgcacgctgggctggctgcagcaggaagaggagaccagcagaaccgccttctgcccgcccgctcgctgtgtgtgtggcagggccc

SEQ ID NO: 33226 - DNA, 18 bp, Homo sapiens
  chr20:33945868-33945886
  hypo
aatgcaggctgggcgcgc

SEQ ID NO: 33227 - DNA, 24 bp, Homo sapiens
  chr20:33988031-33988055
  hypo
ctcgtcctttttcctttccacctc

SEQ ID NO: 33228 - DNA, 30 bp, Homo sapiens
  chr20:34022336-34022366
  hypo
ctcccagccagatccgtccaggcctggcac

SEQ ID NO: 33229 - DNA, 30 bp, Homo sapiens
  chr20:34055235-34055265
  hypo
gaagaatggatgggcgggagccggcccagc

SEQ ID NO: 33230 - DNA, 37 bp, Homo sapiens
  chr20:34176525-34176562
  hypo
ttaagaatttcaacaattggccgggtgcggtggctca

SEQ ID NO: 33231 - DNA, 191 bp, Homo sapiens; identical to SEQ ID NO: 12943
  chr20:34359741-34359932
  hypo

SEQ ID NO: 33232 - DNA, 87 bp, Homo sapiens
  chr20:34670677-34670764
  hypo
tgctcatgctggtacttttgtcgtctcctgcctttggacttttttttgagacaggttctcgctgtcacacacgttggagtgcagtgg

SEQ ID NO: 33233 - DNA, 179 bp, Homo sapiens; identical to SEQ ID NO: 12945
  chr20:34680185-34680364
  hypo

SEQ ID NO: 33234 - DNA, 714 bp, Homo sapiens; identical to SEQ ID NO: 12946
  chr20:34680611-34681325
  hypo

SEQ ID NO: 33235 - DNA, 31 bp, Homo sapiens
  chr20:34730052-34730083
  hypo
aaaaaagaacaaaaaacgtattttgtagaaa

SEQ ID NO: 33236 - DNA, 24 bp, Homo sapiens
  chr20:35088589-35088613
  hypo
aatcaaccttggctcacgcctgta

SEQ ID NO: 33237 - DNA, 83 bp, Homo sapiens
  chr20:35088672-35088755
  hypo
agcctgagcaacagagaccttgtcgctacaaaaaataaaaataaccaacttaaagtgaatagtacaggcgtagcataagtgac

SEQ ID NO: 33238 - DNA, 132 bp, Homo sapiens
  chr20:35089025-35089157
  hypo
agacctaccacaggtgcggcctggagagatgaggcccacaaggcagcgacaggacctggattcagtgaggagaggggactcgcggggtagaagccaggaactgggaaggcgaggaggcgtgaaggcaccacc

SEQ ID NO: 33239 - DNA, 129 bp, Homo sapiens
  chr20:35441116-35441245
  hypo
taggaatcattgtcttcagctcggtaaggcctgaagctccggctggggtcgggcttagagtccaagtcaccagtgcggaaagcctctcggatcctgggctcccattccggcaggtccctgaagtcaggt

SEQ ID NO: 33240 - DNA, 20 bp, Homo sapiens
  chr20:35442202-35442222
  hypo
taaatcgctctctttccctg

SEQ ID NO: 33241 - DNA, 856 bp, Homo sapiens
  chr20:35443719-35444575
  hypo
gcttggtgtccctggggccctcgctgttgtcgggggcctcatgcagccggaagtcagcacactcgttgtccagacacagccggaggccagccgtgaagccattggcatcagccaccaggacatcgatggccttactgaccagggcggcctgctctctcagcccaggcagcacctcggcctccctggctctgcagagtcggaccgcatgggactcgtgtgtctcgcccaggggagcaggcacacactgggcagagtccccggcctcggcgtccgtctccagcatgggccgcgtactctggcaggaggcgaggtcacagcgctggaggttggagaggagcacgcggttctcgtactgcagcttcttgaccttgccgctgagctcgccgatctgcagcttggcggccgccagctcctcctgtgaaggttcgctgagcacagaacaactgtcctccgacagcgccacgtccagctcgtgctccgagcggaacttggccagctcgttcagcagcagcttgttctggtcctcgagctcggcagaggagcgccgcagcagctcggcctcctcttcgacaaactgcaggtgtcgccgcagctctgccaagctctccccgcactctccgccacccagcgcggagaaggccaggcgtgcctcaggacccccacagccacctccatgatccttcatgtcgtccatctcagcccgcaggcctcggttctccacctccagctccacgatgcggcggctcagcaggttggcttcctcctccaccagcttcaggtgcaccttcagctcggtctcccgcgagtggggggcatcggccagctcctcggctgacagcgcgctgtccaggtcccc

SEQ ID NO: 33242 - DNA, 30 bp, Homo sapiens; identical to SEQ ID NO: 12950
  chr20:35491340-35491370
  hypo

SEQ ID NO: 33243 - DNA, 31 bp, Homo sapiens
  chr20:35612049-35612080
  hypo
agaggtcctctatttacgaaccttcatggcc

SEQ ID NO: 33244 - DNA, 31 bp, Homo sapiens
  chr20:35615341-35615372
  hypo
ttgagattttggtccacgaagacatggacca

SEQ ID NO: 33245 - DNA, 30 bp, Homo sapiens
  chr20:35627247-35627277
  hypo
attctgcatcactatcgatggctattactc

SEQ ID NO: 33246 - DNA, 37 bp, Homo sapiens
  chr20:35788335-35788372
  hypo
cactccagcctgggggacagagcgagactccattgaa

SEQ ID NO: 33247 - DNA, 137 bp, Homo sapiens
  chr20:35812618-35812755
  hypo
tagccagcacctgggctctgacgcccactcactacctcaccaagcatgacgtggagagactaaaagcctcgctggatcgccctttcacaaatttggaatctgccttctactccatcgtgggactcagcagccttggt

SEQ ID NO: 33248 - DNA, 30 bp, Homo sapiens
  chr20:35833225-35833255
  hypo
actggaaacaacagcgttatttgtggctgc

SEQ ID NO: 33249 - DNA, 30 bp, Homo sapiens
  chr20:35874070-35874100
  hypo
ctcccagctcctctgcggggcaagtggagt

SEQ ID NO: 33250 - DNA, 36 bp, Homo sapiens
  chr20:35874330-35874366
  hypo
gggtcttggggcaggccgggcgcgcctcccattcac

SEQ ID NO: 33251 - DNA, 30 bp, Homo sapiens
  chr20:35924169-35924199
  hypo
ttcgcaacacctggccgttcatttgccgac

SEQ ID NO: 33252 - DNA, 94 bp, Homo sapiens
  chr20:35929625-35929719
  hypo
ggtgagtcagaagagacgtcaggcagcaagcgacttgggccatggcctctgacctagacttctcacctccggaggtgcccgagcccactttcct

SEQ ID NO: 33253 - DNA, 36 bp, Homo sapiens
  chr20:35987216-35987252
  hypo
catgtctgccggtgtccgccccggcctgccgtctcc

SEQ ID NO: 33254 - DNA, 30 bp, Homo sapiens
  chr20:36146054-36146084
  hypo
ccaggagaaagtctcgtttgccaacacttg

SEQ ID NO: 33255 - DNA, 94 bp, Homo sapiens
  chr20:36151105-36151199
  hypo
tgtcgcggaccgggcggcaggtgttgggggagcgcaggcagcgagcccccaactgaggccccagctcccagccctgggcggccgtatcatcagg

SEQ ID NO: 33256 - DNA, 31 bp, Homo sapiens; identical to SEQ ID NO: 12954
  chr20:36235666-36235697
  hypo

SEQ ID NO: 33257 - DNA, 31 bp, Homo sapiens
  chr20:36627480-36627511
  hypo
tatgtgacattgcaatcgggtgaagagaacc

SEQ ID NO: 33258 - DNA, 31 bp, Homo sapiens
  chr20:36759315-36759346
  hypo
ttgacagagaatgtgacggtgggaactctag

SEQ ID NO: 33259 - DNA, 47 bp, Homo sapiens
  chr20:36760996-36761043
  hypo
gcttggggtcacacagcgggggaatggctgggcggatccctgaactc

SEQ ID NO: 33260 - DNA, 102 bp, Homo sapiens
  chr20:36766006-36766108
  hypo
tgcaacaggcactttccaaggcgctgggttagagacttttctttgaggccgagagcaaccagaggcacaggagaggttctcgaagggcccatggagagaggc

SEQ ID NO: 33261 - DNA, 332 bp, Homo sapiens
  chr20:36767691-36768023
  hypo
ggggccattgctgtacgtaggctaccaattaaaacacacgcacacacatacacgagcctgccgggctgggaaaactggatgcttatcttcaaggctgcattaaagactctgagggcacataccctctgggtatttgtaggtgtgggtgatatcctcccgctcgtctcggcccacgctcttagtgctgatcttcagcccaacgatcagggaacggttgatggatttgtgcacagacccatcgtcctgctggatccagtctaccacgtcggcattgacctccgcaaagacaaagggcgcatcgtacttggtgctcaggtcgccctccttgatgg

SEQ ID NO: 33262 - DNA, 124 bp, Homo sapiens
  chr20:36770629-36770753
  hypo
aggtcctggagacatccgccctgctctgggcctccacctgcccatctgcattccagggaacactgtacctgctgtccaagtgctgagaacatgagccagcccttcctgccgggacaatggcgcc

SEQ ID NO: 33263 - DNA, 2 bp, Homo sapiens
  chr20:37036240-37036242
  hypo
tc

SEQ ID NO: 33264 - DNA, 50 bp, Homo sapiens
  chr20:37054865-37054915
  hypo
tctgtaagccccaccgtgattcacacagtggagtcgcagagttcgaggaa

SEQ ID NO: 33265 - DNA, 44 bp, Homo sapiens
  chr20:37114342-37114386
  hypo
tacaggtgtgagccagagttgagttttatcgcttgttttgttag

SEQ ID NO: 33266 - DNA, 30 bp, Homo sapiens
  chr20:37217070-37217100
  hypo
ggtcttcccatacccgggggacccctgaca

SEQ ID NO: 33267 - DNA, 484 bp, Homo sapiens; identical to SEQ ID NO: 12962
  chr20:37274670-37275154
  hypo

SEQ ID NO: 33268 - DNA, 841 bp, Homo sapiens; identical to SEQ ID NO: 12963
  chr20:37302481-37303322
  hypo

SEQ ID NO: 33269 - DNA, 553 bp, Homo sapiens; identical to SEQ ID NO: 12965
  chr20:37353165-37353718
  hypo

SEQ ID NO: 33270 - DNA, 139 bp, Homo sapiens; identical to SEQ ID NO: 12971
  chr20:37434213-37434352
  hypo

SEQ ID NO: 33271 - DNA, 233 bp, Homo sapiens; identical to SEQ ID NO: 12972
  chr20:37434488-37434721
  hypo

SEQ ID NO: 33272 - DNA, 157 bp, Homo sapiens; identical to SEQ ID NO: 12973
  chr20:37434736-37434893
  hypo

SEQ ID NO: 33273 - DNA, 439 bp, Homo sapiens; identical to SEQ ID NO: 12974
  chr20:37434930-37435369
  hypo

SEQ ID NO: 33274 - DNA, 362 bp, Homo sapiens; identical to SEQ ID NO: 12975
  chr20:37435487-37435849
  hypo

SEQ ID NO: 33275 - DNA, 30 bp, Homo sapiens
  chr20:37464579-37464609
  hypo
cgtggacctgctgacggagctgcagctgct

SEQ ID NO: 33276 - DNA, 121 bp, Homo sapiens
  chr20:37540090-37540211
  hypo
gagccaccacgcctggccgcctcattcttttttattgctttctagaattcgattgtttgaatattaaaatttacatatccatgctcctttttttttttttttaaattgagacagagtctcg

SEQ ID NO: 33277 - DNA, 97 bp, Homo sapiens
  chr20:37596805-37596902
  hypo
ttgctggtccttgctggaccacgatgaatgattggtagaggagttgtaagcgtgaaccctggcactgccggcagccgtctttccagctcctgtacag

SEQ ID NO: 33278 - DNA, 44 bp, Homo sapiens
  chr20:37632980-37633024
  hypo
tacaggcgtcagccaccgtgcccggcctgttgtgaagattctaa

SEQ ID NO: 33279 - DNA, 152 bp, Homo sapiens
  chr20:37656984-37657136
  hypo
gatcctgtgcattagagcacacggagcctagggcaggcaagggtttcacccgcctctctgttggctgcctatgtaggtgacccggatctggttctgaggtgcattgtctccggcttcttcgccaatgcagcgaggtttcattctactggagc

SEQ ID NO: 33280 - DNA, 45 bp, Homo sapiens
  chr20:37659949-37659994
  hypo
atgaattgggatcccagctcacggttctttttttttttttttttt

SEQ ID NO: 33281 - DNA, 26 bp, Homo sapiens
  chr20:37672973-37672999
  hypo
cacccggcctcttcatttcttattat

SEQ ID NO: 33282 - DNA, 168 bp, Homo sapiens
  chr20:37673287-37673455
  hypo
cacagtggaaaggtggcggatggagatgcggcggcctctgtgcgcagctggtacggcagtcctggagagccacctgggactactcatgtgtgttcctgccccacagcccagaaactctgcttctgggggtgtgttcccaacaaaattctcacccgggtccttaggaga

SEQ ID NO: 33283 - DNA, 811 bp, Homo sapiens; identical to SEQ ID NO: 12976
  chr20:39316041-39316852
  hypo

SEQ ID NO: 33284 - DNA, 1408 bp, Homo sapiens; identical to SEQ ID NO: 12977
  chr20:39316983-39318391
  hypo

SEQ ID NO: 33285 - DNA, 43 bp, Homo sapiens
  chr20:39672621-39672664
  hypo
aatgcaagtgcccagccgggcgtggtggctcacgcctgtaatc

SEQ ID NO: 33286 - DNA, 30 bp, Homo sapiens
  chr20:39739653-39739683
  hypo
cctgtgaatgacgtgcgggttgggtttttc

SEQ ID NO: 33287 - DNA, 43 bp, Homo sapiens
  chr20:39831201-39831244
  hypo
ctggacaaagagctgccgcagcaagtgccgctgctgggcagtc

SEQ ID NO: 33288 - DNA, 24 bp, Homo sapiens
  chr20:39847848-39847872
  hypo
gtcagccaccgcacctggccttcc

SEQ ID NO: 33289 - DNA, 22 bp, Homo sapiens
  chr20:39893818-39893840
  hypo
atcactgaagtcattacgataa

SEQ ID NO: 33290 - DNA, 129 bp, Homo sapiens
  chr20:39989812-39989941
  hypo
agggaaggctggaaggcgctgctggataaggctgggctctggggtgatgttccccgagttggtgggatctaggggttgggtcctggccagcctgtctagttggcttgccctggccgcacctgctcagcc

SEQ ID NO: 33291 - DNA, 202 bp, Homo sapiens
  chr20:40020280-40020482
  hypo
tagaatcatggtggaaggcaaggagaagcaaggcacatcttacatgagggcaggaggtggcggggcagagagagagagcgcgcctcaatggctttcaatagttcaagtgcattcacaccaggcgcattcctgcgcttgagattcctagcatcagccaggagcggcttagtgggagaaagagctgcgacggtgatgatagtga

SEQ ID NO: 33292 - DNA, 380 bp, Homo sapiens; identical to SEQ ID NO: 12982
  chr20:41817535-41817915
  hypo

SEQ ID NO: 33293 - DNA, 741 bp, Homo sapiens; identical to SEQ ID NO: 12983
  chr20:41818007-41818748
  hypo

SEQ ID NO: 33294 - DNA, 116 bp, Homo sapiens; identical to SEQ ID NO: 12984
  chr20:41818804-41818920
  hypo

SEQ ID NO: 33295 - DNA, 100 bp, Homo sapiens
  chr20:42088665-42088765
  hypo
ctttcaggattttatgcgacaagcaggtgaagtaacctatgcggatgcccacaaggaacgaacaaatgagggtgtaattgagtttcgctcctactctgac

SEQ ID NO: 33296 - DNA, 144 bp, Homo sapiens
  chr20:42192720-42192864
  hypo
acatctgcctacccctcgggatcctggggagaggaagggaccctgtgagaacctaatgaccgccccaggcagcaaggccttcatgagccagggtgctctctgggaccgtttcttacgcagcaggagagtcgtgggccaaccagg

SEQ ID NO: 33297 - DNA, 92 bp, Homo sapiens
  chr20:42193731-42193823
  hypo
tctgccggatcccgcgtgacatcagctagccccctcgcggctgccgggagctgtgagctctgtgctggggccaggccggcaccaggcacaga

SEQ ID NO: 33298 - DNA, 170 bp, Homo sapiens
  chr20:42314842-42315012
  hypo
tggcctgtgtgcacatgagaacgcgtgtgtctgttgtgtaggtggggcctggcctggctcttgtggctgcgtatgttgtggtttgtgtcctgagctaggaagcctgactgagggcaggtggggactcaggtctggctaggtcagcccgcgatgcctgctaccatggctca

SEQ ID NO: 33299 - DNA, 31 bp, Homo sapiens
  chr20:42320467-42320498
  hypo
caccgcactcggcaattttttttttttttta

SEQ ID NO: 33300 - DNA, 31 bp, Homo sapiens
  chr20:42565991-42566022
  hypo
gctgataaccttcccacgggcagctcctggg

SEQ ID NO: 33301 - DNA, 211 bp, Homo sapiens
  chr20:42833283-42833494
  hypo
ctcctgccctccccacgccagtagtcagcggtgtctattgttcccatgtccacgtgtgttcaatgtttagcccccacttctaagtgagaacatgcagcatgtggttttacaaatacataatttttgaccatatattttgaaaaatttttaaataatgttccaagtaatttttagggataccaaaatggcttaattttactttttttttttt

SEQ ID NO: 33302 - DNA, 108 bp, Homo sapiens
  chr20:42924600-42924708
  hypo
ataaataaaataaaaaagacaattaaagactagtgtggcagaaagtattatcctcacttcgtagttgagtaaccagctcagaaaaacgaagtgatttgcccaagatca

SEQ ID NO: 33303 - DNA, 134 bp, Homo sapiens
  chr20:42965897-42966031
  hypo
cccagcccgagagcacggctatgcggctcctgagtggcctggaggtgcccaggtaccgccggaagcgccacatctctgtgagagacatgaatgccttactggattatcacaaccacatccgggccagtgtgtac

SEQ ID NO: 33304 - DNA, 18 bp, Homo sapiens
  chr20:42998544-42998562
  hypo
gcccggccctgggctctt

SEQ ID NO: 33305 - DNA, 425 bp, Homo sapiens; identical to SEQ ID NO: 12994
  chr20:43438793-43439218
  hypo

SEQ ID NO: 33306 - DNA, 263 bp, Homo sapiens; identical to SEQ ID NO: 12995
  chr20:43439247-43439510
  hypo

SEQ ID NO: 33307 - DNA, 32 bp, Homo sapiens
  chr20:43717046-43717078
  hypo
tcatggtgtagtgttacaggccgaaatgatga

SEQ ID NO: 33308 - DNA, 42 bp, Homo sapiens; identical to SEQ ID NO: 12996
  chr20:43726587-43726629
  hypo

SEQ ID NO: 33309 - DNA, 74 bp, Homo sapiens
  chr20:43926536-43926610
  hypo
ccccgagagagatgcgctcacctggacagatgctgcctctgaggttctccagcaggtgcgtcatggtgccgaag

SEQ ID NO: 33310 - DNA, 383 bp, Homo sapiens; identical to SEQ ID NO: 13002
  chr20:44099336-44099719
  hypo

SEQ ID NO: 33311 - DNA, 30 bp, Homo sapiens
  chr20:44456136-44456166
  hypo
gtggcaggccttgacgtcctagattcttgt

SEQ ID NO: 33312 - DNA, 30 bp, Homo sapiens
  chr20:44469503-44469533
  hypo
cagtgcctgagctgcgccatgccccggacc

SEQ ID NO: 33313 - DNA, 30 bp, Homo sapiens
  chr20:44470444-44470474
  hypo
cttgaagccccaggcgaagctggtacctct

SEQ ID NO: 33314 - DNA, 42 bp, Homo sapiens
  chr20:44502011-44502053
  hypo
cctgggcaacaagagtgaaacgccatctcaaaaaaaaaagca

SEQ ID NO: 33315 - DNA, 80 bp, Homo sapiens; identical to SEQ ID NO: 13004
  chr20:44540762-44540842
  hypo

SEQ ID NO: 33316 - DNA, 35 bp, Homo sapiens
  chr20:44560414-44560449
  hypo
aagatacttaactatccaggccggaggcggtggct

SEQ ID NO: 33317 - DNA, 30 bp, Homo sapiens
  chr20:44567519-44567549
  hypo
ggatttctccacatcggtgggtggtcactg

SEQ ID NO: 33318 - DNA, 30 bp, Homo sapiens
  chr20:44577543-44577573
  hypo
ccaggagagctggccgcaaatccatgatct

SEQ ID NO: 33319 - DNA, 21 bp, Homo sapiens
  chr20:44601522-44601543
  hypo
gggcgctgtgagtcacgcctg

SEQ ID NO: 33320 - DNA, 35 bp, Homo sapiens
  chr20:44601782-44601817
  hypo
ctgggcgacagagcgagaccctctttcaaaaaata

SEQ ID NO: 33321 - DNA, 15 bp, Homo sapiens
  chr20:44602068-44602083
  hypo
aaaactcctaagcag

SEQ ID NO: 33322 - DNA, 121 bp, Homo sapiens
  chr20:44602322-44602443
  hypo
attgccttccagcctggggaacaacagcggaaactcttgtctcaaacaaacaaacaaaaagtcctaaggagaagacctattaataaggagaaaaggtccgggctcggtgggtcacacctgt

SEQ ID NO: 33323 - DNA, 292 bp, Homo sapiens; identical to SEQ ID NO: 13010
  chr20:44660584-44660876
  hypo

SEQ ID NO: 33324 - DNA, 30 bp, Homo sapiens
  chr20:44869323-44869353
  hypo
ctgtatgagcatgtccgagggcatcactgt

SEQ ID NO: 33325 - DNA, 225 bp, Homo sapiens; identical to SEQ ID NO: 13016
  chr20:44935839-44936064
  hypo

SEQ ID NO: 33326 - DNA, 104 bp, Homo sapiens; identical to SEQ ID NO: 13017
  chr20:44936314-44936418
  hypo

SEQ ID NO: 33327 - DNA, 35 bp, Homo sapiens; identical to SEQ ID NO: 13018
  chr20:44937332-44937367
  hypo

SEQ ID NO: 33328 - DNA, 30 bp, Homo sapiens; identical to SEQ ID NO: 13019
  chr20:44937614-44937644
  hypo

SEQ ID NO: 33329 - DNA, 30 bp, Homo sapiens
  chr20:44978833-44978863
  hypo
gctggcctggtgctcgccccttgtgtgacc

SEQ ID NO: 33330 - DNA, 31 bp, Homo sapiens
  chr20:45000400-45000431
  hypo
tggcagccacctcccccgccagcctcccctg

SEQ ID NO: 33331 - DNA, 177 bp, Homo sapiens; identical to SEQ ID NO: 13022
  chr20:45524132-45524309
  hypo

SEQ ID NO: 33332 - DNA, 237 bp, Homo sapiens
  chr20:45833373-45833610
  hypo
cagcacagagccccacgtggggcaggcccacatcagcgacacttggaggaatataggtgacctttgcttctctagactaaagaaaataaataagaatatagatggggtcctgatgtaccctgatatgaaggtggcagctaaatgctgacctttggaaaactcaactctgattatcgccactcgactgtatagtttaaaatggacggtcggccgggcgcggtgactcatgcctgtaat

SEQ ID NO: 33333 - DNA, 190 bp, Homo sapiens
  chr20:45837755-45837945
  hypo
gggggtgttcatgacctctcacggccccttctgtgtttggtcgtgcaaacctgacacagccatcccgaccaaatggaaaactgcaaattcgaggacgaccacggcatttttccaaaacagtttaattaaaaaaaggtaaagaaatctgaaaaaactgggggggtgggggaaggaacgggcaaacccaaaa

SEQ ID NO: 33334 - DNA, 41 bp, Homo sapiens
  chr20:45880360-45880401
  hypo
gaaaactctttatacccgtctctgtccggcaagaaatctga

SEQ ID NO: 33335 - DNA, 50 bp, Homo sapiens
  chr20:45949145-45949195
  hypo
aattaccctggccagccaccacgtaaagatgctgcggctgtgcatggtgg

SEQ ID NO: 33336 - DNA, 37 bp, Homo sapiens
  chr20:45968503-45968540
  hypo
gtgaggcaccacacccggccccaagaaccattctgag

SEQ ID NO: 33337 - DNA, 83 bp, Homo sapiens
  chr20:46011039-46011122
  hypo
gctgattctaatgtgtagccacggttgagcgccactgttctagaaaactacaagtttaaactagaacaaaaagaggcattttg

SEQ ID NO: 33338 - DNA, 28 bp, Homo sapiens
  chr20:46103341-46103369
  hypo
tctggccgcctttcttcatttttgtggg

SEQ ID NO: 33339 - DNA, 102 bp, Homo sapiens
  chr20:46823498-46823600
  hypo
gctccagggacaggagtgttgcgggcgaatgagctggacgagggccagccctgcagggcgcgcagacttgcggctctcttcgcaggcttttggcccaaacag

SEQ ID NO: 33340 - DNA, 31 bp, Homo sapiens
  chr20:47214550-47214581
  hypo
aggtggggagaggacccggaggacaaagggc

SEQ ID NO: 33341 - DNA, 171 bp, Homo sapiens
  chr20:47296130-47296301
  hypo
cagggtggaggtgaacgaggccagctgagtcagagtcacaggggcggagggcccctaccttggacatgatgtcctccagctcacttcgggccttgtaggtgccatcgtcgtagcggaagcgatacatcacctgctcattcttgaactggtgcttgtcggaaactggagaga

SEQ ID NO: 33342 - DNA, 264 bp, Homo sapiens; identical to SEQ ID NO: 13025
  chr20:47443672-47443936
  hypo

SEQ ID NO: 33343 - DNA, 483 bp, Homo sapiens; identical to SEQ ID NO: 13026
  chr20:47443944-47444427
  hypo

SEQ ID NO: 33344 - DNA, 128 bp, Homo sapiens; identical to SEQ ID NO: 13027
  chr20:47444452-47444580
  hypo

SEQ ID NO: 33345 - DNA, 183 bp, Homo sapiens; identical to SEQ ID NO: 13028
  chr20:47444609-47444792
  hypo

SEQ ID NO: 33346 - DNA, 241 bp, Homo sapiens; identical to SEQ ID NO: 13029
  chr20:47444920-47445161
  hypo

SEQ ID NO: 33347 - DNA, 31 bp, Homo sapiens
  chr20:47559246-47559277
  hypo
gcctctttcttaatggcgttaaaattcatat

SEQ ID NO: 33348 - DNA, 31 bp, Homo sapiens
  chr20:47601990-47602021
  hypo
aggtgatgtatgcctacgtggaccaacttga

SEQ ID NO: 33349 - DNA, 31 bp, Homo sapiens; identical to SEQ ID NO: 13030
  chr20:47663142-47663173
  hypo

SEQ ID NO: 33350 - DNA, 159 bp, Homo sapiens
  chr20:47688820-47688979
  hypo
aggatgaagaggaagccggcttattggagctcttaaaatcccagatttgtgataatgccgcactctatgcacaaaagtacgatgaagaattccagcgatacctgcctcgttttgttacagccatctggaatttactagttacaacgggtcaagaggtta

SEQ ID NO: 33351 - DNA, 30 bp, Homo sapiens
  chr20:47713208-47713238
  hypo
agttcagtgtatggcgttggtttgtgttga

SEQ ID NO: 33352 - DNA, 31 bp, Homo sapiens
  chr20:47745702-47745733
  hypo
tagtaaaataaaaacacgaaaagaagctcag

SEQ ID NO: 33353 - DNA, 61 bp, Homo sapiens
  chr20:47766302-47766363
  hypo
aaaatggaaatgcagcgtaacaaaagaaaaacaaatcgctcctgtgcggccagccatgaag

SEQ ID NO: 33354 - DNA, 31 bp, Homo sapiens
  chr20:47768035-47768066
  hypo
tagaaaagataatgtgcggtgacatctcccc

SEQ ID NO: 33355 - DNA, 39 bp, Homo sapiens
  chr20:47799075-47799114
  hypo
gacaaagagcagaaggtatgccgggcacagtggctcacg

SEQ ID NO: 33356 - DNA, 29 bp, Homo sapiens
  chr20:47824321-47824350
  hypo
gctgggattataggcgtgagccaccacgc

SEQ ID NO: 33357 - DNA, 183 bp, Homo sapiens
  chr20:47905420-47905603
  hypo
gattgggaagtttcccagctccgtttatcggtacttggccgtaccgataaaggggatggacttggagtgaccaggtcttagtcacatgtattttcataccctaaacaagaagcggtatagaccagaatggagcactgattgtaatccaccttctttcttagaaactggcgatggaatatgaga

SEQ ID NO: 33358 - DNA, 1123 bp, Homo sapiens; identical to SEQ ID NO: 13031
  chr20:47934835-47935958
  hypo

SEQ ID NO: 33359 - DNA, 30 bp, Homo sapiens
  chr20:47988940-47988970
  hypo
gagtaagggttttgcgctgggatcgtggct

SEQ ID NO: 33360 - DNA, 30 bp, Homo sapiens
  chr20:48098627-48098657
  hypo
ctccaggtagatctcgtcgatgccccagta

SEQ ID NO: 33361 - DNA, 30 bp, Homo sapiens; identical to SEQ ID NO: 13036
  chr20:48100397-48100427
  hypo

SEQ ID NO: 33362 - DNA, 123 bp, Homo sapiens
  chr20:48259014-48259137
  hypo
acataaaatgcaaactgcaagcgctggcgctggagcatgggaagcaggtgtctgaacaggactgggaggtgctcgtggcggttccggaaggggataaggatcgccacctggagtggattacag

SEQ ID NO: 33363 - DNA, 30 bp, Homo sapiens
  chr20:48334214-48334244
  hypo
tactatacatatacgcgtttacttgttcat

SEQ ID NO: 33364 - DNA, 354 bp, Homo sapiens
  chr20:48504342-48504696
  hypo
cttggttgtgtctctcgacccaggacctgcaccacgggcgcatccagatgaaaactctcaccaacaagtggtacgaggaggtacgccagggcccctccggctccgaggacgacgagcaggagctgctctgacgccaggtgccaaggcttcaggcaggcaggcccaggatgggcgtttgctgcgcacagacactcagcaggggcctcgcagagatgcgtgcatccagcagccccttcaagacataagagggcggggcgaggtactggctgcagagtcgccttagtccagaacctgacaggcctctggagccaggcgacttcttgggaaactgtcatctcccgactcctccctgag

SEQ ID NO: 33365 - DNA, 509 bp, Homo sapiens; identical to SEQ ID NO: 13039
  chr20:48598695-48599204
  hypo

SEQ ID NO: 33366 - DNA, 30 bp, Homo sapiens; identical to SEQ ID NO: 13040
  chr20:48599506-48599536
  hypo

SEQ ID NO: 33367 - DNA, 31 bp, Homo sapiens
  chr20:48673064-48673095
  hypo
acttagcagtatactccggccctctctgcaa

SEQ ID NO: 33368 - DNA, 110 bp, Homo sapiens
  chr20:48673861-48673971
  hypo
tgcccctccgcttgtgcggctgaatccaggatttttcccttgacttgccccgcacagtgaggcctggcattttcttcccgctccccatgctggcacgtgacacagccccg

SEQ ID NO: 33369 - DNA, 121 bp, Homo sapiens
  chr20:48707850-48707971
  hypo
gggattacaggcgtgaatcaccacacctgggcttttgtcattaaaaatttttacaagaatatattcatattcattaatcagtcatataacttaaggcttttttttttttttttttgagatg

SEQ ID NO: 33370 - DNA, 35 bp, Homo sapiens
  chr20:48720798-48720833
  hypo
tagggccagactccgtctcaaaaaaaaaaaaaaaa

SEQ ID NO: 33371 - DNA, 19 bp, Homo sapiens
  chr20:48767530-48767549
  hypo
ccagctccatttttttctg

SEQ ID NO: 33372 - DNA, 199 bp, Homo sapiens; identical to SEQ ID NO: 13042
  chr20:48771161-48771360
  hypo

SEQ ID NO: 33373 - DNA, 31 bp, Homo sapiens
  chr20:48887085-48887116
  hypo
ttgggggtatcttgtccgatggttattgttt

SEQ ID NO: 33374 - DNA, 31 bp, Homo sapiens
  chr20:48916106-48916137
  hypo
aaaaaaaaatggaggccggtcacggtggctg

SEQ ID NO: 33375 - DNA, 31 bp, Homo sapiens
  chr20:48975789-48975820
  hypo
gctgacaagaatcagacgtggttcctgccct

SEQ ID NO: 33376 - DNA, 31 bp, Homo sapiens
  chr20:48988162-48988193
  hypo
actggcaaagccctggcggtggtgtggtagc

SEQ ID NO: 33377 - DNA, 178 bp, Homo sapiens
  chr20:49046943-49047121
  hypo
ccagccctgcattttcaatcaccgcgactgggagaggaagccaaccgccggccctagtgggtggcagccaggaatgctgctcggtaccctacagcgcacaacacggcccttgccagaaagaatcaacagggctgtgggcgaggagccctggtctcacgagaggttgcccacccctcac

SEQ ID NO: 33378 - DNA, 182 bp, Homo sapiens
  chr20:49197042-49197224
  hypo
cagtgatgtgatagaggtgtccgctgaggtggtcagggaaggctgcttgcagtaggtggccgtgcacggaaagtttgcagaatgagcaggtgttagttccagctggagatgactgccggctgtgcccttggtacctgctttctggagggaagttttaagacgtgtgcatacttgacccagca

SEQ ID NO: 33379 - DNA, 247 bp, Homo sapiens
  chr20:49203140-49203387
  hypo
ccatccaccagccgccgtctgtgagctccaccagcactcgcagcaagtcagtcgggctgagagtgtggttgtagaaaccctggctttgtgccttcccaccttccccagctcaccaaggtgacacctggctgctgctgaaatggcctgagcagtcttgcattagcagggccagccacctgccagcctgctgcatccccagtgcctcttgacgcagaagtgccgagcagctgaccggcagcgaggcctg

SEQ ID NO: 33380 - DNA, 603 bp, Homo sapiens
  chr20:49204053-49204656
  hypo
acctctaggatgttccgctgaatgggaaccctgccttgcctctggcttctatcccaaaggtctaagaagacagcgaacactccctgccaccccagccatggaggaggcctgccttggcaggatgctacaaagggtggaggtcggctctgtgccagggctgctaacggtgcccatcccaggtgccccagagttgttctgcctgctgggagagctgggtgtggcctctcgcagattctaagggccccaggcaccccgctgcgctgcacagtttgtgccactttttaccgaacgacagtgtggtttcccgggctgccgcccgcacggcctccaggtcagactggcacaggctggcagtctggtcgatgctttcaatgccctgttcgagattaggagaaaaagaaccctttagggggccttctcaacagcaggtagagtccacttagtggccctgcagggccagtcctagcatggtctctggggcctcagccccttccttttctccaggcttccaggttttttaggtggcctcaggttcatgagaggcacctctggactctggaagcgtctcgcctcttcagcccttacacccgctagggagccagg

SEQ ID NO: 33381 - DNA, 256 bp, Homo sapiens
  chr20:49206898-49207154
  hypo
cgcagtggagtccagcgtctgcggctgcaaagggaaacccaggagtgggtttgccctcactcagtcgagtggctgcaccttcaactgcacgggtggggcgatggaggggcccaggtgtagagttggctccagggacctgggcccagagccaaaagagaatggccgcctttccatctgcaggtggctctccaaagtgtctgctgctttgggaagacagactgggagtaggatcgggtcctcccgctcctcctacaca

SEQ ID NO: 33382 - DNA, 31 bp, Homo sapiens
  chr20:49223730-49223761
  hypo
ctttgagaagctcagccgatgagcaggggac

SEQ ID NO: 33383 - DNA, 31 bp, Homo sapiens
  chr20:49224077-49224108
  hypo
agggtgtctgcagacccgcaggcaccctggg

SEQ ID NO: 33384 - DNA, 408 bp, Homo sapiens
  chr20:49224945-49225353
  hypo
cagcttgatggtacccaactccgtgatgtccaccacgatgacctgcggccgcgtcgtgaagaagtcggcgatgtcacacgtcactgcacccacagccagcgagcccaggccccgcaactccgtcacctgggggtgggggctggagggtggtgtctgagccgaacacccaggcaccccagccctgcccccgggccccatccccaccttgatgtccaggttctcatgcagcgtggggatgaaggccttctcctcttcgtcccaggtctggctgtcatctgactcgatccgacccttgagcttccaacgctggcggcccagacgcatgagcacctgtgaaccagcccgagaggggccgcgtcagcccaggtgggtgtccccttgctgtccgcccagggccctccctgccag

SEQ ID NO: 33385 - DNA, 107 bp, Homo sapiens; identical to SEQ ID NO: 13043
  chr20:49226115-49226222
  hypo

SEQ ID NO: 33386 - DNA, 66 bp, Homo sapiens
  chr20:49230521-49230587
  hypo
agccaggatacagagacggccgcttgtttgcttgcttatttcattcattcattcattcattcattc

SEQ ID NO: 33387 - DNA, 174 bp, Homo sapiens
  chr20:49236428-49236602
  hypo
agacaagacccatccacgcttccccaggaagagacagagaggaggcgaggtagaggaatgcacttcttaaaggcagcacacagcccagccttacttgaggcctcttttcaatgcttcgaagatcttcttcacctgctggggcttcgggtctgcacagaccgaccccttccgcag

SEQ ID NO: 33388 - DNA, 30 bp, Homo sapiens
  chr20:49237361-49237391
  hypo
aagcccaggcacagccgctgcagtgggtgt

SEQ ID NO: 33389 - DNA, 30 bp, Homo sapiens
  chr20:49240854-49240884
  hypo
agaggttagggaccccggcaggtgggcagc

SEQ ID NO: 33390 - DNA, 102 bp, Homo sapiens
  chr20:49244320-49244422
  hypo
gacagaatgacacccacaaaaatttctagagcacaacagcagagcgttcaatcaaagtacagagcacaggctacacgctcatgaagccgcccttgggtacag

SEQ ID NO: 33391 - DNA, 145 bp, Homo sapiens
  chr20:49247307-49247452
  hypo
gcgaaggaggcgctccggcccacgacccccacggcccctgtgtccccaggggacaggaaccgcaacctcaccgacatggtggtcacctgcaaggagaggacaggagagtcagcctggcatcaccatccagcgagtgccgtccgca

SEQ ID NO: 33392 - DNA, 166 bp, Homo sapiens
  chr20:49261891-49262057
  hypo
tccatcctgtgtctgcggattctcccaggtctgtaaggcagcagggagatgcggcctctcccactccacccaacacgtagccagggcgaggtggggccgggggagaggctgacattcaaaggcatctgagtggtaagaggtgagcgagtgaggtgaatggggacta

SEQ ID NO: 33393 - DNA, 151 bp, Homo sapiens
  chr20:49264293-49264444
  hypo
caggcatgagccaccgcacccggccacctcattctcactatgtgaccttggacaagtcacttatcctctttgagcctccagttcctcatctatacattggaagccactgaaattatcttacagttactttcagttgcgaggacttgctctt

SEQ ID NO: 33394 - DNA, 25 bp, Homo sapiens
  chr20:49281971-49281996
  hypo
ttttgagatggagtctcgccctgtc

SEQ ID NO: 33395 - DNA, 81 bp, Homo sapiens
  chr20:49282235-49282316
  hypo
catgagccactgtgcctgccgggtgggtttcttatggcgaatgatcccacaccacttttcagtgcacgtagttacatggag

SEQ ID NO: 33396 - DNA, 146 bp, Homo sapiens
  chr20:49286717-49286863
  hypo
gaagagggcgctctgagccaaggtagagccaagtcaaccaggcaggcggaggcccagagcatgagttttacctactgccggtttcggccaaaatgccagaaagccaagcagcaatcttgggcatcggacttggctagaaatccctc

SEQ ID NO: 33397 - DNA, 30 bp, Homo sapiens
  chr20:49287169-49287199
  hypo
aggcaggcaccacaccgtcctgtggagcat

SEQ ID NO: 33398 - DNA, 123 bp, Homo sapiens
  chr20:49290532-49290655
  hypo
agtcatgctgctttcaatccacgggagagccggacacgagcgttccaaggcaggagcagaactccatgttggccattataaagacaagattccttttcccccgctttttatagcctctctggg

SEQ ID NO: 33399 - DNA, 36 bp, Homo sapiens
  chr20:49323814-49323850
  hypo
acagacagctttaaaaggtgacgaagggggccgggc

SEQ ID NO: 33400 - DNA, 77 bp, Homo sapiens
  chr20:49331493-49331570
  hypo
agcactctgagaggcacggggctgccggagagagaagagttgtctaaactgaggaaggtagccaggcgcggtggctc

SEQ ID NO: 33401 - DNA, 92 bp, Homo sapiens
  chr20:49346547-49346639
  hypo
acccatctgagtacccgctgggagtcgggttctgtgccactcaatgccagcaaagcacaagccgtccctgcgccttcgggagctttcattct

SEQ ID NO: 33402 - DNA, 25 bp, Homo sapiens
  chr20:49350864-49350889
  hypo
aaccaaaactaggtagtgtgccggt

SEQ ID NO: 33403 - DNA, 102 bp, Homo sapiens
  chr20:49358021-49358123
  hypo
ctgtctggtttaccatcaggtcgcagcatctaaatctggcagacttacttagtgtactataatgcatgcactcttttttttgtggagtggggacggagtcta

SEQ ID NO: 33404 - DNA, 41 bp, Homo sapiens
  chr20:49358362-49358403
  hypo
gtgagccaccgcgcccggccgcactctgtcttttaagcaaa

SEQ ID NO: 33405 - DNA, 30 bp, Homo sapiens
  chr20:49406842-49406872
  hypo
tatggttttagagatcggggtcccagacaa

SEQ ID NO: 33406 - DNA, 30 bp, Homo sapiens
  chr20:49457312-49457342
  hypo
cacgcgagaacgagcgaagtctggtctgcg

SEQ ID NO: 33407 - DNA, 34 bp, Homo sapiens
  chr20:49556445-49556479
  hypo
ccaccagccaacgcccatccgcaatcagagatct

SEQ ID NO: 33408 - DNA, 31 bp, Homo sapiens; identical to SEQ ID NO: 13044
  chr20:49574742-49574773
  hypo

SEQ ID NO: 33409 - DNA, 31 bp, Homo sapiens
  chr20:49610453-49610484
  hypo
aagcaggatccaggcacgggctccagtgcat

SEQ ID NO: 33410 - DNA, 134 bp, Homo sapiens; identical to SEQ ID NO: 13045
  chr20:49639050-49639184
  hypo

SEQ ID NO: 33411 - DNA, 639 bp, Homo sapiens; identical to SEQ ID NO: 13046
  chr20:49639217-49639856
  hypo

SEQ ID NO: 33412 - DNA, 114 bp, Homo sapiens; identical to SEQ ID NO: 13047
  chr20:49639882-49639996
  hypo

SEQ ID NO: 33413 - DNA, 46 bp, Homo sapiens; identical to SEQ ID NO: 13048
  chr20:49640094-49640140
  hypo

SEQ ID NO: 33414 - DNA, 18 bp, Homo sapiens
  chr20:49874168-49874186
  hypo
ctggaaagtgctaggatg

SEQ ID NO: 33415 - DNA, 55 bp, Homo sapiens
  chr20:50084756-50084811
  hypo
ctctgtcttgagtggtggttacgtgggtatatgcgattgtcaaaaatcactgaac

SEQ ID NO: 33416 - DNA, 24 bp, Homo sapiens
  chr20:50266158-50266182
  hypo
aatcgcacagctaggccgggtgca

SEQ ID NO: 33417 - DNA, 31 bp, Homo sapiens
  chr20:50309616-50309647
  hypo
acatggccaactactgcggccatcctctcag

SEQ ID NO: 33418 - DNA, 31 bp, Homo sapiens
  chr20:50326110-50326141
  hypo
tagaaatttagcagggcgtggtggtgtgcac

SEQ ID NO: 33419 - DNA, 103 bp, Homo sapiens
  chr20:50337347-50337450
  hypo
aggcgacacagcgagactctgtctcacaaaaaacaaaaacaaaaaccgtttcctgatgatcacaatatcagtgcttaaaggcgcaggcaccacctggcagttg

SEQ ID NO: 33420 - DNA, 42 bp, Homo sapiens
  chr20:50346532-50346574
  hypo
ccacgcatcaaggccacgcccacgcatcgaggctgtgctcat

SEQ ID NO: 33421 - DNA, 18 bp, Homo sapiens
  chr20:50378296-50378314
  hypo
tcaaaaaaaaaaaaaaat

SEQ ID NO: 33422 - DNA, 1657 bp, Homo sapiens; identical to SEQ ID NO: 13052
  chr20:50383661-50385318
  hypo

SEQ ID NO: 33423 - DNA, 94 bp, Homo sapiens
  chr20:50390635-50390729
  hypo
ttggaaagaaaaagaacgtcttaggttgagaactttccatgaacaacaatatctagctaaaatttaataatattctgggctgtgtgtgtatttt

SEQ ID NO: 33424 - DNA, 80 bp, Homo sapiens
  chr20:50405411-50405491
  hypo
tttggtggtaaaagctcgcccacaaatgttgcacacaaaaggcttctctccagtgtgagtccgctcgtggatctgaagag

SEQ ID NO: 33425 - DNA, 31 bp, Homo sapiens
  chr20:50407492-50407523
  hypo
ccaggctgcaggtcaccgggcaaggagccac

SEQ ID NO: 33426 - DNA, 146 bp, Homo sapiens
  chr20:50407904-50408050
  hypo
gtttgacatccaccgcggagatgttcggtggcttccccttccctttcttggatgtgtctagcgccacagtggagaaagggctctggaagagcaccgagcccggggcctgaggaagcaaagcgctcgggaggcgggacatgacgttc

SEQ ID NO: 33427 - DNA, 30 bp, Homo sapiens
  chr20:50408412-50408442
  hypo
ggcagggagtgcatccgcgctccgctgatt

SEQ ID NO: 33428 - DNA, 39 bp, Homo sapiens
  chr20:50441825-50441864
  hypo
aataaggactccaagccgggcgtggtggctcgcacctgt

SEQ ID NO: 33429 - DNA, 21 bp, Homo sapiens
  chr20:50602380-50602401
  hypo
gcccagctccaagctgcttct

SEQ ID NO: 33430 - DNA, 35 bp, Homo sapiens
  chr20:50805265-50805300
  hypo
ttcaataaagacatagcgggtagatcatgaggtca

SEQ ID NO: 33431 - DNA, 121 bp, Homo sapiens
  chr20:50805539-50805660
  hypo
gtttataagaaaatttagaagaaacttataaagaaggggaaaatcactcaatatttccatctctgcctaccatgaatattataaaatatttttttccattcattttctttacacttaaaag

SEQ ID NO: 33432 - DNA, 34 bp, Homo sapiens
  chr20:50805899-50805933
  hypo
acttccagcctggtgacagcgagacttcatctca

SEQ ID NO: 33433 - DNA, 30 bp, Homo sapiens; identical to SEQ ID NO: 13061
  chr20:51589970-51590000
  hypo

SEQ ID NO: 33434 - DNA, 30 bp, Homo sapiens; identical to SEQ ID NO: 13062
  chr20:51963662-51963692
  hypo

SEQ ID NO: 33435 - DNA, 44 bp, Homo sapiens
  chr20:52179946-52179990
  hypo
tacaggcgtgaaccaccgtgcccggccaagattctttataaagc

SEQ ID NO: 33436 - DNA, 167 bp, Homo sapiens; identical to SEQ ID NO: 13063
  chr20:52209196-52209363
  hypo

SEQ ID NO: 33437 - DNA, 33 bp, Homo sapiens
  chr20:52281657-52281690
  hypo
gctaacgtgcccggctcttttttttctttttct

SEQ ID NO: 33438 - DNA, 19 bp, Homo sapiens
  chr20:52311457-52311476
  hypo
ctaatttaaagtagaagct

SEQ ID NO: 33439 - DNA, 78 bp, Homo sapiens
  chr20:52311775-52311853
  hypo
aaaaaaaaaaaaaagtcgaagctgtctattaaaaataaatgatagtaataatctaacgtggttcatgaggaaatttaa

SEQ ID NO: 33440 - DNA, 23 bp, Homo sapiens
  chr20:52319011-52319034
  hypo
ccgtctcaaacaaaacaaaacaa

SEQ ID NO: 33441 - DNA, 31 bp, Homo sapiens
  chr20:52360542-52360573
  hypo
tgatgaacgcaagccacgaggtgaagatcta

SEQ ID NO: 33442 - DNA, 30 bp, Homo sapiens
  chr20:52484679-52484709
  hypo
tggcgctaatatttacgactagaacattct

SEQ ID NO: 33443 - DNA, 68 bp, Homo sapiens
  chr20:52538602-52538670
  hypo
aagaactagaaacaacctaaacgtgcatcaggagttcaagaccagcccggccaagagaccagcctcgc

SEQ ID NO: 33444 - DNA, 30 bp, Homo sapiens
  chr20:52561278-52561308
  hypo
gactggaccagagacgtaaataatacacct

SEQ ID NO: 33445 - DNA, 18 bp, Homo sapiens
  chr20:53530452-53530470
  hypo
tttagattagtcttttaa

SEQ ID NO: 33446 - DNA, 334 bp, Homo sapiens; identical to SEQ ID NO: 13074
  chr20:54934185-54934519
  hypo

SEQ ID NO: 33447 - DNA, 30 bp, Homo sapiens
  chr20:54944843-54944873
  hypo
gctccttaactgatcggggtcagggcagag

SEQ ID NO: 33448 - DNA, 31 bp, Homo sapiens
  chr20:54974275-54974306
  hypo
ttgagaaagcacatgacggtgctgaagtttg

SEQ ID NO: 33449 - DNA, 26 bp, Homo sapiens
  chr20:55198511-55198537
  hypo
cttttttttttgagaccgagtctagc

SEQ ID NO: 33450 - DNA, 136 bp, Homo sapiens; identical to SEQ ID NO: 13083
  chr20:55206293-55206429
  hypo

SEQ ID NO: 33451 - DNA, 134 bp, Homo sapiens; identical to SEQ ID NO: 13084
  chr20:55206463-55206597
  hypo

SEQ ID NO: 33452 - DNA, 22 bp, Homo sapiens
  chr20:55206736-55206758
  hypo
cgaggtgcaggtgagcggcgct

SEQ ID NO: 33453 - DNA, 30 bp, Homo sapiens
  chr20:55566744-55566774
  hypo
gctgcgtttactgtccggtgtaactggata

SEQ ID NO: 33454 - DNA, 31 bp, Homo sapiens
  chr20:55741638-55741669
  hypo
acagtggagcgatggagaaggccatgggtag

SEQ ID NO: 33455 - DNA, 205 bp, Homo sapiens
  chr20:55925380-55925585
  hypo
tagtaagagtagttcacgtatgatttcacttgaccctaattaggaacagccctggcatcattttccccaccatgcagcaggaaactgaggcccaaagagccccgaggtgggctcagggtaccccagtgggcaaacagggagaggccagggcgggaaacccgcggccgacctcgccttgttcggaggcagcgttagagcagcttct

SEQ ID NO: 33456 - DNA, 30 bp, Homo sapiens
  chr20:55953199-55953229
  hypo
gcctcatctctgtacgaatttgggtcccag

SEQ ID NO: 33457 - DNA, 106 bp, Homo sapiens
  chr20:55959113-55959219
  hypo
ctgacaatccccagcatcctacgggcccgaatccacactgcggattccgtcagctcactggcggcagcactctctggtgtctttttttttttttttttttttgaga

SEQ ID NO: 33458 - DNA, 226 bp, Homo sapiens
  chr20:55959338-55959564
  hypo
aggagtgaaccactgcacctggccttctcttgtgtcttttgtctttcatttctcttcttcactacccgtcagcatgataggtttcttcctcctcttatgaatcccagtgtcaagatacagcctgatcgccccttaatacggtgccgccattactccagacccctctgcaagcattggtcattcatcagctttcacgaggtgaactggggacgaggcaggggcttgg

SEQ ID NO: 33459 - DNA, 30 bp, Homo sapiens
  chr20:55959781-55959811
  hypo
tcttcggtgagggggcgtttccctctggtg

SEQ ID NO: 33460 - DNA, 98 bp, Homo sapiens; identical to SEQ ID NO: 13095
  chr20:55966871-55966969
  hypo

SEQ ID NO: 33461 - DNA, 219 bp, Homo sapiens
  chr20:55969521-55969740
  hypo
aagtgtagcagtgggaggagccgctggctgaggggtgctggagggtggccggggcccttctagcctgtgcgagtggccgggcagctcaggttcctgccggggtgcctctgtcctcctgggaagggagcgtgtagggtggtgggagcaggcggccctgtccgtctcgtcctggaatctgttttgtagatgtctagagtcgtcttagagggtgtttgggga

SEQ ID NO: 33462 - DNA, 209 bp, Homo sapiens
  chr20:56001370-56001579
  hypo
agatggatgtttactcttccccgcttcgagcacaggccatttgctctgcacggcacctgtctctttcccactaaatgcatcttgaccaggccccttagcacacacggggcttgctctttctttgccgtcagctgcgtgctatctgtggcgtgcatggggcaggtggggtgggcgttcccatccccagcgatggaggcaggagctctttc

SEQ ID NO: 33463 - DNA, 30 bp, Homo sapiens
  chr20:56099533-56099563
  hypo
cagcacacatcctgcgcctggcaaggttcc

SEQ ID NO: 33464 - DNA, 372 bp, Homo sapiens
  chr20:56126191-56126563
  hypo
gcgattggaatgagtcgggccaggtggaaaacgaatctggccattcatcagagctgtcaggacgggtctctcaccagaagtgtttaccagtgttcaccatgagcttccgagttctgctaacgggagcttcgactgtaactcagaggacttggaaaacgacttgggtgacttagcgtacctatgttattgaattcgcctaagtgttgcgactcttgatgctgacacttacgagaatgcacagtgggacttccagaaaatttaacagtgcagttcagaaaaatgcctccgtgggggtggggggctttgaggaagtccaggtggcatgggactggggaggggaagaagcaaggagcacagcggcgtcgggagtga

SEQ ID NO: 33465 - DNA, 30 bp, Homo sapiens
  chr20:56264984-56265014
  hypo
ggccagtggctgcatcgcccggcagcagcc

SEQ ID NO: 33466 - DNA, 30 bp, Homo sapiens
  chr20:56265334-56265364
  hypo
accacccgggggggccgggcccagtgcctg

SEQ ID NO: 33467 - DNA, 30 bp, Homo sapiens
  chr20:56265671-56265701
  hypo
cctggagagcaggcgcgcaccccagcctgc

SEQ ID NO: 33468 - DNA, 23 bp, Homo sapiens
  chr20:56577649-56577672
  hypo
acagaaagccaaacaccgcatgt

SEQ ID NO: 33469 - DNA, 1032 bp, Homo sapiens
  chr20:56780189-56781221
  hypo
caaaatccaagcccatttctacggcctctgtgggattaagacgtcggttccaattcttcagcctctctgcctctgcccctcgccgtggcctcatcggagggaggcatcgctccctgaccctcgactttcagcttggccactcgactcgcttggcttcccacctacagccaggagtgacggcataacaggtctgcgcccgcccctgaagacgcctcccacgtccccgctccccacgtccgcgcccacacctgaagacgcctcccacgtccccacgtctgcgtccgcacctgaagacgcctcccacgtccccgcaccccacgtctgcacccacacctgaagacacctcccacgtccccgcaccccacgtccccacgtctgcgcccgcacctgaagacgcctcccacgtccccgcaccccaagtccccacgtctgcgcccacacctgaagacgcctcccacgtcccgtctgcgtccgcacctgaagacgcctcccacgtccccactccccacatctgcgcccacacctgaagacgcctcccacgtctgcacccacacctgaagacacctcccacgtccccgcaccccacgtctgcgcccacacctgaagacgcctcccacgtcccgtctgcgccgcacctgaagacgcctcccacgtccccactccccacatctgcgcccacacctgaagacgcctcccacgtctgcacccacacctgaagacacctcccacgtccccgcaccccacgtccccacgtctgcgcccgcacctgaagacgcctcccacgtccccacgtctgcgcccgcacctgaagacgcctcccacgtccccgctccccacgtctgcacccacacctgaagacgcctcccacatccccgcaccccacatccccgcgtctgtgcccgcacctgaagacgcctcccacgtcgacgcctcctaggtctccacttcccacgtccctgcttgtggagcctgtgccccggccgacctgctggtgccaggacagtgagagacgcctgcagcagagctgcccag

SEQ ID NO: 33470 - DNA, 142 bp, Homo sapiens; identical to SEQ ID NO: 13099
  chr20:56785103-56785245
  hypo

SEQ ID NO: 33471 - DNA, 36 bp, Homo sapiens
  chr20:56941011-56941047
  hypo
ctatttttaaaccattcgttacgctgtgtagacaga

SEQ ID NO: 33472 - DNA, 111 bp, Homo sapiens
  chr20:56941587-56941698
  hypo
cagtccattacacattcgatacaggtatcaaaatatcataggcacctcaaagacatgtacaactcttaatttaacatttttgaaagaaaaaaaaaccggccagagcattaa

SEQ ID NO: 33473 - DNA, 150 bp, Homo sapiens
  chr20:56977724-56977874
  hypo
gggtctaaggcataggcgaggaagggttggtgtttaggagaaagctgagaaagatgccaggcgcaatggctcacacctgtaatccaaggattttgggactccgaggcaagcgaatcagttgaggccaggaatttgagatgagcctgggca

SEQ ID NO: 33474 - DNA, 213 bp, Homo sapiens
  chr20:57009362-57009575
  hypo
ctgtagcagacatttacggtaggcttgcagtagtgaaagatccatggactaggaatcagaagactgggtcctcggccttattcccagctctgtcatgcgtgattttgtggctcttaggttggtgacctgcaaaatggagatgttggtcatccttgcttacttcaccaggggcgtccatcctaagacataagagaatgccggtaaattgcttta

SEQ ID NO: 33475 - DNA, 30 bp, Homo sapiens
  chr20:57041607-57041637
  hypo
aattcatccatccacgtttattggtcctga

SEQ ID NO: 33476 - DNA, 281 bp, Homo sapiens; identical to SEQ ID NO: 13101
  chr20:57224798-57225079
  hypo

SEQ ID NO: 33477 - DNA, 335 bp, Homo sapiens; identical to SEQ ID NO: 13102
  chr20:57225218-57225553
  hypo

SEQ ID NO: 33478 - DNA, 39 bp, Homo sapiens
  chr20:57241749-57241788
  hypo
tctgggattacaggcgtgagccaccgcgcccagccgatt

SEQ ID NO: 33479 - DNA, 235 bp, Homo sapiens
  chr20:57244308-57244543
  hypo
tcccaggcttgccctgagcctcgggcttgttctcttagctcttccacaggtgccagcgtgccgtgcaggccctgccgagccgggcccgggcctgctccgagcaggaggggcggctgcttgggaacgtggtggcctcgctggcgcaggccctgcaggaactctccaccagcttccggcacgcacagtcaggctacctcaaacgtgagtgctgcccgggcctagtgaagggattttg

SEQ ID NO: 33480 - DNA, 235 bp, Homo sapiens
  chr20:57268879-57269114
  hypo
ccctgcagggtgagccggcacaacagcccctcggccgcccacttcatcacgcggctggtgcggacctgcctgccgcccggagcgcatcgctgcattgtggtgagtgcttcgagaggaggcagccacggtgctcctagtcgggcagcggtgagctcgggcctggggagctcacagccctgctcagactgcagcgcacgcccagagggctgtggacgttatcatccctgctctgtag

SEQ ID NO: 33481 - DNA, 48 bp, Homo sapiens; identical to SEQ ID NO: 13103
  chr20:57415187-57415235
  hypo

SEQ ID NO: 33482 - DNA, 303 bp, Homo sapiens; identical to SEQ ID NO: 13104
  chr20:57415538-57415841
  hypo

SEQ ID NO: 33483 - DNA, 2077 bp, Homo sapiens; identical to SEQ ID NO: 13105
  chr20:57428310-57430387
  hypo

SEQ ID NO: 33484 - DNA, 34 bp, Homo sapiens; identical to SEQ ID NO: 13107
  chr20:57470652-57470686
  hypo

SEQ ID NO: 33485 - DNA, 252 bp, Homo sapiens; identical to SEQ ID NO: 13108
  chr20:57478607-57478859
  hypo

SEQ ID NO: 33486 - DNA, 30 bp, Homo sapiens; identical to SEQ ID NO: 13109
  chr20:57480439-57480469
  hypo

SEQ ID NO: 33487 - DNA, 438 bp, Homo sapiens; identical to SEQ ID NO: 13110
  chr20:57484404-57484842
  hypo

SEQ ID NO: 33488 - DNA, 30 bp, Homo sapiens; identical to SEQ ID NO: 13111
  chr20:57485068-57485098
  hypo

SEQ ID NO: 33489 - DNA, 97 bp, Homo sapiens; identical to SEQ ID NO: 13112
  chr20:57485782-57485879
  hypo

SEQ ID NO: 33490 - DNA, 231 bp, Homo sapiens
  chr20:57577636-57577867
  hypo
ctcccacactgccccacagtccgctcctccacctggcctcctcccggtcgcccagccaggggccttctggaactgtccctgctctggtgacttcacgcatcactgaaaagtcccaaagcagacctccatcctgccgccacccagcctgcccatgctctgcaccccaaaccctcttcctggagcagccggtggctggtttgtcccctcccacctgaccgacccaccctaggt

SEQ ID NO: 33491 - DNA, 270 bp, Homo sapiens
  chr20:57578207-57578477
  hypo
gttccacttggcagtgcagggcgtcccatggcctgcccccgagccctatccttctatgcccaacccaacccggcgacagcagtcctggcccagaggcagagctcggatggatgagcagtttcggttctggcctctccgtctactcctgcctgaagcatctggacccggcctaaccagctcactgaggtatgcacaagcttctcccacggccaaactcaatccttcatcccaccagccccatctgggaacgggcttattactcacactgtg

SEQ ID NO: 33492 - DNA, 203 bp, Homo sapiens
  chr20:57578997-57579200
  hypo
caggagaccagtgagggcagtcggcagtggggcggtgtggcttagacctggaggaggcggtgggcggtgcgtgatttctgcatctgcttcgaaggtagaaccgacaagacttgtgggtggattatatgagggacagaaaacagaggagtcgggtaccagtccaggcttttgcctgcatagccggaaggacagccagggaggac

SEQ ID NO: 33493 - DNA, 30 bp, Homo sapiens; identical to SEQ ID NO: 13113
  chr20:57797362-57797392
  hypo

SEQ ID NO: 33494 - DNA, 30 bp, Homo sapiens; identical to SEQ ID NO: 13114
  chr20:57798081-57798111
  hypo

SEQ ID NO: 33495 - DNA, 577 bp, Homo sapiens; identical to SEQ ID NO: 13115
  chr20:57875496-57876073
  hypo

SEQ ID NO: 33496 - DNA, 315 bp, Homo sapiens; identical to SEQ ID NO: 13116
  chr20:57978780-57979095
  hypo

SEQ ID NO: 33497 - DNA, 13 bp, Homo sapiens
  chr20:58179981-58179994
  hypo
tccagccccctcg

SEQ ID NO: 33498 - DNA, 142 bp, Homo sapiens; identical to SEQ ID NO: 13119
  chr20:58180236-58180378
  hypo

SEQ ID NO: 33499 - DNA, 31 bp, Homo sapiens; identical to SEQ ID NO: 13120
  chr20:58323973-58324004
  hypo

SEQ ID NO: 33500 - DNA, 111 bp, Homo sapiens
  chr20:58397112-58397223
  hypo
gcgatccgccccgcaacgatcccaccccttctccagcgatcccaccccctccgcagcgatcccaccccctccgcagcgatcccaccccctccgcagcgatcccaccccttc

SEQ ID NO: 33501 - DNA, 224 bp, Homo sapiens
  chr20:58507217-58507441
  hypo
agataaaagcgttacggataaaaacaacaacaaagaaaacaatttggcagatgggggaggcaaagattttcccccaaaggaaaaactgctgaatgaatgcaagcagcagtagataattcaaagtcccctctgccctggtaactaacatagctaaggtgtccaaaaagacattaaaggtgaatgaaggggagggaaggcgtcctcctcctcccatcattactaaa

SEQ ID NO: 33502 - DNA, 555 bp, Homo sapiens
  chr20:58507740-58508295
  hypo
aacaaaaaaaaaccacgctgccgtattcgcagatgctcggccagcctggagcccggtccagaaaaggccgcacgtggagccacgtgtcgcgcattgagccgccgcgggacgcatcaggcccagctgcgcggaggggctggcggcctcaaccgcaaggagaggccgcaggtggggacggcgggagggagagaagggactgaaggcgccgagcaggaggaaggttttgcgcgcactcccttcttccctaagtggaaccggcagtggcaacaacgaggccgaaggcgaagtccctgctcccaccgccggcacggtgacccttttcccagggtcacccccgaaccaacaaagcacacacacacccgagatgcgccccaggccgcagcgccaaccccccttcagatgtcccggagacaggcgagcagcggtccccagggctcccgtcgccaccgcttctcccgcacccctcagcctcctcgggccggcgacgcgcgcagccccaggcctgctccccgctcgccaagcgcaccgccccgcgcctcagccaccttgaccgag

SEQ ID NO: 33503 - DNA, 498 bp, Homo sapiens; identical to SEQ ID NO: 13121
  chr20:58514020-58514518
  hypo

SEQ ID NO: 33504 - DNA, 21 bp, Homo sapiens
  chr20:59826956-59826977
  hypo
aatggaagtgcacactcccac

SEQ ID NO: 33505 - DNA, 67 bp, Homo sapiens; identical to SEQ ID NO: 13123
  chr20:59828340-59828407
  hypo

SEQ ID NO: 33506 - DNA, 28 bp, Homo sapiens
  chr20:59872425-59872453
  hypo
caagagcgaaactccatctcaaaaaaca

SEQ ID NO: 33507 - DNA, 268 bp, Homo sapiens
  chr20:59872749-59873017
  hypo
tggattctggaggccttgcagcgcactttcctgccctctcgcgtgtatgatagagacattagcgcgtgtcagcccctttaccggggcttcccattgtcttagcgtgctcctttcatctaatgagcaggcgcccttggctgaacttttcaggaatccgtggggaaccagagtgaatatattatggcgctgtggagcgaatgacaatcgggcagtgctcgcctgtggccgtggaggtatctgcgccaccgcaaaatgcctcacccttctt

SEQ ID NO: 33508 - DNA, 31 bp, Homo sapiens
  chr20:60079876-60079907
  hypo
ttggtcagaaagcacacgctccgcttccata

SEQ ID NO: 33509 - DNA, 253 bp, Homo sapiens
  chr20:60094623-60094876
  hypo
caaggaggctccctggtgccccgaccccgaggagggctcatagcactggccaggcagcgctgcctctcgggctgctgcgccagcatcgcagggcgattaccctgtgctgctctctagatgggtgtctattctttcgttgttccttaatcgaatgccactagttcctgggcgcaggacgccagtgtgtcttcacaggcagactgcgtggtggtggtataatccccattaccacgtggaggaaactgaggtgcag

SEQ ID NO: 33510 - DNA, 30 bp, Homo sapiens
  chr20:60107463-60107493
  hypo
gaaaatgaacctcttcggtttcagaactca

SEQ ID NO: 33511 - DNA, 30 bp, Homo sapiens
  chr20:60107959-60107989
  hypo
gctcaggtctccctgcgatgcaatcaaggt

SEQ ID NO: 33512 - DNA, 31 bp, Homo sapiens
  chr20:60170957-60170988
  hypo
accctgcctcacataacgtttgtccataaag

SEQ ID NO: 33513 - DNA, 264 bp, Homo sapiens
  chr20:60226060-60226324
  hypo
tgtgcttgtgtgagttagcctcgtgcttggccgtgcactggtgtgcttgtgtgagtgagttagcgccgtgcttggccgtgcactggtgtgctcgtgtcagtgagttagcaccgtgcttggccgtgcactggtgtgctcgtgtgagtgagttagcctcgtgcttggtcacgcactggtgtgcttgtgtgagttagcgtcatgcttggccgtgcactggtgtgcttgtgtgagtgagttagcatcgtgcttggccatggcagtgag

SEQ ID NO: 33514 - DNA, 30 bp, Homo sapiens
  chr20:60237750-60237780
  hypo
gtgcccagctgctcgcgtggccaacacagg

SEQ ID NO: 33515 - DNA, 108 bp, Homo sapiens
  chr20:60238323-60238431
  hypo
cgacaaatgagtccacgcaggaaaggagtggcacccgcaggaggcctgtgctgcggagctcctgggagggtgacgctggggcaggggctgctgcggacaagcgttggg

SEQ ID NO: 33516 - DNA, 380 bp, Homo sapiens
  chr20:60238685-60239065
  hypo
atcttggctgcccaggggaagcggggactcgaggagagcagggagtgctgtcttcccggcgggagctggcggtactgaggaaggacgtgcagaaccaggcagggctgacagacgcggggtcgggggaagatcaggagctcccggtgtccaggctgcacaatgtgggcaccactgaacacggggtaaaccaatcaccagtcactcccacgctgggtcttccagctccctcgaggccgccctggccctccacactcccaccgctggcgccagcatctgtgcccgcggcagtttagagtgacactgtcctctgtccagcaccggtccacgttgaggtgtctgtgtgccaccgggacccttccgtagacatgcaccatgaagac

SEQ ID NO: 33517 - DNA, 29 bp, Homo sapiens
  chr20:60261374-60261403
  hypo
gagagaacaagcccaactgtgcgtgtata

SEQ ID NO: 33518 - DNA, 121 bp, Homo sapiens
  chr20:60261582-60261703
  hypo
gcatttgtgtatgtgtgcattcgcgtgtatgtgcatgtgcattcgcgtgtgtgcattcatgtgtgtgcatgagcacgtgtgtgcatgtgtgtatctgagtgcacattctcgtgtgcattcg

SEQ ID NO: 33519 - DNA, 29 bp, Homo sapiens
  chr20:60261822-60261851
  hypo
attcgcgcgtgtgtgtgtgcatgtgtgca

SEQ ID NO: 33520 - DNA, 20 bp, Homo sapiens
  chr20:60272659-60272679
  hypo
gggggaacaaaaaaaaggaa

SEQ ID NO: 33521 - DNA, 322 bp, Homo sapiens
  chr20:60275908-60276230
  hypo
tggagtgcctgatcttgacagcggaccgacatcttcaagggaacggcggctccccccttttttgcagaacactttcaaaggtgtattcgtgttccagggccgccataacagagcgccacagaggggcggtgtaaacagcagaggtgtatgctctcgctgctctggaggatggaagcttaaagccgaggcatcggcaggggtggtttgacgaaagccgtcagagagctcggagggaagactctgttccaggcctctctcctcggcttgcaggtgccatcttcttcccgcatctcttcacatcgccttccctctgggagtgtgt

SEQ ID NO: 33522 - DNA, 220 bp, Homo sapiens
  chr20:60316297-60316517
  hypo
cagtgtgcaggggccctggtgcggtcccccgggcatcacttccccaagccacccacggagctgcctttgagggcgctgtcatcagtttcatccagggtctctccggcagggaacgcctttcacctgcaaagtccttggttcatatggctgacgccaccgctgtttcctgcctggtcattcagacgttggtggcccattcgttctcaaagcagcttcaatg

SEQ ID NO: 33523 - DNA, 69 bp, Homo sapiens
  chr20:60334002-60334071
  hypo
gtatatgagtgtgcacatgtgcgcatgggtgtgcacatgggtgtgcacgtgtatgcccacttgtgagta

SEQ ID NO: 33524 - DNA, 425 bp, Homo sapiens
  chr20:60352645-60353070
  hypo
atgtgcacacacatccacatgcgcacacacgtgcatacaaaaacacacgtctacacacgcacacacgtgcatacaaagacacacacccatacgcgcacacacgtgcatacaaaaacacacacccacatgcgtgcacacgtgcatacaaaaacacacacccacatgcgcacacacgtgcatacaaaaacacacatccacatgcgcacacacgtgcatacaaaaacacacatccacatgcgcacgcacttgcatacaaaaacacatccacatgcgcacgcacgtgcatactatacacacatgcacacacgtgcatgcaatacacacatccacatgtgcatacacgtgcatactatacacacatgcacacacgtgcatactatacacacatccacatgcacacacacgtgcacactatacacacatgc

SEQ ID NO: 33525 - DNA, 191 bp, Homo sapiens
  chr20:60361299-60361490
  hypo
cctggccccaggcaggaggggcggctacacatgtgcaccacccccatgaccgtcttgagtgtggttctgaagacgcaatcccaagatgaacacgatcgccctgctgcagtctgcgagtcgcccggcagccagacacagcgctgagacccacggggattcacattgtccccgctgaagccagagggatgtga

SEQ ID NO: 33526 - DNA, 329 bp, Homo sapiens
  chr20:60448754-60449083
  hypo
ccccatctgagctgctgtctccgttccaggcacctacgtgatgaccgtcacggccaacgatgctgacgacagcaccacggccaacgggatggtgcggtaccggatcgtgacccagaccccacagagcccgtcccagaatatgttcaccatcaacagcgagactggagatatcgtcacagtggcggctggcctggaccgagaggtgaggcggggtggggtctgcgtgcaggcgggtgagctcctggtccccgcaggacacccacaggaccctcggggagcctctccagtggcgccgtcggggagtgatcgacagtctccccagtggcact

SEQ ID NO: 33527 - DNA, 215 bp, Homo sapiens
  chr20:60485473-60485688
  hypo
gcagtttgcaggggaggtccccgaaaaccgcgtggagaccgtggtcgcaaacctcacggtgatggaccgagatcagccccactctccaaactggaatgccgtttaccgcatcatcagtggggatccatccgggcacttcagcgtccgcacagaccccgtaaccaacgagggcatggtcaccgtggtgaaggtgcgtactcttctcacaccctgcc

SEQ ID NO: 33528 - DNA, 564 bp, Homo sapiens
  chr20:60494943-60495507
  hypo
gattgtgtggaagcatggtatcgtgattatgtggaagcgtggtgtcacggtgattgcgtggaagcgtgttgtgattgtgtggaagcgtggtatcgcggtgattgcatggaagtgtggtgtcacagtgattgcgtggaagcgtgtcgtgattgtgtggaagcatggtatcgtgattgtgtggaagcgtggtgtcacggtgattgcgtggaagcatgttgtgattggaagcgtgtcacggtgattgcgtggaagcgtggttttgtgattgcatggaagcatggcgtcacagtgactgcgtggaagcgtggtgtcatggtgactgcgtggaagcatggtgtcacggtgattgcatggaagcgtggtgtcacagtgattgcatggaagcgtgtcatgattgtgtggaagcatggtatcgtgattgtgtggaagcgtggtgtgattgtgtggaagcgtggtgtcatagtgattgcatggaagcgtgtcgtgattggaagcgtggtgtcgcggtgattgtgtggaagtgtggtgtgattgcgtggaagcgtgtcttggtgattgcatgga

SEQ ID NO: 33529 - DNA, 359 bp, Homo sapiens
  chr20:60502708-60503067
  hypo
atgggggcaagatgtggtgggcggatcccagccctcaggggccagtgcagagcccagcacccgcagaacccctccctggctccccagtgggagtgagtccccggtgcgtggctgtgacctccgtggctgtgagtttccacgtgaatgccacaccccgctgtgtgcgtgtgtgcaggtgtgggtgtggccgtgtgctctgccgtgtctgttgaggtgccgtgcgcagtggctgtgtgcgtgtgtgcagctgcgggtgtgggtgtggccgtgtgctttgccgtgtctgttgaggtgccgtacgcagtggtgtggctgcccatggcgtgtggcagggtgtcggtcaggagccatggctggac

SEQ ID NO: 33530 - DNA, 30 bp, Homo sapiens
  chr20:60503362-60503392
  hypo
cgccatcaacatcacggcggccgacgctga

SEQ ID NO: 33531 - DNA, 198 bp, Homo sapiens
  chr20:60508053-60508251
  hypo
ctgtttgtcatgtggatgaagcggcgagagaaggagcgccacacgaagcagctgctcattgaccccgaggacgacgtccgcgacaacatcctcaagtatgacgaggaaggcggtggcgaggaggaccaggtgagactgcggcccgcccccgcctccccacgcgaggccggctctcacgtgtactagtgtctcagcagg

SEQ ID NO: 33532 - DNA, 30 bp, Homo sapiens
  chr20:60544917-60544947
  hypo
cccatcggaacactcggccccctcatcggg

SEQ ID NO: 33533 - DNA, 101 bp, Homo sapiens
  chr20:60545256-60545357
  hypo
cccagagggccctggcgccccttcccgacagtctcctcaccggagccccacaccctgcttctacccacccatgaacttccatcaggcggaatcagaatgca

SEQ ID NO: 33534 - DNA, 231 bp, Homo sapiens
  chr20:60545561-60545792
  hypo
cttgtatgacttttccgcggacaaaggaactcattctcaagtagatgcttaggactggaactgctggtcacaggatagatgtgcattcggcttcgtcgctgtgtcacacactgaagagatgcccattcagcttcatcactgcatcatcacacaccgggtagacatgcattcaacactgggtagacgggcattcagcttcatcactgcatcacacaccgggcagacgtgcgt

SEQ ID NO: 33535 - DNA, 101 bp, Homo sapiens
  chr20:60549274-60549375
  hypo
acgtaaacctgcatatcgctgtgggtccgtcacagtaggtggagtgaacgtcacaatgggagaccaactccaattgcatcagagaccgttcccaaaggctc

SEQ ID NO: 33536 - DNA, 30 bp, Homo sapiens
  chr20:60552008-60552038
  hypo
gaagcatagctgctgcgtgccagctcctgt

SEQ ID NO: 33537 - DNA, 255 bp, Homo sapiens; identical to SEQ ID NO: 13125
  chr20:60552246-60552501
  hypo

SEQ ID NO: 33538 - DNA, 373 bp, Homo sapiens
  chr20:60563048-60563421
  hypo
cacatgatattctggaaaaggcgaaactaggagacaataagatccgtggaccagggactgacaggaggggagggatgaacgggcagagcacagaggaattcagggctgtggaacgactccacatgatacggtactggtggaaacacgtcattctacagctgtcaaaacccacagaatgtacacaccaagagtgcaccctgatgggaactatggaagctgggtgagaaggacgtgttgacgtgggttcatggattctaacaaacgcaccacccggccaagcgggggaggctgtgcacctgcagggaggagggtatgggaagtctctgtactaaaaaagtcccctcctttttccgtgaacctaaaactgctctaa

SEQ ID NO: 33539 - DNA, 127 bp, Homo sapiens
  chr20:60563805-60563932
  hypo
caatcttcacccactcggcagtgcctcacctgggtcctccaggtccggcgttctcgatactccacgtacctcccagccccacaccccggcccttctcatgagtgaggacgcacgagctcccttactc

SEQ ID NO: 33540 - DNA, 71 bp, Homo sapiens
  chr20:60581686-60581757
  hypo
gagctactcagcaccacggccgtgagcgcagtggtggcctgcgaggtgggcggtggcggctgctgctggct

SEQ ID NO: 33541 - DNA, 30 bp, Homo sapiens
  chr20:60586705-60586735
  hypo
aagagccggggttgcggggggagctgcccc

SEQ ID NO: 33542 - DNA, 289 bp, Homo sapiens
  chr20:60620216-60620505
  hypo
ctcgcaaagccatgccgctcaaacggaatcccatcgggatgctccccgctcaggactgtcacagggacaaccgtcccgcacctcctggcccatgcaccctccccaccggccacacaaggtctggaatgttcttccctgcccttcctgggaaagccctgcctgccgtgcctgcccgctcctctctacccttgactcgcttcaggtgcttggtggagacgatggcggtgaaactttcaacagcgcgcctgtttgggtttaagcttcagagaacaggcgcagaatccctgca

SEQ ID NO: 33543 - DNA, 143 bp, Homo sapiens
  chr20:60662672-60662815
  hypo
tcctgtacactcacctgcacacgcactcacacatgctcctatacgctcacctgcacacgcacacgctcctgtacacccacctgcacacgcactcacacgcactcctgtacactcacctgcacgcttacccacacatgctctgt

SEQ ID NO: 33544 - DNA, 437 bp, Homo sapiens
  chr20:60725125-60725562
  hypo
gtctttgaaattgcacacacacgtcaagcatacagcggtggggccgtgaggcagcagccagctcctctcaaggagactgcacatgtgtaaattgagacgctcttctgaaacctacacaccgacttcacggattccacagttgggtgaatgttcagaggggtcccactggcttccatcagtggagtctgtagtatcggcttgctgacctcgggggcagggacggagcagctcaggctgggctcagagggaaggactgctgatgggtcagcgatgtctgccccgagaacaggagtggcaggcgctagcgcaggtgccatcgctggcttagccacctgctgatgctcgaccagctctccggttagccaggctggtccccctcacaccttgatgactcctaggaattgattctgcgtctgtgtccacgccatgcgtgggga

SEQ ID NO: 33545 - DNA, 31 bp, Homo sapiens
  chr20:60731379-60731410
  hypo
ccatctggaatgctggcgcctggcaggtgga

SEQ ID NO: 33546 - DNA, 30 bp, Homo sapiens
  chr20:60736049-60736079
  hypo
atgcagcaggagcacgggaaacaggagagg

SEQ ID NO: 33547 - DNA, 31 bp, Homo sapiens
  chr20:60766097-60766128
  hypo
aaagtgcatggaggcccggtttcttataggc

SEQ ID NO: 33548 - DNA, 1396 bp, Homo sapiens
  chr20:60772852-60774248
  hypo
aataggccatggttgtcgtaacacaaagggactgagattcttgttcttgctttagttgaccagcaagtcaagtccctgtcgtcggtcctgtcgcggtaccagggtttcagtggagaagatggagggagtaaaaactgcttcgggcgcagtggcgccgtcctctacatccgggtgagccgagactgccggacctggccctgtccccgttgttctggatcatccagctcctgggggccaccgtgtgacccacggggcccctgtggcttgatgcccacagctaggaaacagcacaatggaaacggaggctggcagacagcgggaaagcagccccacccctcaaagcaaacccagacgggcatttgtaccagggtctcacaccatgtgcatgtctagtgaaaaagtcatgaaacgattctcttttaaaaagagggagcccacggcacggacgcttcctccgtctctgaccccatgagccgacctctgactgagggaggccactggcacccagcgggcctgcgtctccttcgcgagctgaattcactcgtctcttagatgttttttctggtgcttcagttcacactaacgttttagaaacactatttgaaaaagccctttgtgcagtcagaagggtgtgtacgcagccccgtgaaagccctggagcactgggaccttttccttgtgctccggagctgttggcagaggtgagtggggcgggcagctgcccggggcacagtccgctcttgtcttctttccttagcgcttgcttcaggaatgggttaaggcctcctttcctcactgctggtagagctcagctgatgagtgcctgctgttccccaggtccccgtgggcacgctggtgaaggagggaggcagagttgtggccgacctgtcttgcgtgggagatgagtacattgccgcgctgggcggggcaggagggaaaggcaaccgcttcttcctggccaacaacaaccgtgcccctgtgacctgtacccctggacagccaggacagcagcgagttctccacctggagctcaagacggtggcccacgccggaatggtaggtgtccccactgccaacagcatctgcacacactcagctctagaaaatccacttttctcaatggggatttgccagtggcctggaagagaacagctttgcgactcacctttttcccatcagtacactgctgacttggtcgtgagcatgagcccttgtgactcccccagccctgaaatcctccctccaatcccagttagttacagactctgcgctaacaaaggtgctgccgcgggccgtgccaccgtcttccctctttcccccaggtgggattccccaacgccgggaagtcctcactgctccgggccatttcaaacgccagacccgccgtggcttccta

SEQ ID NO: 33549 - DNA, 540 bp, Homo sapiens
  chr20:60781093-60781633
  hypo
cagtgccctgcccagacaccccgtgaaatgccctctagtcaaaaagccaaagacagccacacgcgcccaggctctgcacagttgggcccaccaccctctcgtgcacgcactttccacacttcacgttagccgccgtcgcccccccgccctaagctcctggagaacagagacctcgtttgtctgtatgcagtgcccgggtcggcgctggccccgggatggaggcctgaagggcagacatgctgaggcaaccggagcgtctcatcagtgaacacacgtgccggggacctgtcctggtgccgctaaagaggctgcagagccgcggggtgcggcagtgcttggcgggggcggggtgcagctctgcgtgcatggcgtccacctggggaccgcaggtgtcaagccggggagagccagtgccaggaggtcacacacgatggttccctctacagagtgttccagaaacgatgaggagaatggattggcggtcctcgggctgaggagggcgggagggtggaggtagccgtggacacaaaagggccatgc

SEQ ID NO: 33550 - DNA, 30 bp, Homo sapiens
  chr20:60791487-60791517
  hypo
ggtgggtgaagccacggagccgcccccacc

SEQ ID NO: 33551 - DNA, 176 bp, Homo sapiens
  chr20:60816077-60816253
  hypo
tccacgcctcgagtgcgttgagagggtcagactctgctgtgttccacatgttaatgagaggtgctgtttgaatgtgaaaaaaatgccacttgactttcatcccagtgtctctcctctgtgccgtccaggagatgccagcagatgggtcttggaatttttttttttttgagatggag

SEQ ID NO: 33552 - DNA, 333 bp, Homo sapiens
  chr20:60816432-60816765
  hypo
gtcattaaagcttgctcgacttttaaagttttagtacattcagccaattacaaaagtgacattttgtataagggaattgttgacacattttaggttcttatgctgtcttcaagcagggaagctgccatctcctcaaggtgatttctttaatgtccccatgcaagccatgtcttgtctggccgtgcaggcacagctggcgccgtgccttcctgagtcacagcatctttgcgaaggtggtgcgccagaccagggctcttgggtcctgggtgggttcccactggctcctgccttcagtgtctttgcctgtaagacggattactatgtggaatctgt

SEQ ID NO: 33553 - DNA, 86 bp, Homo sapiens
  chr20:60842012-60842098
  hypo
aaaagctgtgggcaggccaggcgtgcgacggctcacgcctataatcactgtcagaggctgaggcgagaggatcgctcgaggctacg

SEQ ID NO: 33554 - DNA, 333 bp, Homo sapiens
  chr20:60842587-60842920
  hypo
ctctcaggaggccaccggggtagtcttatttcgaggtctgttcctacagctaggaactgtgtttttgtttgtttcagtgatgcttcaaatttgggccaacaggctccacctaacctctgcggcctcatgtctgcgtctcttttctccctcactgacagtcccagttttctgcagccctggcgaggacagatttagaccggcacgcagttgtgactcactcactttgccccacatacctgtgggaccagctctgctgccgacagtgtctttgctgagacagcacatgtctgtgcctcctgcagttgccacttgtcattgtcttcagggtatatc

SEQ ID NO: 33555 - DNA, 35 bp, Homo sapiens
  chr20:60845090-60845125
  hypo
agcccccctcccagcacggacgctgagttttggga

SEQ ID NO: 33556 - DNA, 31 bp, Homo sapiens
  chr20:60848398-60848429
  hypo
cccagtgggagaggaccggcaaaccatttaa

SEQ ID NO: 33557 - DNA, 210 bp, Homo sapiens
  chr20:60868205-60868415
  hypo
accgcgcccggcctgttcattgtttttttaaagtgttaaaaaaaatatactgtgaaaataatgatcttttgtccttcgaagaaaatgtcttctcctttgtgagcgctgcccccaccccacccccaacactaaggacacccctcgggccctgagtgccagccgggggctgtggacggcggctgaaccagcgccaacactcaggccctgtgc

SEQ ID NO: 33558 - DNA, 30 bp, Homo sapiens
  chr20:60868956-60868986
  hypo
cctggggcccgggaccggaggctgacgagg

SEQ ID NO: 33559 - DNA, 30 bp, Homo sapiens
  chr20:60882632-60882662
  hypo
gtgccctctctcttcgcagctcccggagcc

SEQ ID NO: 33560 - DNA, 459 bp, Homo sapiens
  chr20:60891779-60892238
  hypo
ttggccaggagctgctgggctcggtccaccaggccctgccgcaccaccgtctgtggatgccagggcagaccgtggctcagacacgcaggccggggctgcgggaggtgcaggcagtgggggcgctcctgctggggctgaggggaagtgaggggcctcaccgcccacgtgtggtccgcctgctgcagggcctggccagcagcatcctcggcagcctgcacggcctgcaggatgcggctgtaggcgttggaggcctcgatggccctctgggtgaggcggtcctggttgacgtccaggatgatgctgcagcggaagggagggtcgaaggagtgggtaagcgcagacgccctcggcctggctctccagcctcctgcgctcacaaccagccgtgcccgtgcctgcccgccaagtcccgcctccaggtctttgcccgtgcctgtcgcctgctgggtgtactgctcc

SEQ ID NO: 33561 - DNA, 31 bp, Homo sapiens
  chr20:60893765-60893796
  hypo
gtctccacttggtgcccgccagatccatctg

SEQ ID NO: 33562 - DNA, 174 bp, Homo sapiens
  chr20:60906042-60906216
  hypo
cgggccctcggccgcgcccctcccagccccattacctgccattacctgttggggccaaaggcgccgtggctgctgatgcagctgacccggggctccacgaactccgggctgaactcctcaatgggcaccagagtgaccccgtgctgcaggcagagggacgagatgctgcaacgc

SEQ ID NO: 33563 - DNA, 31 bp, Homo sapiens
  chr20:60912468-60912499
  hypo
cgcggacacccctgcacggcatgtgaacaag

SEQ ID NO: 33564 - DNA, 273 bp, Homo sapiens
  chr20:60912906-60913179
  hypo
gcagtgcctgtgtagccggggcggcagcggcacaaacctcccgccccacagagctggtccagggctccccgagggtcgcaggtgcatgctgcagagggacaatggggtcaggccctggcgccatgtgggtggcagaaccccttcctgccctgaccctctgctcaccttggcagttggggaaaccatggtagccagggcggcaccggtcacaatgaggtccagcaaactcaggctggcataggcagcggccggcctcatcgcagccctcgggca

SEQ ID NO: 33565 - DNA, 112 bp, Homo sapiens
  chr20:60913463-60913575
  hypo
ccaggcctcaggtgtccacctcgagcgcaggtagaggttgagcggggagaggggactcacgctggcagccggggccgtagaaccctggcgcgcagagctcacaatgggtgcc

SEQ ID NO: 33566 - DNA, 30 bp, Homo sapiens
  chr20:60925164-60925194
  hypo
tccacacccaggtgcggtgagtcaggggat

SEQ ID NO: 33567 - DNA, 263 bp, Homo sapiens
  chr20:60925793-60926056
  hypo
accctagggtgttacaccctccgggcaccacgctgagtactggtttgcgtgtttcccagctgcctcccccggaacaggtgctcctgaggccgggctggggtcccaccctgtgttcccattcccaggaaaacggcccagcgtgtgttaggcgctcaacatacagctgctggctgaaagaaccaacgaagggagggaggaaaggacggacgtgccctggggttgcttctccgcagaatgagcccggccctaccttactgaggact

SEQ ID NO: 33568 - DNA, 246 bp, Homo sapiens
  chr20:60936961-60937207
  hypo
ggggactggagagcaggcacccgaccccacctaaccctcagtggccgccacctcggcacaggtatcccaggaatgtccacttgcgccagcctcctctgcattcctgcagcccctcccgcacctgccaggaattccttaaacagcagggcgcctgacgcagggggcaccaccgcactgctcacagcacctccgccctcccagccccaagctgtctactcagcacccgcaaccaaactctgtggcctt

SEQ ID NO: 33569 - DNA, 244 bp, Homo sapiens; identical to SEQ ID NO: 13129
  chr20:60941670-60941914
  hypo

SEQ ID NO: 33570 - DNA, 382 bp, Homo sapiens
  chr20:60953306-60953688
  hypo
gctgagcaagacaagcctgggcgactcacctggggcaggaatgtggattccatcactccgcagaggctttcaagcaaaacacagcctcgtctctgggcctgtttctgccgtgcgggcacgtccagcccgacgctctcagaagcagctgggatgggctcggggaggtgggggtggagcaggagtcccagccgccttcctctggggcccatcccaggctcccggctgggcgccagcagggctccagaaatgagggggcctcacaccgttgcctctggacgtgccgtgcccgaaatcccgccattcccactgggcatgccgggccctcgaatcctccatgactccagggaagcgactccgtcccgcttggcctcagtcactgctc

SEQ ID NO: 33571 - DNA, 30 bp, Homo sapiens
  chr20:60967329-60967359
  hypo
ttggggatgggcagcggctagacttgtcaa

SEQ ID NO: 33572 - DNA, 105 bp, Homo sapiens
  chr20:60984025-60984130
  hypo
aatgctgaggaaggaacggggtctcttcctgggtctggtgaacccccttgctaggctcccgctgccagtcttctcccctccccagggtgtcgatgggtggccaaa

SEQ ID NO: 33573 - DNA, 30 bp, Homo sapiens
  chr20:60996143-60996173
  hypo
ggaggttgggataccggtcaagtggctggg

SEQ ID NO: 33574 - DNA, 202 bp, Homo sapiens
  chr20:60997209-60997411
  hypo
cccaaggcctcgccacggccagcccagcccaagtggatcacagagcggaacagccatggctgcatctgggttctcaaaggtcagcctggagacgcccacgtgagggtcctgtgtgcaacatcattctacagaaccgtcccgaacaggaccgcctaaccccatcccatgacgggtggaatatggtggccgcccagccccatgc

SEQ ID NO: 33575 - DNA, 250 bp, Homo sapiens
  chr20:61000622-61000872
  hypo
ttaccctgtcctctgggaggccgggccccctgagctcctctgctgtctgagcaggaggcatccggggcatcactgggctccccgcctctccgagggcactcaaccagagaagccgcctgggcaccagtgctccaaggacgtctgccaggccggctgctctccaccccagccaccgacccccagcaggctctttggggcaggagtgcggagctggacactggtaccctccgtctctgaggcctgggctgtc

SEQ ID NO: 33576 - DNA, 31 bp, Homo sapiens
  chr20:61025493-61025524
  hypo
ggcagacatcccagggcgctgggctgtagct

SEQ ID NO: 33577 - DNA, 137 bp, Homo sapiens
  chr20:61285649-61285786
  hypo
cacttgtcacatctgcaaagacgctttttccaaataaggtcatgcgctcaggtcccaggtgaacgtgactgcccggggaacacggggggcaccggtccgcccaccccagccccagcgcaggcccagtgagcagactc

SEQ ID NO: 33578 - DNA, 693 bp, Homo sapiens
  chr20:61287913-61288606
  hypo
cacacccctgagccccggctccctccgctccgctgcccatagccccctggacaccagcaagcagcccctctgccagctctgggccgagaagcatggcgcccgggggacccatgaggtgcggtacgtctcggccgggcagagcgtggcgtgcggctggtgggccttcgcaccgccgtgcctgcaggtcctcaacacgcccaagggcatcctgttcttcctgtgtgcggccgcattcctgcaggggatgactgtgaatggcttcatcaacacagtcatcacctccctggagcgccgctatgacctgcacagctaccagagcgggctcatcgccagctcctacgacattgccgcctgcctctgcctcaccttcgtcagctacttcgggggctcagggcacaagccgcgctggctgggctggggcgtgctgcttatgggcacggggtcgctggtgttcgcgctgccccacttcacggctggccgctatgaggtggagttggacgcgggtgtcaggacgtgccctgccaaccccggcgcggtgtgtgcggacagcacctcgggcctgtcccgctaccagctggtcttcatgctgggccagttcctgcatggcgtgggtgccacacccctctacacgctgggcgtcacctacctggatgagaacgtcaagtccagctgctcgcccgtctacattggtga

SEQ ID NO: 33579 - DNA, 31 bp, Homo sapiens
  chr20:61300098-61300129
  hypo
ctcgcagccccaatgccgaatgcccaaagaa

SEQ ID NO: 33580 - DNA, 289 bp, Homo sapiens
  chr20:61314588-61314877
  hypo
acttgatcatttattccaagtcgtgttgggcttggacctcgggctctcgggagcggccgtgacggagctcagacccagcacttctcctgcagagccagccgctcgctgctggccatgcctggaggtggcgaggacgggcttttccatcactctcggtgggggcacctgctccaggggcagctccatgggcgcttggcgggacggaagctgcgggaatagttgatgttgaggttgacggcgacagtgaggactgcaagaatacagtcacgtaccctggaacaatgttcag

SEQ ID NO: 33581 - DNA, 30 bp, Homo sapiens
  chr20:61431296-61431326
  hypo
gtgacatggattagcgctacgtgggctgca

SEQ ID NO: 33582 - DNA, 68 bp, Homo sapiens; identical to SEQ ID NO: 13133
  chr20:61447608-61447676
  hypo

SEQ ID NO: 33583 - DNA, 284 bp, Homo sapiens
  chr20:61458964-61459248
  hypo
gaaagtccagaggcagccaagcgttccaggagtggaactgaagtgaccgtccccagactggtcagcctccacacctccctcgactgagccctggcagccggagtgcagggagccgccgtgccgtcctgcagcatctgtggatccaaacacagttttctccacgcacccacaggccccagggtggtggtcgggggtggcccctgccgctgcccaccatagctccttggtgtccccgagcagctggccggagaatgcgtgaggccgtctgggaagagactgccact

SEQ ID NO: 33584 - DNA, 31 bp, Homo sapiens
  chr20:61466382-61466413
  hypo
cagagccccttgcaggcggaaaacctaaggc

SEQ ID NO: 33585 - DNA, 39 bp, Homo sapiens
  chr20:61470100-61470139
  hypo
caggggccccaaggtacgagtccacggccagcaaggctt

SEQ ID NO: 33586 - DNA, 293 bp, Homo sapiens
  chr20:61471983-61472276
  hypo
ccattggggcccaggggacaccggggatctgcgacacctcagcctgccaaggagccgtgttaggaggggtcggggagaaatcaggctctcgaagctcataaaattcaacgtgaggaagcaagtgacaaggacgcccgaagcacagtggacggtcatgaaggagcgggggtgtggcaggcgggtgacgtccaggagagggagcgcccctggctgcccctcggccgccgactggacgcgcgggccttgccagcgagcaccctcatcgggctgtcgcctgacagcatacctcaaaa

SEQ ID NO: 33587 - DNA, 147 bp, Homo sapiens
  chr20:61488409-61488556
  hypo
aacctgcctgactccacagggcgcgctcttagaagcttgcacctcagctcctgccttctccccacgcgcctttgctgatcgcacctggcatcctttctccatagtaagtcacagcctgagagtgactgcatgcggagtcccgggagt

SEQ ID NO: 33588 - DNA, 139 bp, Homo sapiens
  chr20:61488858-61488997
  hypo
aagcgccttgtgtggcggtggcaccttcgcccacattctgaatctctccaagggctcttcgctctacatttgtgtccaactgacgcattctactccgattcctcttcagtgcttgtttgcatagcgctgcttctttgcg

SEQ ID NO: 33589 - DNA, 76 bp, Homo sapiens; identical to SEQ ID NO: 13134
  chr20:61492901-61492977
  hypo

SEQ ID NO: 33590 - DNA, 329 bp, Homo sapiens
  chr20:61505958-61506287
  hypo
gtgaactccgcaggtcgtctttgaaggcacatgtggctcttctgccactgcctggggagctgagacccctttgcccaaagaccctcaagtgccttccctagggagctgccctgtaaggtgccgccgtcctgcccgggactcaccaccacctctgtgttccttctagacctagatccagactggagttccagcaggccccaaaagagaaagtgtgaggtgtggcctacaaatatgtttccctacgaaaacctgcggaaaatgtgtggaaatcgatgttgagagtgcgggatctgggtgggaggaatataagcttgcgtaagtggacaggg

SEQ ID NO: 33591 - DNA, 66 bp, Homo sapiens
  chr20:61506505-61506571
  hypo
ggaggtcaccccttcacgaggattgtgaggagtgaattcatcggggagccccgcaccctcacctgc

SEQ ID NO: 33592 - DNA, 94 bp, Homo sapiens
  chr20:61518344-61518438
  hypo
gtaagaggagagcgacgtccatcttcttctgggtgccggggtgccgagaagggccccagggcagcaccagcctgcactgcgtcctctccagcag

SEQ ID NO: 33593 - DNA, 314 bp, Homo sapiens
  chr20:61527971-61528285
  hypo
gcgtcctggggctggcgaggccattggaacagaaggtaccactggcttccttacggctcccaccaaagcagcggagccagggaacttcttggaggcagccgttgccgctgcaggtgccggtccggcctgcctggcagctgaagcaccactcgatggggtagcggagagccatggcctcttggggatggtgcccttgaaacctgagggtggctttttaatggctggtgtggctgctgccacattagcaaaagaagacttctttggcacgaggtttctaggtgcaggctgcttgcccaccgcggagcctggagggg

SEQ ID NO: 33594 - DNA, 31 bp, Homo sapiens
  chr20:61576608-61576639
  hypo
aaatacaggaaaagcacgaatcatgattctg

SEQ ID NO: 33595 - DNA, 31 bp, Homo sapiens
  chr20:61577748-61577779
  hypo
tccacagcattgttctcgcctctgaatgatg

SEQ ID NO: 33596 - DNA, 30 bp, Homo sapiens
  chr20:61619036-61619066
  hypo
gaaagccaggcgtgcgagccaactacttgt

SEQ ID NO: 33597 - DNA, 221 bp, Homo sapiens; identical to SEQ ID NO: 13139
  chr20:61637735-61637956
  hypo

SEQ ID NO: 33598 - DNA, 249 bp, Homo sapiens; identical to SEQ ID NO: 13140
  chr20:61638220-61638469
  hypo

SEQ ID NO: 33599 - DNA, 263 bp, Homo sapiens; identical to SEQ ID NO: 13141
  chr20:61638534-61638797
  hypo

SEQ ID NO: 33600 - DNA, 679 bp, Homo sapiens
  chr20:61674962-61675641
  hypo
cctgaaggaagaagggggcttcgcagtatagttcgagtcgggctctgtttctttccatcccaaacacatagagacgaccaaggccctgatcccaaaagaagaacccaggctgccggcgatcctggggacaacgatgttaactcagggacaggcgcagtctctggaccaggccaggtcgtggtgcacacactcgatctctgcagcgtttcccacatgggcactgcggaccgggaatgtcaggggaacgcgggcaccgtggaccgggaatgccaggggatcgtgggcaccgccgaccgggaatgtcaggggaacacgggcactgccgaccgggaatgtcaggggaacgggggcactgcagaccgggaatgtcaggggaacgtgggcactgcggaccgggaatgtcaggggaacgtgggcacggctgaccgggaatgtcaggggaacgcgggcacggccgaccgggaatgtcaggggaacgtgggcactgtggaccgggaatgtcaggggaacgcgggcacggctgaccgggaatgccaggggaacgcgggcactgcggaccgggaatgccaggggaacacgggcactgccgaccgggaatgtcaggggaacgtgggcacggccgaccgggaatgccaggggaacacgggcactgtggaccgggaatgtcaggggatcatgg

SEQ ID NO: 33601 - DNA, 324 bp, Homo sapiens
  chr20:61692802-61693126
  hypo
catgtcctgtgtccgcgtctgtgtctgtgtccatgtccatgtcctgtctgtgtccatgtctatgtcctgtccgtgtcctgtcagtgtcctgtctatgtcttgtccataacctgtctgtgtccgtgtcctgtccatgtctgtgtcctgtctgtgtcctgtctgtgtccgtgtcctgtccatgtccatgtcctgtccgtgtctatgtcttgtctgtgtccatgtcctgtccatgtctgtgtccgagtcctgtccatgtccatgtccatgtcctgtccgtgtctgtgtccatgtccgtgtcctgtccgtgtctgtgtctgtgtcttg

SEQ ID NO: 33602 - DNA, 271 bp, Homo sapiens
  chr20:61693185-61693456
  hypo
ctgtccgtgtccgtgtccatgtccatgtcctgtccatgtccgtgtcctgtccgtgtctgtgtccatgtccgtgtcctgtccatgtccgtgtcctgtttgtgtcctgtctgtgtccgtgtcctgtttgtgtcctgtctgtgttcgtgtcctgtccatgtccatgtcctgtccgtgtctgtgtccatgtccttgtcctgtccatgtctgtgtcctgtccatgtctgtgtcctgtctgtgttcgtgtcctgtccatgtccgtgtcctgtgttcg

SEQ ID NO: 33603 - DNA, 820 bp, Homo sapiens; identical to SEQ ID NO: 13143
  chr20:61733166-61733986
  hypo

SEQ ID NO: 33604 - DNA, 357 bp, Homo sapiens; identical to SEQ ID NO: 13144
  chr20:61734251-61734608
  hypo

SEQ ID NO: 33605 - DNA, 211 bp, Homo sapiens
  chr20:61749021-61749232
  hypo
caaatccacagtctgtctggacgaccagccaccacgcagacaggagcgagggggttaacgcagtgtggaccgaatccacagtctgtctggatgaccagccaccacgcagacaggagcgagggggtgaacgcggtgtggaccgaatccacagtctgtctggacgaccagccaccacgcagacaggagcaagggggttaacgcggtgtggacc

SEQ ID NO: 33606 - DNA, 144 bp, Homo sapiens
  chr20:61771323-61771467
  hypo
aaggaaaggagaccagagcagcgctcgtacctctgaagtcctctcccgcaatgcgacgtattagcccaaagtagaccgtggctatggccggggcggggcagctctgtttgtgagcacggaatcgaggctgggagctgcacactc

SEQ ID NO: 33607 - DNA, 339 bp, Homo sapiens; identical to SEQ ID NO: 13145
  chr20:61808666-61809005
  hypo

SEQ ID NO: 33608 - DNA, 413 bp, Homo sapiens; identical to SEQ ID NO: 13146
  chr20:61809218-61809631
  hypo

SEQ ID NO: 33609 - DNA, 294 bp, Homo sapiens; identical to SEQ ID NO: 13147
  chr20:61809840-61810134
  hypo

SEQ ID NO: 33610 - DNA, 397 bp, Homo sapiens; identical to SEQ ID NO: 13148
  chr20:61810159-61810556
  hypo

SEQ ID NO: 33611 - DNA, 7 bp, Homo sapiens
  chr20:61810632-61810639
  hypo
cgccgga

SEQ ID NO: 33612 - DNA, 268 bp, Homo sapiens
  chr20:61838280-61838548
  hypo
ttcacagtcctggtcacagtgcgtgggagacaactggaaacgcacagttcgggctgcctggaaaacacatgcagcctcctttcagggcctttgatctccctttgtctcccgcacagccaggcacaggttcagcgctcactcgctgccaagtgctggaggcgagctgtgctgctccctcaacattccttagtgccacggctccatgggcactgagttatgagtgtgaaagtttacttctcagggatacagctgcattaaccccgggcac

SEQ ID NO: 33613 - DNA, 30 bp, Homo sapiens
  chr20:61871052-61871082
  hypo
ttcccgggtggcagcgtcagcttgttttta

SEQ ID NO: 33614 - DNA, 30 bp, Homo sapiens
  chr20:61874234-61874264
  hypo
atggcctggggggacggcaggggtaggaca

SEQ ID NO: 33615 - DNA, 30 bp, Homo sapiens; identical to SEQ ID NO: 13153
  chr20:61885276-61885306
  hypo

SEQ ID NO: 33616 - DNA, 426 bp, Homo sapiens; identical to SEQ ID NO: 13154
  chr20:61885777-61886203
  hypo

SEQ ID NO: 33617 - DNA, 21 bp, Homo sapiens
  chr20:61886256-61886277
  hypo
cgaggcgttttctctgagagt

SEQ ID NO: 33618 - DNA, 56 bp, Homo sapiens
  chr20:61895762-61895818
  hypo
cattttctggttgcttcggctgctggctgtagtggggacggcggctgtgagccttc

SEQ ID NO: 33619 - DNA, 31 bp, Homo sapiens
  chr20:61909561-61909592
  hypo
acttgagagctggggacgcctggcgtgggcc

SEQ ID NO: 33620 - DNA, 59 bp, Homo sapiens
  chr20:61913594-61913653
  hypo
gtcagcttctggttcccgccagggccgccgttttctcgtctgcacgggagggctgcggc

SEQ ID NO: 33621 - DNA, 30 bp, Homo sapiens
  chr20:61919435-61919465
  hypo
tgtgggggccgtcccgtcccacactcccct

SEQ ID NO: 33622 - DNA, 97 bp, Homo sapiens
  chr20:61967698-61967795
  hypo
agaggctcctgcctggtgagacgccaggactggggagggagcccgacaaatccaggatctgaacacagaaacggagaaaccctggggacgactcagg

SEQ ID NO: 33623 - DNA, 96 bp, Homo sapiens
  chr20:61967914-61968010
  hypo
gtgtgcgtgcgtgtgcgtgcacgtttgtgtgcgtgtctgcgtgcactgtgcacgtgtgtgcgtgtgcatgcacgcgtgtgtgacagtagcccacaa

SEQ ID NO: 33624 - DNA, 30 bp, Homo sapiens
  chr20:61974150-61974180
  hypo
tgggtgacctcgggcgggtcgtggccggcc

SEQ ID NO: 33625 - DNA, 1785 bp, Homo sapiens
  chr20:61980719-61982504
  hypo
cctcaccgtgccgtccgccgaggcccactgtgtcccaaagccagagacggcaccgggatccaccctgtgccagccactcggggccccctgccccgctcagcctgggacctgcggccacatagcaggcttgggaagaggctgctgcagcaggggccacgccctgcaccccaaagcgaagcagcctgaggcctgggcccggctcctggattacacaccaggaagaaagggcgtccgccggttccgtctgggtcagaggcgcccaacacagccatgggcgggacttaccgagaagtctgtgtcttcggccttcaggtggtctgcaatgtactggacgccctccaccgcccgggtcagggccggcgacaggggcaggtgcgggggcggcgctttggtgctgcgggtcttgaccgtggcgctcggggacaccgaagagggctccttcttgcatgtgcatttgcacggagagggctggtctgggggtgggagctcagccgagtgggtgttgcgagaggccagggcgccggcagcctggccatctgcctcgggggcggcatcgtctcggggaacacagtactggatgctccgagaccggcaccggacgccgccttccaccgcttcgccagggctggacatgtgctggacgctgagggacctggctttggccagccctggtgcctgggtgccgtggggcgggcggcagggtccaggcgaggggtgggggctggctttctcagcttccaggggctgctgaggagggagctggtcggagggtgacttgcaggaaggcccaggctcagccggcacatccagggggacacagaaggacggtgagggcgggtgcaggctctgggtgccgctcgtggcagggggctccccttctggctcgggccagaagcgcggggcactggccatcttatgcatggactcgatgagccgccggcaattgtccttgaccacggacggccgcttcatgaggagcaggcgtggcacgatgtccaggaagaccctgcgtacccaggtgggcatggtgtgcgtgcgtggcgagcggtggtgcacgttgagcacgaagaccgtgatgacgatggacagggtgacgaagatcatggtgaacagcaggtactcgccgatgagtgggatgaccagtgaggtggacgggatgatctcggtgatgagcagcaggaagacggtgagcgacagcagcacggagatgcacagcgtgatcttctcgccacactcggagggcaggtagaagaccagcacggtgaggcaggagatgagcaggcaggggatgatgaggttgatggtgtagaagagcggcagccgccggatgacgaaggcataggtgatgtccgggtagatctcggcacagcactcgtacttcctggtgttgtaggtgcccacggcatccacgatgacccactcgccactctcccagaagtccagctggtccacgcggctgtgcatgttcaccaggtcgatcttggccttgtcgtaggtccaggagccgaatttcatggtgcagttctgctggtcgaaggggaagaaggtgacgtcgatgctgcaggagctcttgtaaatggccgggggagtccactgcacccgcccgtcatggaacaggtgggccttggtcaggtgggtgaccgcgaagtccccgtcagcactgggcaggaagagagcgaagggtgtgagacccccacatccatgcccacgtccacacccacgcccactgccacacccatgcccacgtccacacccacacccacatccacgcccacatccacgtcc

SEQ ID NO: 33626 - DNA, 271 bp, Homo sapiens
  chr20:61982563-61982834
  hypo
ccacgtccacgcccacatccacacccacgtccacgtccacgtccacgtccacacacagaggcattctcacgtcacaggagcacaaaagggctggcggccttgcccgggtacactgttcgtcttctcacctactcgtgcacctcagtttatcatccctgagctgggcgtagcacgtggttcagagaacgggaagggacctacgagtgcctgacacacataatcactgctgctggtgattacccttatccatgagtggcgcatggatggggct

SEQ ID NO: 33627 - DNA, 239 bp, Homo sapiens
  chr20:61990837-61991076
  hypo
acccctgtgctccttgcagggcgacctcagtcacagtgcacgatggccacgccctcacctaccacgtcaatgagctgagcgatggacaggccgaagcggacgaggaccacgtccgagatgttggccacgggtcgggaccacttgttgtaaccggagaagagtttcttcaggagccgctcctcggcgtgggcccgggtctccacatggctgctggctgcggggagaggcaggccagtggc

SEQ ID NO: 33628 - DNA, 36 bp, Homo sapiens
  chr20:62018864-62018900
  hypo
gcacacacatgcacacgcacatgcacacccgcacac

SEQ ID NO: 33629 - DNA, 30 bp, Homo sapiens
  chr20:62019256-62019286
  hypo
tgcacgtgcaagacccgatgcgcatacatg

SEQ ID NO: 33630 - DNA, 364 bp, Homo sapiens
  chr20:62031396-62031760
  hypo
ctgtttcacaacaccccagctcgttcgtgccctgaggagagggaccatccgtccccacacccggtccacagcaccgcacccgactcagccccagcatcgaccagaagtccccggccctcagaccggccgcccagagacagtgggagtgaggaggccacacaccgtccaggttgaatcactgcgttttactgagtgcacaggtccacctggcgtccgaactcgtccccgtggcagcagggatccccagaaccttccacggccatcgcggccgcaggaccccacacccgaagtcccccgcaaacccgcactggcgcattcttacggctctggcatcaacctgtccgtgtgagtaagttaatatctc

SEQ ID NO: 33631 - DNA, 188 bp, Homo sapiens
  chr20:62032065-62032253
  hypo
cgggcacacgtgggccgtgtggatcccgggcagagggatggcgtccagcgggaccaccagctctgggcgcctcagtgcgagacccctccgtgagacccctcctgccctgcgcgtgtctctggagcccgtcccttgggcccctcgcccgccccacctgttcgcagggtccagggcgtccgtacctggca

SEQ ID NO: 33632 - DNA, 30 bp, Homo sapiens
  chr20:62046255-62046285
  hypo
cttctgagttctgccgtgacgcggcaccct

SEQ ID NO: 33633 - DNA, 30 bp, Homo sapiens
  chr20:62056206-62056236
  hypo
tggggaggccccagcgatctcattcgaaca

SEQ ID NO: 33634 - DNA, 30 bp, Homo sapiens
  chr20:62083296-62083326
  hypo
ccccgggaaggaccacggccgtgcttcaga

SEQ ID NO: 33635 - DNA, 30 bp, Homo sapiens
  chr20:62083854-62083884
  hypo
acacctgcacagcagcgtcgaggcaggtgc

SEQ ID NO: 33636 - DNA, 30 bp, Homo sapiens
  chr20:62092325-62092355
  hypo
ccgttaacaccacagcgggacgggaccgcc

SEQ ID NO: 33637 - DNA, 252 bp, Homo sapiens
  chr20:62110512-62110764
  hypo
aggctgcacagagctgaagtccggcgagtcccaaggctcccagggcggcccgctgccccacaccctccggcaaacacgaaggcgccaccctcggcacccagcagcatctgcctcagcccctgcagagggcggcgctggtgtgggctgcagagagtatggcccgcaggcagccgccatgggcctgcccgagctgagtggctttcagcagaccaggcggccactcaggcctgcgtggactggatgtgtccccag

SEQ ID NO: 33638 - DNA, 57 bp, Homo sapiens; identical to SEQ ID NO: 13156
  chr20:62119561-62119618
  hypo

SEQ ID NO: 33639 - DNA, 184 bp, Homo sapiens; identical to SEQ ID NO: 13157
  chr20:62119922-62120106
  hypo

SEQ ID NO: 33640 - DNA, 66 bp, Homo sapiens
  chr20:62126238-62126304
  hypo
cttcttgatgtaggcgctgacttccttgacgatctcgtcgtagcgcttctcgctgtaggccggctc

SEQ ID NO: 33641 - DNA, 414 bp, Homo sapiens
  chr20:62153197-62153611
  hypo
agtccagcacagccagcgctgggcccccgtcctgacctgagcggttaccaccagccccaggcctgcggaggcgctagtccaccagagcccctccccgcccctctccccactccgcatccctcgcccccctccccacctcccaccccccaccctgtaaactaggcggctgcagcaagcagaccttcgcatcaacacagcagacaccaaaaaccagtgagagccccgctctctaccgcccggccccagcactcgctagctttcctgacacctggaactgtgcacctggcaccaagcggaaaataaactccaagcagccagtagccccgatggtgtgtgcctgagctgtgtggcccgaggttccatttgagtgtgagaaatggctgaatccctcccgacctcactgccttgtggggg

SEQ ID NO: 33642 - DNA, 31 bp, Homo sapiens
  chr20:62154842-62154873
  hypo
ggggaggggcactgcccgggagctggtgtct

SEQ ID NO: 33643 - DNA, 30 bp, Homo sapiens
  chr20:62167655-62167685
  hypo
ggtcgtgggtctgcgcgtgaccctgctaac

SEQ ID NO: 33644 - DNA, 208 bp, Homo sapiens
  chr20:62174861-62175069
  hypo
tgccttggctgccagctgccccgaccctcccaccccagaggatgctggccacaacccactaaggggtctggctcagacctagctggggaccctgagatggtcagagctgtgtggaggagggagtgtgggcagccacaggctggggcggggcagcgagagcggcccaggttggagcttttctgctgacggtgtgcacagagtaggcact

SEQ ID NO: 33645 - DNA, 38 bp, Homo sapiens
  chr20:62180549-62180587
  hypo
ctctcctccccccacccgctgcccgtctcctcccgccc

SEQ ID NO: 33646 - DNA, 78 bp, Homo sapiens
  chr20:62190623-62190701
  hypo
cagacgcgcacctggccggcaggcacgagggtctgctgagcctcgcagaagtccaggaggctacgccagagggggcag

SEQ ID NO: 33647 - DNA, 39 bp, Homo sapiens
  chr20:62214175-62214214
  hypo
agaaaccacctcacacgggcagaccgactgcgtccagag

SEQ ID NO: 33648 - DNA, 44 bp, Homo sapiens
  chr20:62218509-62218553
  hypo
accttcaaaaccctcacgagttaccgaatcggctgattcaaaac

SEQ ID NO: 33649 - DNA, 159 bp, Homo sapiens
  chr20:62220462-62220621
  hypo
cccacatgggaatcctcgacctccatagtgactggttctgtttatgcctctgccccaggactgaagccctagggacacacctcatggatctcagacccctgggaggggccggctcagggacaggctgcccaggacctccgcacccggtcaagtgcactc

SEQ ID NO: 33650 - DNA, 867 bp, Homo sapiens
  chr20:62221209-62222076
  hypo
caagaaaaaagggggaggaaacgtgggacctgaagaccgattttccaggttgctctcgctgttctgtccccttctctcttctcgtgatttgttttggcgattcctctctttggttctgcagaccacgtgacccacctgcccgagccagccctgcggcctctgcccgctccctgctgccgcggctgagagacagccagccctgtccgtcccaggggcctcgccctcctgtcggctacttccgctcgtggtcctctgccatggcagccacctcaatggtggccgtgtgctcctcaggcccgggggcagcccctgcgggcactgtcacaattgtgctggagccaggcgaggcctgggccacgttctgcagggtggggcccaggccaggcaacgtgagcagctgtagcgggctgaccaccttgaacaccgtgctaccgtcctgcacggcggccgtgctcaggaccgtgaggctggacgcgtccgggtggatctccactgtgctggggtaggtggagccggaagaggccaagactgtgtatcccccgagcagcggggaggccggggagctggcggggggcgcctgaagggaacccttgcccaggacggtggacggcagggtggacaccactttaccaaggggcacgctggtcagctgggggacgggcacgcccgggccaagcgccagctgggcagactgggtgagcacctgcgaggccatggcggccggtcctgatgtggcacgtgcaagccggggccgcttcacaggcggtggcagggagaccggcgtcagcgtcatgagcacgttgctgaggtgctgggacttgtgcttcagctccttggctcggcgacgatgctcatcacactgctgct

SEQ ID NO: 33651 - DNA, 30 bp, Homo sapiens
  chr20:62225373-62225403
  hypo
aacaccaccaccaacgacctggaagcagtt

SEQ ID NO: 33652 - DNA, 30 bp, Homo sapiens
  chr20:62242063-62242093
  hypo
taagccactgtcccgcgagggcagagcctt

SEQ ID NO: 33653 - DNA, 229 bp, Homo sapiens
  chr20:62242323-62242552
  hypo
cagcccaccaatgcccggatatgcaagtgagcccagcctggaccccccggcgaggcccagcagcaccagcccaggcccgaaaaccttaagaaatgaccagtgtctgctgctttaagccaccaagctctgcggtggtttgttaggctgcaagcatggctaattcagaaactgccagaaacaagcactgctgtccccagcctgggacacacagcaccgcctctgcgtgggg

SEQ ID NO: 33654 - DNA, 31 bp, Homo sapiens
  chr20:62266230-62266261
  hypo
gattagaggtatgagccgctgcacctggcct

SEQ ID NO: 33655 - DNA, 107 bp, Homo sapiens; identical to SEQ ID NO: 13159
  chr20:62273410-62273517
  hypo

SEQ ID NO: 33656 - DNA, 30 bp, Homo sapiens; identical to SEQ ID NO: 13161
  chr20:62284063-62284093
  hypo

SEQ ID NO: 33657 - DNA, 30 bp, Homo sapiens
  chr20:62317504-62317534
  hypo
acgctcgtttatgccgaggccgtcagcaca

SEQ ID NO: 33658 - DNA, 990 bp, Homo sapiens
  chr20:62320900-62321890
  hypo
ttgtcacgggcctcccgtaccccccacgcatggacccccgggttgtcctcaagatgcagttcctggatgagatgaagggccagggtggggctgggggccaggtgagttacagcagggtggggctggggtaaggcggtctggtgactgagcccccgccccgtggccaagggagcccccgtgaccgagccgcctcgccccacagttcctctctgggcaggagtggtaccggcagcaggcgtccagggctgtgaaccaggccatcgggcgagtgatccggcaccgccaggactacggagctgtcttcctctgtgaccacaggtgcgtgcagtccggtggcaggcgcggcgccaggggacacgcccacaccccactgggcccctggactctccttccccacatgaggccccgtctcctccagagcctctccggctactcggggtcagcgtggggcccctgcagcagatgagggtcttcacttcggtgaactgaacccttgaagcggctgtgggcagggcagcagggctatggccaccccccaggttcgcctttgccgacgcaagagcccaactgccctcctgggtgcgtccccacgtcagggtgtatgacaactttggccatgtcatccgagacgtggcccagttcttccgtgttgccgagcgaactgtgagttcctgcccagggaggggatgagggtgttgtccccagaggagccagaaatgggtccacccacccccatggttctgcagatgccagcgccggccccccgggctacagcacccagtgtgcgtggagaagatgctgtcagcgaggccaagtcgcctggccccttcttctccaccaggaaagctaagagtctggacctgcatgtccccagcctgaagcagaggtcctcaggtgcggacgggcagcgctgggtgggcggtgtgggggtggcggagcgggcggcgtggggcgggcagcaccaggcgcccagggcggaggcgactcacc

SEQ ID NO: 33659 - DNA, 30 bp, Homo sapiens
  chr20:62322210-62322240
  hypo
gagccagttcctgcccggcagaggcccagg

SEQ ID NO: 33660 - DNA, 422 bp, Homo sapiens
  chr20:62326136-62326558
  hypo
agcagggaagcagggccagcacgccgtgagcgcctacctggctgatgcccgcagggccctggggtccgcgggctgtagccaactcttggcagcgctgacagcctataagcaagacgacgacctcgacaaggtgctggctgtgttggccgccctgaccactgcaaagccagaggacttccccctgctgcacagcaagtggccctggcgtggggaacagccggtggggtggggggcaggggacaaaatgggggctgtgccgggtctgattgaagctccccgcagggttcagcatgtttgtgcgtccacaccacaagcagcgcttctcacagacgtgcacagacctgaccggccggccctacccgggcatggagccaccgggaccccaggaggagaggcttgccgtgcctcctgtgcttacccac

SEQ ID NO: 33661 - DNA, 940 bp, Homo sapiens; identical to SEQ ID NO: 13162
  chr20:62383188-62384128
  hypo

SEQ ID NO: 33662 - DNA, 376 bp, Homo sapiens; identical to SEQ ID NO: 13163
  chr20:62384602-62384978
  hypo

SEQ ID NO: 33663 - DNA, 30 bp, Homo sapiens
  chr20:62398974-62399004
  hypo
aacgccggctccagcgcacagaccagaggc

SEQ ID NO: 33664 - DNA, 30 bp, Homo sapiens
  chr20:62401272-62401302
  hypo
ctccgccatctccacggccaccttctccag

SEQ ID NO: 33665 - DNA, 30 bp, Homo sapiens
  chr20:62407337-62407367
  hypo
cagaagacacgggtcgttcccagactctcc

SEQ ID NO: 33666 - DNA, 465 bp, Homo sapiens; identical to SEQ ID NO: 13164
  chr20:62461264-62461729
  hypo

SEQ ID NO: 33667 - DNA, 31 bp, Homo sapiens; identical to SEQ ID NO: 13168
  chr20:62467675-62467706
  hypo

SEQ ID NO: 33668 - DNA, 263 bp, Homo sapiens
  chr20:62481424-62481687
  hypo
tcctgtttttgggattcaccccgtagcggcggccttgtcttcccaccgtagggatgagccactgttcgcttatccactcgccagctgatggatacttggttttctcagctttgcgaacgctgctgctacaaaggtttgaggcgagtcttcctgcggacgtgtttcatctcttctgggtaaatacctgggcgcgggatgctgagtcacgctacgtctcctttcctgaatctctttttttttttttctttgagacggagtctctc

SEQ ID NO: 33669 - DNA, 328 bp, Homo sapiens; identical to SEQ ID NO: 13170
  chr20:62495255-62495583
  hypo

SEQ ID NO: 33670 - DNA, 16 bp, Homo sapiens
  chr20:62495814-62495830
  hypo
gacaaactagccaggc

SEQ ID NO: 33671 - DNA, 359 bp, Homo sapiens
  chr20:62550814-62551173
  hypo
ccagggcccgggacagcgccacggaagaggacgcacccggctgtgtgcacatgtgcccagggcccgggacagcgccacggaagaggacgcacccggctgtgtgcacatgtgcccagggcccgggacagcgccacggaagaggacgcacccggctgtgtgcacatgtgcccagggcccgggacagcgccacggaagaggacgcacccggctgtgtggacatgtgcccagggcccgggacagcgccacggaagaggacgcacaggacagcgccacggaagaggacgcacccggctgtgtgcacatgtgcccagggcccgggacagcgccacggaagaggacgcacccggctgtgtgcacat

SEQ ID NO: 33672 - DNA, 129 bp, Homo sapiens
  chr20:62551401-62551530
  hypo
ccagggcccgggacagcgccacggaagaggacgcacccggctgtgtggacatgtgcccagggcccgggacagcgccacggaagaggacgcacaggacagcgccacggaagaggacgcacccggctgtgt

SEQ ID NO: 33673 - DNA, 30 bp, Homo sapiens
  chr20:62551898-62551928
  hypo
tccctgcacgtgtgcggtcttgtctgccta

SEQ ID NO: 33674 - DNA, 767 bp, Homo sapiens
  chr20:62562303-62563070
  hypo
ctgaaggcgaggagacggagttctacgtgtcccccgaggatctggaggcacagctgcagtctgacgagaggggtgagtgcccgccccagggcccgtgtgtgtgtgtggggcagagccagaatgggccctgaatggtgtcaacctgtcttgtcaaacaggagggcactgacactgtgccgcgagtgtttgtggtggcagctgggactgttgaggtgtgaacgtggaccctgaggtaaagcaggcgcatagagctgtccccgccgtgacctgcggtagccgtagatcccagggactgcgaggcggggcagggcggcaggcagttggggcggggctgagggccgagggctggcggtgacccaaggcgacggaggaaagccgtgtggggtggaggtcagcgagtagcctctcccggtggagagtttgtccaggtgcccgaaagtcgctccacaggaccagcgttgggtgcgcgccaggctgtggccctcgtgcagtgccctgtgtgcttgcttttcagaggccacagacacgccgatcgtcatacagccggcatccgccaccgagaccacccagctcacagccgactcccaccccagctaccacactgacgggttcaactaaatccaggaggagctgtggtcagaggaggagccggcgcctggccacgccaaccttagaatcatgaactgtagtcacagagatgggaaggcagcctcctgcctgccctggccttgctggggcccctcctgcctccacgcccacccagcgtc

SEQ ID NO: 33675 - DNA, 76 bp, Homo sapiens
  chr20:62563316-62563392
  hypo
cctgtgcttgaggggccggaggcaggtgctgcctggcagagctgtgttaccgtcttggcctcggggtctggtccac

SEQ ID NO: 33676 - DNA, 30 bp, Homo sapiens
  chr20:62564940-62564970
  hypo
gaaaggtgaggtggcgagacagtggggtgc

SEQ ID NO: 33677 - DNA, 30 bp, Homo sapiens
  chr20:62571649-62571679
  hypo
cgtcgtggtcctaccgagtgtattgggcag

SEQ ID NO: 33678 - DNA, 31 bp, Homo sapiens
  chr20:62572478-62572509
  hypo
tgccccgtacctgcggcgtgctcttcaggac

SEQ ID NO: 33679 - DNA, 326 bp, Homo sapiens
  chr20:62578678-62579004
  hypo
gtgagaccccaaaatggaccacgttcccttgcaacccggcacactctctgggcagccaaatcgctgccatgctgaaggctgggtgcccaaggagacgtgagggcggcgtgtgggtggaggcgagaccagaccaggttgtgcgcacacaccgagggtgaggtccccagacaggaccaggctgaagggctcagggagagaggcagagggctcagccaggacctgattctcctgcagtgacagcaggcccagcacagtgcctcggcctggcctctctggctgtcagagtgccggatgggggaccctgcgctgggagccttattggaacc

SEQ ID NO: 33680 - DNA, 140 bp, Homo sapiens
  chr20:62581867-62582007
  hypo
aacaaaaggttaattccaacccggagggttccaagccgtaaccaacacaagagagacgcgcccagaccaacagcctcaagcaaaatggcaccttcgaccctgggctctgcccggtgcccgagagcacctgccagcctgtt

SEQ ID NO: 33681 - DNA, 327 bp, Homo sapiens
  chr20:62583700-62584027
  hypo
cactgtgctggccaggcgagggacggaggagcccaggcacgcagctgtgaatggaaccaccaggccccaccctggaatcacgtcgcctcgctgcaggccacgtggtccccaacatgcccctccacggggctgctctcggccacagcagcccacggcagggaggggccgctcacggtggggaggggtagcctgccctggtcctattcactggtgttcctcccaggttctaacttcctgagctgggccggtccagagaactcccattcccacgccacccacaggtgctgatgccgcgctggggtaagcgctgcccagagcaccttctgc

SEQ ID NO: 33682 - DNA, 30 bp, Homo sapiens
  chr20:62591216-62591246
  hypo
ggggccaggccccacgcaccatgctcactt

SEQ ID NO: 33683 - DNA, 235 bp, Homo sapiens; identical to SEQ ID NO: 13171
  chr20:62600640-62600875
  hypo

SEQ ID NO: 33684 - DNA, 540 bp, Homo sapiens; identical to SEQ ID NO: 13172
  chr20:62601089-62601629
  hypo

SEQ ID NO: 33685 - DNA, 126 bp, Homo sapiens
  chr20:62608160-62608286
  hypo
gaaaagacagattctgcggagatgaagaacagaggggaggttgattcacaggagaaactagacagacgaaaacaacagcaagagaaaggcaggctgagtgtggggaagagacgctctgaggcaggt

SEQ ID NO: 33686 - DNA, 30 bp, Homo sapiens
  chr20:62630984-62631014
  hypo
agtctgttcgggagacgaaccctcatcacc

SEQ ID NO: 33687 - DNA, 121 bp, Homo sapiens
  chr20:62631470-62631591
  hypo
caccacgcctgaatccaccactggtttgacggcaggctaagcttcattataaagagctcagttggtcagctcttcacccgcctaatggtggccagtcacggtggctcacgcctgtaatccc

SEQ ID NO: 33688 - DNA, 121 bp, Homo sapiens
  chr20:62631830-62631951
  hypo
aaaaaagaacgacccgagcagatgtgcagtctctgctttgtccatggagttgtcctgaaggaaatcatgctcttttcacaaagtggtgtttcattttttttttttctttttttttgagtct

SEQ ID NO: 33689 - DNA, 33 bp, Homo sapiens
  chr20:62639422-62639455
  hypo
tgtacctggcccggcctaatttcttaacatcat

SEQ ID NO: 33690 - DNA, 31 bp, Homo sapiens
  chr20:62646173-62646204
  hypo
aatttattgaatgctacgatgaaagtgaaaa

SEQ ID NO: 33691 - DNA, 270 bp, Homo sapiens
  chr20:62662207-62662477
  hypo
acccgaacagctgcccggagtggaggctcctcgtgttgtctcttgactacggtgcctctggctccagggggaggtgaccctgaggagagggtggcagcaacgcagagtcccgggcctgccagcatgctcagcagccagcgcccgccatcccttctccagcagcgggtgggggtgccatgcacacccttacctggcctctcatagcatggacctcttcgggcccggtttttcaggtgtgcatgtgtctggcaggcacggcggtgtgaatcc

SEQ ID NO: 33692 - DNA, 31 bp, Homo sapiens; identical to SEQ ID NO: 13174
  chr20:62694895-62694926
  hypo

SEQ ID NO: 33693 - DNA, 30 bp, Homo sapiens
  chr20:62713070-62713100
  hypo
tttctacaggcaggcgtccctccaggcccc

SEQ ID NO: 33694 - DNA, 907 bp, Homo sapiens; identical to SEQ ID NO: 13175
  chr20:62714750-62715657
  hypo

SEQ ID NO: 33695 - DNA, 923 bp, Homo sapiens
  chr20:62737168-62738091
  hypo
ggtgcccaggcccttcagcaccgcaatatgctgcggaagttcttccggaagttgtcatctagaaaggcgtagaggaaggggttcaggcacgagttggcgtagctgaggctggtgatgacgtaggacatactgatgaccagtggggtctggggcaggtccgtggtcagggccacgacagaggccaggtggaagggcgtccagcagaggaggcacacggccagcacgacgaggaccaggacggtcaccttccgcctggccttgcctagagccttggctccagagcggagccgcacggcccgcagcctgcgcaggaggtctgtgtagagcacacagatggtgcacacgggcagcacgaagcccaggaccaacgtgtagacacggctggccttgaaccagacctgctcgggccacgggaagctcagcccacagcttgggacctgcagctcgttgctgtagacgccagcgaaagagaagaagggcagaaccaggaccgtgacgcccagccagacacacaggctggcgaccttcgccccccggtaggtgcgccagggcatgtggcgggacctcacggtggccagcaccaccaggtatcggtccacgctcatcacggctaggaagtagatgctggagaagatgttgtagtggtcgacggccagcaccagcttgcagagcagctccccgaagggccagtactgcagcaggtgctccgcgatgttgacgggcagtaccagcgtgaagagcccgtcggcgacggccaggttcaggatgaacacgttggtcaccgtcttcatcttgggcgcccttaggattacaaggatgacggccgtgttgccagtcagccccacagcacagatcccggagtacacggcgggcaggagcacatagaggaacggcagtggctcggagaaggtggcattgtggcc

SEQ ID NO: 33696 - DNA, 213 bp, Homo sapiens
  chr20:62839566-62839779
  hypo
tactctgttattgtggaggtccgctcggatgatgacaaggacgaggacacccactcccggaagtcaacagtcactgacgagtcggagatgcaggacatgatgacccggggaaacctgggcctcctggagcaggccatcgccctgaaggctgaacaggtgcgcacagtctgcgagccgggctgcccgcctgccgagcagagccagctgggcctg

SEQ ID NO: 33697 - DNA, 30 bp, Homo sapiens
  chr20:62845140-62845170
  hypo
agtgtgcacatgccccgggccccccaggag

SEQ ID NO: 33698 - DNA, 30 bp, Homo sapiens
  chr20:62845653-62845683
  hypo
gtgaacacgtgggagcgtgtgtgtgcatgt

SEQ ID NO: 33699 - DNA, 31 bp, Homo sapiens
  chr20:62859481-62859512
  hypo
gctctcatacgctacacgttgatacctgtga

SEQ ID NO: 33700 - DNA, 31 bp, Homo sapiens
  chr21:15448707-15448738
  hypo
gacttggaaaataattcggcaggtgcctcag

SEQ ID NO: 33701 - DNA, 31 bp, Homo sapiens
  chr21:15450034-15450065
  hypo
aaacaatgggcggatgcggtggctcttggct

SEQ ID NO: 33702 - DNA, 300 bp, Homo sapiens
  chr21:15455746-15456046
  hypo
accacatgcccttaaagaactcgagtcgagagagtcagcaagagactttcagcattgtctcccgaaagcagtgaggtggatggcggtggagtgtcccaaaagcagtgaggtggatggcggtggagtgtcccgaaagcagagaggtggatggcggtggattgtcccgcgctcctgtggttttaggtggccacgcatggaggatagatttcaaatatttccggagaggctcgagccacagtcattcagagcatccgagctcgggatggggtttctgacagcgccttaagggcaaggaagggc

SEQ ID NO: 33703 - DNA, 710 bp, Homo sapiens; identical to SEQ ID NO: 13177
  chr21:15588288-15588998
  hypo

SEQ ID NO: 33704 - DNA, 30 bp, Homo sapiens; identical to SEQ ID NO: 13178
  chr21:16130746-16130776
  hypo

SEQ ID NO: 33705 - DNA, 154 bp, Homo sapiens
  chr21:16408139-16408293
  hypo
gtgctgggattacaggcatcgtgatgtatatgactttctaacaaatactgtaatgatgctattcatccttaatagaaatccatgggagtatttaaataatacaataatgttaacgatttcttattttctgaaattactgcgaaaatggcaaatt

SEQ ID NO: 33706 - DNA, 30 bp, Homo sapiens; identical to SEQ ID NO: 13180
  chr21:16488404-16488434
  hypo

SEQ ID NO: 33707 - DNA, 31 bp, Homo sapiens
  chr21:18824915-18824946
  hypo
cataagccaccactcccgaacaagactgaaa

SEQ ID NO: 33708 - DNA, 722 bp, Homo sapiens; identical to SEQ ID NO: 13182
  chr21:18885686-18886408
  hypo

SEQ ID NO: 33709 - DNA, 30 bp, Homo sapiens
  chr21:18966016-18966046
  hypo
attctcttaaacaacgacataaaatagatt

SEQ ID NO: 33710 - DNA, 31 bp, Homo sapiens; identical to SEQ ID NO: 13184
  chr21:18985139-18985170
  hypo

SEQ ID NO: 33711 - DNA, 30 bp, Homo sapiens
  chr21:19139461-19139491
  hypo
agggtgccatcaaggcggcgttccagcgag

SEQ ID NO: 33712 - DNA, 35 bp, Homo sapiens
  chr21:19274889-19274924
  hypo
atgcaattaacatctacggtcggttgattttaagt

SEQ ID NO: 33713 - DNA, 618 bp, Homo sapiens; identical to SEQ ID NO: 13188
  chr21:27011502-27012120
  hypo

SEQ ID NO: 33714 - DNA, 696 bp, Homo sapiens; identical to SEQ ID NO: 13189
  chr21:27012148-27012844
  hypo

SEQ ID NO: 33715 - DNA, 13 bp, Homo sapiens
  chr21:27341417-27341430
  hypo
ggaggctggcgga

SEQ ID NO: 33716 - DNA, 30 bp, Homo sapiens; identical to SEQ ID NO: 13190
  chr21:27403678-27403708
  hypo

SEQ ID NO: 33717 - DNA, 84 bp, Homo sapiens
  chr21:30294960-30295044
  hypo
tggaaggctgatctacgacttaaaagaatgcaaccttttgcgtcttacctacttctaacggggccacttcgagttgtcctgcct

SEQ ID NO: 33718 - DNA, 191 bp, Homo sapiens
  chr21:30357056-30357247
  hypo
tgcttggaggaaaagccgcttcaaatgcatcttttgctgcaaacgcagctggtgtgtaagtatcacactgagccattagccaatatcccattaaactttttaagtagggagccaactgtttctttactttaaggataagtttttcaaaagcttgttgtgtggcttctcggacgcgacggtcatgatcctat

SEQ ID NO: 33719 - DNA, 43 bp, Homo sapiens
  chr21:30406900-30406943
  hypo
gtgctgggattacaggtgtgagccaccgcgcctagcgagtgca

SEQ ID NO: 33720 - DNA, 100 bp, Homo sapiens
  chr21:30407635-30407735
  hypo
catcattaaaacagatttttacgtcttaaaaatcattttcacagtagtcttcactgaatgacatcttttttttttttttgagacggaatctttctgtcgc

SEQ ID NO: 33721 - DNA, 31 bp, Homo sapiens
  chr21:30722603-30722634
  hypo
tgtctgtatacaatgccgccctgccaaatgt

SEQ ID NO: 33722 - DNA, 31 bp, Homo sapiens
  chr21:30936923-30936954
  hypo
atgggaaaggatgacacgattcaactctaaa

SEQ ID NO: 33723 - DNA, 30 bp, Homo sapiens; identical to SEQ ID NO: 13210
  chr21:32716469-32716499
  hypo

SEQ ID NO: 33724 - DNA, 89 bp, Homo sapiens; identical to SEQ ID NO: 13211
  chr21:32931770-32931859
  hypo

SEQ ID NO: 33725 - DNA, 30 bp, Homo sapiens; identical to SEQ ID NO: 13212
  chr21:32932325-32932355
  hypo

SEQ ID NO: 33726 - DNA, 151 bp, Homo sapiens
  chr21:33057408-33057559
  hypo
ggtgcagcaggtggcacggcagagccatacattttcacgctgtcaccagactcggcgtttcctctagccccagacaccactgttggaatgggatttccaatagataagtcttttgtagtgtcttcatttataccagcgatagtagctaagg

SEQ ID NO: 33727 - DNA, 46 bp, Homo sapiens; identical to SEQ ID NO: 13213
  chr21:33058220-33058266
  hypo

SEQ ID NO: 33728 - DNA, 33 bp, Homo sapiens
  chr21:33058552-33058585
  hypo
agaaagaaatcaaagttgcgctcttcactttat

SEQ ID NO: 33729 - DNA, 90 bp, Homo sapiens
  chr21:33175438-33175528
  hypo
aaaaaaaaaaaaaagaaatttcgcttatcggtctttcttataagcattacttacattatagatcagagcgatgcactagaacttttcaaa

SEQ ID NO: 33730 - DNA, 31 bp, Homo sapiens
  chr21:33523366-33523397
  hypo
tctctatatgattctgcgttaaatttggcca

SEQ ID NO: 33731 - DNA, 34 bp, Homo sapiens
  chr21:33641297-33641331
  hypo
caaataaggggaggaagggcgggggcagaatgga

SEQ ID NO: 33732 - DNA, 31 bp, Homo sapiens
  chr21:33642643-33642674
  hypo
ttagttctgacaattccgtgccttaactttc

SEQ ID NO: 33733 - DNA, 31 bp, Homo sapiens
  chr21:33688988-33689019
  hypo
ttaaggaggtcagccacgaccacagggtgtg

SEQ ID NO: 33734 - DNA, 125 bp, Homo sapiens
  chr21:33694582-33694707
  hypo
cagagtttttaaggtttgaggcgccatgtagaagtgagccaacagcacggagacattccgaagtgcaggcctgcgtggccaccgactgcacaatcgtgttggccgtgcagcatacaggatccatg

SEQ ID NO: 33735 - DNA, 519 bp, Homo sapiens
  chr21:33707627-33708146
  hypo
aaccctggcacgaatcggtcttgagcacatagggcctggctcttggtgctcctgtaagagctggtttatatcacggggcgtgagtcagctgccactttaaaaatgtctaaatttctcacagtctgttaccctcagcagatgggaagactgtatctcattcccataggttttcctgagagcaccaagcccagcgcctccaggcaatcaaggaacattatctatagagctaaatacttctaaacaaaattcttctaaatacaggttcgcttctgtgcaagtcgacaacagtcactaatgtcagaaaaggaaagaatcatcctttcaggaatgctcgctgttcaccccagtttctggcaggcagagagcccatgcgccaggcacacccggcagactgcccatcacagaccggcgggagagccgccacgtagcgtccaggatccccagctcagctccccgagctcaggcctgctccctcatctaaggacgagatgtttattttgtttgcggaaatgctctgtg

SEQ ID NO: 33736 - DNA, 172 bp, Homo sapiens
  chr21:33711060-33711232
  hypo
gagtcggcagaaacagcgagtgctgcatgagcatcacgtagaccaccgggagctggatgagcttcgtgcgcacggagctttctgggctgtacaggagctgtacggcggtgaggagcatctttaaaaatgtgtggtcctggtaccgaaatctaggcggcgagagtcaaaggga

SEQ ID NO: 33737 - DNA, 205 bp, Homo sapiens
  chr21:33760696-33760901
  hypo
cagtgaaaatccagtcacattcggcctctgccagcctcacaggtgttttcagatccccttttatgctgcaacattttccgcagcaaccaccgccattcctttaacagtcactgagcaagtgcatctgctatgccaggcgctgctctgagcttcggggccagactccattgctgccgtctgcagcgtggtctggtggtgattatga

SEQ ID NO: 33738 - DNA, 318 bp, Homo sapiens
  chr21:33781920-33782238
  hypo
agcaattcagttttctcgcaagattccaaaattcttaaagagatcagattaggaccaaaatcttctgatttaacagtgaggggctaagggacaaaacagagggaagccagggagacgtccttcagaccctctcatagcccacgactgcccggtcgcattgtgctgtccatctgccttctaaacatccttccattgtggccgcttctcctcttctttctgggtgtacagcgagcacatcagcccaagcacagccataaacccctgactgcactctctccctcaccacggccatctccccagacccacttttcttttttg

SEQ ID NO: 33739 - DNA, 164 bp, Homo sapiens
  chr21:33812565-33812729
  hypo
gtgatcctggcttcatcgccaagtggctctgcagtttgaggattacgctgtgtcccgaagaaaagaaaagaaaattgttccgtttagttgcttggggtaaagggggattgatccagttacttttaaattaatctaagtcagatggtgttcgctgcataactttc

SEQ ID NO: 33740 - DNA, 241 bp, Homo sapiens
  chr21:33844218-33844459
  hypo
gagcaaccgcactcggcctccatttcttaatattgcagagaagcacctcatttcccaggcttactagtctaacttagccacatgtgttttaagaagcagcagtaagtaacatccctgtcagttgttcttttcagcagaattcagttggccaagcaggtaaatctgtaagccgaatggtttgtgttcacttggtcactgcctttcattcctaggaatggtagatgaaagttggatttaatta

SEQ ID NO: 33741 - DNA, 31 bp, Homo sapiens
  chr21:33845959-33845990
  hypo
agctgcctcccctcttcgcttagcagccaga

SEQ ID NO: 33742 - DNA, 66 bp, Homo sapiens
  chr21:33849055-33849121
  hypo
cacccccagggctgcccgaggcctggctgccagtactcccgtatcctgcaccgcagtgggacacac

SEQ ID NO: 33743 - DNA, 90 bp, Homo sapiens
  chr21:33875250-33875340
  hypo
ttctaacagggttcccacccgatccataaacagcctggtccccctgcagtgggggcctgagagccaaccctgtgccgtctctcctcaaag

SEQ ID NO: 33744 - DNA, 149 bp, Homo sapiens
  chr21:33876125-33876274
  hypo
tgacttttaattattccggcggtccctggggtaggagcagcaggggtgtcttagaataggcgtactatgaacagctgtgattaattggtcttgcatttttcatgaaacaggtataaacttcgacccaagcggatcgaaggttctgagga

SEQ ID NO: 33745 - DNA, 30 bp, Homo sapiens
  chr21:33898149-33898179
  hypo
cccctgccctggtctcgctaacactggttt

SEQ ID NO: 33746 - DNA, 23 bp, Homo sapiens
  chr21:33898640-33898663
  hypo
tggagtctcactctgtcgccagg

SEQ ID NO: 33747 - DNA, 24 bp, Homo sapiens
  chr21:33913567-33913591
  hypo
gttaagaagtccaggccgggcgcg

SEQ ID NO: 33748 - DNA, 117 bp, Homo sapiens
  chr21:33924143-33924260
  hypo
attagagagactcaggcgtgcaccaaggaaacgtctagctatgctcttctccagcctctcaccgggctgcaggtcttagcttttagtatcactggggtgtcccgggcttttgtttga

SEQ ID NO: 33749 - DNA, 59 bp, Homo sapiens
  chr21:34033604-34033663
  hypo
tgaggcaaggccccacggttccacccagcatacaagcttatggagcggctccttttgag

SEQ ID NO: 33750 - DNA, 65 bp, Homo sapiens; identical to SEQ ID NO: 13222
  chr21:34442191-34442256
  hypo

SEQ ID NO: 33751 - DNA, 1768 bp, Homo sapiens; identical to SEQ ID NO: 13223
  chr21:34442594-34444362
  hypo

SEQ ID NO: 33752 - DNA, 37 bp, Homo sapiens; identical to SEQ ID NO: 13224
  chr21:34444444-34444481
  hypo

SEQ ID NO: 33753 - DNA, 27 bp, Homo sapiens
  chr21:34471072-34471099
  hypo
cgaagatttaaaaaacgcagctgggtg

SEQ ID NO: 33754 - DNA, 33 bp, Homo sapiens
  chr21:34711331-34711364
  hypo
gccaccgagcccggccaataatgatttttttaa

SEQ ID NO: 33755 - DNA, 41 bp, Homo sapiens
  chr21:34745738-34745779
  hypo
cgaaaaaaaaaaaaaacaacgagagtgagcctcagccctcc

SEQ ID NO: 33756 - DNA, 31 bp, Homo sapiens; identical to SEQ ID NO: 13229
  chr21:34776440-34776471
  hypo

SEQ ID NO: 33757 - DNA, 31 bp, Homo sapiens
  chr21:35533044-35533075
  hypo
catgagccaccacacccggccaccattttct

SEQ ID NO: 33758 - DNA, 31 bp, Homo sapiens
  chr21:35938134-35938165
  hypo
agtatctcttccccagcgaccatgtatacac

SEQ ID NO: 33759 - DNA, 111 bp, Homo sapiens; identical to SEQ ID NO: 13234
  chr21:35986868-35986979
  hypo

SEQ ID NO: 33760 - DNA, 84 bp, Homo sapiens; identical to SEQ ID NO: 13235
  chr21:36042155-36042239
  hypo

SEQ ID NO: 33761 - DNA, 1782 bp, Homo sapiens; identical to SEQ ID NO: 13236
  chr21:36160096-36161878
  hypo

SEQ ID NO: 33762 - DNA, 2976 bp, Homo sapiens; identical to SEQ ID NO: 13237
  chr21:36161931-36164907
  hypo

SEQ ID NO: 33763 - DNA, 163 bp, Homo sapiens; identical to SEQ ID NO: 13238
  chr21:36171596-36171759
  hypo

SEQ ID NO: 33764 - DNA, 204 bp, Homo sapiens; identical to SEQ ID NO: 13239
  chr21:36206694-36206898
  hypo

SEQ ID NO: 33765 - DNA, 106 bp, Homo sapiens; identical to SEQ ID NO: 13240
  chr21:36231769-36231875
  hypo

SEQ ID NO: 33766 - DNA, 180 bp, Homo sapiens; identical to SEQ ID NO: 13241
  chr21:36252844-36253024
  hypo

SEQ ID NO: 33767 - DNA, 267 bp, Homo sapiens; identical to SEQ ID NO: 13242
  chr21:36259126-36259393
  hypo

SEQ ID NO: 33768 - DNA, 40 bp, Homo sapiens; identical to SEQ ID NO: 13244
  chr21:36265220-36265260
  hypo

SEQ ID NO: 33769 - DNA, 118 bp, Homo sapiens; identical to SEQ ID NO: 13245
  chr21:36421137-36421255
  hypo

SEQ ID NO: 33770 - DNA, 132 bp, Homo sapiens; identical to SEQ ID NO: 13246
  chr21:36421463-36421595
  hypo

SEQ ID NO: 33771 - DNA, 183 bp, Homo sapiens
  chr21:36437234-36437417
  hypo
gctttcgggtccaggcgaactcgctgtggtattgttcttctctgctcggtttccaaaggagagcccaggcgcgttaattgctgggtggcagctacactaaatgcaagtggacgacagctgggtgccgggctcgctctgcaagagaaggtttgggtttccattgtagtccgcatcataatccgc

SEQ ID NO: 33772 - DNA, 30 bp, Homo sapiens
  chr21:37259304-37259334
  hypo
tctggcgtctgggtcgttgtgtcctgacaa

SEQ ID NO: 33773 - DNA, 68 bp, Homo sapiens
  chr21:37405206-37405274
  hypo
cgctgatgtgaggagtcgctgtcctgttgtggggcgctgatgtgtgtgggggtcgctgatctattgtg

SEQ ID NO: 33774 - DNA, 30 bp, Homo sapiens
  chr21:37504740-37504770
  hypo
agccaacatgccagcggcccagagctgggt

SEQ ID NO: 33775 - DNA, 364 bp, Homo sapiens; identical to SEQ ID NO: 13247
  chr21:37528251-37528615
  hypo

SEQ ID NO: 33776 - DNA, 133 bp, Homo sapiens
  chr21:37582266-37582399
  hypo
ggtggaaaaatggatgaaaagcgcctcgcacaatgatcaggacacaggcgaccccgatgaacacgtccctttcctgccccgtcagtatcccctttgtctctttctctccatcgtctcagccctgctctggctt

SEQ ID NO: 33777 - DNA, 24 bp, Homo sapiens
  chr21:37699404-37699428
  hypo
cgcgcctggcctcaaatttaaatt

SEQ ID NO: 33778 - DNA, 30 bp, Homo sapiens
  chr21:37756382-37756412
  hypo
gttggcactgaagtcggatctctaaaatgt

SEQ ID NO: 33779 - DNA, 207 bp, Homo sapiens
  chr21:37775028-37775235
  hypo
aataaaaataaattttgtgtgcgacaggcaagaagctaccggatgtttcacgacgacagcatgaagtctttcttccgtagactgagtttcactcccgacggatctttgcttctcacgccaggtgtgtttcgtagctttggacttaaaggaatgatggccgagtggggatgtctgctcccgttttacgctgcagcttatcagctcagt

SEQ ID NO: 33780 - DNA, 20 bp, Homo sapiens
  chr21:37781582-37781602
  hypo
gccaccgcgccctgccaaaa

SEQ ID NO: 33781 - DNA, 31 bp, Homo sapiens
  chr21:37847367-37847398
  hypo
aagtgctagtcagtgccgggtgcaggtgggg

SEQ ID NO: 33782 - DNA, 31 bp, Homo sapiens
  chr21:38140416-38140447
  hypo
aggtgctgcgcaggcgcggttcgaggtagga

SEQ ID NO: 33783 - DNA, 28 bp, Homo sapiens
  chr21:38209182-38209210
  hypo
acatataaaaactgcacggcggctgggc

SEQ ID NO: 33784 - DNA, 27 bp, Homo sapiens
  chr21:38419290-38419317
  hypo
tccagctgaactggggcgagaagcctc

SEQ ID NO: 33785 - DNA, 74 bp, Homo sapiens
  chr21:38566695-38566769
  hypo
ttgctgctccctgcccgcgagccacttagaagctgatttggtgaccagatgaacttctcgcgttaccccagtgc

SEQ ID NO: 33786 - DNA, 143 bp, Homo sapiens
  chr21:38605996-38606139
  hypo
acccactggcaaacaggtgcacggtcccacctgtagcagggagcaggctggcgagacagaaagggcagtgcgctcaggagcagacgccaggccagatcccgttgttgtctgccttactgtgcgagcccagacagataacacaa

SEQ ID NO: 33787 - DNA, 33 bp, Homo sapiens
  chr21:38638500-38638533
  hypo
gagccaccgcgcgggccagatttttccctttgt

SEQ ID NO: 33788 - DNA, 31 bp, Homo sapiens
  chr21:38673196-38673227
  hypo
gtaggggtttggatttcgggagaaatcattc

SEQ ID NO: 33789 - DNA, 257 bp, Homo sapiens
  chr21:38823805-38824062
  hypo
agttgccctcattattcagcacggctgaacaggtttgcagcctaagagcagtaggctctaccgtctagcgtgggcgtgcagtaggctccaccgtctagcgtgggcgtgcagtaggctccaccgtctagcgtgggcgtgcagtaggctccaccgtctagcgtgggcgtgcagtaggctccactgtctagcgtgggcgtgcagtgtatactcagtgatgttctcacaaccatgaaatcgcctgacagtgaatttcttag

SEQ ID NO: 33790 - DNA, 31 bp, Homo sapiens
  chr21:38893253-38893284
  hypo
actggagtgtcaccctcgcccaggaatgtgg

SEQ ID NO: 33791 - DNA, 30 bp, Homo sapiens
  chr21:38935478-38935508
  hypo
ttcctctgagcccagcgcagtgccaaggcc

SEQ ID NO: 33792 - DNA, 435 bp, Homo sapiens; identical to SEQ ID NO: 13268
  chr21:39288790-39289225
  hypo

SEQ ID NO: 33793 - DNA, 31 bp, Homo sapiens
  chr21:39654406-39654437
  hypo
catattctttgtgctacgaatcagaatagga

SEQ ID NO: 33794 - DNA, 143 bp, Homo sapiens
  chr21:39726164-39726307
  hypo
tggtgtgcccttactgaggatcgacaaaggagaacacgtctatgttttgtggaaacacgactgaagccttcatccaatgacgttggccggccccgctctcctcgtgccatcaagcactctacgctgactcagtagagcagcac

SEQ ID NO: 33795 - DNA, 8 bp, Homo sapiens
  chr21:40032312-40032320
  hypo
cacctgtc

SEQ ID NO: 33796 - DNA, 157 bp, Homo sapiens; identical to SEQ ID NO: 13270
  chr21:40032367-40032524
  hypo

SEQ ID NO: 33797 - DNA, 235 bp, Homo sapiens; identical to SEQ ID NO: 13271
  chr21:40032679-40032914
  hypo

SEQ ID NO: 33798 - DNA, 459 bp, Homo sapiens; identical to SEQ ID NO: 13272
  chr21:40032973-40033432
  hypo

SEQ ID NO: 33799 - DNA, 87 bp, Homo sapiens
  chr21:40117699-40117786
  hypo
caagactctgtctcataaacaaacaaaaacaaacaaacaaccaaaaaatccttaatgaacatgtatgtttaacgatatatatatata

SEQ ID NO: 33800 - DNA, 31 bp, Homo sapiens
  chr21:40128612-40128643
  hypo
gagccaccgcgcccagcccctgtctgttttt

SEQ ID NO: 33801 - DNA, 88 bp, Homo sapiens; identical to SEQ ID NO: 13276
  chr21:40177514-40177602
  hypo

SEQ ID NO: 33802 - DNA, 672 bp, Homo sapiens; identical to SEQ ID NO: 13277
  chr21:40177801-40178473
  hypo

SEQ ID NO: 33803 - DNA, 139 bp, Homo sapiens
  chr21:40191658-40191797
  hypo
tatacctgcagctgtgctggccggcttcacaggtgtgtgtggaactccgagagcctggccgcccagtctcctgggtcctgtcccttgcttcctttcgagccacagtaccacattcaccgagggtgtttctaagctaggt

SEQ ID NO: 33804 - DNA, 35 bp, Homo sapiens
  chr21:40208398-40208433
  hypo
agattatcggccgggcgcggtggctcatgtctgta

SEQ ID NO: 33805 - DNA, 45 bp, Homo sapiens
  chr21:40278581-40278626
  hypo
gattacaggcgtgagccaccgcgccccaccgcgtctgccattctg

SEQ ID NO: 33806 - DNA, 30 bp, Homo sapiens
  chr21:40316225-40316255
  hypo
ccctcgcagcctgcccgtgtctccgcctcc

SEQ ID NO: 33807 - DNA, 298 bp, Homo sapiens
  chr21:40316660-40316958
  hypo
ggaaggcccagccacaaagcacgatccagcccaaaacgccggcagtgcctcggcagaaatgtcacctcctacaccatcaactctgtgagagcggggatttgtttgtcacgactgcgtcctggtgcccagaccaaagcctgcacatcacggtgctccgtggatgggtttgaaggagcggacctggaccagagcgtgctgtaggccacagtcagtgccggcccacccagaactggccactcagcggttacccatctctatcgctttctttcccagagtcggaaacttggaaccactttca

SEQ ID NO: 33808 - DNA, 31 bp, Homo sapiens
  chr21:40352340-40352371
  hypo
tactgagtgcaggatgcggacgggaaaggat

SEQ ID NO: 33809 - DNA, 106 bp, Homo sapiens
  chr21:40434562-40434668
  hypo
agaaacaagcactcagccctccgggagctgccagcttcacgggaacgagatcctctccaggggatctggagcggctgcgtgttccgcacattaatcctctccatga

SEQ ID NO: 33810 - DNA, 30 bp, Homo sapiens
  chr21:40480267-40480297
  hypo
cgcccgctccagccgcgcactgtctcatag

SEQ ID NO: 33811 - DNA, 149 bp, Homo sapiens
  chr21:40480500-40480649
  hypo
tcccacaggtgtgcaaggtagcggggagacctgtgtctgcccaacaaggcccgggctccaggggccctaaccaggtgtgggctgagaacgggagctccccaagggcgggccgcgctcctcatcctctcgctaagcccttgctgaatgag

SEQ ID NO: 33812 - DNA, 31 bp, Homo sapiens
  chr21:40488783-40488814
  hypo
atggaccctcagtaaacgcatgctgagtgga

SEQ ID NO: 33813 - DNA, 349 bp, Homo sapiens
  chr21:40506195-40506544
  hypo
gacagcgcccacctccgctaagggggctccgctttcctgcctagctccttcagtttcttgccgcgaaaatggtctttgtattgcactttgtggctgacagacaccgtccgttacctctcagcattgtttcaatacacacacattaacacacactcgcgcacacacacacgtacacactcgcacacactcccacatgtacacatatacacgcacacccacacatgtacacagtcacacacaaactcactaacacaaacatgtatacattcactaacacacacaaactcacgaacacgtgctaacatgtacacactaatacactcatacatacacacgaacacattcacac

SEQ ID NO: 33814 - DNA, 28 bp, Homo sapiens
  chr21:40646951-40646979
  hypo
cagagctagactccgtctcaaaaaaaaa

SEQ ID NO: 33815 - DNA, 35 bp, Homo sapiens
  chr21:40697449-40697484
  hypo
gattataggcataagccaccgcgcctggaccccct

SEQ ID NO: 33816 - DNA, 249 bp, Homo sapiens
  chr21:40762534-40762783
  hypo
cagggcatagacagaaagtagcgggggactggggaaccctcctgtgacccgtgttggaaggtgctgatccccgttgtccgccctgccagatgtccagggtgctgcagaaggacgcggagcaggagtcacagatgagagcggagatccaggacatgaagcaggagctctccacagtcaacatgatggacgagtttgccagatatgccaggctggaaagaaagatcaacaagatgacggataagctcaaaa

SEQ ID NO: 33817 - DNA, 90 bp, Homo sapiens
  chr21:40904966-40905056
  hypo
tttaactaacctttctcgtgatacaaatcattttcatgtaagtcagagctctccttcagtccagtagtttttaatttttttttttttttg

SEQ ID NO: 33818 - DNA, 71 bp, Homo sapiens; identical to SEQ ID NO: 13282
  chr21:40941232-40941303
  hypo

SEQ ID NO: 33819 - DNA, 31 bp, Homo sapiens
  chr21:41753050-41753081
  hypo
caggatgaggcaaaggcgatgaggaccaagg

SEQ ID NO: 33820 - DNA, 66 bp, Homo sapiens; identical to SEQ ID NO: 13283
  chr21:42539637-42539703
  hypo

SEQ ID NO: 33821 - DNA, 527 bp, Homo sapiens; identical to SEQ ID NO: 13284
  chr21:42540313-42540840
  hypo

SEQ ID NO: 33822 - DNA, 212 bp, Homo sapiens
  chr21:42572213-42572425
  hypo
cattatttcagaatgaaatttcgtttagtttatgagtctgtccaaatatttcgatcatttaaattcagatgttagtttacctcggtttgtggagaatggactgggctgtagaaacttagaagccaagcgaatgtggactccgctgtcttcattgctgtcttgttactatggatgtcggattaggtgcacccgtgaggtcttggattgtaacc

SEQ ID NO: 33823 - DNA, 40 bp, Homo sapiens
  chr21:42585676-42585716
  hypo
ggtgacagagcgatactccgtctcaaaaaaaaaaagagta

SEQ ID NO: 33824 - DNA, 95 bp, Homo sapiens
  chr21:42593385-42593480
  hypo
atctttgtaccaagggcaaaacgagtgtctttgattttacctttgcaaataattttgttgtcgattccacaaatgtgtgagtgtcggccgggcgc

SEQ ID NO: 33825 - DNA, 214 bp, Homo sapiens
  chr21:42593779-42593993
  hypo
tgtcagtgtctactgtgtgcctggccctgttacaggcatgcacggcagacagagcagcaaacagcaaaaatccctgtcagagggaggcttcacgctggtggggcggaggcagcaggagctgtcgggaccccgtgaatggcatgattgcgcacggggcccaggcagtggctgagttggttacaagaatgcgctcggagtctgactctgggttcca

SEQ ID NO: 33826 - DNA, 44 bp, Homo sapiens
  chr21:42596857-42596901
  hypo
aacagtaaaaatgtatctagtcggctgggtgcggtggctcacgc

SEQ ID NO: 33827 - DNA, 181 bp, Homo sapiens
  chr21:42608631-42608812
  hypo
gaacctgaactccagctgctgcgggcacaggctggtggagcctccctctgggatgccggcacctacccgtgtcacacagcagcagcacagcagccctgcaaagccggagggccaggcaggtgccagattgggttgtgtccttcaaagggtcgtgtcctacggtggccaaacaaagcacctg

SEQ ID NO: 33828 - DNA, 86 bp, Homo sapiens
  chr21:42609013-42609099
  hypo
ttaggatagctgccttggacacggcaaccttatcttcatggttcgggaacatggatacataagagaatgcaaggggcttagccggg

SEQ ID NO: 33829 - DNA, 228 bp, Homo sapiens
  chr21:42613694-42613922
  hypo
gtctacactgtgagtcctaagcgggtgcccctctctgtcgccctcccgcagccatcaagttctctggagaccttcttcgactccctggtgacacaagcaaacatccccaacgttttctccatgcagatgtgtggagccggcttgcccgttgctggatctgggaccaacggaggtagtcttgtgggtatcttttagtcttaaaggggcgaaaaatcacagatggatggg

SEQ ID NO: 33830 - DNA, 312 bp, Homo sapiens
  chr21:42617796-42618108
  hypo
gtaacagacagatggtgatggcggctagagccacgtggggcggggagcgccactgtcactcacgcacctttccctttctctcccggttcaagtataacgcagacaaggccatcgtggacagtggcaccacgctgctgcgcctgccccagaaggtgtttgatgcggtggtggaagctgtggcccgcgcatctctggtgagtcctcgggacactcacgggtccccgagttgctgagttacagtcacctgctgaggagcagcactgcgtgttctgagcatctctgaactattgcgccatgtatttccaattttca

SEQ ID NO: 33831 - DNA, 30 bp, Homo sapiens
  chr21:42676099-42676129
  hypo
tcatagactggattcgcgactgcgctgttc

SEQ ID NO: 33832 - DNA, 181 bp, Homo sapiens
  chr21:42780051-42780232
  hypo
agagcagagtgagaccgctaccaagagaagaatccttaaggagagaatttaccggctcactcaggcgcgacacgcactctgtcaattctccagcaaagagatccactgaagggcggcgatgcctgtggttgttttcttgtgcgtactcattcattctaaggggagtcggtgcaggatgccg

SEQ ID NO: 33833 - DNA, 31 bp, Homo sapiens
  chr21:42953696-42953727
  hypo
cagggtggtgaaggcccgaggccaggagggc

SEQ ID NO: 33834 - DNA, 165 bp, Homo sapiens
  chr21:43021069-43021234
  hypo
cacacctgtagtcccagctactcgggaggctgaggtcccagccgaatcccagctactcgggaggcggatcccttgttcaaaaagcatgaagactttacagatggcgacagcctctcgttgagcccaggaagagtcatctgagccggggaggtggaggttgcattg

SEQ ID NO: 33835 - DNA, 31 bp, Homo sapiens
  chr21:43026508-43026539
  hypo
agccagggattacaggcgtgagccaccgcgc

SEQ ID NO: 33836 - DNA, 110 bp, Homo sapiens
  chr21:43088943-43089053
  hypo
cactggcttgcctgagctgggcggccccgcggtctaagcattagagcgacctacctgtctcatcttgccggaaaactggggataataacgcttacctcacaaggaaggtg

SEQ ID NO: 33837 - DNA, 63 bp, Homo sapiens
  chr21:43090565-43090628
  hypo
tcccagccagggcctgcgtgcggggcgtgcccggctggttctgttgaccgagggtcagcacgc

SEQ ID NO: 33838 - DNA, 31 bp, Homo sapiens
  chr21:43102335-43102366
  hypo
ctgggacagcctctgccggtcagtggcttct

SEQ ID NO: 33839 - DNA, 177 bp, Homo sapiens
  chr21:43109383-43109560
  hypo
accctgcacgggccctcgtcaccgggtcatcccccacgggccctcgtcaccgggtcaccccgcatgggccctggtcaccgggtcaccctgcacgggccctcgtcaccgggtcaccccgcacgggccctggtcaccgggtcaccccgcatgggccctggtcaccgggtcgccccccac

SEQ ID NO: 33840 - DNA, 31 bp, Homo sapiens
  chr21:43143548-43143579
  hypo
acaccccaagcatactcgctgccctgtgtgg

SEQ ID NO: 33841 - DNA, 1039 bp, Homo sapiens
  chr21:43160968-43162007
  hypo
gtggacccccggtctccgcaggcagccagctaggtcttgcttcgccgcaggagcgtggcggcggggccatggccgccctggaacttgaggctctgcaggttgatgtgggccccatgcctgagcagagtctccaccgtctgtgcgtgccggccctgggcggccaggtgcagcgcgctgagcccctgctcgtcgaacaggtcaatgacatcggcgctgaccaactcctccaccacctccgagtgcccgtgggcggcagccaggtgcagcgccgtctggttcaggggtccccgggccagcacatcggccttctcctcgacaagcagcttgacagtggccaggtgtccgttgcgggcagccaggtgcagagcggtgtagccgtctgaggtcatggcctccttgccagcgccccgatgcaggagcagcctggcagtgctcgtgtgccccgtctccgcggccacgtgcaggggtgtctgtgccagcaggctgcagacgttgacgtcggagcacaggtcgatgaggatgcgggccacgcggtagtgcccgcgctgtgcggccaggtgcaatggcgtcctcccatccagcgtctgggcgttcacactcacccccggctgcttggccagcagcttgacgatgggcaggtggccctgccaggcagcgtagtgcagtggcagccaggcatccttgccctgcaggctcacgtccacgcctcggcgcagcaggatgcgcacgatattctcctgcccgtgctggcaggccacgtgcatgggcgtccggccctcaaagtccacctcgttgaccgaggcgttcttctccaacagcagccgtgtgctagactcgtccccgttctgggctgcaaagtggagggctgtccactggtcctcatccttggcgttgacactgatcttccgcgccagcaggagctccacgacaccccgcaccctcctctccacggccatgtgcaacggggtggagcccctacggttgctcaggttggggttggcattgttgagcagcagccacttggcgcactcctcttgcc

SEQ ID NO: 33842 - DNA, 141 bp, Homo sapiens
  chr21:43162541-43162682
  hypo
tggcacctgccacccacggacgccccaggcctagcagcctgcagagatggtgactagagctggaaggggctgctccagctcttgccccacctcgaagtggcacctcctgacctggggaggttaagtcggaagttttctatg

SEQ ID NO: 33843 - DNA, 520 bp, Homo sapiens
  chr21:43164043-43164563
  hypo
ctggttgaaggttcccgctcaaaggacagcgacagtgatcctctggaagagaaggcggagtccaccgaggacacccccgagagcctcttcccactgccggacgatggcagcttggactcagaggagctgcggctgagctcctcggggccctcgacagcctgggaaactccagagtccagctgtgagagcagctcggagaggctgtagtcgttatcgaaggtgggggcagaggcccgcttgagcctcgcaggcaccacctgcgaagatgcagaagagggggtgggtgaagaccctgccatagaccgcatggcccgcccatgacacaaacacagaagagcaaggtgggccacgggagggagatgggggaggaaaggacggaccctggaagcaatgcagataacctattggtcaccgagctcagaccccgcatcggcacagcactagggagctcagacgccatgtccacacagcgccgcggagctcagaccccgcgcccgcacagtgccgggcagctcagacc

SEQ ID NO: 33844 - DNA, 268 bp, Homo sapiens
  chr21:43165724-43165992
  hypo
gggcggggatgcagtcgggcaggtggacctgagcccccatgggacctacacttctaatggagttgggtgcgggatgggctcagaagagagggagagtggtccgggcggcgggggactctgcaaagaggagtggtttggaaactcctgcctggaagccgaggagacaaaagacccctgtgggaaggactcgttacctcgctcctgggctccggggggcttttcacgtccagatcatgagcagtttctttcacttcgtcatcaggctttt

SEQ ID NO: 33845 - DNA, 47 bp, Homo sapiens
  chr21:43166636-43166683
  hypo
tgtgcagggctcatttcggcccacctgttacacgccttgtttctcac

SEQ ID NO: 33846 - DNA, 146 bp, Homo sapiens
  chr21:43168202-43168348
  hypo
ctgcctcatttcacaagccttcgggctgtaggccactgtgcgggagaacgtacagaaggcaagaaaggcgacaggcggtcagacaacacagacggacaccggccagcagaggcctggcaggacgcgttctgtgctttctactgaca

SEQ ID NO: 33847 - DNA, 244 bp, Homo sapiens
  chr21:43239934-43240178
  hypo
cacctttcccacactcggcacacaggtactcgcggacattgtcgtgcacacgcatgtgctccttcagcatgtccttcctggcaaaggacttcccacactgctcgcaggcgtggctcttcacacctgagaacacaggcatctgccactcagagccgagcagctccgacctgcagtggctgcaaagaggatgcaccaaggagaggggcccagcctccccagcagctagaagcgcagtaacaggggt

SEQ ID NO: 33848 - DNA, 31 bp, Homo sapiens
  chr21:43245324-43245355
  hypo
tggatgagcgtcactccggggctcacgtgag

SEQ ID NO: 33849 - DNA, 31 bp, Homo sapiens
  chr21:43256882-43256913
  hypo
agggaatgcgcccgggcgtcactcccagctt

SEQ ID NO: 33850 - DNA, 62 bp, Homo sapiens
  chr21:43271536-43271598
  hypo
ccctgggtgcattgggcgggcagggctctagaagcgccactgtgcctcgagagggacccctg

SEQ ID NO: 33851 - DNA, 30 bp, Homo sapiens
  chr21:43273409-43273439
  hypo
gaatcttaagctaccgagctactaatattt

SEQ ID NO: 33852 - DNA, 30 bp, Homo sapiens
  chr21:43275299-43275329
  hypo
tcactcccagtccacgtgtcacggggacac

SEQ ID NO: 33853 - DNA, 31 bp, Homo sapiens
  chr21:43282988-43283019
  hypo
cgagatcctgggcaggcgtgtggctcacgtc

SEQ ID NO: 33854 - DNA, 240 bp, Homo sapiens
  chr21:43290513-43290753
  hypo
aagcaggaggagcatctttcccgctgggcacacggcctcgtgacaatattaaaagcactcagggaaaacccactaacggaaaaagcaaacgtattttcaaaaatatgcgccgcagaaccatcctgaaaaatgctgtgggtgggcttcagggggctagcgggtgggtggagacggactctgactaagtcagtttgtgacaccctgcagattcccactctggagtcacgacacacacaggca

SEQ ID NO: 33855 - DNA, 31 bp, Homo sapiens; identical to SEQ ID NO: 13293
  chr21:43373717-43373748
  hypo

SEQ ID NO: 33856 - DNA, 61 bp, Homo sapiens
  chr21:43386122-43386183
  hypo
aggggggcccaccatgcgattgtccgggtgaggaggggaggttgggcgccttccctggcat

SEQ ID NO: 33857 - DNA, 31 bp, Homo sapiens
  chr21:43393500-43393531
  hypo
gaggtgcggagctgaacgcttcccgcctgag

SEQ ID NO: 33858 - DNA, 31 bp, Homo sapiens
  chr21:43441079-43441110
  hypo
aatggaaagcgtggtgcgtacagccagtgaa

SEQ ID NO: 33859 - DNA, 31 bp, Homo sapiens
  chr21:43448738-43448769
  hypo
tgaataagaagggcaccgccacaccctgtgg

SEQ ID NO: 33860 - DNA, 66 bp, Homo sapiens
  chr21:43481097-43481163
  hypo
ctggtgtgggcggaggcggtggtccctggtgtgccctggctgcagccgcctcgctccccctccacc

SEQ ID NO: 33861 - DNA, 147 bp, Homo sapiens
  chr21:43546528-43546675
  hypo
gatcctgagccccatctactgcgccttccagaatgacctgctgacatcctccggcttcaccctggagtgggggtaagggagaaatgccccggctgccccacagccacgtgcctccagaccacctgcgctttgagagttctttagggt

SEQ ID NO: 33862 - DNA, 371 bp, Homo sapiens
  chr21:43547690-43548061
  hypo
gtcgtcagatgtagtcgtgagtaaactcatctgagaacaaggacagcggggctcgctgacaagcaaggagtcccatttcctctcttctcagctgccctgtgcccaacacatacaccaacgtgattgagaacggcaactccaataaggcccagttcaagctgaggatcttttcctttatcaacgactccatcgtctacctgcactgcaaactccgcgtctgcatggaatcccccggagccacgtgcaaaatcgtaagtgttttttggttttctaaacgtttggttggattcacgttccttattgttacggttcgaggctctgttaataaaaacctagggctcgagtggctcggggccaacctctgggaggag

SEQ ID NO: 33863 - DNA, 111 bp, Homo sapiens
  chr21:43736992-43737103
  hypo
ggtggacttggtttatcaccccgagaaatgggagcgcctggctgcttggatttagcctgcagctggggtccccggtggtgtgtgcagggcggccttgagcctccaagggtg

SEQ ID NO: 33864 - DNA, 258 bp, Homo sapiens
  chr21:43786490-43786748
  hypo
cccacagagcaggaagaagcacgccttacctgtctgggcctcggccagggtgccgagggccagcatggacaccaggaccagggcgcagatcaccttgttctccatggtggccattgcctcctctctgctccaaaggcgaccccgagtcagggatgagaggccgcccgagccccggattttatagggcaggctctgtttgcttaaagagcgttagataacatttgcctaaggaggcccggggatcctctgagacaataa

SEQ ID NO: 33865 - DNA, 214 bp, Homo sapiens
  chr21:43981534-43981748
  hypo
gtagtactcacaaggcgggatgcggtagcctgtacgcctgtgtgctgacacaatggtcggaattgtttcatctgtgtgtttccaggtggcttgataatgtacaatgatttcagttccagggaagaagaaggagccattcgatactcagtccactgcacccggctatacgagaactcttttaatagctaagttttccaggcgatgtagtatgaaa

SEQ ID NO: 33866 - DNA, 30 bp, Homo sapiens
  chr21:43988767-43988797
  hypo
tccaggttttcacccgaggcagtggttggc

SEQ ID NO: 33867 - DNA, 103 bp, Homo sapiens
  chr21:43991409-43991512
  hypo
tgccttctcccaagtgccacacggtttgttgacacggtgtgcgcctggggcgttcacagtgcttagaatcgcagaggttgccgtttctgtacatttcatgcag

SEQ ID NO: 33868 - DNA, 31 bp, Homo sapiens; identical to SEQ ID NO: 13295
  chr21:44013673-44013704
  hypo

SEQ ID NO: 33869 - DNA, 31 bp, Homo sapiens
  chr21:44015499-44015530
  hypo
attgggatccttggagcggggtgctggaggg

SEQ ID NO: 33870 - DNA, 29 bp, Homo sapiens
  chr21:44057376-44057405
  hypo
acacacacttacacatgcacacgcatgca

SEQ ID NO: 33871 - DNA, 148 bp, Homo sapiens
  chr21:44057644-44057792
  hypo
gactccagtgacccacacctccttctcagaagtaccacagcgctgagctctgatctcacttgcgaattctgataagaagcgacatatcctagatgggaagggggcgtgtgaccatgaggcgacgtagcgtctgcgctgcatgggagag

SEQ ID NO: 33872 - DNA, 25 bp, Homo sapiens
  chr21:44059406-44059431
  hypo
cacacacacacggaggccatatgtg

SEQ ID NO: 33873 - DNA, 31 bp, Homo sapiens
  chr21:44065442-44065473
  hypo
catgccgagaaggtcacgtgctacagcagag

SEQ ID NO: 33874 - DNA, 31 bp, Homo sapiens
  chr21:44065969-44066000
  hypo
gttaatcctcagctttcgggttgctcgttgt

SEQ ID NO: 33875 - DNA, 31 bp, Homo sapiens
  chr21:44082506-44082537
  hypo
ccctccatgccccttccgactgttgcagagg

SEQ ID NO: 33876 - DNA, 31 bp, Homo sapiens
  chr21:44109121-44109152
  hypo
tagacatggccagtgccgtcctcagcgaggt

SEQ ID NO: 33877 - DNA, 178 bp, Homo sapiens
  chr21:44112893-44113071
  hypo
cccctcttcctctcctccactcggtgcctggtgacatgcggccatcctcagagatgtgcttcggggcccgcacgccttgctcctcgcactcttcctgcaccggagccgcggtgcgaggcctcgggaatgctcaccgtttctctcccgccccccggccgcatgctgcagccattccctc

SEQ ID NO: 33878 - DNA, 30 bp, Homo sapiens
  chr21:44184268-44184298
  hypo
tcagaacccactcggcgctgacatacggcg

SEQ ID NO: 33879 - DNA, 30 bp, Homo sapiens
  chr21:44184647-44184677
  hypo
tgtcggagagcatcccgcaagagaaggagg

SEQ ID NO: 33880 - DNA, 31 bp, Homo sapiens
  chr21:44215220-44215251
  hypo
taatgaagacttcatcgcgggtgcaactggc

SEQ ID NO: 33881 - DNA, 31 bp, Homo sapiens
  chr21:44284396-44284427
  hypo
cggccctctccataaacgctgagtgtgctgg

SEQ ID NO: 33882 - DNA, 31 bp, Homo sapiens
  chr21:44338415-44338446
  hypo
taagtgtccaggactgcgggcattcctgagg

SEQ ID NO: 33883 - DNA, 247 bp, Homo sapiens
  chr21:44440491-44440738
  hypo
ctgtgtgagggaggccgtgccagggcctggagcacggccttgtaacgagcagatcttctctcgtgttttgtgagaaggaatttaacaaagaaatgccattcacatctttttcttttaaaatgaagttggcagagtagcctacgctttcctgggtgacaggagggaaggtccgtatctctagtgcctgtggaggcgtctggaacaaggagtcagcctgtgccctcctgttctgcggaccctctttctg

SEQ ID NO: 33884 - DNA, 117 bp, Homo sapiens
  chr21:44444711-44444828
  hypo
tgtcgctgctgttatcgtcaccgctgaaccgttaaacgtggggggcggtctgccttggcctatgcactaaccagccactgcagcactaggacattcctgggacgaggagaaacactt

SEQ ID NO: 33885 - DNA, 391 bp, Homo sapiens
  chr21:44448041-44448432
  hypo
tgtccagcctgccctgccagcctgtgattgttgctgctctcgttctctgtggagtcttatcacaggcgtgagtgcctggtctgacagagtcgccagcgtctgtcggggatttcatcactgctggtgcctacgtgctgtgctggccacatgtctaggaccactggaggacttacgcctccagtcatctaagaaacagctcatcattgggaatggtttttgaaaagatgcagctcttgccttagatcgtgctttgtggtgaaacaagaggaggtggcagtcccattctctgatggctcagacacgttgccacccagaggctcggccccgttggtgatctggtgacgtccagacgagtgcagactgcccgatcgtctcaggcatgatggcacta

SEQ ID NO: 33886 - DNA, 30 bp, Homo sapiens
  chr21:44448712-44448742
  hypo
tgcttcgtagagcagcgtgtttgttagaag

SEQ ID NO: 33887 - DNA, 76 bp, Homo sapiens
  chr21:44483008-44483084
  hypo
agggtgagttacaggctgcaccggcactgtggccgggctctggactcgacctaccgtcctgtccagcaccgtgggg

SEQ ID NO: 33888 - DNA, 30 bp, Homo sapiens
  chr21:44486366-44486396
  hypo
gtcggctcgataatcgtgtccccgggcttc

SEQ ID NO: 33889 - DNA, 1085 bp, Homo sapiens; identical to SEQ ID NO: 13298
  chr21:44494940-44496025
  hypo

SEQ ID NO: 33890 - DNA, 111 bp, Homo sapiens; identical to SEQ ID NO: 13299
  chr21:44513218-44513329
  hypo

SEQ ID NO: 33891 - DNA, 209 bp, Homo sapiens; identical to SEQ ID NO: 13300
  chr21:44514585-44514794
  hypo

SEQ ID NO: 33892 - DNA, 30 bp, Homo sapiens; identical to SEQ ID NO: 13301
  chr21:44515794-44515824
  hypo

SEQ ID NO: 33893 - DNA, 30 bp, Homo sapiens; identical to SEQ ID NO: 13302
  chr21:44524440-44524470
  hypo

SEQ ID NO: 33894 - DNA, 189 bp, Homo sapiens
  chr21:44601205-44601394
  hypo
cctgggttctgggtgggggcacggcaggcaggctcttctggcagctgggtgatgcccgtgagcgctaaatgcaagacgtgtgaacacaggcggctcacagatgccagtgctgagtgcgactgtgcctccgcctggcctcgaggcatttgctgaacttccagcttacccggttctcctcctgtgctgact

SEQ ID NO: 33895 - DNA, 268 bp, Homo sapiens
  chr21:44630288-44630556
  hypo
ttccagaggaggagacagaagcgctacgaggttgagtcactcgtccaagttgacacagtggcctgtctgagtccagagcctgcgccgtggccccacgcagcctctctgcctcccggtgccgtgagtttgcctgggtaaagctggctgcatacgagcctctgtcgtcacgggctcctactttaaggtgccgtcctgtgcggctgccaaagggaacaacgttgtcagaacctcttcccccggggagtccggagctgcttggtgctggggg

SEQ ID NO: 33896 - DNA, 104 bp, Homo sapiens
  chr21:44799063-44799167
  hypo
tgtccaggaggggagtcggggcagggacatacagggcatctccgacctggaggaggtccccccgctgcagaggtctctggggatgaaagcggggagtccctgtc

SEQ ID NO: 33897 - DNA, 404 bp, Homo sapiens
  chr21:44830889-44831293
  hypo
agcacagaggcagggcccaggcgcctccaggcgaaggcctccgctcccaccgctgcgagaggaggcgcgtccacgacggaataagcaggcggtcaggtcgccaacaatccggtcaaccacggtgcttcttccctggtgggtgtctggccccgttcttgctggggatggcgctcggggatgccaccgtgtttccccagggcccactgtgcaccctgcatgtcgcgcccttgtcacgggagcggcctgctgacccggagcacgcgtggccgtcacaaagggctgcaaagctgcagcaccagaacgcaaactcaggcgtgcggcaacggaggccacgttctcagccaccgtgccactctgcatgtcagctggctgggcgtgcctccgtcttgtgttagcaaggacat

SEQ ID NO: 33898 - DNA, 30 bp, Homo sapiens
  chr21:44837143-44837173
  hypo
tttcattctccacccggtttctcagcagct

SEQ ID NO: 33899 - DNA, 199 bp, Homo sapiens
  chr21:44840105-44840304
  hypo
aggctcacctccaccgtcctctgccggtccacgcccagggtctgcatgatacccagcgcctgctcatcgtagtcgcccaggttggaggtgtagctgtgtgcggagaaggcggggcaggcgggtcccggcaagcagggctcagcccgcatccaccggtgctgccggatctgggcgatggtgatgcgcctggcggggtcca

SEQ ID NO: 33900 - DNA, 250 bp, Homo sapiens; identical to SEQ ID NO: 13303
  chr21:44847591-44847841
  hypo

SEQ ID NO: 33901 - DNA, 144 bp, Homo sapiens
  chr21:44856358-44856502
  hypo
gagcctcctccttgacttgttcggagtgtttcttcactgaccggtttacctgggtgtgcatacggagggtgagccactggaacagtgaaagcgtccacccttcactgagtcagtccctctcccggaaggggccagggacagggc

SEQ ID NO: 33902 - DNA, 30 bp, Homo sapiens
  chr21:44865749-44865779
  hypo
gcaggggcagcctccgacctcatcccagct

SEQ ID NO: 33903 - DNA, 287 bp, Homo sapiens
  chr21:44871833-44872120
  hypo
gggtgatgcctgctgaagccacgcagccagtgcctccaccctaccccccatctgacccaccggccccttccgcacgctggaagcctgcccggcctgaagtgtcctcacctgtcgccctatcctcccctccactccagcccaccggtgactcagccctcacagctctctcctccccgagggagccggtgacttggctctgatggtgccgggacccagccccggcatgttcagaatccttgtcctttaacctgcgtccacatgtagtcgcctccacctccctgcctgaa

SEQ ID NO: 33904 - DNA, 30 bp, Homo sapiens
  chr21:45194491-45194521
  hypo
ctaccagcacccgttcggggcaggccctcc

SEQ ID NO: 33905 - DNA, 105 bp, Homo sapiens
  chr21:45195122-45195227
  hypo
aggcctcagcatcgcctggacctgttcttgcttggggcatcccgtcggtcaccaaccatgacagcgaggcgggcctggcctgtgctccaccggagggggcttctt

SEQ ID NO: 33906 - DNA, 31 bp, Homo sapiens
  chr21:45206422-45206453
  hypo
atgcccattgcatgcacgataccacccactg

SEQ ID NO: 33907 - DNA, 30 bp, Homo sapiens
  chr21:45223949-45223979
  hypo
cagaaaataaaatgccgcgcagcccttgcc

SEQ ID NO: 33908 - DNA, 594 bp, Homo sapiens
  chr21:45224199-45224793
  hypo
taaggcctggattgcccggggtgagcgtgtgtgtggtgggaagacctggcttccgcgagagccttgttcctggaggcaggagcgccccgccatcctgggtacccgcgggtccgcaggctgcgcacctctttccctcagccaggtcaccctcagcgtcctccctgcccctctccccttcacacctgctggagcctgtgagggaggtggcgggtccccactgtggcgacggagagctgacagtagcccagggctttccacctgcatggaacaagggcctgtctgccgccagcgctgtggccacagcctgcataggtgacaaggggccgctgcgttgggttttgcccgcatcttctgttccatgggtgcccagccagccaggccgtgtgggatccagcgagaggccagggcttggagtgggcctgggaccaggaaggacctctaggctgtggctggccttgtgcagaccctggactgcatccggttccccaaagccctgctgcattcgagtgtcccccaaccccgggcaggtggcacctggtgacacctccttcagtcccactcagctgggcggccggggcaggcttagggcacagt

SEQ ID NO: 33909 - DNA, 30 bp, Homo sapiens
  chr21:45233570-45233600
  hypo
caggtcccattccccgggggagtgaagggc

SEQ ID NO: 33910 - DNA, 43 bp, Homo sapiens
  chr21:45281600-45281643
  hypo
aaggtaaaatggggtgtcagtcgtctctaccttgtggcctggt

SEQ ID NO: 33911 - DNA, 31 bp, Homo sapiens
  chr21:45299420-45299451
  hypo
ggcttggaggctgggtcgtgggggtgtggcc

SEQ ID NO: 33912 - DNA, 16 bp, Homo sapiens
  chr21:45317974-45317990
  hypo
tcggtaacagagggag

SEQ ID NO: 33913 - DNA, 686 bp, Homo sapiens
  chr21:45345838-45346524
  hypo
aagcggcgaggcccacgtgtgaggccctgagagctggaaataggtactggatttcagtgtccgatggagaagtctgtgatattttggatatgttggattaggtaaaacacatcgttaaagttaattccacttttctctgtgttttactgtggccactggagcattcagtggtacggtggctgcggcttgccttctcccgctgggtcagcaccagggtacaggtcatctgtagacttttgcctgagacacagacgcctgcttgggacatggactccagctcctcagccctgtcctccagcagcggtgaaatctggagtgttcttgagtaacgcactggcgccaagggggtgctgagccttcgctctgccgtccttggctgaacaagctgtttctctggggaccacgtcaggtaacacgtaggacagcggggtggtccagcagggagggcatgcgcatctgtgtggcaggactgggggtgattttatccgggatcccctggggtggcccagcgttggctcgggtgtttcattctcacagagaacaggcagcttcaggggccacgcgtgcacgagaggagcccccagcccccacggcgcgttcctgggtttccatgctgcggcatttaagaaaagagctctgtgtcgtgctgctggggtagcttccgtgagctacgctggccttttttt

SEQ ID NO: 33914 - DNA, 569 bp, Homo sapiens
  chr21:45352874-45353443
  hypo
tgtagtggccacactgattgacgctctctctccctcacagcgtgccaggtgccttttctctgcgttctcgtcaacacctgttacattcgtctttttgataatagccaactgaacggcatgaaatgacacctccctgtggcttcgatttgcttctccctgatggttaataatgccgaacagctcttcgttaacctgctggctgtcggtgtggctccttctgaggcacagccgttcgggtcctttgctgtttgctttcttgctattgagtctgagcccctttaccctgtggatgctgggcctgcatcgggcatgtggtctgcagggttttctctcccttgcgggtcgtctctttaccctgtcgttccctttgtcatgcagaagctgtttagtttgccgtaatcccagtggtctatgtttgcttttgtcgtgtatcttttttaaagctctgccatctgttttctccatggggaaaggtttgggaatatcgatgatgtcatcatactcctggctgcttcttgacattttccatgcccagcattgttctcagtgcgccccgggggtctttggtt

SEQ ID NO: 33915 - DNA, 210 bp, Homo sapiens
  chr21:45353712-45353922
  hypo
ctgccacgagcctcacgtggagagtggacagtggcatggaaacgccagagggttagaactgagcagcaggacggggtctgtgggtgcacgagaggaggcccttggtctggaacagcctggggtccccatgtgctgtcactgtgtggactggccacacctggtgtgccgcttcctttctcagtcatggccagctgccgaatgccgtaccag

SEQ ID NO: 33916 - DNA, 44 bp, Homo sapiens
  chr21:45354889-45354933
  hypo
catgccacccatgtgccgtccaccacccacgccacccacaccac

SEQ ID NO: 33917 - DNA, 257 bp, Homo sapiens
  chr21:45360446-45360703
  hypo
tcctgaaggagctgagcggtttcataccatctgggcggtgtttgtagatgcctggcatgtcctgggacggacaagtgcctgatgtatgggcacagactcccactgccccccaaggcaggtgctgtaggatggctgatttacatggtgatctgcaccctgagcagaaaatgcgtagttaccatcaaagtggcgctgctctgtcacacccattgcctgatgggctggtttatggtgatcgcaggcgatttcccagctgc

SEQ ID NO: 33918 - DNA, 31 bp, Homo sapiens
  chr21:45367128-45367159
  hypo
ccctggtctttagttccgattcccggtgaga

SEQ ID NO: 33919 - DNA, 46 bp, Homo sapiens
  chr21:45374889-45374935
  hypo
cacacagaggctgggacgtgaatgtgcatcacggctctatctgtgg

SEQ ID NO: 33920 - DNA, 39 bp, Homo sapiens; identical to SEQ ID NO: 13305
  chr21:45381602-45381641
  hypo

SEQ ID NO: 33921 - DNA, 222 bp, Homo sapiens
  chr21:45396664-45396886
  hypo
ggcaccagtgaaaacaggtcacgcctacctgacgtcttgccgtgtggctcagtgacgggcgctgtggacgtggcagcccctgaatcccagctcccgtacacacagtatcactgctgccttagtcaccaccgtcatcctagctggcaaacttggtgttcttattaaattgtaaaagtatttaaaagattttaatatatcatatgtgagcggcttaccctgtgt

SEQ ID NO: 33922 - DNA, 54 bp, Homo sapiens
  chr21:45399854-45399908
  hypo
ccaaccatctttaaaagagagcgggtcggccaggtgtggtggctcacatctgta

SEQ ID NO: 33923 - DNA, 999 bp, Homo sapiens
  chr21:45400147-45401146
  hypo
ctccatctcaaaaaaaaaaaaaaaacaaaaaaaaacgagagagttgatggtgcccttcactacttcccaagcatcctagagtcccacgggctgccccgcccacgggcagtggctgcggagtgtctgctctatcaggcatggtgatttcctgccagcctgtgcctttgacattcccaccagaggcagaaccttctgcaggtggccctggccaggctcctctctcctcccagctcctcattagcctcctttgccaggctaggaaaccgaggtatgcgaggttaaggaactttccttgggccgtgcagctgagagtgcgctttgcagggatttgcatccaggccgcgggactcacacaggccacacctgccacccccactgcctctggctcgtgggaggtgtgggatgtggcgggtggccggggcagtgctgggcaggcaggtgttggtattcacaacgttgctttcttgaccgattattttcctgggagacttcctcagtcaaagggttgatatgcttgcgagctctcgatgcacgctatcagattctccaaaaacgtacagccagcttcgcctgcacctgcagcttctgtgatttgtgctcttaattgacgtggcgctttttttaggttgagtcgtttttcattgccaacaatcttctcctgcattgaaataatagcttgtaaagaagcctcacgcttcctttttctctgttgactcttctaggacgcgctccaggagatatataatcagaagggcatgtttccaggggagcagtttaagcctgcccggaggccgtggaccctcctgaacttcctgtcctgggccaccattctcctgtctcccctcttcagttttgtcttgggcgtctttgccagcggatcacctctcctgatcctgactttcttggggtttgtgggagcaggtaatggacactgtcgctaacagctcacactctgacgggcctcacagtatcagccacagggtccgggacctggtgact

SEQ ID NO: 33924 - DNA, 764 bp, Homo sapiens
  chr21:45403456-45404220
  hypo
agggcagcgctcggccggtcatgctggctcccttggccttgcagcgagcccctggcccacgccgagcgagggatgcttctccctacagcatgtccactcccccggcatggccaggtggggcccctggggcaatggcagtggtagaacgctcaacttggttgcggtaccatcagcccacctgcatttggctttcgacttgcttgttctaagtcacagcgccctcatctttttagcaaggtaaaaaaaccaaaatgggtgttatctctgatatcttgaaaccagcgttctgaatagaggtaggttgagttttctaggggaaaacaaatggagaaaagaggcatgaagaaaagtaaaccgagaacataattaggcatcgggcctaagtgtcctggggagattggaggggacggcagcgttctgcatgatggaggcgctgccgggccccgggtctgtgggggccgtgctctcagggcgtgtgcgggacgccacctgtgcacacctgctcagagcacggctcctcgcaggggtgaaggggcagaccaacgaaaccagatgagaccaacgacaccatgcgagacacgcttgcagacactgttgttttggaaatgtgcttccctccatctgaaatctcatccctccacccgcccactcgggcagctgtgccgtgggcagggcatgcgctcccctggctgagcaccccagagattctcctgcaccttcctcatgccgcacgctgctcatccgtctccatgtgtgtttagatc

SEQ ID NO: 33925 - DNA, 43 bp, Homo sapiens
  chr21:45446229-45446272
  hypo
ttactgcctcgacattatacacgaattatagcaaatactttat

SEQ ID NO: 33926 - DNA, 31 bp, Homo sapiens
  chr21:45470786-45470817
  hypo
ttaatattttttttttggagacgcagtctcg

SEQ ID NO: 33927 - DNA, 31 bp, Homo sapiens
  chr21:45482526-45482557
  hypo
gcaggggctgggccagcgggtccactccaca

SEQ ID NO: 33928 - DNA, 26 bp, Homo sapiens
  chr21:45510773-45510799
  hypo
attaaaaaattatttttcagccgggc

SEQ ID NO: 33929 - DNA, 252 bp, Homo sapiens
  chr21:45513668-45513920
  hypo
atgatctcatatgatataaaacttatggtatcataaaaagttaaagatttaccaattttgtacaatcttctgctgggacaaggccaggcaaagggagtcagggcagggacaggtgctgtggggcctaaagcagcatgcataggcgtgctgtgaggcggggcctgcccatggtgtctgctcagcacccttcgcatggcgtgtgtttcgctgcagtgtctgtgtcctctttgcggttatggtgctgtgtgagca

SEQ ID NO: 33930 - DNA, 154 bp, Homo sapiens
  chr21:45518810-45518964
  hypo
catcattcatttttaatcagacgtctaccaaatacccaacactgaataactagcttccccagcgctcttgcaagtgaaaagggcgttctgtgaaaacagcggctatttcagctcgcagcaccgagcgctccccgtgtgctttccctgagccagc

SEQ ID NO: 33931 - DNA, 31 bp, Homo sapiens
  chr21:45536572-45536603
  hypo
tgctgcagttgcttagcgcctgctgtgtgca

SEQ ID NO: 33932 - DNA, 158 bp, Homo sapiens
  chr21:45546687-45546845
  hypo
cagccagccgggagaccgcaggatgacttgcttcgtggggagagcagcctggatatgctgtccagtgatcattaacggttcttttttccccaggtgacatgagttctcggcacttcaaacctgagatcagggtgacctcactccgcttctctcccact

SEQ ID NO: 33933 - DNA, 64 bp, Homo sapiens; identical to SEQ ID NO: 13307
  chr21:45553435-45553499
  hypo

SEQ ID NO: 33934 - DNA, 193 bp, Homo sapiens
  chr21:45558784-45558977
  hypo
ctgggactgatgtgcccgtgtgtctgagcccacgtcccctgggcgaagctcccattttcactgacctgtccagagcgttctgggtgagcctgccctgcgtgtccatggtgcggcgcgctctaatgagctgcagccgtggccactctgcaccctctgagacagtcacccatggggacggcgaacacccactgcc

SEQ ID NO: 33935 - DNA, 30 bp, Homo sapiens
  chr21:45583748-45583778
  hypo
tgaggctggacaagcgcctccgccagaagc

SEQ ID NO: 33936 - DNA, 30 bp, Homo sapiens
  chr21:45584417-45584447
  hypo
acctcgggaagggacgcgtccacctggaac

SEQ ID NO: 33937 - DNA, 31 bp, Homo sapiens
  chr21:45585662-45585693
  hypo
cgggcggtggctgcagcgtggagattgttgt

SEQ ID NO: 33938 - DNA, 177 bp, Homo sapiens
  chr21:45628848-45629025
  hypo
cacctgcaaaaatgtccgcctgcacagatgtccacctgcatgaatgcccacctgtgtccacatgcacgaatacccacctgcacagatgcccacctgcacggatgcccacctgtacaaaggcctacctgcgtgaatgtccacctgcatggatgcccacccgcacggatgcccacctgc

SEQ ID NO: 33939 - DNA, 165 bp, Homo sapiens; identical to SEQ ID NO: 13308
  chr21:45660234-45660399
  hypo

SEQ ID NO: 33940 - DNA, 30 bp, Homo sapiens
  chr21:45678288-45678318
  hypo
cccgaggctgcagccgtggtgcccgtcggc

SEQ ID NO: 33941 - DNA, 39 bp, Homo sapiens
  chr21:45709580-45709619
  hypo
actcccagcaagttcgaagactccggcagtgggaagaac

SEQ ID NO: 33942 - DNA, 30 bp, Homo sapiens
  chr21:45712923-45712953
  hypo
ggggaacccctagccggcatggacacgact

SEQ ID NO: 33943 - DNA, 78 bp, Homo sapiens; identical to SEQ ID NO: 13309
  chr21:45713626-45713704
  hypo

SEQ ID NO: 33944 - DNA, 30 bp, Homo sapiens
  chr21:45730716-45730746
  hypo
ccctagggggcacccggaccctgttaccca

SEQ ID NO: 33945 - DNA, 30 bp, Homo sapiens
  chr21:45735776-45735806
  hypo
cctgtgcgtcttcccgcctggaaggcttca

SEQ ID NO: 33946 - DNA, 49 bp, Homo sapiens
  chr21:45736415-45736464
  hypo
ccatcaccctgccctgcgtacgtgcgtgggtaagcgtggtgtgtgggtg

SEQ ID NO: 33947 - DNA, 30 bp, Homo sapiens
  chr21:45744818-45744848
  hypo
cctggccacagctgcgcgtccaactctcgg

SEQ ID NO: 33948 - DNA, 30 bp, Homo sapiens
  chr21:45746841-45746871
  hypo
gcaggtgggggctgcgtccctgctcagccc

SEQ ID NO: 33949 - DNA, 31 bp, Homo sapiens
  chr21:45750373-45750404
  hypo
agccccgcctgtggacgcgtgtgtggcacct

SEQ ID NO: 33950 - DNA, 30 bp, Homo sapiens
  chr21:45753662-45753692
  hypo
cagcaggcctggagcggggacctgcaggct

SEQ ID NO: 33951 - DNA, 38 bp, Homo sapiens
  chr21:45791195-45791233
  hypo
ctccagtgtctgcctccgtgtcccgtggccgcctccct

SEQ ID NO: 33952 - DNA, 371 bp, Homo sapiens
  chr21:45819428-45819799
  hypo
gggccctcagcagctcggggacagcgcctgacccctcggccacctgctccaggctctggcctcccattttgcagatggggggaagctaacatgaagcaaaagcaggagctggtggccatggagatcgcaattcacctccccatggatgttcctacctgggagcggcaggcagaagcccaggtggctctgggaacggcgtctgccctctctccctggagggataagcgggacacggcgtgtcctccctggagcagcaggggctcccaggcatggctgccctcagcatcgccctggaacccccggcagggcctggctcccagcgagtgccccttgcacgctgggcttccttggagcgccgagctattgccaag

SEQ ID NO: 33953 - DNA, 30 bp, Homo sapiens
  chr21:45820208-45820238
  hypo
gcatgctggccttcccgctgctcctcaccg

SEQ ID NO: 33954 - DNA, 30 bp, Homo sapiens
  chr21:45844752-45844782
  hypo
gccctgcactggatcgtgaggacgctgcgg

SEQ ID NO: 33955 - DNA, 30 bp, Homo sapiens
  chr21:45847888-45847918
  hypo
agcacctgctctcacgggtggctgccacac

SEQ ID NO: 33956 - DNA, 30 bp, Homo sapiens
  chr21:46032011-46032041
  hypo
cccaccatggctgacgcctgctgcaccagg

SEQ ID NO: 33957 - DNA, 237 bp, Homo sapiens
  chr21:46036537-46036774
  hypo
tggctttgtttacctggaacccgagaccctgccctggtcagcacccaattcgagagctctgctcagcagtgagaatgagacaccgtgacaatgcggctgcgcaccggacacctggctcagcgcaggcagcgcacggacagagtctgcggtgtgaccacaccaagcagccctaaggcagcacgtgcccgcacaagcctcagcctctgctccggtcacgcctgcccacttgggtgtatt

SEQ ID NO: 33958 - DNA, 213 bp, Homo sapiens
  chr21:46193372-46193585
  hypo
gacattctaaagacaggatgacgcaaggctggagaacacctgcagcctgggtgtccacggcagctcctgccaggaggctcgggccttacctgccagcatgctcaccaccgacagcaggatcttctccacactctgcacaggactccaccgctccgcgctgctctcgtagcccatggggtcatcgcctggcgcgtggaggatggaaatgcagac

SEQ ID NO: 33959 - DNA, 174 bp, Homo sapiens
  chr21:46206092-46206266
  hypo
gcatgagtgcaggtgcgcctgcattaacacatgaaacaagcaggttacacatcagttcatgtatatgatctcctgcttctacagaaataaaaagagctgccccgatacaagtatacagccgcacagtccactaatgaggacagcccagactgtgggactcgccatccatctcat

SEQ ID NO: 33960 - DNA, 30 bp, Homo sapiens
  chr21:46232814-46232844
  hypo
cagaggctggatcacggggcctacacggcg

SEQ ID NO: 33961 - DNA, 288 bp, Homo sapiens
  chr21:46256985-46257273
  hypo
agcccccagcacctccgtgtagcccccgacacccagggtgcagcccccggcacctccgtgtagcccccggcacccaggcagtccccggcacctccgtgtagctcccggcacccagggtgcagctcctggcccggcctctgctttgccggttgcttccagtcctagcagcaaagatcgcagagcctctgtcctcttggggtgcggggcagagcacgggcaccatctcctcagggctgggcccccgttcttgccctacgactctgcagagacaatcgtgtgactcgcagc

SEQ ID NO: 33962 - DNA, 30 bp, Homo sapiens
  chr21:46257708-46257738
  hypo
ctgggaacctgcctgcggtgcaggcgtctg

SEQ ID NO: 33963 - DNA, 154 bp, Homo sapiens
  chr21:46270476-46270630
  hypo
gactctggacacacctgcttccggggcacgtggcccagagccgggcctgtggacgggcctttctttcttcttggggtggaccccgtccccacgatccctaaatggccaccccccagacagcccaacaggcagcgagaggcctgcaggcactgag

SEQ ID NO: 33964 - DNA, 31 bp, Homo sapiens
  chr21:46277459-46277490
  hypo
ctgggcagtagattaccgcatgattcactgt

SEQ ID NO: 33965 - DNA, 31 bp, Homo sapiens
  chr21:46317320-46317351
  hypo
gggccctggtttcctgcgtgccattttgaag

SEQ ID NO: 33966 - DNA, 555 bp, Homo sapiens
  chr21:46319087-46319642
  hypo
gaggtcctgctcagttggccccgagtccaggacaaggcttccaggtacccgcccctgtctgccccgctcagcgtcagccctgcccgtgcttcgaaccctctctggggaaggctggagaggcagaggctgccacgcaggagtgcagggcagagagctgccacgccctctgggcaatgtgtgcatagactcgggctttcagagtccaggcatgagcagcatttgaggcgtctcaccgtgggactggggatgtccacgggggcagaatcccagccttccccacacggtggacctgctttcgcactgagggacactcagtttcggtagaggccatgagtgtcaggtgcggctctccctacccgagttccgggacccgagggccgtccctcccgtctgtggctcccggcggaggacctgagtcttgtatctctaaagtcctttgcggcccccagagcctacaacgtcaggctgcaagagcgtcgcactacggccagcgaggacaagccccttgtgaccagtggttgcctctcggcccacggctgatcccagccagaagtc

SEQ ID NO: 33967 - DNA, 30 bp, Homo sapiens
  chr21:46323797-46323827
  hypo
tgcagtcccacgggcgccctcatcagcagc

SEQ ID NO: 33968 - DNA, 30 bp, Homo sapiens
  chr21:46326697-46326727
  hypo
gcccacacacccgtccgacccggacacatg

SEQ ID NO: 33969 - DNA, 31 bp, Homo sapiens
  chr21:46326979-46327010
  hypo
tggagtcaggatcccccggccctgtgaagtt

SEQ ID NO: 33970 - DNA, 306 bp, Homo sapiens
  chr21:46328929-46329235
  hypo
acccttccttaggttggcagccgtgagtggcaggcggggaccagcacggcaccaatctgcagccatcgcagtgatggcggcttcaggcggggacctccgcggatgctgagcctgcgggtgcgatttgatgagggcagaacctcaccagcccacagtggctgcgaggggatcatgcagcgggatggggaggccggggggatgccgtctcagcagagccgtccacgctgacctcatcaagactgggacggggccacagcagtgcctctcatgggcacttaggacaccgtcactgaggggctcctgcca

SEQ ID NO: 33971 - DNA, 45 bp, Homo sapiens
  chr21:46330653-46330698
  hypo
agcagccccaccagggcgagcagtggggggcgcaggcccagcatg

SEQ ID NO: 33972 - DNA, 171 bp, Homo sapiens
  chr21:46353948-46354119
  hypo
caggtctgggtggggccggagactgtaccccacaaaaggtcccaggtgaggcggatgtggcctggcgctgtgtggctctggacctagtccttgggcttgggctggcacccagggcctgggcttgagacagctgtgacgcaggcaagccatttaccccgtttgtggggacat

SEQ ID NO: 33973 - DNA, 97 bp, Homo sapiens
  chr21:46359158-46359255
  hypo
cagtcagatgagcagggctcccgttcccagcacgggacccagcccgttacctcgctgctatgtttcccacgtaaacggagcaatacccaattctaaa

SEQ ID NO: 33974 - DNA, 97 bp, Homo sapiens
  chr21:46368231-46368328
  hypo
gtcgtggagcatcgggcgtccggggagctggtcgtggagcatcgggcgtccggggagctggtcatgcagcatcgggcggtccggggagctggtcgtg

SEQ ID NO: 33975 - DNA, 255 bp, Homo sapiens
  chr21:46372999-46373254
  hypo
cctggtgtgttttccagaccccgcctggcaaggcccaggccgagcctgtgcagcaggctctcctcattcactcctcagacactactcctcatgggaggtggcagcgagtgccccccggctacagggctatcccttcctctgtgggcgcgtggccggcctgtcatgttcaggggccctgggcactgtggttttctgatgtgtgcttgtctgaggtgtaggcaggtcgtggaggctgtcttgcgaggttccctaggt

SEQ ID NO: 33976 - DNA, 30 bp, Homo sapiens
  chr21:46392161-46392191
  hypo
tttaaggcccaggtcgctgtcccatgtgaa

SEQ ID NO: 33977 - DNA, 31 bp, Homo sapiens
  chr21:46674111-46674142
  hypo
ctgctgctgggccccacggtgcccacctggc

SEQ ID NO: 33978 - DNA, 30 bp, Homo sapiens
  chr21:46696611-46696641
  hypo
cgagctcctgcttccgcgctcctggccttg

SEQ ID NO: 33979 - DNA, 188 bp, Homo sapiens
  chr21:46748148-46748336
  hypo
tccaagtctgcactgtgcccacgaggccctcaaggccgcagacagccccacacttctcggacgccgccccagcacggtccttgtgtgaggtggacactccttctggacgccgccccagcacggtccttgtgtgaggtggacactccttctggacgccgccccagtacggtccttgtgtgaggtggaca

SEQ ID NO: 33980 - DNA, 256 bp, Homo sapiens
  chr21:46763203-46763459
  hypo
cagatgcatacggaacgcaggaagccggggccccacgttcccccatatgcagtctgcaaatgcaaacacggaggctgaaacaaacacgtctggaagaaatcacaggggagcatctcccctgctgtgcccaggatccacgggtgagcaagacagggtccctgtccggatggggtttcatttgggggtgcggagggggtgcagaaccaaaaaaaaaccaagcaagcgagtgaaacagggagctcggaagtgggcgctc

SEQ ID NO: 33981 - DNA, 326 bp, Homo sapiens
  chr21:46772698-46773024
  hypo
tggtgctcacaatcagccccccgcccagcagttacctccatccaggcacacacggccctcgttcccctctctgcccgtggggcgcctccacagatggctggaggacccatgcagaccctcggcttggtagcctgctgcccattcctgtgcccacagccggggctcctgtgcccacagccggggctcctgtgcccacagccggggcggcctgacctcgcagcacagggtgtcagccgggaggatgcgggggaggcggctgcccagcctcctgtgatcccggcaggtcctggccctgcactgggcccggtttcaccacctgtcagcct

SEQ ID NO: 33982 - DNA, 134 bp, Homo sapiens
  chr21:46799998-46800132
  hypo
tcatctctcacccagcgttggtccgtgcacacacgctcacttcgcacccagcatccgtccgtgcacacacgctcacctcgcacccagtgtccatgcacacacactcacctcgcaaccagcgtccatccatgcac

SEQ ID NO: 33983 - DNA, 457 bp, Homo sapiens; identical to SEQ ID NO: 13313
  chr21:46800434-46800891
  hypo

SEQ ID NO: 33984 - DNA, 544 bp, Homo sapiens
  chr21:46801865-46802409
  hypo
agtggggagcgaggccgaagctatctctgtgcagctgccccctcacgctgctgtggccccagggtttggttcagatgctgagtgtccggtgacttccagacacttcctttccagtctcagggaacccaccccacaaagcgcctgccccaggacctgggtggcgcgtctgtgtcttctcagcatatccggttcttggagcagggagacgacccagatcctgctctctggctcctggcccgctgcccccaagctgtcaccaaggcaggtcatggatgttccgtgtcatggctgcgtgggccgttcgaccacggccacacacgcatagactgaggaagacagagcaaggggctgatcgctgccaagcagtggatgccagtgcaccgtgacaaggagcccagagcctttggtgggcgcctgactgtgtcttcaagttcccgggatctgtgtggacagctgccatcccagtcggccctttcttggttttcttggttttcagagaaggggcgaagaataagggggcagcgtcttctccaccagaagacac

SEQ ID NO: 33985 - DNA, 219 bp, Homo sapiens
  chr21:46802647-46802866
  hypo
gatgggattgagttaggatcccgggatgggggtgatcaactggggtcatccgggtgggccccaggtggcattgcaaggttcgcacaagacggagacttgacatggaggaaaccatggaccacggaggcagagagcaccatgaagaggctgtccacgaaggtcagagcgatgtggccgcaagccaaggagtgcacggccgctgggagccaagagaagcca

SEQ ID NO: 33986 - DNA, 90 bp, Homo sapiens
  chr21:46804100-46804190
  hypo
tgccctgtgcatgaccgaagccacaagcatcaaaacagctacattcatgctgaagaggacatttatttttatttttgagacggagtcttg

SEQ ID NO: 33987 - DNA, 173 bp, Homo sapiens
  chr21:46804429-46804602
  hypo
ggattatagacgttagccaccgtacccagctggcaaaatttctaggtgaaataataaaataaaataaaaatagtggtcggaaatctgtctcctgagacagaagtgtctgattttctataactcagttaaaagtggtgccaatagaaacgcagttacgacgtcaataccggaag

SEQ ID NO: 33988 - DNA, 286 bp, Homo sapiens
  chr21:46812066-46812352
  hypo
tgcagccctcacaaacaaggccgctatgaacatgtggcttcaggtcttgatgcggatgactgaggacctgaatatctggatcacgagacaggtgtgtgtttaactttttagcaagcggcaaaactgtttttcagaagggtcgtcctactgcggaagtgagtggccttccctgagtttccagtcggtgctgggagttccctgagtttccgcactcagggccgggagttctagctgctccacacctttgacgactcttgctacagtcggtcttgtaaattgtaacctt

SEQ ID NO: 33989 - DNA, 30 bp, Homo sapiens
  chr21:46812981-46813011
  hypo
cagggcattgctcccggcacgaggccgccc

SEQ ID NO: 33990 - DNA, 31 bp, Homo sapiens
  chr21:46827568-46827599
  hypo
ctgatgcccatggccacgccaggagcctggt

SEQ ID NO: 33991 - DNA, 30 bp, Homo sapiens
  chr21:46835050-46835080
  hypo
gtggtgttggttcaccgaaggggtggcatt

SEQ ID NO: 33992 - DNA, 506 bp, Homo sapiens
  chr21:46835358-46835864
  hypo
ccagggctcagagctcaggaccggctgccacgggtggggcaggaggaggggcaggaccatgcgcaggggcggcggagcggggctgtgaatggagccccccttccggaagatggatgcaggtgggaaccagcgtggtgtggagttgagagcgggggtgcggcaggcggccggggcaggccccggacgggaaagtgcaggcggtgccattgatcagaccctggctgggggcctggggttcacgccttgcctggccttcagagaggtgcgagctctacttttggagaatgaggcaaaggcgcagaagcactcccggaaagtgccatccagcccagtgcctggcgctgcagccgggtggagccccaggtggtgctcacgcagccaggcgggcatggtgtgttgggggttttcataaagaaaagctgaccaggcacgtgccaagcaggccctcagccctgagggtacttgccgggggccgggagagtgtgggcccccgcttatccagaaca

SEQ ID NO: 33993 - DNA, 30 bp, Homo sapiens
  chr21:46836324-46836354
  hypo
gtggtgtggggaccgcgaggctccgcactg

SEQ ID NO: 33994 - DNA, 30 bp, Homo sapiens
  chr21:46838504-46838534
  hypo
ctgctctgcacagcccgcctcgtgcacctg

SEQ ID NO: 33995 - DNA, 329 bp, Homo sapiens
  chr21:46839033-46839362
  hypo
ctggagctgggccctgacacacgatgccgtgtgtagtgacatgcaattccatgtagtgacgtgattccgtgtagtaaggcgatgccgtgtgtggtgacgtgcagttccgtgtagtgacgtgatgccgtgtgtggtgacatgcagttccgtgtagtgacgtgatgccgggtagtgacgtgatgccgtgtagtgacgcaatgccgtgtagttacatgatgctgtgtgtagtgatgcgcgatgccgtgtgtggtgacacgatgccgtgtgtggtgacacttaatgtcatgtagtgacacgctcgcaggatcgccaaggccaggctggctcca

SEQ ID NO: 33996 - DNA, 69 bp, Homo sapiens
  chr21:46841283-46841352
  hypo
gaagggaaggagagggcactgcggtgcctggagagccagagtccgcccgtgtggaagtgttgggggctg

SEQ ID NO: 33997 - DNA, 789 bp, Homo sapiens
  chr21:46844483-46845272
  hypo
gaccagtggagaactcgcgagcactcggccagtggtgcctccaatttgcagcctccaatccctggtcagaggtgtgacctgaccctggaccagagcgctgggccaggtcctggtggcttctgcccttcagcttggaagctcctgaaaaccggctcccttccggggcagcccttggcccccactgaccctccctcagtcctaggtgtgcagtggcgtggggaccctgggaggcccgtggcgcagccccttcccgcctcctgcccgtcggtttccattgctcaggcactgcctcgcccgcgcctctttctcccagacctgagccaccgctgccaggatccttccccagctggttttccttctctttgatgtgtttccactgagggtccaaaccggtccaggcgcgggttccagaactttcttcagatctctcgcacctgaaaatttcctctgtagccattcgcaggaggtttctcagatgccccgggctcgggggccagtcagtctcatgaggacggggtgggtctgacttgtggcatcgcggcctctccatcggtgctgctgggcctgtgagccaatgggtgggcagcaccacccaccgcctccttcctcacaccagtcttgggctgcgcagagccccagccatgtgtgtgctgagtgcagtgtgaccgcgtccgcccgtctccccggacacgcctgttggagccccggccgtgtgtgtgtgtgtgctgtgagtgcagtgtgaccgcgtccacctgtctccctggacacgcctgtcagagccccagactg

SEQ ID NO: 33998 - DNA, 15 bp, Homo sapiens
  chr21:46848190-46848205
  hypo
cgctctgaggaaggt

SEQ ID NO: 33999 - DNA, 324 bp, Homo sapiens
  chr21:46848490-46848814
  hypo
tctagaacattcacacgccggagagagggagccctgggccatcacgcagccaccgcccggccccaagaacctgcgagtccactttccacctctggatcggcggttctggacgttcatgcaggtggttcccgcagtgcgaggccttttgtttcgggctcctctcacaagcctcacgtttccaggtacgtcgtggtgttgtgcagacccacaattcatcccttttcatgggtgtgtaatagtccaccatagattctctacgttttaaagcatgttttatgtgcctgaaatgtctctgcactcgagactatagcttgctttctttct

SEQ ID NO: 34000 - DNA, 16 bp, Homo sapiens
  chr21:46849113-46849129
  hypo
ccgagactacagcttt

SEQ ID NO: 34001 - DNA, 629 bp, Homo sapiens
  chr21:46849578-46850207
  hypo
gctgggagcctgactgcgggtgacggacaggctctggcagcccctgtcagcatcctctccagggcatgtgaaagccagtgtgtcctcagctgccagtgccccctccccacctcctctgggcccatgtgcacgggacctgggctcccccaaccaagcctgcccgccttggttcagcagaacggctcctgtctctacagcggtgccaggccaggagtgctgtgtctgtgaagcggggtcatggttttggggccctcatctccctcgcgccctctcattggggaccccccgtctccctagcgccctctcgtcctctcctgcatgtgctgtgtctgtgaagcggggtcatggttttggggccccccgtctccctagcgttctctcgccctctccagcatgtgaagtggggtcatggtttgggggcccccatctccctagcgccctctcgttggggaccccccgtctccctagcgccctctcgccctcgcctgcatgtgctgtgtccatgaagtggggtcatggtttgggggccccctatctttctagcaccctctcgccctctcctgtatgtgaagtggggtcatggtttgggggccgccatctttctagcgccctctcgccttctcctgagc

SEQ ID NO: 34002 - DNA, 30 bp, Homo sapiens
  chr21:46859968-46859998
  hypo
atgggcggaggggccggtcctccgatgatg

SEQ ID NO: 34003 - DNA, 30 bp, Homo sapiens
  chr21:46860944-46860974
  hypo
ccgggatgcaaaccccggggacacccgcct

SEQ ID NO: 34004 - DNA, 810 bp, Homo sapiens
  chr21:46861362-46862172
  hypo
ccagcagctgcctccaggcctcgggacgcttgaacccacctcgagggctgccagctcctggcctggaggtgcccccaccgggtcctccagtcctgctgcccggtggctctggccatggttcccgtcccgggctgttcatgttccccctgctcctctccgtgatctgccatctctgcttcaccagccggcgccttctacagaacacggccgtgagcttcccatgttctgccgctggctcttcacgccaacaggtctcctctgagcagggccagcttatggcatggcgccgggtcagctctcacctgtccccctcagacgcccacctctgatatgcaactatttccagcagaaaatgtcccatgtccttaaaggatggagcacgctgctgggaacacggctctctccataaaggagggactccccatgccactcccaaggccacgggaggccgccctcagcacagggtccatggggtctcggggtctccctgccaaagcacaggcctggtgaccccctgggaccctcactccagggagaggactgtgcatcttgtgtgcttctcacagtcactgtgtggggttcagcccaggggaggtcacctcgccctcatccacgcagtcctgcggggaggcccatttgccctgactgcacagtcctgcagctcggctgtgcccttgagtgggtggcgctgccctgttgcccaccgtagctgctgtggggccacagccttgagcctggacactggccatgactggataccaccggtgcacagggtgcacgtgaggaaaccctgcccgttctgtgcccgtg

SEQ ID NO: 34005 - DNA, 30 bp, Homo sapiens
  chr21:46862420-46862450
  hypo
cgtagtctctgtcgccgggtagtagcaggg

SEQ ID NO: 34006 - DNA, 427 bp, Homo sapiens
  chr21:46863355-46863782
  hypo
agcccagctcggcatcgcagcagagtcccggtggtggagatgctttgccactggccacccagagctaggagcctcggccaagggctccctccttgcactgtggtctctcgggacctaggaggtcccggggtgtggactgtgctgaactgttctccgacaggcggccctttttctcccacgtgggcgaaaagtgaagcctctgggtggtcctgtacctgtctgtcacatcccgggctgcagccgggtccccagggaggcctccgtgaaaacacaaatcaagtgccaatttcctggtgaagagtctttatgagagcaatgcggccccgtgcccctttacgcggctctgctggtggagaggaatagctgagctgcagcactaaggagagatgcctgctgcatgatcccctagatgcgtccgagggacact

SEQ ID NO: 34007 - DNA, 382 bp, Homo sapiens
  chr21:46864061-46864443
  hypo
cccatgtgacacattcgctccatggtacctcctgcctcccgaaatcacctctaagttcactttgtgccaggttttgttctccagcgcatcttcagtgctgcgagcaggctgggcttgcagcaggagcacgggtgtgcgtgtggagtgaatgaagggccgtgtgcccgagtaggtggcgtgcaggggtgtagtgaggtgcgtgcaggggtgtagtgaggtgtgggatgtgcagagtgaatgaaggacgttgtgctcgtgtgggtgatgtgcggggttgtggtgaggcgtagggctggggtcagctggtcgtccggacttttggttttctggctgtaaaatgcacatgccaggatagttgtgaggtgcacgctcactcgtgcat

SEQ ID NO: 34008 - DNA, 30 bp, Homo sapiens
  chr21:46885714-46885744
  hypo
gcacaggcgggcgtccgtggagtgcacgtg

SEQ ID NO: 34009 - DNA, 269 bp, Homo sapiens
  chr21:46886385-46886654
  hypo
ggaaggctgagctctcgcacccgggaaggctgagctctcgaaatggggttcaggcatttgctgtttgattccaggacatctgagacagctgggcctgtacctcggggagtggaggctgcgccattctctgcccatccagcatcttagggccgggcatttggaagctggcttctgaagggagcccccaggagcttcgtggagaggagacgggacagctttggaaagggcgttgctgtcactggggtccctggggccgccggtgtagcgtg

SEQ ID NO: 34010 - DNA, 1652 bp, Homo sapiens
  chr21:46894653-46896305
  hypo
aggagacgccgtggacgtggacccacagcctcgctcctgggggcgtgggcaggagacaccgtggctggactgtgggcagtgtgtgaacatccatgttactttcatgctttttctttattttgcccaataagcccgttgtttttgcctggaacatgccagaagacgccagatcgttcacatggcggccatgacaaggctgcgccctgggacagcttgctgggtgcggggggtcgccgaggcgccgcacccctcccctggcctgtcttgccctcaggggtcagtagcggtccctgaggatgtttctcctccgggttttcctgaagtttaaaacatccagccgccttggcgcgtgttcggcccagccgggcgtgcgctggggaaacctgtgcggggagcatctgcggtgcggcctcctccagggcagggctctggccagaagagaggagcgcgttccccctcccgcctccgcatgtctgaccaccggccgaggcaggttcagaagcgtcactgtcctcgacccgattggacacgacttactgaagctcagatggtgcctgggcagggaaggccagcgtgcccaccccagcggccccccggagagcaccagagagggctggacgaggcgagagggggcctggaggaggcgagagcagcgtcctttgcttcccaggcctgccgggctcggggcctggcctggctgccatctctccagcctttcccttttcaaactcctcaggcatccggagactctggcagcgggctcggggacgcccgggagcttctcagggaggagacggtgagtagccggacggggcccagcccacgctgcagggtcccgggagagcccctcccagcagtggggtgacacatgtgcacacgcaggtgtggctccaagagctccctctatgccacgaagacatattcctggctggggacagggatgctgggctgggcagacgctcggagcctgggcacaggccccgctccggccctgcctggccgccgcgtgtctctggtgagaggatattcctttaaaacgaggtcctgccctgcacactccttggtcttcgaggcaaccttggccttcccttcgccccatccctccgttagctcgtgcgtggccatcagggaatgaacgcgtgtgtgagcctgacgaccaggaggagaaggcggcgcagggagcgcgcggaaggctttccccagctcgggccacctgagaaaacacaggaggggcggggagtggggaggccccagccgcgggactgaggcgcggtgctgtccgtgagagacgggtgcgggaacgtgttccctgcggggaccctctgcagattcacatcagcttcccagcatggcctgtcgggcgccgggaggcctctgtggtgacggcaggcgcggtcctgggtcctggggagccggggagcccacaggcggccacacccctgcggcccacggaaggaagcccctcgcgcacggccctggagcaccctcctgtttcagaggatttttctttatctttcttgcgatcttaagtatttcatttcacaaaccaagcaagtctccaccgggcatctgccggccgaataacaggccacctcccctctcgtcctccagggcgcggccctaaaacccaggctccccgcgccaccccccgt

SEQ ID NO: 34011 - DNA, 827 bp, Homo sapiens
  chr21:46900339-46901166
  hypo
ccgagctcagggcaacgtgtctctccggctcttttcctcagaccttcattgacatggagggatctggcttcgggggcgatctggaggccctgcgggtgagtggcccttaaactgcagcgctgcccgatgtctgtgcccatgaggaacaggccatggacccccaagattcagctggggtcctgtggggggtggggatgaggcccgttctgggggtggtggtcatccctggtgggtgccacatgggctgtgactatctgtgttcgcccacgtccagggtcctcgaggcttccctggacctcccggaccccccggtgtcccaggcctgcccggcgagccaggccgctttggggtgaacagctccgacgtcccaggacccgccggccttcctggtgtgcctgggcgcgagggtccccccgggtttcctggcctcccggtaagtcctgcctccaccgtcagtgtcgggagccctgtctgctgggagtgaggggtgaacaccccacatgggagcccctgccccgcctcaggcctccccagtccccgcctcctcacctcatctcctctaggagctggcgggcagttgctgactcggggccaccctggggtgtgcggaagcacctgagtggccaccccatggttctaggggtgctgaccagtgggggtgaccgcaagcaaggcctccgacctctctggccctgtgggtccacggactgcacagagagcgtctccatgagcaattcccatgggtgggtgtgggagggccgaggtcagcattgctggagggccaggggagggaggagcctgcttggccaacgcggctcgtagggtct

SEQ ID NO: 34012 - DNA, 30 bp, Homo sapiens
  chr21:46901457-46901487
  hypo
ccgatgggcattcaccgtcaccatcggctc

SEQ ID NO: 34013 - DNA, 1235 bp, Homo sapiens
  chr21:46906462-46907697
  hypo
cagggctggaggtaacgagggtgccctgtgcacctcccgctgtgcatgtgggcctccccctgtgcatgtgggcccaaccccgaccaagttcgggctccgtggctctctcctcagttgtgtttctgtgtggctgaaatcgtgtcgtaaagttagaagaaaggctgctgtggggcctgcgttgcttggcagaatgttccttaccttttgatttgcagggtttagaaagcatcataagaaaacgtgtctacgctggggttgcagggccagcgggggctgggctgggtcctgacacgctctcctcaccccacgcaggggagcaagggagcccccggtcctgctggtgctcgtggggagagcggcctggcaggagcccccggacctgctggaccaccaggcccccctgggccccctgggcccccaggaccaggactccccgctggatttgtgagtaccgcctacacctgaccccctggagagccgggggctgccgttgccccagccctactacccctggcatctcactcacagagcagcacgtcctgggcggtggccttgctggcactgcctcatcctgggattccatattccgcatggtggggctcgagtctctcgcccgtcgcccgtgccccacggtgctgatggggatcttggcccagccatgccccagcacccgtgccctgaccaagagcgaatgagctgacccgagacgggctgccccgggggggctccacccaggccctgccaccaggtagacagtccccatctgagaacggcggctccccaggccaccgtggccccaaagcatgtcccaccctcctctcgggcagtgccaccccagggaggggtccttccctaagaagggacacaggcccctacgtgtctcgtgtgtctcttccaggatgacatggaaggctccggggggcccttctggtcaacagcccgaagcgctgatgggccacaggtagtgttgtgagctgggcgtggccggctctgaggggtaagggggtgttgcctggggcaggagagtgtccctgagagccaccggccttgcatgggatcggaagccgccctgcagagccgtgaggaccacgtgtggcgggcgctgtgccccgcgggccacccttgttcttcggagatgccccttcattgaactaaagtcacggggtgagggcctggtctgcaaagtgggagacactgtgagtggtcaagacaaaggaacacggggccgcatgccc

SEQ ID NO: 34014 - DNA, 30 bp, Homo sapiens
  chr21:46909214-46909244
  hypo
ccagcctgggcccacggggtccctgcacaa

SEQ ID NO: 34015 - DNA, 636 bp, Homo sapiens
  chr21:46911011-46911647
  hypo
gtccacagccccgggcgcctcctcacccaccgtgggctctgggcaccccctccagggctgggtggactctggggtcctggccagagcggttgagatgaaatgccggacgcgtggcctcctcttccagggagatccagggaaggacggagtcgggcagccgggcctccctggcccccccggacccccgggacctgtggtctacgtgtcggagcaggacgtaaggacgctgcgtgggtgggcacccaatctgtccagaccccccacggggtgcagagatccctccccgagccccccccacacccccacatcccccaggtcaggacaggccctgactgccagtctacactccacctcctcggtgggggctgcagacgccctcggtcagagacgcctggggagcccagctccatgtggtgttggagacaccgaggagaggggagggcctgcacaggggccagtgtttttacgtcaaaggctcccattgggctcactccctgtgtccttgacactgtggccccaaagctgcatgtagtcacccagctgccccgtcagaagaagcagatgcacccttggcccctctggtgaaggttgtgttggttccggaaccttcctcccccactgcggcccgtccatcag

SEQ ID NO: 34016 - DNA, 968 bp, Homo sapiens
  chr21:46912094-46913062
  hypo
aggccacagggacctcggcgtgacggtcaagacatcagaacatcagaaaagcctcccgtaggccgagccacctccgccggcaagcaagggagcgtctagcagaggcaggagcattttaaaacaaaatggaagtaaaaaccatggcccttagggcgtctggagtctgcatccagctgctctgagctgaggggcgtctgtgctgcaggagggatgccccaggcccaggaagactggaaagcaacattttccttgaatttcctggtttggtgttttgttgatctgtaagtcgctcgagtccagttgaattttaaacgcggctctttgtttccgatttttccttttgctcgtggacagggatccgtcctgagcgtgccgggacctgaggtatgtgcctgcccagcttctaagagacgggcctgcggggacctgggtacaaggctgggtggggtccgggcaggcgcgagggtgcgtgatgaccccagctgacgccgtccctctttccccagggccggccgggtttcgcaggctttcccgtgagtaacctggtgccagagctgcatgctgcccggctggggaggggtctccacctggtagcacagagcagcccggtcgagctggggtgggccttgtcaggcccgagggatagcgacagtcactgcccccaaggaaatgatgggagtgggatgtgggcgagagccgctggcaggccctgtgctgggtgggcacccgtgagggtgaggcagctccttgcacctgcagaggcctgcagtgtccagagtgaggctggggccgggaggtgtcctggtgggggtcacctgcggaggcctgcagtgtccagagtgaggctggggccgcgaggggccctggtcgggctgtcgaggcaggcatattgcggggggcagctgtcgggggagatggagcagccgtcggggatgggggagatgccagccgctcgggcctcacggcct

SEQ ID NO: 34017 - DNA, 418 bp, Homo sapiens
  chr21:46913264-46913682
  hypo
catccctgctcgggccgtccctgtggtcacctcccgtgaaaggacccagcctgcgaggcccagtcacagcggccctgccttcggggctctgggtgaggctttgtggggaaggagctggccctgactctgctggacctcctgccattccagggtgagaagggtgaaccgggcagcatcttcagccccgacggcggtgccctgggccctgcccagaaaggagccaaggtgagggccgggcagcctccttccggcaggcgtgggggctcctggggctgtggagacagcctggggagggtcttcctgagggtctggctcctgatgcacgagcctctcccaagcagggctctaccatccaggcctggccctggtggcccctcctttctcgcacccatgtcggcggttccgccggcccctcgtc

SEQ ID NO: 34018 - DNA, 30 bp, Homo sapiens
  chr21:46913901-46913931
  hypo
aggggcctgtgcctgcgtccccacccccag

SEQ ID NO: 34019 - DNA, 30 bp, Homo sapiens
  chr21:46914210-46914240
  hypo
acgcaccaacctggacgcaaaccccaaacc

SEQ ID NO: 34020 - DNA, 477 bp, Homo sapiens
  chr21:46914468-46914945
  hypo
gcttccgaggacccccggtaagtcggtccctggctttctctgcactgagctcgggcatgacggcccccaaggacacggtcgcccgcggctgctgagcttgtgctgtgcggcccagggctcatctccctagtgcagttttaaagcgtgtggggcaggtgtcggcgtgaggctgcagtgggctcctccgagctgatgggtggcccagggtgctgtgctctgcatggcccctccccttccccaggaccccccaactcgtggtcaagggccagggtctgccccactaagcctggcccccttcctcttgcagggtccatacggacggccggggtacaagggagagattggctttcctggacggccggtgaggacctggggtctccagtgggggcggcagatggggtctggcaggtggggagcagcccaggcccacgggggtgacatgcccagaggggagtggacggccgccgcacccactgt

SEQ ID NO: 34021 - DNA, 412 bp, Homo sapiens
  chr21:46918203-46918615
  hypo
accagggtcccctctcgccgccacggtcccctctcgccgccagggtcccctctcaccgccagggttccctctcgccaccacggtcccctctcgccgccagggtcccctctcgccgccagggtcccctctcgccgccacggtcccctctcgccgccagggtcccctctcgccgccacggtccccgctcgccgccagggtcccctctcgctgccagggtcctctgcagaggaggccgccatacctgctcttgctggggctgcactctggggtgggaagggaccaggcaggcagaggccgagtctgggccgggacatccttaaggcctgtggaggcaaaggcaggcagaaagcaagcgggaagatggaagatgtgcccatgccagccttggatctctcagcgtcacacacgacgc

SEQ ID NO: 34022 - DNA, 139 bp, Homo sapiens
  chr21:46918885-46919024
  hypo
ccagaacgagggctccgagggctctagagggaacagtgtttgcaggcggaatggctgatgctcttccaaagccaaggaaggctcagagcattcccctcattcgaaggatcaacaattagagtgacgagatttctcaaca

SEQ ID NO: 34023 - DNA, 30 bp, Homo sapiens
  chr21:46929844-46929874
  hypo
acttgcgcgcctcccgctcagcgcccctcg

SEQ ID NO: 34024 - DNA, 668 bp, Homo sapiens
  chr21:46935334-46936002
  hypo
tccagcaacaaagcccgcggggcacagtgcagggacagcatggccaggcagctgccctgagtgtcgccagcacgctgtggccaccgccagagtgcggcacagggcagggggaatcctagggggcctgctagcaggataagcggaggcccccattgctaaggcaggcggccctcgaggcaggggtcgtggggatgcactgagggccgcctgcaaagttaccacaggggcgcccgagagtcactggttcacattctgaacaccgtcgcttggaagacactgcaaacccagcttgctgacaccaggaggatggacagccagctggggacaagtctcatctgcagcctcagggcctgaggcttgggcggagcacagagtgcagggggaaggggttgtcactgggctcaggaattcagctgcctgcggggccggggcctgggccaggtatgggtcgctctgtctctgctccagggaggctggccccacagcccccaggctgtcttctggggaaagcggcgggctctgggctggctgcaggcctccgaggcccttgtcctgcacgctcagtgcctgtgctgccttctcctccgcggcactcctcaggccctgggccgggggctgccgcgggtggtggccccgctggcagtgccgcaggccatccagcatggccc

SEQ ID NO: 34025 - DNA, 51 bp, Homo sapiens
  chr21:46937009-46937060
  hypo
ctggggagctgtgccacgcaaggacagactgtgccacgcagagctccctgg

SEQ ID NO: 34026 - DNA, 41 bp, Homo sapiens; identical to SEQ ID NO: 13315
  chr21:46950829-46950870
  hypo

SEQ ID NO: 34027 - DNA, 30 bp, Homo sapiens
  chr21:46998315-46998345
  hypo
gcccgtccttagccacgggggctcctgtgt

SEQ ID NO: 34028 - DNA, 172 bp, Homo sapiens; identical to SEQ ID NO: 13316
  chr21:47062752-47062924
  hypo

SEQ ID NO: 34029 - DNA, 986 bp, Homo sapiens; identical to SEQ ID NO: 13317
  chr21:47063438-47064424
  hypo

SEQ ID NO: 34030 - DNA, 30 bp, Homo sapiens
  chr21:47167568-47167598
  hypo
cagtcacagaggctgcggtcttgcccttac

SEQ ID NO: 34031 - DNA, 30 bp, Homo sapiens
  chr21:47269612-47269642
  hypo
acatttcatgtagacgtctcacttgtgaag

SEQ ID NO: 34032 - DNA, 506 bp, Homo sapiens
  chr21:47286940-47287446
  hypo
agactattcagtgaaagacatcggtcattgaggtatctattcaaaaacacggtttagtactctgccacacaccgaacgcaacgccacagcagccatagaagcgtgtgtggctgtttaacgtggtctttttggggagggcatcctaggcagagcaggcgtggaagggaaggcggcggacggaacaaaacgcgggcacgcaacggctgctgcgccggatctgaggcagggccagcctgtgggagcagcaacatcgctcgcaggacagcgatggagcccccacgaatccgcgtgaaagcagcaaccacctagaaatgaacgtacagctgcttagaaacagaatacggatgacccgaaagacttcccgatggtagtcaccagcatacaggacctgacacgggcgtgcgggcagggtgtgccgctacggggtccctggcgcacctgctacccctgctacccgcattcaccgcacgcggagggtgcgggccgtgaaggttatacatgcaaat

SEQ ID NO: 34033 - DNA, 168 bp, Homo sapiens
  chr21:47330941-47331109
  hypo
gaggtaccgtctgcgcgccagggccagcccacgtcagtgctggatttggcctcccagcactgcaggcaaaggcttggaagccccggtcgccccaaggactcacacagttggggctgtggggggctcctgaccccaagtcagcctgagcgagagcggtgccggtatggg

SEQ ID NO: 34034 - DNA, 286 bp, Homo sapiens
  chr21:47370133-47370419
  hypo
atgctcccagcctgggcctgacgggccggggtgcaaccaccgccagcatctaccatgctgtgagtgggcggcggtgacgcacccacctgggaatggcagcgagtgcccggagtgccggattccccccgagctttcacgtctaaggattacgaggaagacctggactacgtgcctttatgagatgcctcctgtgggtccctgaggccgtcaggtgccacctcacccctgcgtgtcctgcggaaactgtgacctgtgactccggggcggggtggccttgggggcacca

SEQ ID NO: 34035 - DNA, 189 bp, Homo sapiens
  chr21:47404094-47404283
  hypo
gtccatctgggtgacgtcgcgccctgggacgggtagcgatggcgccaggggccgcccgcctcacgcccgccgtgcctgttcctggcaggtactaccgctgtgaccgaaacctggtgtggaacgcaggcgcgctgcactacagtgacgaggtggagatcatccaaggcctcacgcgcatgcctggcggcc

SEQ ID NO: 34036 - DNA, 31 bp, Homo sapiens
  chr21:47414105-47414136
  hypo
agggaagagaaggccccgttggtgtccctgg

SEQ ID NO: 34037 - DNA, 758 bp, Homo sapiens
  chr21:47417618-47418376
  hypo
cagaggagccccaggacctgccggaccccctggagacccggggctgatgggtgaaagggtgagtgtccaacagctcgggccctagggcggaggcctggccgccagaggccctgggaagccccagccccgcactgtggagctgcctggggtccctgaccgggccgggagtgcccgcagcatcactggctcctggccacagtcggcacctgagccagaggccgcctcggcagggcccctcctgccccgagatccgggtcccagggtccacggggaccagcagggtggccccaggggagggagccggcttctgggctgacggaggggccctgcgggtgaggtgctcccgggcctgtgccagccagtgggtatcccaggccaggccgattcgcacggtgacggctactctgctcccccagggagaagacggccccgctggaaatggcaccgagggcttccccggcttccccgtaagtgtccggaggctgagcccacaggaacatgcccaagctgcctgcggcgccctctttagtggactgggcactcttgggtgggcgggctggccccaggaccgccggctggcccaggaattccatggccgggattctgtcagctcaggcccttccgctgtgcgcccctcacagcctcccctctcaaatcagaacccggtatcactgccctgcttttccatgacaggggtatccgggcaacaggggcgctcccgggataaacgtgagtacgccccctcctccatctggctg

SEQ ID NO: 34038 - DNA, 30 bp, Homo sapiens
  chr21:47422522-47422552
  hypo
caccatcccagggccggcccggcctctcgc

SEQ ID NO: 34039 - DNA, 30 bp, Homo sapiens
  chr21:47423059-47423089
  hypo
cccagtgagtacctcggcggccgggacacg

SEQ ID NO: 34040 - DNA, 358 bp, Homo sapiens
  chr21:47425490-47425848
  hypo
tggcccctgaatcccagaatccggggtgcacggctgttctgggggccgctaggggactaagaggatcggccgagggctgggctggaggagggcagcagggatgggcggcgagggtgagggtggggcttcctgaaggccttcacctgcggggaccccggcgagcccctcaggtgccacaggcagggacacgcctcgctcgatgcgtcacaccatgtggccaccagagctgcgggaaaatgctggggaccctgcatttccgtttcaggtggcgaacaagcgcccctcacagaactgcaggtagagacgggcccggggcagacgcagtgaggcggtgggcggggcccggggcagatgcagt

SEQ ID NO: 34041 - DNA, 30 bp, Homo sapiens
  chr21:47459985-47460015
  hypo
tgtccctggtcctcgcggcctgcatctgag

SEQ ID NO: 34042 - DNA, 30 bp, Homo sapiens
  chr21:47460475-47460505
  hypo
ggaacgatggcactgcggccgcaccgtcaa

SEQ ID NO: 34043 - DNA, 158 bp, Homo sapiens
  chr21:47538428-47538586
  hypo
agtcccaagcccgaccgtgggtcctgcccccgcagcgggcatcctgcaccccccttcccctgccaaaagacgtgaggctgattctgcaaacccttccagggggaccctggccgcccaggacgcagagggcccccgggagaaatcggggccaagggaag

SEQ ID NO: 34044 - DNA, 31 bp, Homo sapiens
  chr21:47569329-47569360
  hypo
cggaatccacaagtcacgagagctaaatcag

SEQ ID NO: 34045 - DNA, 34 bp, Homo sapiens
  chr21:47627712-47627746
  hypo
acacctgcagatctcacgacggacaggatggggc

SEQ ID NO: 34046 - DNA, 293 bp, Homo sapiens
  chr21:47689550-47689843
  hypo
tcccaggcagcatcctccccacgctgtggccactacgggcttgtggcaaggaatcctggcagcctccttggagccgctgccagaatgggcagcagagtgtgtgcgaggtgaggtggcgctctgtgcggtgggccgcggtcctggtcacattgcactgaacggaatcatgcagggcctagaacagcaggtgctacaggggctgctctgtcctcatccccaagttccgtggaagtggaacaaaataaccgactggaaaccccaagacacagtttactctgcgcaaaccccagggg

SEQ ID NO: 34047 - DNA, 89 bp, Homo sapiens; identical to SEQ ID NO: 13321
  chr21:47717297-47717386
  hypo

SEQ ID NO: 34048 - DNA, 239 bp, Homo sapiens; identical to SEQ ID NO: 13322
  chr21:47717433-47717672
  hypo

SEQ ID NO: 34049 - DNA, 2 bp, Homo sapiens
  chr21:47717748-47717750
  hypo
cg

SEQ ID NO: 34050 - DNA, 176 bp, Homo sapiens
  chr21:47746264-47746440
  hypo
tactacttatctacatttttgcgcagcttgctcacttccgacagagaaaaacaaaaggtgacagttcgcattcggagaaaaagacggcgaagaggaagggctcggctgtcgatgcgtctgtccaggaggagagtccggtaaccaaggaggacagcgcactctgtggaggaggggac

SEQ ID NO: 34051 - DNA, 99 bp, Homo sapiens
  chr21:47773780-47773879
  hypo
tccttgactggaagcacgaggaggcgcctctgctgtgagcagtcggtcctggggagggaatggcgcacacatggaaaaggggtacgtgtgtaaagcttt

SEQ ID NO: 34052 - DNA, 254 bp, Homo sapiens
  chr21:47774501-47774755
  hypo
gcagcatgagcaagcccggtgtcgggctccgggggacacacgggagggcagggaggagacgcaggggcagcaccgcgtggcttgttgcacggtggaaccagtggaggggaactcggggcatctgggctcagcggccaggagccctcactctggagcagggtccctgggcctgctggaggccacagggtgtccaggcagggtggcagcgggctgtgtgccagtttgagttccctgcaaagcggaccccaacacag

SEQ ID NO: 34053 - DNA, 183 bp, Homo sapiens
  chr21:47775487-47775670
  hypo
cttcagcattgggacacgagtggcgtctggaaccctctgaagggcacagccaaggtgggcccctcccgcctcgccatggtgtcggcaggtcccgggtctgggggacgttctcggggagcctgggtgcctgggttcgatccaagtcctccgtgaagcagctgagtgctccgacctcttcttctg

SEQ ID NO: 34054 - DNA, 129 bp, Homo sapiens
  chr21:47797822-47797951
  hypo
tgcctggtgatgtgccgtctgcttgccgtacctgtgggcgtcctacgtacatagactcagcgtgtgccctcggtgtccgcggctttcactttgtgtgtttcccaggttggcgcacgttgtagcatgtgt

SEQ ID NO: 34055 - DNA, 44 bp, Homo sapiens; identical to SEQ ID NO: 13324
  chr21:47799181-47799225
  hypo

SEQ ID NO: 34056 - DNA, 265 bp, Homo sapiens
  chr21:47811197-47811462
  hypo
gcggcccaggagcaggcggcgctgagggaggagtgcacccgtctgtggagtcggggggaggccacagccacggacgccgaggccagagaagctggtaaggagcgcgggctgtggagggtggtgcgagctgtggggcgcggatacagctgccacggtttccccagctcccaaggacactcagtgtctctagagggtcaagtgtaaaccagcacgcagcttctcctggaacactgggcatgggaagcttgtgcggatcaggtgaggc

SEQ ID NO: 34057 - DNA, 21 bp, Homo sapiens
  chr21:47825322-47825343
  hypo
cttttatggccaggagcggtg

SEQ ID NO: 34058 - DNA, 30 bp, Homo sapiens
  chr21:47831519-47831549
  hypo
agggaggctgaggtcgaagacatggcctcc

SEQ ID NO: 34059 - DNA, 754 bp, Homo sapiens
  chr21:47832835-47833589
  hypo
agaggcagctgcagtcggagctgctcttggtgaaaaatgaaatgcgcctgagtctggaggacggcggcaaggtgtggggaggggggaaggcgcgaggtccccccgggagaggctggacacgcggcagcaaggtgtggggagcggggaaggcacgaggcccacccgggagaggctggacacgcggcagcaaggtgtggggagcggggaaggcacgaggcccacccgggagaggctggacacgcggcagcaaggtgtggggagcggggaaggcacgaggcccacccgggagaggctggacacgcagcagcaaggtgtggggagggggaaggcgtgaggcccccctgggagaggctggacacgcggcagcaaggtgtggggaacggggaaggcacgaggcccacccgggagaggctggacacgcggcagcaaggtgtggggaggggggaaggcgtgaggcccccctgggagaggctgggtgcagaacatgtgggtcttgccctgggcagaggcgggtattctgctgaggtgaggagcacagtccgtgcctgcagtgacatgttctctgaatcctttctgttctgtaacgagctgtccataactgttgtgaaatttcgtacgtgcttcatttaagccactctgtagaaacaatcagttgggtttttttcttgtaattgatccaaatggatttaactgtgctcgagggttagtcctggtttgtcttttcatgggaggaccacatcgcccccgtgggcct

SEQ ID NO: 34060 - DNA, 30 bp, Homo sapiens
  chr21:47859911-47859941
  hypo
ccctcacctgcccccggctgcgtctctaag

SEQ ID NO: 34061 - DNA, 337 bp, Homo sapiens
  chr21:47965679-47966016
  hypo
ccccctggccagcaggcgcacacgtggtgctgagcctcctgccgcctgctgggtctttttggccagttggttggttgtccacagcctgatcgtgcccctctccactttgtgcaggcagttccggtcaccacaggaggagcacccatctttgacaggccattcaccaggacaggcctgctgggcttcatcgggcctgtgagtatgtcctcctgtaccagcactggcagtcagagaaggtagggggtgtggctaagggacacctcgttgcagccccacccttgtcctggccgttcctgacctcccatgtggccttggtcggtggcgctgacctccctgc

SEQ ID NO: 34062 - DNA, 31 bp, Homo sapiens
  chr21:48044003-48044034
  hypo
ccgtgtttgcctgagtcgcatgcatgcacct

SEQ ID NO: 34063 - DNA, 30 bp, Homo sapiens
  chr21:48069214-48069244
  hypo
ccggctcgggcatgcgagtcttccatccac

SEQ ID NO: 34064 - DNA, 1042 bp, Homo sapiens; identical to SEQ ID NO: 13325
  chr21:48087161-48088203
  hypo

SEQ ID NO: 34065 - DNA, 30 bp, Homo sapiens; identical to SEQ ID NO: 13326
  chr22:17601366-17601396
  hypo

SEQ ID NO: 34066 - DNA, 31 bp, Homo sapiens
  chr22:17619493-17619524
  hypo
cgcctgatcaggtcctcggcatactggtaag

SEQ ID NO: 34067 - DNA, 1157 bp, Homo sapiens; identical to SEQ ID NO: 13328
  chr22:17849826-17850983
  hypo

SEQ ID NO: 34068 - DNA, 36 bp, Homo sapiens
  chr22:18074667-18074703
  hypo
tcaataaagttgtgcacgtcacgctgaagagccatg

SEQ ID NO: 34069 - DNA, 162 bp, Homo sapiens
  chr22:18081584-18081746
  hypo
tgggtatacagacaaacggatagaaagcaggacagatatccgtatacccatgtttgcagcagcattattcacaacagccaaaaggtgggagtaacccaagtgtccagtgacagatgaacggataaacacaacgtggggcatccataccgtggaatattattc

SEQ ID NO: 34070 - DNA, 134 bp, Homo sapiens
  chr22:18265396-18265530
  hypo
gcactgagacccaggtgtcatcgtgaagttcatgccagccagaggagccactgtggcgtttccggccataggcctgggcaggagccgctcccaggcgtgccgtgggcagggccgggtcagccttcagggaagag

SEQ ID NO: 34071 - DNA, 330 bp, Homo sapiens
  chr22:18286546-18286876
  hypo
tagtgtcagcacaggcgctgccatacataccacccagatgcaagtcgatgaggtcactgtaataagactctccccaatagtctacaacaaggaatcggtgaagagagagttattccatcaggtagtcctcctgtccccccatacccaatcaatgatatgatatggagcaatcaatgatatggagcgcaagaaacacagacacagcgaggcggcagaggaacggctggaaggcatgcgtgcctaagtgcatcacatactgcatgtccacacatgccgtatctgcatactgcgtggctgcgggaggagggcggtaactaaaactcactgtgg

SEQ ID NO: 34072 - DNA, 97 bp, Homo sapiens
  chr22:18291184-18291281
  hypo
ggtcccagggaactaacgacatgagggggtctgggggtgcaggctggggacctgctcagtgcaattctgtgatggttccttgcggttcaatctccct

SEQ ID NO: 34073 - DNA, 174 bp, Homo sapiens
  chr22:18291579-18291753
  hypo
agcagagcttaggagggagcccggcagtacctgcttcgccccggagcgccttctccacagccacgcccctttcctccagccgccgctgcctctcctccacctgctgcagctgccgctggatgatctatgacagacagcacagactgagcacccggctctccagccctgcttcag

SEQ ID NO: 34074 - DNA, 31 bp, Homo sapiens
  chr22:18295720-18295751
  hypo
ttcctgctgaatgctccgggggagtagaagt

SEQ ID NO: 34075 - DNA, 31 bp, Homo sapiens
  chr22:18316174-18316205
  hypo
ctgccctgacctcctgcgagggtgtgtcctc

SEQ ID NO: 34076 - DNA, 247 bp, Homo sapiens
  chr22:18328028-18328275
  hypo
gtgattttacagtagagtgaacgaaacttgggaaggaaaacatccaagaggcgtctgtttgacgtgggtaacgtggggaacgcatactgtctggcaagaattctactaggaccacgggaaacaaagcagattaaaacactctctactctaaaagagcttcagtagcacctgggagagggccctgcaggaatcctttcggtacgacgtgtcaagtaccatgagccacgtatgcactcatgggagaaca

SEQ ID NO: 34077 - DNA, 99 bp, Homo sapiens
  chr22:18329914-18330013
  hypo
gtggcaaagcccccctgtactcggcacagcagctgctgaagacacttcagggctccgcgccgctgagaagggtgtcgcgtaggaaatcaggatgtcaag

SEQ ID NO: 34078 - DNA, 610 bp, Homo sapiens
  chr22:18340816-18341426
  hypo
gtaaaatggagctggtgttcacgtggctggtagaacccggaagtaattgatggagagtcccatccacctggaggcccgcatcccctcccgggcaatgaaacgtgtttctgcgtacaagcctaccaccccctcccgccaaggtaagcggtgaggagacaaggagcaattataaagaaagaggtgttggcagccaacagggtgctgagaattccgggcggtggtgagaggagcccacagtgccatgacctgacctgggcaggagtgccaatgggcctcaccaccccttgtttcattatgactaatctacttgctggcacttgtgaggcgcttggctgggtgagctgcaaggtaagggctggtttttgagtctaaaggaggtttcagggcttcgtgaaaggggctggaattcggaaagacttctcctgaaatctctgcctggctgctgccgttcagagctccacatgggtgtttttatctcggggagcacttgtgggaccgggtcctatacggcatcatcctgccctattttttagcatgaaaataagagtggcccattttcacagccgctctccttccatgtgtgtgccacggcctccctcttaggcagtgt

SEQ ID NO: 34079 - DNA, 48 bp, Homo sapiens
  chr22:18352968-18353016
  hypo
gcctctcactgccacccgatctcccaccaggtgcgcacctctgccctc

SEQ ID NO: 34080 - DNA, 212 bp, Homo sapiens
  chr22:18353508-18353720
  hypo
tgccttatctaaacagcgtcctaattctttcattcttccccgactcgggagtgctttttaccaacatagcagaagggccaggcaccatgacaggagtcagcctttctcggctcacctctctgggctccttccttgctccttctaacagaggtgactgtttgttcaccctcaggacagctgaagtgactaggtcctaacggcatggcatccct

SEQ ID NO: 34081 - DNA, 215 bp, Homo sapiens
  chr22:18354910-18355125
  hypo
acttctaactggctacggtcaactgtgctcttggctctgccacagagtgacggcaccgccacagtcactgcctccacgcactgacagagaacacttggcacaaccgcgaaagcctgggccagcctgctgctgacgagggagccagcatcacagtgcttcacaccagacttgagtaatgctatgatacagcctggcgacgccgggaaatatcgaca

SEQ ID NO: 34082 - DNA, 236 bp, Homo sapiens
  chr22:18355584-18355820
  hypo
tgagctcactccgcccgtgtacatctttatatacttctatcggttgaagattacaaaatgaccagaatgaagggaaatgagaaggaaaaaaatacataaattaagaagacacggggaaaaaaagaaatctttgggaagtgcaatttgaatacaaggtgcagcagcaaaccatgccaacacagtgctcacaggcagggaaaccgggtggaagaaaaacatcgcgtcagtgtccacgc

SEQ ID NO: 34083 - DNA, 83 bp, Homo sapiens
  chr22:18358158-18358241
  hypo
acgtgagtggaggctgcggagggcagagttttagtgagtcctaggccatgctacctgtcggagggagtcggaggagggagagg

SEQ ID NO: 34084 - DNA, 147 bp, Homo sapiens
  chr22:18363712-18363859
  hypo
agttgaacttctagttcgtggtgggacagtcgtgtttccatgatgtgggtgggactgactagggtcaggtgtgaatgtaggatgcaccatcctgagggccataaaagttgcttccaccacaaacggtttctacgcatagcctttctt

SEQ ID NO: 34085 - DNA, 31 bp, Homo sapiens
  chr22:18371276-18371307
  hypo
agacaagataattccacgaaaagggacatcg

SEQ ID NO: 34086 - DNA, 106 bp, Homo sapiens
  chr22:18400897-18401003
  hypo
tacaaggccctataaacgtgtcgtaaacattttggtctcaggactcctttatacacttcaaagctaaggaggaccagagttcgaggctgcagtgagctacgatcat

SEQ ID NO: 34087 - DNA, 156 bp, Homo sapiens
  chr22:18427253-18427409
  hypo
cccgaacaatgaagtcggaggcagggagagcagagccgacccagcctccgctttgctaatggcacaagggcaacattccatgcaaagtttcggtgtgcaggcctcctgagaacccagcagtgccaggcagcagtgagcacacgcacccactgacga

SEQ ID NO: 34088 - DNA, 30 bp, Homo sapiens
  chr22:18434476-18434506
  hypo
ttttgagacagggtctcgctcaggcatcca

SEQ ID NO: 34089 - DNA, 30 bp, Homo sapiens
  chr22:18434745-18434775
  hypo
agcgactgtgccgggcgtaaaatttcttaa

SEQ ID NO: 34090 - DNA, 269 bp, Homo sapiens
  chr22:18443244-18443513
  hypo
acaggtaccacacatgcgaacccagcatatgggaaggaaacatgcaccctggaacaccccgcccaggagtgtgtgtgggaaggagactccaggagctctgcgaactgttctggaactggacctgttcaggattggcaaggggctccgggaacagatcctgtgggtgtgagactgtgtccccgtccgcttagggaaggaccatgggggtgagagggtggggggaaggaggcagatttggaaacagacacccgccccggggtcagatttga

SEQ ID NO: 34091 - DNA, 95 bp, Homo sapiens
  chr22:18553828-18553923
  hypo
catcctcagtgagggacgataagagactggggctggggggatgggcagaatctttgctgttgccacaaactgggagtgtccgcagaaaactgaat

SEQ ID NO: 34092 - DNA, 451 bp, Homo sapiens
  chr22:18619402-18619853
  hypo
aaacaaaacaaaaaaaaagagtcacacgaacacatgttctgatccacctgaggcaaaaggcgcccctgtggagcccagcacgtctgtgtgggaggaaccgcctggaggagcagagagcaaagcaaaggggcttggggcggaacacgacgggagtggcaggagcagccagcgggaagccagggagagggtttggagatcagccagtcgcgggcaggggtaggcaaaacctgtaggttcctgtggacgccctggaattgtgcagttacttctgagtgaggcatgaaaccagtgagttctgaggagacaactaacgctgcaatttaatttccagttaacctgtggagcttcagaagctctcactcacaactgggatattaacaaggtcggatccggagggaagtccctcagcacatagagcatgaagtgtgcacccccccgtgcagcaagtcca

SEQ ID NO: 34093 - DNA, 31 bp, Homo sapiens
  chr22:18977078-18977109
  hypo
tttttttttgacagaatctcacgctatcgcc

SEQ ID NO: 34094 - DNA, 31 bp, Homo sapiens
  chr22:18977348-18977379
  hypo
gtgagccaccgtgcctggccctcatgtgtct

SEQ ID NO: 34095 - DNA, 76 bp, Homo sapiens
  chr22:19039217-19039293
  hypo
gacagagcaagaccctttctcaaaacaaaacgaacaaacgatgcaaagagaaaacggaagaataatgtgaacaaca

SEQ ID NO: 34096 - DNA, 194 bp, Homo sapiens
  chr22:19053068-19053262
  hypo
gagccatgacactgtgtgacccgcccctgcctcccacagccgaaaaaaataaggtgtgggcgatgccacaggtggcaaagctaaggagccagccagcacttgagtatcaatgagtctggccagcgtcctctcacttcctccacccatcacttccgactcctacacccacacacgggaatgcctggtaatttaca

SEQ ID NO: 34097 - DNA, 34 bp, Homo sapiens
  chr22:19130727-19130761
  hypo
aaaaaagaaaaaagaaagtcggagctgcagtctg

SEQ ID NO: 34098 - DNA, 220 bp, Homo sapiens
  chr22:19620237-19620457
  hypo
tgggtggcccagacactcttccgactcccggccaaactccacgtcattccgcgatcagtggcatgcctgtgcctgtgggcgcattcctctcgccagccggccacttgtggattcctccgccagtgtgctcctctccacgtccagccgctcctgtctctgccttgctagggtctgggtttttataggcgcccgatggggcgtggcagcaagagcggtcttg

SEQ ID NO: 34099 - DNA, 68 bp, Homo sapiens
  chr22:19621108-19621176
  hypo
ggacagagggagaggacgatggcaataatgttgcccctgtggcccaccaggcccgcaccttggcaaca

SEQ ID NO: 34100 - DNA, 479 bp, Homo sapiens; identical to SEQ ID NO: 13335
  chr22:19706042-19706521
  hypo

SEQ ID NO: 34101 - DNA, 303 bp, Homo sapiens; identical to SEQ ID NO: 13336
  chr22:19748605-19748908
  hypo

SEQ ID NO: 34102 - DNA, 50 bp, Homo sapiens; identical to SEQ ID NO: 13337
  chr22:19748960-19749010
  hypo

SEQ ID NO: 34103 - DNA, 40 bp, Homo sapiens
  chr22:19798778-19798818
  hypo
gccaagcccaactgtgcgtgggggccgtcctgcccagtac

SEQ ID NO: 34104 - DNA, 106 bp, Homo sapiens
  chr22:19856432-19856538
  hypo
cactgggggcccccaccgtggtggctgtctggtcctcacggcggccctccgcgggtggggtgggatcagagcttgtctgagctggtgaaggcgggactcatccctg

SEQ ID NO: 34105 - DNA, 30 bp, Homo sapiens
  chr22:19867650-19867680
  hypo
tgaggtcgtggagtcgccactgtcctcagc

SEQ ID NO: 34106 - DNA, 224 bp, Homo sapiens
  chr22:19872961-19873185
  hypo
ggctaagccagcttgcgggaggccggctccagcctctgtgctctgctcagccgcaggaattgggtgccgggagggctggcaccggtcggggatcagcccagacacaggggatgccagcccacatcagaggaaggagctgggccccatgggcagggctggggcacgaaggaggggctgtggtccctgcaggccgggggctcacgctcagccgtctggtccctctc

SEQ ID NO: 34107 - DNA, 135 bp, Homo sapiens
  chr22:19882798-19882933
  hypo
tggggagcggccaacccgcctggcagccagcaggatgggggagccctgggaggtgacaggaagtggggcaaagattctccatgcacctcggggagaccagagacagagcgtgtggctcgacgtgcccttacctat

SEQ ID NO: 34108 - DNA, 30 bp, Homo sapiens
  chr22:19891269-19891299
  hypo
gggctcaccatcctcgccttccacattcct

SEQ ID NO: 34109 - DNA, 30 bp, Homo sapiens
  chr22:19892648-19892678
  hypo
acttgcattaacagcgccggacaaaagccg

SEQ ID NO: 34110 - DNA, 10 bp, Homo sapiens
  chr22:19923946-19923956
  hypo
cttgtagctc

SEQ ID NO: 34111 - DNA, 103 bp, Homo sapiens
  chr22:19924378-19924481
  hypo
atgcaatgcttattacgccaaaacaaacaagtagattagaggcgtgggcttattcggtcatgctggaacctcctaatgctcaaggggtacaagtgtgtcgata

SEQ ID NO: 34112 - DNA, 31 bp, Homo sapiens
  chr22:19963989-19964020
  hypo
tagagataagtacccccgggccctgcccact

SEQ ID NO: 34113 - DNA, 30 bp, Homo sapiens
  chr22:19965519-19965549
  hypo
ggcatgcaggagcgcgtccaccagcccttc

SEQ ID NO: 34114 - DNA, 270 bp, Homo sapiens
  chr22:19966358-19966628
  hypo
tgggaccacgaggacggggcctggtgtgcatgtgggctttagcaccaggtctggtccacacctcaggcagcccgacgtgttcttgaagacagttgtccactcggcgtcccgtggcttggagtcctcgttgggctcacgctcccatcctgagtggggcacgatcacctcgtgggtcagcgtctgcaggccatggtcaatgatgaccatcttcaggggctcataggatgacaggttccacagggtgcctgtggggtgcgattggccaatctg

SEQ ID NO: 34115 - DNA, 31 bp, Homo sapiens
  chr22:19967326-19967357
  hypo
cacaccaccgcagtcccggatggcggccttg

SEQ ID NO: 34116 - DNA, 30 bp, Homo sapiens
  chr22:19970586-19970616
  hypo
ctcacagcctgccccgggcctctgactgca

SEQ ID NO: 34117 - DNA, 15 bp, Homo sapiens
  chr22:19971896-19971911
  hypo
gacctggcaaccctg

SEQ ID NO: 34118 - DNA, 101 bp, Homo sapiens
  chr22:19972130-19972231
  hypo
atgcatgtacatacacgtgtgcaagtacccagcccggcacaggccgagcacatcaacccgtgtgctctaacagcaccccaagggcacggcgcccactgttc

SEQ ID NO: 34119 - DNA, 273 bp, Homo sapiens
  chr22:20073378-20073651
  hypo
cggcaggacgcgcccgggtctcagcggacttgtgcatgttagctgtgtagatttatgtgagggcttgtaaaactctggtcttgtaaactagtcttaagcgcttttaatatggagacagatgagagcccctctccgctcccgtgtgggcccgcaggagaagcggtgatggagagccgagctcgccccttccaagcgctgccccgtgagcagtctccaccacctcccctgcaaacgtccagtggtgcagaggtaatggacgttggctctggtggt

SEQ ID NO: 34120 - DNA, 31 bp, Homo sapiens
  chr22:20087955-20087986
  hypo
tctggggaagtgcttgcgtagaccctggccc

SEQ ID NO: 34121 - DNA, 136 bp, Homo sapiens
  chr22:20123201-20123337
  hypo
agcccccctgctgggacccaccgcatgtggcctggggtattcctggcccccgagcctcagtttccccatctgtccaggtgtctatagggattggacaggtaggtgcaggtacttcgaggcccaaaggcctggcctg

SEQ ID NO: 34122 - DNA, 31 bp, Homo sapiens
  chr22:20123637-20123668
  hypo
ggacctgccctccacccgtagcttggctgga

SEQ ID NO: 34123 - DNA, 159 bp, Homo sapiens
  chr22:20126323-20126482
  hypo
ggcctggatgaggcatcgtggcgcattttccatctggggctcccacctccagcctgtgtaccgcccccgccccctaccccgccccagtcatggagcctaggtcgctggaatggggtgaccttaggtctgtgggcctctctgagacggctgccctgagag

SEQ ID NO: 34124 - DNA, 81 bp, Homo sapiens
  chr22:20228947-20229028
  hypo
agctctttattccacgtcgtccgatatttttacacaagtaaaataaaatgcatatctctatataccgcgatctgggtggga

SEQ ID NO: 34125 - DNA, 92 bp, Homo sapiens
  chr22:20248024-20248116
  hypo
agcgcagcacatcctgcgtgaccttgggccagctcctcagccctccctcgacagccgtgctggtagctggccaggcccgggtgagtgagttc

SEQ ID NO: 34126 - DNA, 30 bp, Homo sapiens
  chr22:20254214-20254244
  hypo
caccctgggctttgcggtattcaacgagcc

SEQ ID NO: 34127 - DNA, 431 bp, Homo sapiens; identical to SEQ ID NO: 13338
  chr22:20255236-20255667
  hypo

SEQ ID NO: 34128 - DNA, 30 bp, Homo sapiens
  chr22:20745572-20745602
  hypo
atcagcaagcacaccgtgcacacaagttcc

SEQ ID NO: 34129 - DNA, 30 bp, Homo sapiens
  chr22:20760075-20760105
  hypo
cgagtgcgggaaggcgttccgccagagctc

SEQ ID NO: 34130 - DNA, 31 bp, Homo sapiens
  chr22:20788840-20788871
  hypo
ggctggcagaaaaggccgggtggtggtggca

SEQ ID NO: 34131 - DNA, 30 bp, Homo sapiens; identical to SEQ ID NO: 13340
  chr22:20791718-20791748
  hypo

SEQ ID NO: 34132 - DNA, 10 bp, Homo sapiens
  chr22:20792481-20792491
  hypo
cgcaagccca

SEQ ID NO: 34133 - DNA, 102 bp, Homo sapiens
  chr22:20864297-20864399
  hypo
ttctttatttttttcgatattgctgtttgtgtgtttttctgttgccgctctaacaaattaccacaagtttagcatcttaaaacaacacacctttagccaggt

SEQ ID NO: 34134 - DNA, 132 bp, Homo sapiens
  chr22:20908749-20908881
  hypo
ggactctgcaacagcacgagtggagctgtgtgtgcctgtggacttgtgccctccctgggagagcgtcccctggccactgtgttaccgcttgctcagaagggcccatcgtgctttgtacgctcacccagcagg

SEQ ID NO: 34135 - DNA, 31 bp, Homo sapiens
  chr22:20929348-20929379
  hypo
ctgagtttctttgttgcgatcaccttgtctg

SEQ ID NO: 34136 - DNA, 31 bp, Homo sapiens
  chr22:20976181-20976212
  hypo
tgctggggaagagacccgcacacagaactca

SEQ ID NO: 34137 - DNA, 51 bp, Homo sapiens
  chr22:21058304-21058355
  hypo
gaggagatggccagggcggaccgagtgagcgcctgcgcgggtccgggcggg

SEQ ID NO: 34138 - DNA, 36 bp, Homo sapiens
  chr22:21304978-21305014
  hypo
gccgtgagccgccgcgcctggcctagacttgtgtgt

SEQ ID NO: 34139 - DNA, 31 bp, Homo sapiens
  chr22:21331193-21331224
  hypo
ggaggtgtctgagctgcggggccaggaggga

SEQ ID NO: 34140 - DNA, 30 bp, Homo sapiens
  chr22:21354049-21354079
  hypo
gacagcaggccctccgtctagaatccgctt

SEQ ID NO: 34141 - DNA, 30 bp, Homo sapiens
  chr22:21354317-21354347
  hypo
aggcctgcagctggcgctgggccttgtcaa

SEQ ID NO: 34142 - DNA, 310 bp, Homo sapiens
  chr22:21380150-21380460
  hypo
ctatggaatccgcttcgacatcctcgtcaccgggcaggtaggcacaggtaggggtcaggccggggatgggatggggcaggcagacagggctggaggaggcatgaggctgacagtcgtgggctgagaggttcagctcagatctctctcaggcagggaagttcgggctcatccccacggccgtcacactgggcaccggggcagcttggctgggcgtggtgagtgcgagcactgtgggcacctgcaggctgcagtgagtgctgctgaccagggtgtgtccaatgcatgctggagcctccggtgcctgcacatt

SEQ ID NO: 34143 - DNA, 31 bp, Homo sapiens
  chr22:21385763-21385794
  hypo
agctcgcccatggatacgtaggtgaacaggt

SEQ ID NO: 34144 - DNA, 31 bp, Homo sapiens
  chr22:21408212-21408243
  hypo
attcctatagcacaggcggatggctgcgaat

SEQ ID NO: 34145 - DNA, 30 bp, Homo sapiens
  chr22:21798779-21798809
  hypo
acaagctcctctcacggagtcctctgcttc

SEQ ID NO: 34146 - DNA, 31 bp, Homo sapiens
  chr22:21802141-21802172
  hypo
gctttccctccttcctcgctgaacaaggtgg

SEQ ID NO: 34147 - DNA, 190 bp, Homo sapiens
  chr22:21803453-21803643
  hypo
agactttaagggtttgtggggcggggcgggattaacacaacatttggctttgttttctttttcctttgatttccacatcaggtgtgtgcgagtgtgtgtgtgtggagatgttaagagcctcacaaggaaactgggttattggaggccaaggcggcttacagttctctgcgttcgtcacttaattcctgaa

SEQ ID NO: 34148 - DNA, 30 bp, Homo sapiens
  chr22:21804696-21804726
  hypo
ccactcccaaaatccgtcagtattcactgg

SEQ ID NO: 34149 - DNA, 32 bp, Homo sapiens
  chr22:21970643-21970675
  hypo
atgaaaatgttccaggctgggcgtggtgggtc

SEQ ID NO: 34150 - DNA, 176 bp, Homo sapiens
  chr22:21977523-21977699
  hypo
gtggggagtgatgggcaggttcggcagcctaacattgttcaggcgcatggcccctgcggtgtgtacacgaactcggcttcttttgtcctaggtacgccaagggcaggtttctggagactcccttgtgcccgggatggcaagggcaccgggctggcgtttccacatctgtcttcatt

SEQ ID NO: 34151 - DNA, 343 bp, Homo sapiens
  chr22:21982765-21983108
  hypo
ctggcctcttggagtccaggtcgtcgagggcgcaaagctgcacgccatcctgggcaagctgggcccgcagcgtgggcgcggtgaggacgcgcagctcatgcagccgctcccaagagcaagagaaagcgtcggggccttcaccgcagccgccggtgggaggcacactggggtagccggggtgcgccatcagctcggctgtcagggtgtggcccgctagggtaccttccaggacccgcgccagggccccggacacgcggtgagcggacatgtgccggccgcaagtgctcaggcccacgaaggcgtctgtccacctgtggggggcgggacatcagaggtgggacca

SEQ ID NO: 34152 - DNA, 1131 bp, Homo sapiens; identical to SEQ ID NO: 13348
  chr22:22005793-22006924
  hypo

SEQ ID NO: 34153 - DNA, 148 bp, Homo sapiens
  chr22:22007500-22007648
  hypo
gcaccctttccccccgggcagaggccccgccccagccagcctgcattccaggtctcagatccctgcagaccaccctgggggaggcactggcaggcctgcccgacactctttccctgttgcactactataggccgctgggaagcagtgc

SEQ ID NO: 34154 - DNA, 42 bp, Homo sapiens
  chr22:22044380-22044422
  hypo
cacagggatggccaggcgtggtggctcacacctgtaatccca

SEQ ID NO: 34155 - DNA, 266 bp, Homo sapiens
  chr22:22058058-22058324
  hypo
ctgtgtaggtgccatccaggccgtcccagggcccgtgccgctccccccgggctgaaccagggtactcacacggaattgaagaggtaggcgcgtccctggctcccctgaaaggactgaaagaagaaggtcccgtgagattggctgcgagtgctttctggaacgaagcggtgctgcccagaaccaggggagtccagccccgcggctgttagctgcgccgggacgcgtcaccgggagcagacaccggcgtcccccctccagaactccac

SEQ ID NO: 34156 - DNA, 36 bp, Homo sapiens
  chr22:22201293-22201329
  hypo
cctctccctctctccttctcccgctttccacggtct

SEQ ID NO: 34157 - DNA, 30 bp, Homo sapiens; identical to SEQ ID NO: 13351
  chr22:22292759-22292789
  hypo

SEQ ID NO: 34158 - DNA, 31 bp, Homo sapiens
  chr22:22314882-22314913
  hypo
gctgtatcacctgtcacggggcccctggtgc

SEQ ID NO: 34159 - DNA, 102 bp, Homo sapiens
  chr22:22324550-22324652
  hypo
gtgcccaggactctgcgggtgtggccagcacctggtgaatgcacagccgattcgcaggtccagctcctggcgagcatccactgagagcgcctcgttgtggtc

SEQ ID NO: 34160 - DNA, 405 bp, Homo sapiens; identical to SEQ ID NO: 13352
  chr22:22862457-22862862
  hypo

SEQ ID NO: 34161 - DNA, 21 bp, Homo sapiens
  chr22:22863219-22863240
  hypo
ggggttaaattgagaaggagg

SEQ ID NO: 34162 - DNA, 30 bp, Homo sapiens
  chr22:22899311-22899341
  hypo
acttgttgccacgcacgtctgagagtaata

SEQ ID NO: 34163 - DNA, 572 bp, Homo sapiens
  chr22:22899561-22900133
  hypo
tgtggtcaaggaccctgactacggtcttgcagcgacatttctgcctctgctcccgccttcctaggacgcctacgccactgcctgggccgtccccaacccccagcaccttcagaggggccgagtcccagagcatccaccgcattacaaatgcgcacccaccctggagagctccaaccacgagcaccgccgcctcggttcaaggcatccttacagccacaactcctcaactggggccaattttccggggcaggcggcccggggtgacccaagtggcgcacattattttctttggtcttcaacccatttccagagagaaaacagggacccgggacaggggtggtgccgggggcacaagcccaaggtcaccctgcggggaagcggaggaatcagggctcgaacttacgtttttcctcagagagttcaccacaccgcgaagttgctggaaggaaagaacgagacaatggctcagctaagcgccctagccgctgcgtggggcggggggggcggcggtgggggccggggggctgggcagcctggtctgaccaatccccgtttctcagtccttccagggc

SEQ ID NO: 34164 - DNA, 346 bp, Homo sapiens
  chr22:22901055-22901401
  hypo
gcagggtggaaaaagggggtgcggtgggcgaatggggaggcggggggctgactgggagtgtgggacggggtgttctgggatcacggagacgtccaagtctggactctgtcctgggtctgtgcttctggcgacctcccttttcttcagtgggatgcggggtgcaggggccggttccaggtcccctgagctcaagtctcgccccaccccgccccgcaagtctagaaaagatgcccctgcccttggctgggtaatctctggatttacctactgtctgtaaccccccgggctgaagagaccaccccccgggagtcaattaacttactctctggagcgcgcgttcctccct

SEQ ID NO: 34165 - DNA, 30 bp, Homo sapiens
  chr22:23415301-23415331
  hypo
cagaatacttaagacggtgtgtggtggcaa

SEQ ID NO: 34166 - DNA, 30 bp, Homo sapiens
  chr22:23415900-23415930
  hypo
ggagcagaacctcacgcgattcatccattc

SEQ ID NO: 34167 - DNA, 30 bp, Homo sapiens
  chr22:23435443-23435473
  hypo
agatgtttctagggcgttccctggtgcact

SEQ ID NO: 34168 - DNA, 260 bp, Homo sapiens
  chr22:23437451-23437711
  hypo
agtgggagccggaggcggggggctgcagggagcacaccagcgaccggccctccaaccctccagccactcagcaacatcgccacagcaaccagcaaccagacggcagcagccgaggcaaacacaagcggacggcttcccaccgtcgccgaggacagggaatgactacggcaaatcaggccactttgccaactagggaggtggagtgtcactagtggggaggggcggccaccgcccgctgcacagagcgccatgccggctgg

SEQ ID NO: 34169 - DNA, 30 bp, Homo sapiens
  chr22:23437915-23437945
  hypo
gcagcccggcggtcccggagaattgaccgc

SEQ ID NO: 34170 - DNA, 30 bp, Homo sapiens
  chr22:23438415-23438445
  hypo
ccgggacatgaccacgggcattgtggagaa

SEQ ID NO: 34171 - DNA, 30 bp, Homo sapiens; identical to SEQ ID NO: 13355
  chr22:23500537-23500567
  hypo

SEQ ID NO: 34172 - DNA, 202 bp, Homo sapiens; identical to SEQ ID NO: 13356
  chr22:23523141-23523343
  hypo

SEQ ID NO: 34173 - DNA, 31 bp, Homo sapiens; identical to SEQ ID NO: 13357
  chr22:23546141-23546172
  hypo

SEQ ID NO: 34174 - DNA, 100 bp, Homo sapiens
  chr22:23737248-23737348
  hypo
gaccccagctcagggccggcttcccaccccacatcccacctgccctccagaaggcagcccctctgcacggggctctgacccaaggcgtcttaggagggtc

SEQ ID NO: 34175 - DNA, 612 bp, Homo sapiens
  chr22:23801037-23801649
  hypo
gcagctcacccccaagtctagcgttccattagtctaccgttccgttcttcccagcacattcggtgcgcagccgcgaccagtctaaccgtggcacctttccaccggccctgagccctggcgtgcccctccacgacatcccctgggcacggagttgtgtcgacaggtctctgtgactggctgggcatgttttcggggtttgcccgcggggcagcgtgtctcagagtttggctgtacgaagcggtgttgacgggtaaacccggttttgtctctccctccggcggttgagggctggttccgcgttccatctgttagtgatgggatcgtgttgccgtggacgtccgtgccgaggtctgtgtgtggacagcgctcagaccccctggctgcgcgcccgggcgtgtgctgggcccatggactctgcgttcagctctttgaggagccgccggctgtttgcagtggccgcatcacacacgctcccgccagcgacgcggagggtctgattcccctcgacccagcagctcatggtgtttgctctcagtggccgtcggcgcgaggcgggtccgtgtctcgctcagttgaggttcacgtttccccggtgcccggcgtcctggcatg

SEQ ID NO: 34176 - DNA, 154 bp, Homo sapiens
  chr22:24054815-24054969
  hypo
ccccagtaataatcagcgctctctcatccttaggagcagactgccctgaatcctctctcagggtgaaccgtgtattttggacttcacgatctttttttagatggggtctcgctctgtcacccaggctgtctcagcctcccgagtacctgggatt

SEQ ID NO: 34177 - DNA, 31 bp, Homo sapiens
  chr22:24205145-24205176
  hypo
aagtttccgtgttcagcggtgaagccttgag

SEQ ID NO: 34178 - DNA, 109 bp, Homo sapiens
  chr22:24459507-24459616
  hypo
cagctgtcatttgcctcgtcccagcgcgacctgttcgaggatggttggctggagtttgtggtccgtgtttactggctgaaggctcgcttcctggcgctgcaggttagtt

SEQ ID NO: 34179 - DNA, 508 bp, Homo sapiens; identical to SEQ ID NO: 13364
  chr22:24552423-24552931
  hypo

SEQ ID NO: 34180 - DNA, 30 bp, Homo sapiens
  chr22:24584729-24584759
  hypo
tccctagagcctgacgccggggcccctgac

SEQ ID NO: 34181 - DNA, 39 bp, Homo sapiens
  chr22:24763168-24763207
  hypo
tgacttttatgttgagccgtgacaagtttttgtttgttt

SEQ ID NO: 34182 - DNA, 31 bp, Homo sapiens
  chr22:24983097-24983128
  hypo
gtgccccttctgatgtcgattcttttagggt

SEQ ID NO: 34183 - DNA, 92 bp, Homo sapiens; identical to SEQ ID NO: 13367
  chr22:24989195-24989287
  hypo

SEQ ID NO: 34184 - DNA, 131 bp, Homo sapiens
  chr22:25016919-25017050
  hypo
gagagactgaccctgccgcagctggctgacacctacgagacgctggccatcgagggtgcccaggccttctacaacggcagcctcacggcccagattgtgaaggacatccaggcggccggtgagtgggtaac

SEQ ID NO: 34185 - DNA, 31 bp, Homo sapiens
  chr22:25251163-25251194
  hypo
agggtagtgagatgggcggccatctgctggt

SEQ ID NO: 34186 - DNA, 18 bp, Homo sapiens
  chr22:25285212-25285230
  hypo
caccgtgcccggccctca

SEQ ID NO: 34187 - DNA, 121 bp, Homo sapiens
  chr22:25336183-25336304
  hypo
cgcacggcctatttatccattcttccatggagcctcctctgttctaaagggctgcttctacccagtcggggcaccttttaaaaattcacacacatagccgggcgcggtggctcacgcctgt

SEQ ID NO: 34188 - DNA, 1463 bp, Homo sapiens; identical to SEQ ID NO: 13368
  chr22:25348233-25349696
  hypo

SEQ ID NO: 34189 - DNA, 332 bp, Homo sapiens
  chr22:25461274-25461606
  hypo
atgaggaatgggtggccgcctggggtcctggagagtagtatttcggatgtctgggctgtgggatgtgggaggaatgtcactgagccattcctcaggtggcacatgccattcctgccccgtccccacataggaatgcgggccacttctcacaggctggaagatggccttgctacatgcgagtcttctgatgtttaaatgttggttagtaactaattcaaacaaaatggtgcaccaccttcctctttccccccaaaaaagaaaaacaacactcaaacaaaattatgtctaaggggactaccatttttcaactttttttaaagaattattattat

SEQ ID NO: 34190 - DNA, 31 bp, Homo sapiens
  chr22:25463146-25463177
  hypo
gttggcacctgcccagcggtgctcccctccc

SEQ ID NO: 34191 - DNA, 31 bp, Homo sapiens
  chr22:25463395-25463426
  hypo
cccttgccctgcctgtcgctctcccatcaga

SEQ ID NO: 34192 - DNA, 102 bp, Homo sapiens
  chr22:25484762-25484864
  hypo
tccttttgaaaatattctctgcgtacataagacaatgtctgtgcctatatctgcgtctgtaccctcccatatgtacatatgtacacacacacacacacgtgc

SEQ ID NO: 34193 - DNA, 42 bp, Homo sapiens
  chr22:25484923-25484965
  hypo
aaccatagatcaaaaacattcgaagaaaaatgtatggttgta

SEQ ID NO: 34194 - DNA, 31 bp, Homo sapiens
  chr22:25492972-25493003
  hypo
cccttctcttgttgaccggcatttgagttga

SEQ ID NO: 34195 - DNA, 86 bp, Homo sapiens
  chr22:25505389-25505475
  hypo
actcagacgtgagccaccgcgcccggcccatcacttctttattctgctaaccacacggaccaaccttgattcgttgtgggagggga

SEQ ID NO: 34196 - DNA, 22 bp, Homo sapiens
  chr22:25547084-25547106
  hypo
gccactgcgcccggcccctttg

SEQ ID NO: 34197 - DNA, 157 bp, Homo sapiens
  chr22:25562061-25562218
  hypo
gccaggggaggtccctcggaagctgccgccgtgggtgaacagatagctggtcatagctggaaggaatgttgttcgagaaagagactttgaaggactgaggatcgatgcagtatggcagtgaaggagagagaggagggagcagcgctggcctcaggac

SEQ ID NO: 34198 - DNA, 185 bp, Homo sapiens
  chr22:25573210-25573395
  hypo
gcctctcatctgtcaacgaagctgtgtaccgccaactgtgttgtggtaccctccattgatggttcccttgatttttttcctcttcctccctgctgctcccaaagcaaacctcagtcctcgactcaagtgccctcaagacccgggtgcagctcagcaagagaagccgccgccgggcccccatctcc

SEQ ID NO: 34199 - DNA, 20 bp, Homo sapiens
  chr22:25578126-25578146
  hypo
cagagcgggactccatctca

SEQ ID NO: 34200 - DNA, 31 bp, Homo sapiens
  chr22:25603310-25603341
  hypo
ggtcccccacccgccacgttcctcggcatca

SEQ ID NO: 34201 - DNA, 30 bp, Homo sapiens
  chr22:25747673-25747703
  hypo
gttgttgttggtctcgagggagatcctgtg

SEQ ID NO: 34202 - DNA, 156 bp, Homo sapiens
  chr22:25753157-25753313
  hypo
ggagcccagggacagccgggcagggccaggcctccaggatcaaatacctccatgggagcctcacctcgatcttgtctgtcttggcatctccccagtagagcttcccttcctgcaggtccagggccaggccgttgggccacccgagggaagcattga

SEQ ID NO: 34203 - DNA, 30 bp, Homo sapiens
  chr22:25756141-25756171
  hypo
accctccattggtccgtctaccgggccagc

SEQ ID NO: 34204 - DNA, 31 bp, Homo sapiens
  chr22:25756561-25756592
  hypo
aggggctcacccttcccgcccagctcaacgc

SEQ ID NO: 34205 - DNA, 662 bp, Homo sapiens; identical to SEQ ID NO: 13372
  chr22:25816891-25817553
  hypo

SEQ ID NO: 34206 - DNA, 126 bp, Homo sapiens; identical to SEQ ID NO: 13374
  chr22:26565234-26565360
  hypo

SEQ ID NO: 34207 - DNA, 105 bp, Homo sapiens; identical to SEQ ID NO: 13375
  chr22:26565502-26565607
  hypo

SEQ ID NO: 34208 - DNA, 30 bp, Homo sapiens; identical to SEQ ID NO: 13376
  chr22:26565936-26565966
  hypo

SEQ ID NO: 34209 - DNA, 31 bp, Homo sapiens; identical to SEQ ID NO: 13379
  chr22:26825081-26825112
  hypo

SEQ ID NO: 34210 - DNA, 30 bp, Homo sapiens
  chr22:26848273-26848303
  hypo
atgtctgactataacgtaatagaactgagg

SEQ ID NO: 34211 - DNA, 30 bp, Homo sapiens
  chr22:26857150-26857180
  hypo
tcacttagagataccggtttcccagttggg

SEQ ID NO: 34212 - DNA, 220 bp, Homo sapiens
  chr22:26961222-26961442
  hypo
gcgagggtcaggctcgagctggcaggtggctggagtggggaccaccaggagctggcagacccttggtggccaaggtctctctcctgctggcttttagctgggaggctcctttgaaggatcagtcagccttgcgatgggcctgcctctcctaaaggctcctccctcttctggatccagtcttgttgctcacctgtggactggcagcgggcacctcctctct

SEQ ID NO: 34213 - DNA, 31 bp, Homo sapiens
  chr22:26965254-26965285
  hypo
aggatggtggttaccccggtggggcaagggg

SEQ ID NO: 34214 - DNA, 389 bp, Homo sapiens
  chr22:27007745-27008134
  hypo
gtttttgctatagtagaagcagcatttctccagagcccagaaccatggcttactgccagtgtgatcttatgctaattggatcacctctccgagcctcagtttcctcatccgtaaaatgagattgagaacaattcctccctcttcagtttgatatgaggattggacataatgtatgtgccaggagtacgaacggccgcaggcacagagcagatgctggagaaatggcagctactgttgtgtggtcattttactgtggcagagagtgtgcccctccgccgcccagtactcacggtcccgcggagacaatgatgctgcgcacacggtcgaagccacggtctgccagatttgagcactcccccgagaattctgctcgacggccctggaagttt

SEQ ID NO: 34215 - DNA, 34 bp, Homo sapiens
  chr22:27099775-27099809
  hypo
gatttcggccgggcgcggtggctcacgcctgtaa

SEQ ID NO: 34216 - DNA, 23 bp, Homo sapiens
  chr22:27742254-27742277
  hypo
aacactggtcccataagaatacg

SEQ ID NO: 34217 - DNA, 32 bp, Homo sapiens
  chr22:29076603-29076635
  hypo
ccaccgcgcacggcctgtttctcctaaatata

SEQ ID NO: 34218 - DNA, 30 bp, Homo sapiens; identical to SEQ ID NO: 13389
  chr22:29091825-29091855
  hypo

SEQ ID NO: 34219 - DNA, 30 bp, Homo sapiens
  chr22:29278215-29278245
  hypo
gcctccctcctgagcggaagctctgggtgg

SEQ ID NO: 34220 - DNA, 31 bp, Homo sapiens
  chr22:29353884-29353915
  hypo
taactcttgctgggcgcggtggttcaagcct

SEQ ID NO: 34221 - DNA, 131 bp, Homo sapiens; identical to SEQ ID NO: 13390
  chr22:29468802-29468933
  hypo

SEQ ID NO: 34222 - DNA, 193 bp, Homo sapiens; identical to SEQ ID NO: 13391
  chr22:29469221-29469414
  hypo

SEQ ID NO: 34223 - DNA, 31 bp, Homo sapiens
  chr22:29533686-29533717
  hypo
ggttcttcagggcccacgtgccttgggcttc

SEQ ID NO: 34224 - DNA, 31 bp, Homo sapiens
  chr22:29534522-29534553
  hypo
actcttcttcataactcgtgctctcctcccg

SEQ ID NO: 34225 - DNA, 30 bp, Homo sapiens
  chr22:29542295-29542325
  hypo
cccctcaggctggacggctccggggtgaca

SEQ ID NO: 34226 - DNA, 19 bp, Homo sapiens
  chr22:29587017-29587036
  hypo
tttcctattctgggtattt

SEQ ID NO: 34227 - DNA, 139 bp, Homo sapiens
  chr22:29587095-29587234
  hypo
aatgctgtcaagcatgttgcagcatgtgtcagcgcttcattccttccaaacaatattccattgcgtggatggaccacatgttgtctgttcaattcatctgtcgacgcgcatttgggtcgttgctgctttttagttctta

SEQ ID NO: 34228 - DNA, 13 bp, Homo sapiens
  chr22:29607988-29608001
  hypo
ttttgagacagag

SEQ ID NO: 34229 - DNA, 30 bp, Homo sapiens
  chr22:29678071-29678101
  hypo
cacacaatatcgcaacgcacttttatagcg

SEQ ID NO: 34230 - DNA, 78 bp, Homo sapiens
  chr22:29686433-29686511
  hypo
tacttaaaaagtacccgtactcagtactcagccggcagcataatgaaaagtgggactagacacggtgtccatatggag

SEQ ID NO: 34231 - DNA, 30 bp, Homo sapiens
  chr22:29686984-29687014
  hypo
attgttaaatctattcgtgccctgagatgt

SEQ ID NO: 34232 - DNA, 9 bp, Homo sapiens
  chr22:29701035-29701044
  hypo
ggccgggaa

SEQ ID NO: 34233 - DNA, 219 bp, Homo sapiens; identical to SEQ ID NO: 13393
  chr22:29702368-29702587
  hypo

SEQ ID NO: 34234 - DNA, 311 bp, Homo sapiens; identical to SEQ ID NO: 13394
  chr22:29702940-29703251
  hypo

SEQ ID NO: 34235 - DNA, 151 bp, Homo sapiens
  chr22:29714173-29714324
  hypo
catgaagccctgcaaacgtgccatgttccctaggagactctcacagcagcgttcctagcagcagtgcccatttatcaagggcctgcgatgtgccaagcctgacccacagcctcatgctcactaaggctccctgggacgccatgattgggcc

SEQ ID NO: 34236 - DNA, 160 bp, Homo sapiens
  chr22:29758098-29758258
  hypo
atgggaagacaagctgggtcactgggcgctcccacaggggaagcatgagccaaggtgcggcagccgctctacacacaaccggctttagccatcaggtgcgacagaggctgcacaccggtgacaaattagagaaatccaatctgcacgtgtgttttacttg

SEQ ID NO: 34237 - DNA, 22 bp, Homo sapiens
  chr22:29768138-29768160
  hypo
tggtggctcacgcctgtaatcc

SEQ ID NO: 34238 - DNA, 21 bp, Homo sapiens
  chr22:29773786-29773807
  hypo
gagactctgtctcaaaaaaaa

SEQ ID NO: 34239 - DNA, 160 bp, Homo sapiens
  chr22:29846253-29846413
  hypo
ctttacatacaacatccaaaacgtggaaacaactcaaatacccgtcaactaataaatggacacaatgtggtctatccggacaaacagaggattattcagccttgcgaaggaataaagcactgacacatgtgacaacacggatgagcctagagggcattat

SEQ ID NO: 34240 - DNA, 30 bp, Homo sapiens; identical to SEQ ID NO: 13395
  chr22:29885579-29885609
  hypo

SEQ ID NO: 34241 - DNA, 121 bp, Homo sapiens
  chr22:29977661-29977782
  hypo
cttaacaaggctgtccgggatgtgcagcagagggtcagtgtaaccaccccatgggttcattttgcccgtttcccagacagcggatttatcaagacagaggaattgcaataagagtttaatt

SEQ ID NO: 34242 - DNA, 46 bp, Homo sapiens
  chr22:29977961-29978007
  hypo
tgagtggatctctgggtgggggccacaaaaccggatgatccggttt

SEQ ID NO: 34243 - DNA, 177 bp, Homo sapiens
  chr22:30090680-30090857
  hypo
accctgtgtgacagagcggaggtcttgtgccctctcagcttcttctctgctttcttacagctcaccttgcagagcgccaagtcccgagtggccttctttgaagagctctagcaggtgacccagccaccccaggacctgccacttctcctgctaccgggaccgcgggatggaccagat

SEQ ID NO: 34244 - DNA, 608 bp, Homo sapiens
  chr22:30091071-30091679
  hypo
cttcgtccaaggcaccggtgtgtgtgtgtcttgcactccagagctgacctccaccgcccagcctgggaagtcattgtagggagtgagacactgaagccctgagaagccagtgccatcatccccaccccgcccagggttccggaacattcattcccccaccggtgaggacctggcatgcagcgaagcagcccagcccggcggatcccaggccagcacgcctgccggcttctcatcgtcagggagcccgcccagagctcgtgacgagcaagtgctgggtccccgccaggcaccccgaggcggcgctctggctggcagctggtggggaataggcagggcagctgtggctggggagagactttaggcagaagctgtgatgcaggctgactgccagccgaggggctgggtagtgccgtgcgggagctgatggtacagggcactcgctgtccccctccggccaccctagaccagggtccgagaggcaggcaggagccactcatgtcttccccattgcccgacgcccatagacgctccttcctgtgtggggctggggtactccctggtcgtactgcagtcagcacccgtaacccggctatgaccagggatctgta

SEQ ID NO: 34245 - DNA, 29 bp, Homo sapiens
  chr22:30158335-30158364
  hypo
ccccaggccccggaacggtacgggtccat

SEQ ID NO: 34246 - DNA, 36 bp, Homo sapiens
  chr22:30165505-30165541
  hypo
gcataggattgcttcgagtttgcccaccacaagtgt

SEQ ID NO: 34247 - DNA, 271 bp, Homo sapiens
  chr22:30190729-30191000
  hypo
tctatttgtgctgatgcggaaagaattctcacttattcccaaggaaaacaagcaagctacagaaaaatgcgtacagtatgatcccaaaagcaaactacgctaactctgtttctatggccacacgcctatgcatgacaatgcagacagaaggctaggaagccccacgccaaatgacagtggttactgcttggaagcacctggagttgtctaaatcttttttttttttttttgttacaggctagagtgcagtgatatgatcttgcaacctccg

SEQ ID NO: 34248 - DNA, 19 bp, Homo sapiens
  chr22:30250833-30250852
  hypo
ttctgaggtagactctcgc

SEQ ID NO: 34249 - DNA, 32 bp, Homo sapiens
  chr22:30309741-30309773
  hypo
tatttatttatttatttgagacggagtctcgc

SEQ ID NO: 34250 - DNA, 31 bp, Homo sapiens
  chr22:30363112-30363143
  hypo
tgtaacttttttgcagcgtttatttttatct

SEQ ID NO: 34251 - DNA, 175 bp, Homo sapiens
  chr22:30422073-30422248
  hypo
ggcccactgtaactgccgagctgcctgctgtcacgtgacactgagggatggcttgtttcttccgggtgggaggatggtggtcagagccaggagtatggagatctgagaccgtgagcagggaagaaagccagtgctaacatgcaaccattcctcacgccaccgccacatcagagct

SEQ ID NO: 34252 - DNA, 186 bp, Homo sapiens
  chr22:30624612-30624798
  hypo
tatggaattaagtcaacgaatgccgatgagatgagatgagttttatgttagtaaatgccaaagccctattcacctgtaagggatgactttttaaatatgtgctgtacttcaaggcgccttactccccatgttccccggtgcctaaaattccagcattagtcactcgtttgccgtagggcactgaag

SEQ ID NO: 34253 - DNA, 48 bp, Homo sapiens
  chr22:30656725-30656773
  hypo
aacaccacacagagtgcgtgctgccagaagggacggcacaaccaagtt

SEQ ID NO: 34254 - DNA, 29 bp, Homo sapiens
  chr22:30784249-30784278
  hypo
caagagtgaaactccgtctctaaataaat

SEQ ID NO: 34255 - DNA, 62 bp, Homo sapiens; identical to SEQ ID NO: 13397
  chr22:30792969-30793031
  hypo

SEQ ID NO: 34256 - DNA, 1006 bp, Homo sapiens
  chr22:30951089-30952095
  hypo
caggatggacttggtgcccagcggctgccagggctgcatggcctcgtcctggatggcggcggcgtccacggcgtggcccccgtcgatgcagatggtccgcatgcgctcgttggcatggcgcagggcggccacctcgcgggccatgcgctcccgcccgaaggcctccaccttgcgccagaagctggcgttgaagtggcggtagaggtgggagtccagcatgttccaggcggtggcgcgcccatacagctcccccgagagccgcggcacgggcgagtcgcggcgggcgttgagcttgaagtagagcacgtcctccagctcccagcacagcaggtccttcagcagcaccagcgactcgtcgaagtactcttgaaggagcaccaggtggaagcgacgctccacctccaggatgtgctcctgcacctgcgggctgctggggtccaggctgttgtcatagcccaggtcgaagaagagcaggtttcggaggtagtgggcattgaagccgttggggtcgtagtagcgatccgggtcttgcaggaactcggtcagcttgtcgccggccgagagcttccacgtgaggggcaccaccggcccgaagtagtggaaggaggactcgaacaagcgggcggggtcgcggagcaccgtgatgaagatggcgttggtcggcaccaggccgcgcacctcgtcgtagtggaagcgcatgtggttgcagatgatgttgaagcaggccccgggccgatagtcctgcaccaggctgcgggcgaagaaggtcgggtagtcgaagtcattgcggccgttagggaaggcgaacttgagccggtgcttctggccgaagcggaacaggatgttgagcagggtgctgctggccgtcttgtgcgtcttcaagaacacgatgttgcgccgcggctggcactcccccgccgagccgttggcccggatcactgcctctggctcgagtgcaggtggagagcaggacgctgcggcctccggggtcctgctggggacagag

SEQ ID NO: 34257 - DNA, 181 bp, Homo sapiens
  chr22:30977856-30978037
  hypo
ggtcccaagggttagacgcatcctggaagtcagtgccagacccccataaaagagtgagaaaagggaccctggtccctgctgctccgaagactggctggccctcccctccctgctccggctctcccacttccttcaggtctagctcagactcggacagaccactttccgacctggccagagc

SEQ ID NO: 34258 - DNA, 31 bp, Homo sapiens; identical to SEQ ID NO: 13399
  chr22:31002802-31002833
  hypo

SEQ ID NO: 34259 - DNA, 30 bp, Homo sapiens
  chr22:31062271-31062301
  hypo
tgagggtagtgatgcgaggagtcattttca

SEQ ID NO: 34260 - DNA, 31 bp, Homo sapiens
  chr22:31069874-31069905
  hypo
caggtgtgagccactgcgctgggccttggag

SEQ ID NO: 34261 - DNA, 86 bp, Homo sapiens
  chr22:31169317-31169403
  hypo
cgtgcctggcctcttaaatgcctttttatccaggacaccctcctgactccccagcccaggtcagcttcccacgtagtggaaagagt

SEQ ID NO: 34262 - DNA, 20 bp, Homo sapiens
  chr22:31176967-31176987
  hypo
atttttttttttgagacgga

SEQ ID NO: 34263 - DNA, 431 bp, Homo sapiens; identical to SEQ ID NO: 13402
  chr22:31198698-31199129
  hypo

SEQ ID NO: 34264 - DNA, 31 bp, Homo sapiens
  chr22:31225040-31225071
  hypo
attgacagtgtggaggcgatggggctgggac

SEQ ID NO: 34265 - DNA, 31 bp, Homo sapiens
  chr22:31260513-31260544
  hypo
gagaaaggatatggggcgttggtgggtgctg

SEQ ID NO: 34266 - DNA, 129 bp, Homo sapiens
  chr22:31260801-31260930
  hypo
gacacccatgaggggacgggtccctgctggacatctatgccttaaccctggaggagctcacgggcagtgagggcaaagttagtttccccgaaacaagcaagcaagtggggtggccgcagggcctctgcc

SEQ ID NO: 34267 - DNA, 238 bp, Homo sapiens
  chr22:31264324-31264562
  hypo
gtctactgacctctaccgtgaggcccagagcaacagcttacggagccagtggcccagaccctggcccagcccgtgtggcctccagacgtctgggggccgcagttgggcttctgagtgcagacacgctgtggcctctcaatggccttgccagggtagggactgtcccatccccaggcaatagatgaggaaattgaggctctgagaggtgaagccatgctcaggccgcctggctggccac

SEQ ID NO: 34268 - DNA, 31 bp, Homo sapiens
  chr22:31266611-31266642
  hypo
gaaggtggtgaatgagcgggccaccctcttc

SEQ ID NO: 34269 - DNA, 30 bp, Homo sapiens
  chr22:31301880-31301910
  hypo
cgaggagggcgtagcgccaaccgacagccg

SEQ ID NO: 34270 - DNA, 31 bp, Homo sapiens
  chr22:31365680-31365711
  hypo
cggcttggaggcctggcgccacccttcgggg

SEQ ID NO: 34271 - DNA, 176 bp, Homo sapiens
  chr22:31494699-31494875
  hypo
cggcgctcgagaaacggcaggccgagaagaagaaagagctgatgaaggcgcagagtctgcccaagacctcagcctcccaggcgcgcaaggccatgattgagaagctggagaaggagggcgcggccgggtgagctgcagaagtgggctgggcagtggggggcggggcgtgataggca

SEQ ID NO: 34272 - DNA, 30 bp, Homo sapiens
  chr22:31495159-31495189
  hypo
tacgaggtgagccccgggaggccagggggc

SEQ ID NO: 34273 - DNA, 31 bp, Homo sapiens
  chr22:31532734-31532765
  hypo
agcatgttggtaacctcgggtgggctgtgga

SEQ ID NO: 34274 - DNA, 58 bp, Homo sapiens
  chr22:31644732-31644790
  hypo
ttcacctccagagacctgtttcggtgagttggtctccgagttcccctctccatctctc

SEQ ID NO: 34275 - DNA, 30 bp, Homo sapiens
  chr22:31674515-31674545
  hypo
ttcctgtggattggcggaatgtttagaagc

SEQ ID NO: 34276 - DNA, 22 bp, Homo sapiens
  chr22:31701868-31701890
  hypo
gccactgcgcctggactctttt

SEQ ID NO: 34277 - DNA, 18 bp, Homo sapiens
  chr22:31925244-31925262
  hypo
tttatcaggtcaggtacg

SEQ ID NO: 34278 - DNA, 144 bp, Homo sapiens
  chr22:31942753-31942897
  hypo
tactttttcatgagacggcaagaatatgtgatttgggaagagatgttagctccaacatcatcatatatatatatgattttttttttgccgtagattttactatgagcagcgattactacggaaggtcttcgaagaatggaaaga

SEQ ID NO: 34279 - DNA, 30 bp, Homo sapiens
  chr22:31998238-31998268
  hypo
agatgtttcagcatcgagaaaaccgcctgg

SEQ ID NO: 34280 - DNA, 30 bp, Homo sapiens
  chr22:32014407-32014437
  hypo
gttcgcaccaggaacgcaggtgctgggctg

SEQ ID NO: 34281 - DNA, 43 bp, Homo sapiens
  chr22:32025195-32025238
  hypo
ggggcctgcaagattgttgtgcgtgaggggtaggtgcatgtag

SEQ ID NO: 34282 - DNA, 30 bp, Homo sapiens
  chr22:32055432-32055462
  hypo
atggaagtcatgcacgagaagctacttcct

SEQ ID NO: 34283 - DNA, 29 bp, Homo sapiens
  chr22:32059271-32059300
  hypo
gagccaccgcacctggcctaaacattctt

SEQ ID NO: 34284 - DNA, 30 bp, Homo sapiens
  chr22:32078073-32078103
  hypo
gcctggagacggagcgacggccgtgcattc

SEQ ID NO: 34285 - DNA, 30 bp, Homo sapiens
  chr22:32152143-32152173
  hypo
caggcaagagccaccgcgctggcatgagtc

SEQ ID NO: 34286 - DNA, 42 bp, Homo sapiens
  chr22:32356771-32356813
  hypo
aagagcaaaaactccgtccccgccccccccccccccccagaa

SEQ ID NO: 34287 - DNA, 419 bp, Homo sapiens; identical to SEQ ID NO: 13409
  chr22:32571880-32572299
  hypo

SEQ ID NO: 34288 - DNA, 161 bp, Homo sapiens
  chr22:32804845-32805006
  hypo
atgtctgagtacatgcgcggcaagtgtaggcactggacagaatgcactgtatgcaatatttactgtgctttactctttaccaaacactttcacgttaccttaagcacacagaaaacttcctatcaaagactacgagctgctcccatcggaaaatatacctt

SEQ ID NO: 34289 - DNA, 31 bp, Homo sapiens
  chr22:32914203-32914234
  hypo
tgctgctgtggagatccggactgggggctca

SEQ ID NO: 34290 - DNA, 30 bp, Homo sapiens
  chr22:33195673-33195703
  hypo
ctcaaattccaccacgtatgccctcattca

SEQ ID NO: 34291 - DNA, 203 bp, Homo sapiens; identical to SEQ ID NO: 13412
  chr22:33453871-33454074
  hypo

SEQ ID NO: 34292 - DNA, 65 bp, Homo sapiens; identical to SEQ ID NO: 13413
  chr22:33454193-33454258
  hypo

SEQ ID NO: 34293 - DNA, 16 bp, Homo sapiens
  chr22:33454345-33454361
  hypo
gggtcccgggagctca

SEQ ID NO: 34294 - DNA, 68 bp, Homo sapiens; identical to SEQ ID NO: 13415
  chr22:34316493-34316561
  hypo

SEQ ID NO: 34295 - DNA, 31 bp, Homo sapiens
  chr22:35730461-35730492
  hypo
ctggtcccctgcagttcgggtggctctcggg

SEQ ID NO: 34296 - DNA, 192 bp, Homo sapiens
  chr22:35742194-35742386
  hypo
aagcacccaggaggaggagggcgggtgccagtcatggggaccccaagccctgccaccctcccagggagcagaaggggcagggccagactcagcttctccgtccagggctcctaccgcagcatctgccaccccgtctctgggcaccaaggcccacatgggcacttcaggcccagaagccgccttctgcaggtg

SEQ ID NO: 34297 - DNA, 31 bp, Homo sapiens; identical to SEQ ID NO: 13417
  chr22:35746850-35746881
  hypo

SEQ ID NO: 34298 - DNA, 58 bp, Homo sapiens
  chr22:35758434-35758492
  hypo
gtgggaccacaacccacgtctcctgccctgccaatttccactgcggggaacagaaggg

SEQ ID NO: 34299 - DNA, 153 bp, Homo sapiens; identical to SEQ ID NO: 13418
  chr22:35768081-35768234
  hypo

SEQ ID NO: 34300 - DNA, 91 bp, Homo sapiens; identical to SEQ ID NO: 13419
  chr22:35777143-35777234
  hypo

SEQ ID NO: 34301 - DNA, 30 bp, Homo sapiens
  chr22:35817356-35817386
  hypo
aagctgcagcccttcgccacagaggcagat

SEQ ID NO: 34302 - DNA, 352 bp, Homo sapiens
  chr22:35848318-35848670
  hypo
gcagatgtcacaccctggaaccgtgtggtgtttctgttgtctgcctacagtaggacgtaggctccacgccacagggactctggcttcctggtcggccactttgtgtctggagcatggagccgggcaggtgcccggcagatgtgtgttgaataaacaggtgggtggccgcctcacgttcctccacggtaaagtgacgctaaggatcatagtcacctctgggctacatgaaataccatgcggaaacgtctggcagcgggcagggcagggcagggcacttcactttctgtactagctgtaaagtgagaaagaagcccttggcactggaagcctggcttttcgttgactctgcagc

SEQ ID NO: 34303 - DNA, 30 bp, Homo sapiens
  chr22:35947980-35948010
  hypo
gcccgccgccccagcgtcaacagtgacctc

SEQ ID NO: 34304 - DNA, 30 bp, Homo sapiens
  chr22:35949996-35950026
  hypo
ccaccatggatctccgtgtacactatcaat

SEQ ID NO: 34305 - DNA, 30 bp, Homo sapiens
  chr22:36246100-36246130
  hypo
ccaggctttaagtgcgtcagagaatactcc

SEQ ID NO: 34306 - DNA, 40 bp, Homo sapiens; identical to SEQ ID NO: 13421
  chr22:36424354-36424394
  hypo

SEQ ID NO: 34307 - DNA, 40 bp, Homo sapiens; identical to SEQ ID NO: 13422
  chr22:36424418-36424458
  hypo

SEQ ID NO: 34308 - DNA, 52 bp, Homo sapiens; identical to SEQ ID NO: 13423
  chr22:36425194-36425246
  hypo

SEQ ID NO: 34309 - DNA, 31 bp, Homo sapiens; identical to SEQ ID NO: 13424
  chr22:36462114-36462145
  hypo

SEQ ID NO: 34310 - DNA, 30 bp, Homo sapiens
  chr22:36537258-36537288
  hypo
ggcatggattcagacgctgatagatctgag

SEQ ID NO: 34311 - DNA, 65 bp, Homo sapiens
  chr22:36677198-36677263
  hypo
agctagctcagcctacgcctcagccaatctggttcccgacgatgcagagccggcattggctgcag

SEQ ID NO: 34312 - DNA, 31 bp, Homo sapiens
  chr22:36688294-36688325
  hypo
ggagtaagcagatgcccgagatggcacctgc

SEQ ID NO: 34313 - DNA, 30 bp, Homo sapiens
  chr22:36691001-36691031
  hypo
cgccagctcctccacggcctgtgagtgctt

SEQ ID NO: 34314 - DNA, 39 bp, Homo sapiens
  chr22:36692852-36692891
  hypo
gccacctggcctcaggcgggcaggcggggtcctcacctg

SEQ ID NO: 34315 - DNA, 130 bp, Homo sapiens
  chr22:36695462-36695592
  hypo
cctgccaggtgggccacggcccctccccctcttcagccccgcggtgccccgggctgctctccttgctttctgttctgtgtggcccctgcaacacccctgcccagcggccacagctcggcacaagcacctg

SEQ ID NO: 34316 - DNA, 42 bp, Homo sapiens
  chr22:36697028-36697070
  hypo
gagctcctcagcctcggcacacagctcggtttctgcctggag

SEQ ID NO: 34317 - DNA, 30 bp, Homo sapiens
  chr22:36713228-36713258
  hypo
agtaactgctgaagccgcctacgtgatggg

SEQ ID NO: 34318 - DNA, 239 bp, Homo sapiens
  chr22:36713505-36713744
  hypo
gtggcaggaataatacgcgatgtcttttgaaaacaacagtcttgtctttcatgcaatgcttctgcacagaaacagccgtgagctgtcagtgtacagtgaatgggagaaagactaacaaaatgagcttccaagtatttttgagagatgggtttggcaccctaaaaacccccatggccagcaccataaaagaaactagaaaccccggagagaggcagaaagcggtccgcactgggcgggac

SEQ ID NO: 34319 - DNA, 204 bp, Homo sapiens
  chr22:36732741-36732945
  hypo
ttactgactgacacacaccaccgcctttctgcaagatccgacctcgccacacctgacaaaactcccaggacacctgacattggctcagtcgtgctggcgcaggtgtaggcaccaaatgtcttgttttgtagctagggccacaaatctctgtctataaacatgcctcgtctctccacctggaccgccagggcatccagtaacagg

SEQ ID NO: 34320 - DNA, 30 bp, Homo sapiens
  chr22:36791015-36791045
  hypo
ggcgtaaagccaccacgcccggctgtattg

SEQ ID NO: 34321 - DNA, 876 bp, Homo sapiens; identical to SEQ ID NO: 13425
  chr22:36901806-36902682
  hypo

SEQ ID NO: 34322 - DNA, 27 bp, Homo sapiens
  chr22:36906150-36906177
  hypo
cttacatagtttacatagcctcggctg

SEQ ID NO: 34323 - DNA, 31 bp, Homo sapiens
  chr22:37007645-37007676
  hypo
tgctgtccaagcaccccgaaatgccccttct

SEQ ID NO: 34324 - DNA, 30 bp, Homo sapiens
  chr22:37168780-37168810
  hypo
acacttgaactgaacgtcaggtccttcaat

SEQ ID NO: 34325 - DNA, 24 bp, Homo sapiens
  chr22:37285259-37285283
  hypo
atgtataagtactattcatgccgg

SEQ ID NO: 34326 - DNA, 24 bp, Homo sapiens
  chr22:37285582-37285606
  hypo
tccgcctcaaaaaaaaaaaaatta

SEQ ID NO: 34327 - DNA, 323 bp, Homo sapiens; identical to SEQ ID NO: 13430
  chr22:37414959-37415282
  hypo

SEQ ID NO: 34328 - DNA, 31 bp, Homo sapiens
  chr22:37733865-37733896
  hypo
cagcaacttcctactacgctgtgatctcatt

SEQ ID NO: 34329 - DNA, 31 bp, Homo sapiens
  chr22:37790763-37790794
  hypo
agaactcttcactcctcgcctgggactgagc

SEQ ID NO: 34330 - DNA, 192 bp, Homo sapiens; identical to SEQ ID NO: 13434
  chr22:37915114-37915306
  hypo

SEQ ID NO: 34331 - DNA, 421 bp, Homo sapiens; identical to SEQ ID NO: 13435
  chr22:37956781-37957202
  hypo

SEQ ID NO: 34332 - DNA, 31 bp, Homo sapiens
  chr22:38002908-38002939
  hypo
ctataagtatacactacgttacagcttttgt

SEQ ID NO: 34333 - DNA, 30 bp, Homo sapiens
  chr22:38062913-38062943
  hypo
cttaataaagtgcgcgtgggagtgttcacc

SEQ ID NO: 34334 - DNA, 31 bp, Homo sapiens
  chr22:38146719-38146750
  hypo
cagctgtcccaagccccggttggtccacttc

SEQ ID NO: 34335 - DNA, 45 bp, Homo sapiens
  chr22:38149553-38149598
  hypo
gggattataggcgcgagctaccgcgcccagctatagggacttctt

SEQ ID NO: 34336 - DNA, 248 bp, Homo sapiens
  chr22:38209392-38209640
  hypo
tgatttgctggagtcccggtcaagggagaagcccagggtggttaaatgatggctctacgctcactgcctccctccaggccctgctgaccccagaggacgcagtcctgtcggacgagctgaaccatgcctccatcatcgacggcatccggctgtgcaaggcccacaagtaccgctatcgccacctggacatggccgacctagaagccaagctgcaggaggcccaggtggggcgacgcctgggtccaccc

SEQ ID NO: 34337 - DNA, 30 bp, Homo sapiens
  chr22:38261623-38261653
  hypo
tacaaagtgctgaaccgttacgagtggtga

SEQ ID NO: 34338 - DNA, 30 bp, Homo sapiens
  chr22:38339957-38339987
  hypo
tgcttctctgcggacggggctgtgagtctc

SEQ ID NO: 34339 - DNA, 267 bp, Homo sapiens
  chr22:38363620-38363887
  hypo
ccctgccacagggcccgaaagatccccatcatcattcgccgttacctgccagatgggagctatgaagactggggggtggacgagctcatcatcaccgactgagctggagtcatcttcctgcccttgccccatgcccaattttcattctcactttatatgtgtaaataataaaatattcaactttccaacccccttcccctctgcttatctgcaatgtcaccacctgttgcttccccgttaccgccatgctgcgtggagcatgcacct

SEQ ID NO: 34340 - DNA, 30 bp, Homo sapiens
  chr22:38364188-38364218
  hypo
ctcttatcgtgggctcggatcccctttcag

SEQ ID NO: 34341 - DNA, 68 bp, Homo sapiens
  chr22:38364988-38365056
  hypo
tcagctctgaaatgccgcctttgtgctggcatccaggcagccgccccagagtgcgggggtcactttct

SEQ ID NO: 34342 - DNA, 881 bp, Homo sapiens
  chr22:38379167-38380048
  hypo
aggccgctggagttccgagttccagggtccttgtgatggaagggcgggcgcggcccccacacctggtcttccagccctatccaaggaggactgccagacagtcccgctctgaggtgcaggaggccgggccgcctcggctaccctgaatccacccgaagctagagggcccgagcccggggggcggtcgggtgctcacctccagagcttgcccagcgtcttgctgagctcagcgttgtgcaggtgcgggtactggtccgcgagcttcctgcgcgctgcctgagcccacaccatgaaggcgttcatgggccgcttgacgtgcggcttgcttttgctggcgccgttgacgcgcacgggcatgggcaccagcgtccagtcgtagccgctgagcacctggctgacggcctcgcggatgcacacggggaacttgtcatcgtccgcctcgccgtcctgctgctccttcttgaccttgcccagctcgcctggccccgggctggctcgcaggcccgatccgccgccgccgccgtcgggccctagcgagggcgcgctccccggggacaggcagcggggctcctccgagcccacggggctcagctccacctccgataggtcctgctcctccgccatgtcgcccccggccgccgccgccgccgcctcggccgcctcccccgggccagccgccggggtcctcgcaaagagtccaacgcccacctggatggaaggagggcgcgatggagcggccgcgcgcgcagccccgagggcggcccgagacaggacgtgggcacagccccgaggtggcggcccttcctgctccagctaaacccatctggcccctggggcccacgcacatgccagactctaggtgggtgcgtcccgcctctgtg

SEQ ID NO: 34343 - DNA, 237 bp, Homo sapiens
  chr22:38380335-38380572
  hypo
gcgcactcacctcctcggacctctcctccagtctggggctcgtccttaggaagtggaaaaccgtgtcccaaggtgtgcggtccagctcggggctgggaggtgacgctggtgggctgggagggaggggcggggggccctgagcctcaggccacggcctcgttaggacggagcctgaatccttaccaccaaccaccctggccggacagcccgagactgactgagcgactgagcctgagc

SEQ ID NO: 34344 - DNA, 240 bp, Homo sapiens
  chr22:38381991-38382231
  hypo
cctcgacgccacccccggcgctgccaaccctcctccccccgcctcccttctcttccctgtgcccagactcttgttcggggccttgaaacagtgagctgtctttgttcgaaatacaggtgaacggcaatcatgtgattaacacacacacacataaaaagctttttaacagcgcccgctcggcctcagaaccgcccggagaggagccgccctggatggacagagggacgagggacgagcatc

SEQ ID NO: 34345 - DNA, 725 bp, Homo sapiens
  chr22:38434364-38435089
  hypo
gcttgggggaaaggaccaggccgggcccaggcaggtggaagccatggctctggccgggtcacagggcggctggggtttgacctggcggccatgatgggctctggacccaggagccacccgggcacaggatgggacgggttgagagattggtcgtccaggcgttgagtgtgccctcgctcctccccaccttccgccgtggccttgagccccttgcgcccgcgcccatggggttaaatctctccctgtctctctctgctccaagttgttttccaagtgaggcagagaatggttctcttgttaccaacatggcttctgggcattgggtaatgcgctccctcttctcccgcagcgccacaaagggaccttttgttcccctccctgcccctctcgctggctcttcccggccccccacccacccaaactccctcctccccccgccggcgcccgcaccccggggctgcgcgctgaccgtggcggccgcggcgccctccctctcccagcgcctgcactggcggccgccatcttgcgagcggccctcagggcggcctgggctttcccagggttctcggggccggggcagtcgtagggggcggctggggctccacaggacgttcgtgacccaccttgcgccccccagggagtggcaggaccctcccgtccccagcctccgcgccaggcctcgtccctgcatgggacaagaggcagccctccgccatttcccgcgg

SEQ ID NO: 34346 - DNA, 30 bp, Homo sapiens
  chr22:38470383-38470413
  hypo
aggaggcgcgcgcccgcttctcccagatgc

SEQ ID NO: 34347 - DNA, 30 bp, Homo sapiens
  chr22:38506561-38506591
  hypo
gctgggagctggtggcgatggcacagccgg

SEQ ID NO: 34348 - DNA, 494 bp, Homo sapiens
  chr22:38506938-38507432
  hypo
tgggcgggcgctgcccgatgccctcccccaggactctctctgccagacccagcagcagcagcccctggaggggaacgccgctttacttctcactgtcctcaggcctgcggctcacagtggggccacgccctctgagcttggctcccacagccgctctggcccgcccagctcctccacttgccggagcaggagcagcacaaacgctggagttgcccagccctgggcagacctcggccctgcacacgcgctgcctgtccacgcggagtccccggcctctctgggtgacaaatggggctctccctggtcctccaagatgaagttgaagattgtggccctccttgggcctgccgggggtatgtgggcctggcagctgcctctgcataccctaagggccggtttaggggaggcctagaggaaagaggaggtgtccctgcccagggatcctggaaaacagagtgtccgggtacaaaggaaaagtccggtcaaggccaagg

SEQ ID NO: 34349 - DNA, 30 bp, Homo sapiens
  chr22:38508132-38508162
  hypo
gaggtcagctggggccggtgagaggctggg

SEQ ID NO: 34350 - DNA, 56 bp, Homo sapiens
  chr22:38520280-38520336
  hypo
aggagccactgcgcctactctctgtgcatatttttgagtgacggagggagtgtagc

SEQ ID NO: 34351 - DNA, 30 bp, Homo sapiens
  chr22:38520659-38520689
  hypo
ttttactctctcctgcgctgacctggaagc

SEQ ID NO: 34352 - DNA, 31 bp, Homo sapiens
  chr22:38525514-38525545
  hypo
tgtccacttctgctccgaacacgatgagggc

SEQ ID NO: 34353 - DNA, 30 bp, Homo sapiens
  chr22:38529068-38529098
  hypo
cgcaccccgggacacgtgggcactgccact

SEQ ID NO: 34354 - DNA, 130 bp, Homo sapiens; identical to SEQ ID NO: 13444
  chr22:38578022-38578152
  hypo

SEQ ID NO: 34355 - DNA, 38 bp, Homo sapiens
  chr22:38578431-38578469
  hypo
ttttttttttgagacaagtctcgctctgtcgaccatgc

SEQ ID NO: 34356 - DNA, 37 bp, Homo sapiens
  chr22:38578708-38578745
  hypo
caccacgcccggctccgaaatttttaacataagtata

SEQ ID NO: 34357 - DNA, 30 bp, Homo sapiens
  chr22:38580938-38580968
  hypo
tacatcagggagggcgtctgccctctaaga

SEQ ID NO: 34358 - DNA, 31 bp, Homo sapiens
  chr22:38633562-38633593
  hypo
tctgtatttcagataacgggtggatgagcct

SEQ ID NO: 34359 - DNA, 475 bp, Homo sapiens
  chr22:38694476-38694951
  hypo
cagggcagcagggggcgccgccagcaccacccatgccctgctgcgggcacccaggagggaccccaggtgaagccagatcctccttgttccgacgggagacagcgccctgcctggccctgctgcccatggtggcacaagctgtcagcacggatgaggctggagggctctgggaccccagtgaggtcaaccacactgtccagctcgtacctcccgtctgtcgggagcccctcccgccaccagctcactctggccctctgagtcagggccttccccatccagtcccccaagcccgccttggcctccaggtgactcacgaatttcagcatgttccagtcaaagacgtagtcataggagaagccctgccggtggaagaggttgcggaagagctgacgtaggtaagagtagtcgggcttgtcgtcaaaccgcagggagcggcagaagttgaggtatgttgagaattcggctggagggtgtt

SEQ ID NO: 34360 - DNA, 30 bp, Homo sapiens
  chr22:38695214-38695244
  hypo
tgcccacagctcttccgctgccctcgccaa

SEQ ID NO: 34361 - DNA, 30 bp, Homo sapiens
  chr22:38812938-38812968
  hypo
ctgcagtggatccacgtgcacgatgccatg

SEQ ID NO: 34362 - DNA, 160 bp, Homo sapiens
  chr22:38874141-38874301
  hypo
aaaaaaagactgcttcgaggaaataactccaaataggagtacaaataggagtgctctaggccagtgtggtcctgctccggcagtatcagcgtcacttgggaaacttgttagaaatacaaacttttaaggctgggctcggtggctcatgcctataatccca

SEQ ID NO: 34363 - DNA, 31 bp, Homo sapiens
  chr22:38894491-38894522
  hypo
ggccactaagagccaacggaaatccctggca

SEQ ID NO: 34364 - DNA, 50 bp, Homo sapiens
  chr22:38995589-38995639
  hypo
ggaactaagatgagcacgattctgaccctgaggctcgcaccactggccac

SEQ ID NO: 34365 - DNA, 31 bp, Homo sapiens
  chr22:39105317-39105348
  hypo
tagagcacattttccccgctttttgaacttt

SEQ ID NO: 34366 - DNA, 230 bp, Homo sapiens
  chr22:39132168-39132398
  hypo
ttgtgctcctagaagtcagagcgccgagcaagcgtgtgggggaagcggcggggtgctgttcacccactcccagatggctggcagcaggcaccagtaagcagggctagtgggcgggctccccatgcactctgaagcggtagatgcaggtgtactcggggtggccccagttagtcaggatccgcagctccaccacctggtacgtggccatcgtaggggcctgggtagagaag

SEQ ID NO: 34367 - DNA, 30 bp, Homo sapiens; identical to SEQ ID NO: 13450
  chr22:39239320-39239350
  hypo

SEQ ID NO: 34368 - DNA, 30 bp, Homo sapiens
  chr22:39529108-39529138
  hypo
aatcaccccacgttcgcctggccagggttt

SEQ ID NO: 34369 - DNA, 101 bp, Homo sapiens
  chr22:39530912-39531013
  hypo
cccagcccagagagtgcgccccgggcaaccccagggtcggccagctcagccctgcctctgggccccacagagcactcgcgtcccagcgtttactcctttga

SEQ ID NO: 34370 - DNA, 30 bp, Homo sapiens
  chr22:39538288-39538318
  hypo
ttgctgttcctccccgccctccaaacccca

SEQ ID NO: 34371 - DNA, 40 bp, Homo sapiens
  chr22:39571320-39571360
  hypo
cactttgggctggtttcgggggttgcgagggtggcagcac

SEQ ID NO: 34372 - DNA, 31 bp, Homo sapiens; identical to SEQ ID NO: 13453
  chr22:39638609-39638640
  hypo

SEQ ID NO: 34373 - DNA, 174 bp, Homo sapiens
  chr22:39690688-39690862
  hypo
gaggaagcaggcctggcgctgagtcacaggagcctggggcagggtaacccccacctgaagtcactgtctccccagcagtgacatcattagcaagccagaatgcgcagggcatacagctggaggaccaggcaagctgaggcgggggccaagtgggtagttcggggccaaccccca

SEQ ID NO: 34374 - DNA, 155 bp, Homo sapiens
  chr22:39755184-39755339
  hypo
tgctgggtgtagaggtcgacagggtccttctggttcctgaggccacttacaggacattgtcccccagctttgaatctcacaccagcactgggtcgcccactccccttcatgatgagccagctcgaggccactttgcccgttcttcaaagatgccc

SEQ ID NO: 34375 - DNA, 35 bp, Homo sapiens
  chr22:39756599-39756634
  hypo
gtggacaccctcaccccgctcgtcctctctttaat

SEQ ID NO: 34376 - DNA, 30 bp, Homo sapiens
  chr22:39770419-39770449
  hypo
gcctgcagctatggcgtggccgtgggcgtg

SEQ ID NO: 34377 - DNA, 123 bp, Homo sapiens
  chr22:39773594-39773717
  hypo
cctggcagagcctgaccgcagccctggccgtgcggagattcaaggacctaagcttccaggaggagtacagcacactgttccctgcctcggcacagccgtaggcctccccggcttgcagaggcc

SEQ ID NO: 34378 - DNA, 30 bp, Homo sapiens
  chr22:39794803-39794833
  hypo
cattttaggttgggcggggtggctcacact

SEQ ID NO: 34379 - DNA, 31 bp, Homo sapiens
  chr22:39872974-39873005
  hypo
catgttctgcagccaccgcctctacctgtct

SEQ ID NO: 34380 - DNA, 54 bp, Homo sapiens
  chr22:39877308-39877362
  hypo
tcactggacataatgacgcactcgctcctgcccgttacccgctttgtctttctc

SEQ ID NO: 34381 - DNA, 30 bp, Homo sapiens
  chr22:39895718-39895748
  hypo
ctgttctgggtaagcgagtgctcccctctc

SEQ ID NO: 34382 - DNA, 42 bp, Homo sapiens
  chr22:39907958-39908000
  hypo
aacagggacatgaagacgggcctgagccggtccttgcagacc

SEQ ID NO: 34383 - DNA, 221 bp, Homo sapiens
  chr22:40026478-40026699
  hypo
tgctgagtggctccattcactcgcccaccgctcctttactcattcaagctgtcggccttcaagggactgctttgtgcccggtcctggtctggatgggagaacacagagcagccgccttggccttgggcgcagagcatgcctggtttccagcggggaggaggaggcagagccgggaactggcacaggctatgatggagggcgggtgggcagcagtaactcat

SEQ ID NO: 34384 - DNA, 30 bp, Homo sapiens
  chr22:40042799-40042829
  hypo
ccctgcagagccggcgccaggccctgggcc

SEQ ID NO: 34385 - DNA, 428 bp, Homo sapiens
  chr22:40045202-40045630
  hypo
gatggccggtcagcacggatgcgcgccctgcaccgtgctgggcccatcatgtgccttaagggagagaatcctcctacagcctgcatggtgggcgttcctgccccaacttctacaacaggggcagacaaagctcagagagctgcagccgcttccccaggcacccctgaccgcctttccaggctgggtcggctggttccaggcagacctgtgggcctgggagccaagcgcactcagggatgtgtcccagggtggattgggcctggtgtgggcaacgactctatgcccctctcatttgcttttcagagctgtgcccgcaacatagccccctggatgcgacgccccacaccctggtgcagcccatccccgccacgctggcttccgatcccgccagctgcccttgctgccagcatgaggacggccggcggccc

SEQ ID NO: 34386 - DNA, 208 bp, Homo sapiens
  chr22:40045721-40045929
  hypo
ggagcagcgaggacggagcctcctcagaactggggaaggaggaggaggaggaggagcaggcggatggggcggtctggctgtgcggggatgtgtggcgggagacgcgagccaagctgcgcggcatcgtggacagcaagtacttcaaccggggcatcatgatggccatcctggtcaacaccgtcagcatgggcatcgagcaccacgagca

SEQ ID NO: 34387 - DNA, 30 bp, Homo sapiens
  chr22:40048319-40048349
  hypo
agcagcaggcttcacgtggcttcctgacca

SEQ ID NO: 34388 - DNA, 462 bp, Homo sapiens
  chr22:40075056-40075518
  hypo
cagcagcctctgggatgtctccgtcctcatcctcaccgccctccctgccacgcaggacacgctgcgggactgcacccacgacgagcgcagctgcctgagcagcctgcagtttgtgtcgccgctgtacttcgtgagcttcgtgctcaccgcgcagttcgtgctcatcaacgtggtggtggctgtgctcatgaagcacctggacgacagcaacaaggaggcgcaggaggacgccgagatggatgccgagctcgagctggagatggcccatggcctgggccctggcccgaggctgcctaccggctccccgggcgcccctggccgagggccgggaggggcgggcggcgggggcgacaccgagggcggcttgtgccggcgctgctactcgcctgcccaggtgggcaggggctggagaggtgtgagggtcgccagagggggggcaccgcagggccagatgggcagcag

SEQ ID NO: 34389 - DNA, 314 bp, Homo sapiens
  chr22:40089235-40089549
  hypo
gcaaaaccaaaacccttggtacgcattaaacacgaactcccattctccagtccccggcagccaccgtgccactgtctccatgagtgtgaccatgccaggaaccacgagtgtgagtggagtcacacggtatttgtccttttatgactgcttatttcacttagcacgaggttctcgaggttcttgaggttctcgaggttcacgcatgctgtggcgcgtgtcggacttttctcccttcttcaggtgcagtgggattcccgtcacgtgtctacaccgcactgggtttggatccacccgttgagaggcccttggttgct

SEQ ID NO: 34390 - DNA, 40 bp, Homo sapiens
  chr22:40262907-40262947
  hypo
catacttttttttttttgagacggagtctcgctctgttgc

SEQ ID NO: 34391 - DNA, 31 bp, Homo sapiens; identical to SEQ ID NO: 13460
  chr22:40280490-40280521
  hypo

SEQ ID NO: 34392 - DNA, 30 bp, Homo sapiens
  chr22:40310793-40310823
  hypo
aggtattgtgggatgcgacagaacgtacgt

SEQ ID NO: 34393 - DNA, 24 bp, Homo sapiens
  chr22:40444536-40444560
  hypo
tccgtctcaaaaaaaaaaaaaaaa

SEQ ID NO: 34394 - DNA, 18 bp, Homo sapiens
  chr22:40487229-40487247
  hypo
gcccgcctcagcctccca

SEQ ID NO: 34395 - DNA, 31 bp, Homo sapiens
  chr22:40543468-40543499
  hypo
gatagttctagaggccgcgaataacaagatc

SEQ ID NO: 34396 - DNA, 28 bp, Homo sapiens
  chr22:40593359-40593387
  hypo
ctcactgcaacctccacctcccgggttc

SEQ ID NO: 34397 - DNA, 40 bp, Homo sapiens
  chr22:40621437-40621477
  hypo
aaaacatatttgaggccgggtgcagtggctcacgccagta

SEQ ID NO: 34398 - DNA, 41 bp, Homo sapiens
  chr22:40624791-40624832
  hypo
tgctgggattacagacatgagccaccgcgcccagccccagg

SEQ ID NO: 34399 - DNA, 31 bp, Homo sapiens
  chr22:40655975-40656006
  hypo
ttctggcagcatgcagcgagggaggtacaga

SEQ ID NO: 34400 - DNA, 31 bp, Homo sapiens
  chr22:40707968-40707999
  hypo
accaataaaaaaattccgagcccttatgtat

SEQ ID NO: 34401 - DNA, 30 bp, Homo sapiens
  chr22:40719898-40719928
  hypo
gtgttcatgtgcattcgcgtgcatccttct

SEQ ID NO: 34402 - DNA, 30 bp, Homo sapiens
  chr22:40720350-40720380
  hypo
tcatgcaggccttttcgttagtttgaaatg

SEQ ID NO: 34403 - DNA, 155 bp, Homo sapiens
  chr22:40815003-40815158
  hypo
ccatctcaccaaaggtgtccccgggggtggagttttcatcgcccgtgctgagcagtgagcgctccgagggggtgggagacacggggggcgtggagcccgtgctgccaaacttcaccaccccactgctggccaccgtggccaccaccacctcagct

SEQ ID NO: 34404 - DNA, 35 bp, Homo sapiens
  chr22:40912132-40912167
  hypo
gtttctgggctaggcacggtggctcatgcctgtaa

SEQ ID NO: 34405 - DNA, 97 bp, Homo sapiens
  chr22:41156759-41156856
  hypo
accatgccactgtactcagcccggggaaataaagcaagacgcagtctcctaaaaacaaaaaaaaaaaagagatttggccggtcgcggtggcttacac

SEQ ID NO: 34406 - DNA, 30 bp, Homo sapiens
  chr22:41185268-41185298
  hypo
catgggctgcagcccggtccctgcgtccta

SEQ ID NO: 34407 - DNA, 26 bp, Homo sapiens
  chr22:41267748-41267774
  hypo
attactggggccaggcgcggtggctc

SEQ ID NO: 34408 - DNA, 30 bp, Homo sapiens
  chr22:41345963-41345993
  hypo
caaatgcacctgtacgacatctaagagtgc

SEQ ID NO: 34409 - DNA, 31 bp, Homo sapiens
  chr22:41464151-41464182
  hypo
tgctgagaagactgagcgacggaatcacacc

SEQ ID NO: 34410 - DNA, 127 bp, Homo sapiens
  chr22:41486562-41486689
  hypo
agtagatactggtttcggggtttctttcggggtcacttacacccctgccacctcctccagtaccaatttacccatggccaaacacagggtgatgtgtaggaacctgaaagcacgtctccgacctcag

SEQ ID NO: 34411 - DNA, 205 bp, Homo sapiens
  chr22:41536177-41536382
  hypo
gctttaaaagacagacggatggaaaacctagttgcatatgctcggaaagttgaaggggacatgtatgaatctgcaaacaatcgagtgagtgtctggtttttttctattaatagccaagattgaacctgttgtggttattttattcctctttagcatgtacaagtagtacatatgcttcagacgggggacacgctgtagctatccc

SEQ ID NO: 34412 - DNA, 30 bp, Homo sapiens
  chr22:41536742-41536772
  hypo
agtgattcgggattgcgctgctggtgacag

SEQ ID NO: 34413 - DNA, 552 bp, Homo sapiens
  chr22:41634430-41634982
  hypo
gtggtgtaggctgagccgtctcagggcgggcaggccagccagggcctcgggggccagcacgctgagcgcgttgtgcgacagccgcagccagcggacgcgcagtagcccctggaaggccatggcgggcaggtaaaccagggcgttgtgggccaggtttagcgtggccagcgcacccagtgccccgaacgtccccggccgcagctcctccagtgcgttcccctccagctccagccgccgcaacgagcccagcccgtccagcgcctcctggggcagctcacgcaggtggttggaggccaggttgagcaggagcaggcggcccaggccacggaaggcgccctcggccaccagctccacctcgcagtggcgcaggtccaggtgtgtgaggtgaggcacgccctggaaggcggctgcggggatcaccttcagcaaattgccctgcaggtccagccgctgggtcagctggggacagcgaggagaaagtggggctgagccaggcagggaccccgcctttgcaagtgctgcttcttccccggaacactcttttctcctgtc

SEQ ID NO: 34414 - DNA, 50 bp, Homo sapiens
  chr22:41639281-41639331
  hypo
ctaggatttacaggtgtgagcccgcacccggcttcatctattttaatttt

SEQ ID NO: 34415 - DNA, 145 bp, Homo sapiens
  chr22:41639557-41639702
  hypo
ccattcctaccttctcggtaccacaccgtaccacaagtagcttacccattcctctagtgatagacatttgggttgtttccagcatgggtttattagaaagagcactgtagccgggcatggtggttcatgcctgttaagtgagctg

SEQ ID NO: 34416 - DNA, 136 bp, Homo sapiens
  chr22:41641906-41642042
  hypo
gaaggcccactaggtccggggccagcgcagtcccagcagctcctgctcctggacaatctggtgtctgcctgtccacacggtgtggggcccagggttgccctctgccaacaaccccacgatccgacccccacagtcc

SEQ ID NO: 34417 - DNA, 31 bp, Homo sapiens
  chr22:41649014-41649045
  hypo
aggctctggagaattccggaccccagactcc

SEQ ID NO: 34418 - DNA, 134 bp, Homo sapiens
  chr22:41656915-41657049
  hypo
cttctgctggcactcacgatcggggactcagcaatgtcctgcggggatggggagaggagagtggaagaggagtggggataaggtcacctgagagcacgtcatttggcacctgagccctgcggctgcccctgcct

SEQ ID NO: 34419 - DNA, 242 bp, Homo sapiens
  chr22:41657476-41657718
  hypo
gccatcattctccagacggtttctgccagccacaaagaccttcagggccagaggcttgccttgggcactggatttccggtgacattcggtcagagctgcagccaggatctgtggggaaaggcaaggggccctggtcatgggcaggagccccttctcccagcggggtggccactgctgctgaactgctcttcaacatcccacgccacccatcggtgcaggtcaggggacgcaggactgctaac

SEQ ID NO: 34420 - DNA, 74 bp, Homo sapiens
  chr22:41658275-41658349
  hypo
aaaacggagactgaccgatgggaatcagagcccatggtaaatgcgacataaaagaatcacgagcgagtgcaccg

SEQ ID NO: 34421 - DNA, 31 bp, Homo sapiens
  chr22:41664702-41664733
  hypo
caaccctctaggtggacgtgtgacgtggtta

SEQ ID NO: 34422 - DNA, 184 bp, Homo sapiens
  chr22:41667991-41668175
  hypo
catgcagcactcctaccggccaggctctcccaggacaacctctgaggaagaaggaagggctctatctcctatttcatataagagcccagcctcagagctgcacgcagggcaaggccacgtacggcaaacaaggtggtgctgttagggcttgatcccatgtgccgaaagcaagctcagctcctgc

SEQ ID NO: 34423 - DNA, 39 bp, Homo sapiens
  chr22:41669064-41669103
  hypo
gctgggattatagctgtgagccatcgtgcccgactgatc

SEQ ID NO: 34424 - DNA, 122 bp, Homo sapiens
  chr22:41669394-41669516
  hypo
cctgtttggggaacacggggctagaataacctgacttgccctttgcgttggccaaaaagggcaccacttggatctaaccttcaggagaacttgccagccgcacgcagtggctcacgcctgta

SEQ ID NO: 34425 - DNA, 30 bp, Homo sapiens
  chr22:41779336-41779366
  hypo
gtttgtttttgagacggtgctttgttccaa

SEQ ID NO: 34426 - DNA, 95 bp, Homo sapiens
  chr22:41839268-41839363
  hypo
tgtgtgtcacacgcgcgcgcatgtgtctgcctgctctaatgtcagaagcgaaggaagatttttttccccccctcgagacagtcttgctctgtagc

SEQ ID NO: 34427 - DNA, 44 bp, Homo sapiens
  chr22:41839902-41839946
  hypo
tacaggcgtgagccaccgcacccggccggaaggtttttcagaaa

SEQ ID NO: 34428 - DNA, 30 bp, Homo sapiens
  chr22:41970939-41970969
  hypo
ccacacagggtgaacgggcagcagccggct

SEQ ID NO: 34429 - DNA, 41 bp, Homo sapiens
  chr22:41995508-41995549
  hypo
agggaaagtccctatcagaaacgattctaaattttcttgcc

SEQ ID NO: 34430 - DNA, 98 bp, Homo sapiens
  chr22:42033730-42033828
  hypo
agcaagctagaagacctgttgcggaaggttcgcgccaaggagaccaggaagcgagcactcagcaggtgtgcactcagcccgggtcagctgcctacact

SEQ ID NO: 34431 - DNA, 32 bp, Homo sapiens
  chr22:42034494-42034526
  hypo
aaatatgatataggccagacacggtggctcac

SEQ ID NO: 34432 - DNA, 30 bp, Homo sapiens
  chr22:42093965-42093995
  hypo
ctccacagaatacacgagcctccaaaaagt

SEQ ID NO: 34433 - DNA, 288 bp, Homo sapiens
  chr22:42095751-42096039
  hypo
ttggccatttccctcagcaaacgcggccaggcccttgccagacccgctccggtgaacccgacgcgaaaccgggcccccgcgctgtgttcactctcctccctgtcagcccgtcccggacccggccgcagcggcctctcgggcccctcagccccaggccggcctgcgggcctccgtggagcccggtccactggctctgcgcctgaaaggacggaaatccggatcccccgggacctcacccagtctcagggacacaccttcccgccttccgccttctggctccttcccttt

SEQ ID NO: 34434 - DNA, 30 bp, Homo sapiens
  chr22:42296538-42296568
  hypo
tctgcactggtttacgagaacactcccact

SEQ ID NO: 34435 - DNA, 397 bp, Homo sapiens; identical to SEQ ID NO: 13472
  chr22:42310612-42311009
  hypo

SEQ ID NO: 34436 - DNA, 222 bp, Homo sapiens
  chr22:42395139-42395361
  hypo
cagacgcatgtctcctcagggcggggcggggagggggtgcgagacgcgtgtgtccttcgaagagaggccggagctgaccggcggttgtgagcagccgggggccttcggtggcagcgtggctgcccttgggtgcctgcgactttgttggatgaggacaggtactgggtgtgtatctcctcctacttccacgaacaaggtgtcgctctttggtaagagggatga

SEQ ID NO: 34437 - DNA, 31 bp, Homo sapiens
  chr22:42473746-42473777
  hypo
gaagtctgttgccagccgctgtaagccccag

SEQ ID NO: 34438 - DNA, 52 bp, Homo sapiens
  chr22:42667190-42667242
  hypo
ggtccctggcagcccccgcccatgggttccaggtgtccgtggaggaacgact

SEQ ID NO: 34439 - DNA, 401 bp, Homo sapiens; identical to SEQ ID NO: 13477
  chr22:42669779-42670180
  hypo

SEQ ID NO: 34440 - DNA, 30 bp, Homo sapiens
  chr22:42671394-42671424
  hypo
gataggccaagaaacgggaagcccgtgcaa

SEQ ID NO: 34441 - DNA, 83 bp, Homo sapiens
  chr22:42916272-42916355
  hypo
cctggagcaatacacacgggactggccatggataggttattgacagttacgagaggagccgggtgcggtgattcatgcctgta

SEQ ID NO: 34442 - DNA, 22 bp, Homo sapiens
  chr22:42916594-42916616
  hypo
cgagactctgtctcaaaaaaaa

SEQ ID NO: 34443 - DNA, 51 bp, Homo sapiens
  chr22:42972461-42972512
  hypo
ccttcccacagccacacgggcgacgcggggctcggccgaccccgcggggcc

SEQ ID NO: 34444 - DNA, 97 bp, Homo sapiens
  chr22:42995262-42995359
  hypo
gttccagctctgaaaatcttacggcccaaacaaagaaatatttctgcattgaaaggctctattcacgccgggcgcagtggcttacgcctgtaatccc

SEQ ID NO: 34445 - DNA, 137 bp, Homo sapiens
  chr22:42995598-42995735
  hypo
gcgagatgtcgtctcaaaacaaaaaaaacaacaggttctattcaacacgacctctcccacctgcctgatcagacacgcagtgtaagaaaacatgaaatgccataccatgtggtggagaaagccgcctgaggctgcaa

SEQ ID NO: 34446 - DNA, 296 bp, Homo sapiens
  chr22:42998947-42999243
  hypo
tcctgcactttccctttgattcgaaatcgggcatctttctgcaaaagcttctcccgggcatccttgactcccagtttgagccgggcatctgagaggccaatcttctgccgggcatcaaatctctgctggaaggtggctgtgcgtgttgactggctgagaaggccttgctggatcccaactcgagatcggacacctccaactcccggtctggcattaagcctgtaaatataaattgcaatcaatattaagtggatctgggtatctacagcagtctatgaaagcggaactgtggtaac

SEQ ID NO: 34447 - DNA, 31 bp, Homo sapiens
  chr22:43038393-43038424
  hypo
caggtataagcccctgcgtccagcccataaa

SEQ ID NO: 34448 - DNA, 31 bp, Homo sapiens
  chr22:43096260-43096291
  hypo
ctgacacaggttcagccgacagcaggagctc

SEQ ID NO: 34449 - DNA, 31 bp, Homo sapiens
  chr22:43098230-43098261
  hypo
cagagagggccagggccgggctcacaggact

SEQ ID NO: 34450 - DNA, 35 bp, Homo sapiens
  chr22:43137118-43137153
  hypo
gctcttcctgcattgccgatctctcagggttgtta

SEQ ID NO: 34451 - DNA, 11 bp, Homo sapiens
  chr22:43150201-43150212
  hypo
ttggccaggtg

SEQ ID NO: 34452 - DNA, 278 bp, Homo sapiens
  chr22:43164965-43165243
  hypo
gggtggaggcagctccctccccgtttactggggtgtgacttgagcacctcgcaagcacaggcagtgcctcagccgcttactctgtgaggggccgaccgtgcccacctgcaggcccactgtgtgccgggcaccctgagccccgcgtttccagtggctccaactctcccacaggtgacccggtggatgctgctctcctctgtgtgagggaggaagcgaggggactgtcatggcccacgagcctgttcgcctccacaagcggctcccaaccccaggctcct

SEQ ID NO: 34453 - DNA, 30 bp, Homo sapiens
  chr22:43197156-43197186
  hypo
gggatcaggagggaacgggctgagcgtcct

SEQ ID NO: 34454 - DNA, 30 bp, Homo sapiens
  chr22:43197564-43197594
  hypo
ggcttgtgctggaggcggaacacatcgccc

SEQ ID NO: 34455 - DNA, 138 bp, Homo sapiens
  chr22:43253986-43254124
  hypo
tttttaattcttgccctcagctcacgccaggccctgggtggaaagctttctttgcccggaaactggctttctgaaaccaagggcttttgtgtcacgttcatggagagatggcagtgcgggttgaggcagaagtgctca

SEQ ID NO: 34456 - DNA, 30 bp, Homo sapiens
  chr22:43266213-43266243
  hypo
acagtgttctgctacggagccaggacaaag

SEQ ID NO: 34457 - DNA, 52 bp, Homo sapiens
  chr22:43273689-43273741
  hypo
cctgagggctgggagccgggagctgagttacacactacgaagaccacaggca

SEQ ID NO: 34458 - DNA, 114 bp, Homo sapiens
  chr22:43351233-43351347
  hypo
cacagtgcctgatgtgaactgcgtggacaagagaccaagaaggtaaactgaatgaatgaatgaatgaatgaacaaacaaacgaacgaacgaacgaaaaaacaaatcaactgatc

SEQ ID NO: 34459 - DNA, 147 bp, Homo sapiens
  chr22:43465507-43465654
  hypo
gaaacaggtgccaccacaactcgcatggacatgctcacgcatcaaagccaacagtcaccacctcagcgcctcgcgccccaaagaaaaaattcagctgtttactgaaaacatgagccggtggaagacgcacaaacccagatagaggta

SEQ ID NO: 34460 - DNA, 31 bp, Homo sapiens
  chr22:43517577-43517608
  hypo
ctctggctttgcggggcgtggaggtactggg

SEQ ID NO: 34461 - DNA, 245 bp, Homo sapiens
  chr22:43529306-43529551
  hypo
tctatgcgcgtggacgttggagtagacagaaaccagaggcttcttaatgtcgactgcctttaaagcttgcgtcaggggctccacggctggctccatgaggcgggtgtggaatgcgccactaaccggcaacatcctggtgcgtctgaaatgaaacttagaggaattcttctggagaaaccgtagagcctggggaaggaaggaggtttcagccgagcaatgtcccagaaatccgcctttacagatct

SEQ ID NO: 34462 - DNA, 31 bp, Homo sapiens
  chr22:43537480-43537511
  hypo
tccatggtcacactgacgccaacccagggct

SEQ ID NO: 34463 - DNA, 203 bp, Homo sapiens
  chr22:43566411-43566614
  hypo
aagtcctcctagaggactcctcggacatgggcatggccaggtgcctccacgcatgttcacgcgccatgatttatcattagtgaagacctcagatgaccaatcgccgccacagttagcaacaagcccgaacctcaaaacctcaaaacacgccactcagccaacaaagcaagctgcagaaggatccgttgaataagatgatattt

SEQ ID NO: 34464 - DNA, 31 bp, Homo sapiens
  chr22:43567928-43567959
  hypo
catatgggttcttgagcggccttgtccctgc

SEQ ID NO: 34465 - DNA, 134 bp, Homo sapiens
  chr22:43570299-43570433
  hypo
cggggccacctgcccggcgcgcgatggaggccaggcagtccttgacagtcagcaggttctcgcaggggaactggttcagcagcacgcctggcctctcctggctgagtttcctgcagggcggaggcaggtgcgcc

SEQ ID NO: 34466 - DNA, 30 bp, Homo sapiens
  chr22:43581408-43581438
  hypo
gctgctgctgctggcggcctcctccacacc

SEQ ID NO: 34467 - DNA, 31 bp, Homo sapiens
  chr22:43655459-43655490
  hypo
tgaattacgttctattcggttgacccctgag

SEQ ID NO: 34468 - DNA, 31 bp, Homo sapiens
  chr22:43689395-43689426
  hypo
gcgggacccagccctgcggtctggctgcaga

SEQ ID NO: 34469 - DNA, 286 bp, Homo sapiens
  chr22:43926570-43926856
  hypo
tctgaagcagccaggtcacaccgggccttcggcagcaggtagagggctccccgtgggaagtttctggccgctggcatttggcagctgctccctgcagaggcactgggcgcagagctgtgctcaccgtcctgaaatctgcgacgcttagcagccctgttccagcctcatcatagcttttgaacgtgcgccgcattggcctccagcagtgcacaattttgggctgaatacgcagcagagcagagtaaaaagatggcgtctccgcgccggcttctttctagacacaaga

SEQ ID NO: 34470 - DNA, 31 bp, Homo sapiens
  chr22:44232852-44232883
  hypo
ctttgccctccagcctcgcagagctggtcac

SEQ ID NO: 34471 - DNA, 566 bp, Homo sapiens; identical to SEQ ID NO: 13486
  chr22:44287469-44288035
  hypo

SEQ ID NO: 34472 - DNA, 189 bp, Homo sapiens
  chr22:44322830-44323019
  hypo
cctctcagatcttgtgcggaaggccaggagtcggaacattggcatcttccatccatccttcaacttaagcaagttcctccgacagggtctctgcaaatgcctcccggccaatgtccaccagctcatctccggcaaaataggcatctctcttaccagagtgtctgatggggaaaacgttctggtgtctga

SEQ ID NO: 34473 - DNA, 112 bp, Homo sapiens
  chr22:44500202-44500314
  hypo
ataagcatagacacagcaacccggagagcagcttcggtttggctgtcggtggcgtgttagttactgtagtggtggcacagaggcgatatacgttaaatattagttctcactg

SEQ ID NO: 34474 - DNA, 196 bp, Homo sapiens
  chr22:44564308-44564504
  hypo
ctggggaggcactgcccagagcgtcctggacatggtggtggccagtctttaaggggaagcgctgtgtgtggatgcggcagctggtgtcatgctggagacgtggcttctgagagtacctaccgcaatgacaggaggatggcacgcctctgaagtttctctgtttccttctgcagacgtggttaacttggacctcaaa

SEQ ID NO: 34475 - DNA, 31 bp, Homo sapiens
  chr22:44601832-44601863
  hypo
aggggtggagaatgggcgcttgccaaggttt

SEQ ID NO: 34476 - DNA, 164 bp, Homo sapiens
  chr22:45074486-45074650
  hypo
gccctgcctgctagttctttaagccgctgctggaaggcatccttctctagaaagtcttcctggctgcctcctgttcaccgcaggccaggcggacccacggccccctcagtgccatctcaccctgggctctgctcatgcctttgggccagcgcttgtcatacaga

SEQ ID NO: 34477 - DNA, 949 bp, Homo sapiens; identical to SEQ ID NO: 13492
  chr22:45097904-45098853
  hypo

SEQ ID NO: 34478 - DNA, 33 bp, Homo sapiens
  chr22:45113348-45113381
  hypo
ggcgtgagccaccatgcccggtatccaggagat

SEQ ID NO: 34479 - DNA, 31 bp, Homo sapiens
  chr22:45116348-45116379
  hypo
ggttggagttggtgtgcgacccctcctctgc

SEQ ID NO: 34480 - DNA, 31 bp, Homo sapiens
  chr22:45122367-45122398
  hypo
ctggtggatggactctcgggggccctgctgg

SEQ ID NO: 34481 - DNA, 281 bp, Homo sapiens
  chr22:45123030-45123311
  hypo
acatcaggggtgggggcgggactcaaacccaggtctgcctgactttagggcacacaccctttgcccttctcacggcccggaggtccccgctggcctcactgtgcaggttgggcttcccgtggccgagagcctcgggcagcagcagcagcgtgcgcatccttgcaggagcgagctgccctgggagcggggtcaggtgagggggtccactcagttcccacggatgctgctttgctcgggctgtgctgggatcgggcctgcgctgtacccgtgtgttgagcacc

SEQ ID NO: 34482 - DNA, 31 bp, Homo sapiens
  chr22:45123856-45123887
  hypo
cgcccctcgcttgatgcggcacattctggcg

SEQ ID NO: 34483 - DNA, 31 bp, Homo sapiens
  chr22:45175810-45175841
  hypo
gggcttgtgtgaaacacgcctctgtgttctg

SEQ ID NO: 34484 - DNA, 31 bp, Homo sapiens
  chr22:45210719-45210750
  hypo
cgcatcatggagggcccgtctccagggtgcc

SEQ ID NO: 34485 - DNA, 168 bp, Homo sapiens
  chr22:45242881-45243049
  hypo
cgtggctgtgggagtgcgggagcgtgcggggcttcgaggaagttgggaggagaaggggaggtcaggccttgcaagtcccaagaagacttgcacctccagatgcctgcgccacagtcctaggtcctggtgttccggggcacccccatcatgcaccgcaggccccccaag

SEQ ID NO: 34486 - DNA, 225 bp, Homo sapiens
  chr22:45277447-45277672
  hypo
atcatacagcacagtttctcccggagtcgtgagaatgacaggagggaccgtggcagctgcgggatttgccggcctcctcgctctgcacctctgcgtgtgtgcatgcgtgtctgtggtcgtggccgcgtgcgatgcacacacgcgtgttcagtgcaattcggcaccatgtgatatgctcggggtgggagcccgtggctcctggacgcttatcctgttgtgctgagt

SEQ ID NO: 34487 - DNA, 1005 bp, Homo sapiens; identical to SEQ ID NO: 13497
  chr22:45404005-45405010
  hypo

SEQ ID NO: 34488 - DNA, 121 bp, Homo sapiens; identical to SEQ ID NO: 13498
  chr22:45405046-45405167
  hypo

SEQ ID NO: 34489 - DNA, 38 bp, Homo sapiens; identical to SEQ ID NO: 13499
  chr22:45405381-45405419
  hypo

SEQ ID NO: 34490 - DNA, 148 bp, Homo sapiens
  chr22:45591072-45591220
  hypo
gtgctggccaagcctccgagcttggccaaatgctggccccagaggagacaaccttctcccgcccctcacctctgagaacagagggcgggccgctgtgctcctcacaacctggactgcctcatcttcccacggacgagctgtcagggct

SEQ ID NO: 34491 - DNA, 344 bp, Homo sapiens
  chr22:45593547-45593891
  hypo
agaaacccaaccaaccgacaggacagggcgggatgactccgggtggctcacaagtaccaaggccctggaggcagagctggctgtgagaaggtgcggctgcttccccacatccgccagcattacctgttaaaatccgatgcagcggcaacgtgacgtaggttaagtgtgcatagagaaggaagtttccatctgctctgttcagcttcagccaggacccgaccagggaccgtcctgtgcccgacagggaccgagaccgcaggttggttgcattgtgcagatcggctggaggaaagaaggccaggtcaaggcccccacagcatgggacgcggcgggagcagcaggag

SEQ ID NO: 34492 - DNA, 356 bp, Homo sapiens
  chr22:45594220-45594576
  hypo
cattacccagtcctgcggtccaggctgggggaacctgccccagagaggcagactagggcagtgatcagtacttcttactgattcgggaacgggcccaggtggggaaggggcttgcccaagttcacacaagagcaggtcgaggccagtgctggagtccctgacccaggccagggccttgagcaggtgggacacccctgcttcttggtcccagtggtcaggacaaagactgccacctcttctgatcaatgctgcagccctgctccctgctgggggaggtgctcagtgggagttgtcagcgaatccttcacgtcgtttttttttgtttgttttgagatggaatctcactcttgcccagg

SEQ ID NO: 34493 - DNA, 86 bp, Homo sapiens
  chr22:45594815-45594901
  hypo
gccactgtgcctggccaatccttcacttccatacactcaacagacacgcacacagtgcggagccaggcgcccgctgggtcctgagg

SEQ ID NO: 34494 - DNA, 357 bp, Homo sapiens
  chr22:45604106-45604463
  hypo
atgactcacaaacatgacatgcggagaaagaagcctgaaacaacatatactgcccgattccaatgtatgagctgtgagaacaggcagaaccaccgactccacacacatgagctgtgagaacaggcagaaccaccgactccacatgcacgagctgtaagaacaggtagaacccgccaactccacacacacgagctgtgagaacaggcagaacccaactccacacgcaggagctgtgagaacaggcagaaccaccgactccacacgcacgagctgtaagaacaggcagaacccaccgactccacatgcaggagctgtgagaacaggcagaacccgcccgggaagtttgaggagacagag

SEQ ID NO: 34495 - DNA, 30 bp, Homo sapiens
  chr22:45607262-45607292
  hypo
atgaaatacgttaggcgaatcacttcatct

SEQ ID NO: 34496 - DNA, 304 bp, Homo sapiens
  chr22:45607807-45608111
  hypo
cgcaggggcaggggccgggggtcactcaccttcctcccgtctgcaccgctttcgctgccggagtacgccagcttccggcgcacatagaaaagcatgtcgtcctgccggggagcccatttctccatgaagtaggtggagaacatccaagtccagaagacgatgcggtcatccttgaagcaccctgcagagggaggccagacaggagtgaggaaggacggccaccctggcccttgcagcatggccttggccaagctgcgcccatacccccacatttctggccagaaatttgcgagggctctgagat

SEQ ID NO: 34497 - DNA, 33 bp, Homo sapiens
  chr22:45653544-45653577
  hypo
gtgtttgggtcatgggggcggacaactcatgaa

SEQ ID NO: 34498 - DNA, 31 bp, Homo sapiens
  chr22:45734833-45734864
  hypo
tgaattatagcacaagcgagggctggtggca

SEQ ID NO: 34499 - DNA, 575 bp, Homo sapiens
  chr22:45808542-45809117
  hypo
acacccagctaattttggtattattagtagagacctccgcaggtcctctggcctctccagacctcagtttccccaactataaaatggggagagcagccatgcgccatggctaaccaaagacggtgtcgccaggaacttaggaaaagctcagtaaactgggtcatcatcactacattcctgggtcaaagctcccttggatccaaatggtggttctggctgcttggaacccattacctcctcgacagctccctctcacttcaacttcggatgagaagggaaaagggacgcgagtgaccagggccaagggccagagcagtccccgaagcaggagtgagggcagagaacagggcccatggcgggaccggggcggagaggaagcgtcaggacccccagggtggggggcgagggttgggagcccctgagatgaagggcgagggccggagctgaggtggggtggggtccctcagggtgtcggaggagggtcgggagccaggaggtggagggcgagagcggggcccgaggcggggccgagtggaagggtcaggacctccgaggtggggcggagggacaagggt

SEQ ID NO: 34500 - DNA, 31 bp, Homo sapiens
  chr22:45821721-45821752
  hypo
tagcatatcctcccctcgagggcccccagtg

SEQ ID NO: 34501 - DNA, 150 bp, Homo sapiens
  chr22:45822397-45822547
  hypo
cctgctcagagaagggcgtggagcctggtgactagagtggagtgaggagaggggcaggtacggaggcctcagaggcagacggtcgaggtcctggcagtccactggggaggactttggcttcttctgtgacggagacggggaactctgcag

SEQ ID NO: 34502 - DNA, 73 bp, Homo sapiens
  chr22:45826805-45826878
  hypo
agacctggactgggaccggcggaggattcagggggctcgcgccaccctgctgtttgagcggcagcagtggcgg

SEQ ID NO: 34503 - DNA, 31 bp, Homo sapiens
  chr22:45882359-45882390
  hypo
agccaccgcacccagccgtttacagccatta

SEQ ID NO: 34504 - DNA, 18 bp, Homo sapiens
  chr22:45901939-45901957
  hypo
tgccggctggcagccctg

SEQ ID NO: 34505 - DNA, 182 bp, Homo sapiens
  chr22:45929577-45929759
  hypo
ctaggatgtattaggatgggtcgttcttgctggtcacccccgcactgcctcggtctctcctagatgtcaatgaatgcatcacgggcagccacagctgccggcttggagaatcctgcatcaacacagtgggctctttccgctgccagcgggacagcagctgcgggactggctatgagctcaca

SEQ ID NO: 34506 - DNA, 31 bp, Homo sapiens
  chr22:45948181-45948212
  hypo
agtatggacacatgtgcggtgaaatggggag

SEQ ID NO: 34507 - DNA, 323 bp, Homo sapiens
  chr22:45959130-45959453
  hypo
gtctgcagagctctgagcactcgcttcgcgtcgcggggtctccctcctgttgctttcctaaccctgccctccggggcgttaataaagtcttagcaagcgtcccacacagtgagcctcgcgtgccttggttttatttggcatggttgggagtctgtgccgcttgttacccgggggtgagctgggcactggccaccgcctggtacccccgagggctgactgaggagcgctccccactagagggtgtgtgctcgggggtccctgttcacagagcccactgtctgtgccgacagggaggccaggccgggtacatcatttcacatgtg

SEQ ID NO: 34508 - DNA, 18 bp, Homo sapiens
  chr22:45969095-45969113
  hypo
ctccgtctcaaataaata

SEQ ID NO: 34509 - DNA, 126 bp, Homo sapiens
  chr22:45976303-45976429
  hypo
tggaggaggtgaggcccgagctgagtgtccttgcatgtgagggagtgacacttagtgagcacctgtgatgaccaggagccagggtttcatcatcgccaggaccctgtgacacggtgggattatctc

SEQ ID NO: 34510 - DNA, 160 bp, Homo sapiens
  chr22:45982946-45983106
  hypo
gtcaatgggatgtgaggttcacgagcacgtcacggagcctctcccctcgtcatgtacgtgcgcatcatggcaaaatgtgcctggccactggttcctgacgctggaaggcacgaacccactccccacacccacagccggcgttgctgtgactgcagtgtct

SEQ ID NO: 34511 - DNA, 444 bp, Homo sapiens
  chr22:46255194-46255638
  hypo
tagaaagcactggatggaatccgcccctcaattcgggtttgctggagaagatgtagaccttggtgctcagagacgctgaatcgctgggctcacccaggcgggtgcggagccccagtctgccccttccactcggccaggctgcctcccgcctctgccctgcagtgccagctttgtgttgcccaattcatctgcagccactagaggtatcttccttgagaatctcctgttggaggctcccgctgccctcaggacatggcccagactccttagagaggcacatgaggtgcgtcccgagccctcctccagccctccctctctggcaggtgaccatgcagcagccgcaaagcacttggcggtctcttctggctcgaggctgacgcccacgcgagcccccacctagaacctccccaacctgtgtccaccgggtgtgcccccagaaatctt

SEQ ID NO: 34512 - DNA, 207 bp, Homo sapiens
  chr22:46261683-46261890
  hypo
tccatgactgtgaaatggagccgacacctctgcagcttcgaccacacagggcttgtggcttggcatggccgcagacgcactgccaggccggcagccttcgccaagaactggattcctcccggcctggcccggctcggctggcattctcgccagtttcattgggttgagttccagagcgatggcagcgattgataatgctgtaattgg

SEQ ID NO: 34513 - DNA, 30 bp, Homo sapiens
  chr22:46283127-46283157
  hypo
tgtccccaaggtgccggagcccaggcaggc

SEQ ID NO: 34514 - DNA, 31 bp, Homo sapiens
  chr22:46312228-46312259
  hypo
agatggggatggtgtgcgcaggtccagccgg

SEQ ID NO: 34515 - DNA, 121 bp, Homo sapiens
  chr22:46437982-46438103
  hypo
ggtgaacattttccctaaatacaatgatcttcagttaaaatatttgtatcttacatagaatctggaattatttctgtaaacagaatttagtaaaagaaatataaaaatcagctgggcacgt

SEQ ID NO: 34516 - DNA, 30 bp, Homo sapiens
  chr22:46455655-46455685
  hypo
gaacattgtgtcaccgttaaaacggtggtg

SEQ ID NO: 34517 - DNA, 31 bp, Homo sapiens; identical to SEQ ID NO: 13508
  chr22:46466169-46466200
  hypo

SEQ ID NO: 34518 - DNA, 31 bp, Homo sapiens
  chr22:46521304-46521335
  hypo
ggtaacctctggctggcggggctttgggtca

SEQ ID NO: 34519 - DNA, 30 bp, Homo sapiens
  chr22:46521912-46521942
  hypo
gctgtgagccgggccggctggctcattcag

SEQ ID NO: 34520 - DNA, 44 bp, Homo sapiens
  chr22:46585894-46585938
  hypo
cccagccgtgttcatctatttctgtgaaccgatgctaggtgaag

SEQ ID NO: 34521 - DNA, 31 bp, Homo sapiens
  chr22:46598486-46598517
  hypo
tagctgggcgtggaggcgtgcacctcttaag

SEQ ID NO: 34522 - DNA, 95 bp, Homo sapiens
  chr22:46678246-46678341
  hypo
caggcagaggcagaaacgcctgcagaggcctcagggaaggaaaggctagcaccatggtggaggtgggccctctggacagacggggctgcatcagg

SEQ ID NO: 34523 - DNA, 30 bp, Homo sapiens
  chr22:46727402-46727432
  hypo
gccactcggaacagcgagtcctctgccgtc

SEQ ID NO: 34524 - DNA, 31 bp, Homo sapiens
  chr22:46785290-46785321
  hypo
tgccaaagagcgtgcccgtgtgctgtgtagc

SEQ ID NO: 34525 - DNA, 20 bp, Homo sapiens
  chr22:46797737-46797757
  hypo
ctttgggagaccaaggcggg

SEQ ID NO: 34526 - DNA, 36 bp, Homo sapiens
  chr22:46805983-46806019
  hypo
aggccatcacggcagccggcccggtcacctggtgac

SEQ ID NO: 34527 - DNA, 251 bp, Homo sapiens
  chr22:46812532-46812783
  hypo
ctgagaaaaaacctacagtgccgctgagcactgcaaggagtggcccagaagcgctaagctgtgcagatccggaatcctgctccaggagtcatccccggggtccagcctcttcttattttccttcgaggtattttcttccctgcgtgcaggccctcctccttggcttccactcagccgctctacgcagtgctgggagtttctgtgtgcgcacaaaagcatttggtccttacgaagtgctcacatttctccag

SEQ ID NO: 34528 - DNA, 113 bp, Homo sapiens
  chr22:46816136-46816249
  hypo
tcacccacactcaaatgcactcgcccacacacgtgcactcatatatgcacactcagccactcatgtgcactcacgtatgcactcacccactcgtgcactcatgtgcacattta

SEQ ID NO: 34529 - DNA, 271 bp, Homo sapiens
  chr22:46816770-46817041
  hypo
ttgggggacagagcatggaagcgcctggataagacagggagaaggtgggggccggggatggtcacggcaggaaaacgcgacagccctcggatggcacgtcccagagcagcggatacacgggtgggtgagagatgctgggtccatggctccgcctaaacccggccctcccatcatctactctgtgcttcagtttcctcatctgtgaaacagcaacagcacctcctcctccaggagctaacatgaggatcacgtgggggacacacatgagcct

SEQ ID NO: 34530 - DNA, 30 bp, Homo sapiens
  chr22:46817740-46817770
  hypo
agccagggaagctcacgaagggcgtgacct

SEQ ID NO: 34531 - DNA, 197 bp, Homo sapiens
  chr22:46828034-46828231
  hypo
ctacttggagtctgtgtggcacgcctgggagatgatgggatattcaaggcagatgggaggggcgggccagggaggtggagggacgccggtggccagcatggaaaggagagtgaaagccagtggaggcgacactacgacctcaggcccagtggctggaccccaactgctggtgagtcgcagccaggcacagtggctgt

SEQ ID NO: 34532 - DNA, 148 bp, Homo sapiens
  chr22:46839046-46839194
  hypo
gattccagtatgaagccctctcgagaacgaggagggctgaaatcgctgacgttttgctgaatttcatgagcatgcacggcctccacgccagtaaccccgagggctcacaggcaccagagctgacgccgggtcagagccaggcacaggc

SEQ ID NO: 34533 - DNA, 31 bp, Homo sapiens
  chr22:46860040-46860071
  hypo
ttctggacgttgaagacgaagacgtcgtcct

SEQ ID NO: 34534 - DNA, 45 bp, Homo sapiens
  chr22:46888631-46888676
  hypo
aggcaagatccaccgtgctcggccgaaacccaggaggacagtaga

SEQ ID NO: 34535 - DNA, 30 bp, Homo sapiens
  chr22:46929689-46929719
  hypo
gcagccgatcacgccggtggggaaactgtt

SEQ ID NO: 34536 - DNA, 777 bp, Homo sapiens
  chr22:46931417-46932194
  hypo
cacccctgaagaattgatgagcgggggccggcccccatcctgggccttaatgctcagcgagtatttctggacatcctcgaaatccaaggggttgatcacatccaggatcccgctcagcgagtgcaggtagaactggccggccacgttcccgctgaggatgctgtagtgaatggccgcgttctggccctggtcccggtccgtggcctgcactcgcagcacagccgtgttgagccccacgtcctcgggcacctggaccacgtagttctgctcgctgaactgggggtagttgtcgttctcgtcctccacctcgatgtacacggtggccgtggcactgagcgggcccggattgcgcccctggtcgttggcctccaccaggagctggtactcggccgcctcctcccggtccagcaccgcccgtgtgctcaccacgccagagctctcgttgagctggaagacgtcccacgcgccccccaacacgcggtaacgcaagttggcgttgatgggcgagtcgcggtcgctggcgcggatggtcagcacctcgtagcccacctccaggttctcccgcacgcgctcgcggtactccgactgctcgaagaccgggctgtggtcgttggtgtctttgaccaagacagtgatgtaggtggtggccgagcgcggcggcgtactgtagtccacggctttcaccctgaggacgtgcgtctccttggtctcgcggtccagtacgctgtccgtgctcacggcgcccgtggcagagtcgattcggaagtagccccggga

SEQ ID NO: 34537 - DNA, 167 bp, Homo sapiens
  chr22:46980175-46980342
  hypo
tacgctcatcactaccggggtgtcattgcttctgggccctcttagctgacagcaaggaaatgcacgtgtgagctgacgcgcacatatgtacgtgtctctgcctgtgtccgcgtgtagcctcctgtacctgtattgagcaaagtgtgagttcgcgccgctgatgaact

SEQ ID NO: 34538 - DNA, 186 bp, Homo sapiens
  chr22:47005067-47005253
  hypo
ttttgccccagagacatacatcgcagaccgctgagtggcgctggttgctgtctgggccggcttggcctcaggcgatcctgttgccctccgcgcaggagcctgggtccaccttctcctggctgtgtgcttccttaaacacggaaggtgttccgcagcctgctgtgcggggtagccctgtgttgggct

SEQ ID NO: 34539 - DNA, 874 bp, Homo sapiens
  chr22:47022396-47023270
  hypo
ccccacctgatgggtgcagggcgggggtctctgggtcggggttttctttggaaagctggaccggccgtgccctgcgtgtgggagctggctcgtggggcttggaggtgtgtgtgggagggacggtggcagggcggggtctctgggtcggggttttctttggaaagctggaccggctgtgccctgtgtgtgggagctggctcgtggggcttggaggtggcgagcgggagagtgaccacgcccctctcttgcagggaacccgagcgtcatgttagggtgaagcagaggacctcagtgctgaacatgctaaggaggttggacaaaatcaggttcagaggtcacaagagagatgacttcctcgatctagcggagtctccaaatgcctcggacaccgaatgcagcgacgaaatccccctgaaggtaccgcggacctcgccccgggacagcgaggagctgagggaccctgtgagtacctgtcctcgtcccccggtgtgggctggggtgtcgtccccgtcctctgtggccgggccaagcgtggactcaggcagattcgtgtcctgcccatgctggtcagagatggactgggcctgactctctgtctcacctgctcccgacccctgcagaccttgtggggccggggtgctgccacgccgagccttctgtgttcgcaggtctgattagcggctggattggttttcctcactggcttttctgggtgggtggcagacttctcacgcacatgtgacgcggaagcctcggcctggccctgggagcgttgacatgcggatggagcagggcgggcgttgtctggaagccgctggtgcctggcttgtcttctattcaagccaaggtgcacgtttccagcccccaaagctgg

SEQ ID NO: 34540 - DNA, 30 bp, Homo sapiens
  chr22:47054133-47054163
  hypo
caggagctggaccgcgagcggcagcggcgg

SEQ ID NO: 34541 - DNA, 34 bp, Homo sapiens
  chr22:47056193-47056227
  hypo
ctgctttacatgggggcggcgcttaggaaccttc

SEQ ID NO: 34542 - DNA, 30 bp, Homo sapiens
  chr22:47062640-47062670
  hypo
gcgtgcagggccagcgattcgatgccttcc

SEQ ID NO: 34543 - DNA, 118 bp, Homo sapiens
  chr22:47163686-47163804
  hypo
aggtgcagaggactcccagagcgatgctggcgtgcttgaggagaggagctggggccagggtgggtctggccgagagaaggggagagtcgtggggtgcgtcatgaaaggtggtggggta

SEQ ID NO: 34544 - DNA, 285 bp, Homo sapiens
  chr22:47172071-47172356
  hypo
tacctggggtgtggggcgtgttctgtagtcaggggctgggacaaggccttcttggcacagggtggcttgaacacagcctgagtgaggaggagtacagggtgtgtttgggagcctggcgggtcgctggctacctgagaacagaggtgtgcgtggaagtagtgggcacagctgtggctgtatggtgggatggtgtgcgtggaagcagtgggcatagttgtggctgtgtggtggggtggtatggatggaaggagtgggcacagctgcggctgcgtggtgggatgggag

SEQ ID NO: 34545 - DNA, 120 bp, Homo sapiens
  chr22:47192835-47192955
  hypo
ggcaggtgagagccctcgcagcgccctggttcctgctgtgtccccactgttgccttctgtcctcagcacctctgcaggctttctcctttccctcatggtaactcacgggcttgccctccg

SEQ ID NO: 34546 - DNA, 96 bp, Homo sapiens
  chr22:47193329-47193425
  hypo
cacccctgcagaaagtgccagcgatgccgcccctctgcagaggtcccagtctctcccacactcggccaccgtcacgctgggtggcacatctgaccc

SEQ ID NO: 34547 - DNA, 99 bp, Homo sapiens
  chr22:47197603-47197702
  hypo
agctctggccctcaaggctttcgaacggtaggacagaaggcacgacgacccgtccgtcaaggagtggggccaggccacggctgtgttccacttcccctg

SEQ ID NO: 34548 - DNA, 74 bp, Homo sapiens
  chr22:47197969-47198043
  hypo
ctcaacctacctgtttcgtcagctgtagagggagcatgagacctgccctgcagggtcctcgtgaaggtcagtgg

SEQ ID NO: 34549 - DNA, 53 bp, Homo sapiens
  chr22:47299399-47299452
  hypo
cttccaccctagctctcgcctctggttgctgctctgagcgtgagtctagaggg

SEQ ID NO: 34550 - DNA, 30 bp, Homo sapiens
  chr22:47370211-47370241
  hypo
gtctccggcgtgcccgcagaggtgctgtgc

SEQ ID NO: 34551 - DNA, 30 bp, Homo sapiens
  chr22:47372685-47372715
  hypo
cgttctttcaagggcgtgtttgttcatcgg

SEQ ID NO: 34552 - DNA, 31 bp, Homo sapiens
  chr22:47393301-47393332
  hypo
gcttatcacctgacatcgggaaatactggcc

SEQ ID NO: 34553 - DNA, 31 bp, Homo sapiens
  chr22:47418700-47418731
  hypo
agtatagaaacctgaacgaaatactactctg

SEQ ID NO: 34554 - DNA, 30 bp, Homo sapiens
  chr22:47425581-47425611
  hypo
cagggatttgccagcgagtgtcctgtgccg

SEQ ID NO: 34555 - DNA, 30 bp, Homo sapiens
  chr22:47436578-47436608
  hypo
ggaggttaccccgtgcgggacgtgactcag

SEQ ID NO: 34556 - DNA, 116 bp, Homo sapiens
  chr22:47436814-47436930
  hypo
ctcgtttgagatcctcggctgccttcagggctgcgggtacacctgaaacggttacttacgctgctttagaatggctcctcacacacatcctgtgcaggtggcgggggactcgctgg

SEQ ID NO: 34557 - DNA, 163 bp, Homo sapiens
  chr22:47455055-47455218
  hypo
ctggtaagtagcaaagcgctgggggacaggccatgccgtgtgggcgcctccactgtctggcacctggattttctgccagggtcctactgggcatcttgaacacactggtgtgggtgcgcacgcgtctggtgtgggagccctttcttgacgctgtaagagagca

SEQ ID NO: 34558 - DNA, 56 bp, Homo sapiens
  chr22:47465543-47465599
  hypo
gtggagctgacttgacggttcccggctgttccctgttgtttggttggagcggggct

SEQ ID NO: 34559 - DNA, 121 bp, Homo sapiens
  chr22:47465778-47465899
  hypo
ggagcggagctgacttgacggttccagcgctgtcccctgttgtttggttggagcagagctgacctgacggtcccagcgctgtcccctgtttggttggagcggagctgacctgacggtccca

SEQ ID NO: 34560 - DNA, 121 bp, Homo sapiens
  chr22:47465958-47466079
  hypo
tgttgtttggttggacgctgtcccctgttgtttggttggagcggagctgacttgatggttcgagactgttccctgttgtttggttggagcagggctgacctgacggtcctggctgttccct

SEQ ID NO: 34561 - DNA, 58 bp, Homo sapiens
  chr22:47466258-47466316
  hypo
cctggctgttccctgttgtttggttggagcggagctgacctgacggttccaggttgtt

SEQ ID NO: 34562 - DNA, 389 bp, Homo sapiens
  chr22:47534618-47535007
  hypo
tgggggaaacacaaacgttccagccgtagcacgttatttggccgaaacccagaataccaggaggccagccctcgctctgcagccgtctcccctgagggcccagcctggattcaggccttttggcttggccaaagcccttctgagtcccaccctgagcctttgcgggagggtgacgtcatgtgctttattgctttgtttatgtgcttcagtcaccgttccgctcctgcagcgaccagtcaggcacagaacactgaggccgccaaagactggcccttggttccagttgcccgcacggaactgtgtgtctggggcccagttgctgaggaagtacctcagaggacaccgctgacacaagccacaggtgctgacgtggccgcacctcccagggc

SEQ ID NO: 34563 - DNA, 414 bp, Homo sapiens
  chr22:48027434-48027848
  hypo
ggccagctgctgtgttcagtccgccattgcaaacacgaagctcttccagaaacgccctcacagacaccccggaagtcacgtacccactctgtaggtgccccggggcacaggcaagcggacgagccagttatccctcagagctcctgctgcctcgcccgctttctctcggaaacgtgaagtgtggcctcagctgaaagtgaggtgagcgtgagtgtggacatgtgtcagtgtgcgtgtgcatgggaggagtgtgtgtgcgcttgatgacgatgatggagcccagtgagccaccgtccgtggagtgtcagagcctcctaggatggccacgccgaaggtgcggaaggaggcggctggcccagcgtcagacgtttccagcatccgcgggagtgaaacggaggctggtgggtggttgtg

SEQ ID NO: 34564 - DNA, 30 bp, Homo sapiens; identical to SEQ ID NO: 13516
  chr22:48137393-48137423
  hypo

SEQ ID NO: 34565 - DNA, 31 bp, Homo sapiens
  chr22:48458712-48458743
  hypo
cactgcgcccggcccacgcgtgcacattttc

SEQ ID NO: 34566 - DNA, 124 bp, Homo sapiens
  chr22:48793171-48793295
  hypo
aggtcccctgcctgccgggcgacgcttgctgcagcccgggaagcgcgtcttccattgctctgtgctgagcacagccgcggtgcggggcctgggttgggcctgtctgccacgcctgctcataccc

SEQ ID NO: 34567 - DNA, 308 bp, Homo sapiens; identical to SEQ ID NO: 13517
  chr22:48885529-48885837
  hypo

SEQ ID NO: 34568 - DNA, 114 bp, Homo sapiens; identical to SEQ ID NO: 13518
  chr22:48885907-48886021
  hypo

SEQ ID NO: 34569 - DNA, 25 bp, Homo sapiens
  chr22:48886204-48886229
  hypo
gggcgtgagctgagggctggggtag

SEQ ID NO: 34570 - DNA, 138 bp, Homo sapiens
  chr22:48924068-48924206
  hypo
ctgggggctgctgcagagttgcggtgaggactccagtagggccttggggcatgagtcggtgccacctgggtgcatcgtgtctccaggaaagggttctgctctgggggtccattccccgatgcctgtgtatagccaagg

SEQ ID NO: 34571 - DNA, 620 bp, Homo sapiens
  chr22:49026209-49026829
  hypo
aggcttgctccactgctgcctcggccctggctttggggcgtgcgtggcctttattcattgcctttgttgagtcgtcagcggcgtgtgatgaccaggtgtgcgctgttgtgtccacaactttccagcctcgctcgggcccagggcaggtggccacgccttcttactacacaggttcacgggataattggtggggccaggtggacccagtgaggcgctaatgatggaagtctgtgcagtgagtgccgcttccagaacaatgacagcgtccacgtcttcaccgccctccatcaggggccgcctagaagccacacaggctgcagggctggctaccggggccctgaatcacgggggcgatgagccccaggctccaggcgctggggaaggaagctgggcactcggctgtggggcttttgtttctacctgaaaccagccagccaggccccccgaggaaaagcaaagtgagcccaaatctgccccctatacccagatacccagtgtcccaggggcacctgcatggggggagcccggcgtgcgtgctggctctgggatgcaaggcccagggtcaccgaggacaggggaactcggcgtgtcctgcagccaggggccggcgctctggaatg

SEQ ID NO: 34572 - DNA, 330 bp, Homo sapiens
  chr22:49138230-49138560
  hypo
cagagcaggtggggcaggagacgggtggagcgggtggtgctgtgtggcggagctggcggcgcagtggagcgggcgttgtggtggacccggtggcgtggcagaccaggcgacgtggtggacccggccgcatggtggaccaggcaacgtggtagactgggcagcgtgatggaccaggcgacatggtggaccgggccgcatggtggaccaggcaacgtggtagaccgggccgcatggtggaccaggcaacgtggtagaccgggcagtgtgatggaccaggcgacgtggtgggccgggtggtgtggtgaagccggcagcacagtggagcaggca

SEQ ID NO: 34573 - DNA, 180 bp, Homo sapiens
  chr22:49277239-49277419
  hypo
gtggtggcgttcctccgactcccagaccacccccgccgggatctgctgggaaacgcccagagccccactcctgctcgtccgctcatcctgggcctcgcctctttttagggtgagtgtggcctcctggggccgcctgtggctccgtgtgcccttccgaccaggctgcgtgtctcatgtgcc

SEQ ID NO: 34574 - DNA, 94 bp, Homo sapiens
  chr22:49387604-49387698
  hypo
caacggctcttctttctccacagccactccagcattcattatttttgtctttctgatcatctcggttccaatcgaggtgagatggtgcctcatg

SEQ ID NO: 34575 - DNA, 223 bp, Homo sapiens
  chr22:49729771-49729994
  hypo
gtgaagtggtttttgggagcccggatgggggcatgggcaggagggaccccgcctggaggtgagtgccggccccagagcctcacgtggctctgaacgatggaatcgcagtcactgagtccaggtgctgtgaccgtgcacgtcggtgccagacacacgagaggcatctcgggaggggctgtcgtgcaactgttcacgatggttgcatccttttttttttttttga

SEQ ID NO: 34576 - DNA, 42 bp, Homo sapiens
  chr22:49730113-49730155
  hypo
acaggcatccctaatagaagcggaaacctctccagaccaact

SEQ ID NO: 34577 - DNA, 48 bp, Homo sapiens
  chr22:49857252-49857300
  hypo
ggattacaggcgtgaaccaccgcgcccggctattattcaaaattctta

SEQ ID NO: 34578 - DNA, 30 bp, Homo sapiens
  chr22:49911092-49911122
  hypo
actcggcttcttcttcgacctccccggcca

SEQ ID NO: 34579 - DNA, 233 bp, Homo sapiens
  chr22:49911379-49911612
  hypo
tccttcagccacagtgtgaagcgcagttcaccaaaactggaaactgccatgcatcccggtgtcatcaaacaccacagcaaaagagccaggtgaacgcacggaacatcaagccgcaaccctccacacctctctgtataaccttcgcggccactgcccccgtgcctgcagagcgggtttgcaggagacgtcatccgaatggataaatgtccgtcggagctggggatcatcctccc

SEQ ID NO: 34580 - DNA, 30 bp, Homo sapiens
  chr22:49935075-49935105
  hypo
ccgagggccccgggcggtgagtacgcaccc

SEQ ID NO: 34581 - DNA, 30 bp, Homo sapiens
  chr22:49982589-49982619
  hypo
acagccgacaagacccggttcccgtgtgcg

SEQ ID NO: 34582 - DNA, 155 bp, Homo sapiens
  chr22:49983003-49983158
  hypo
tcagtggcagagccccggtttctgccgcaaacacctctcactgccctccacacaacacatagctccctcctcctcctcacagagtgcctcacacagggcctacccagcggaggaaagagagtctcagctgccccggagcccgttcctcaccaaga

SEQ ID NO: 34583 - DNA, 154 bp, Homo sapiens
  chr22:49983614-49983768
  hypo
gcctcccagcagcctgaggcccgagcagggtctgtgatgagcagaggccgcagacggcagtgctggggccgggaattctccctgtgggctctgccctccggcgtgaccagtgcatgtgtctgtgctggaggtcggggcccttgagatgagacac

SEQ ID NO: 34584 - DNA, 30 bp, Homo sapiens
  chr22:50000868-50000898
  hypo
agcgtgtgctggagacggaatccccaaagc

SEQ ID NO: 34585 - DNA, 98 bp, Homo sapiens
  chr22:50001665-50001763
  hypo
atgattaatgtcgtgcgcaggcctctcctgggtgccggggattcagctgcgatgaacaggacaaagtccagatctcatgggaccggcatgggggtgat

SEQ ID NO: 34586 - DNA, 795 bp, Homo sapiens
  chr22:50008937-50009732
  hypo
gagacaccatcttcatggacacggacatgacacgcgctctgggcagcctggctagagctctgcccacggcacgtcagcccctccacttccgtctgaaaggtgccggccgcgtgtgtcacgcgagaccagtcctgcacgtggatctggacggggcaactgcgcgaagggtcatgaatcccgccggccagggaggatcgtctcctgtgcagaatgaggtgcggtcagaacacggcagaagctgggagctcccacccggctgcccgagacacctcccctcaagattcaccaaacaccacgacgtgcaaagaagaaagtccacgcctccgcggaaaacactgcggctcggcaggtcaatccaaacctggaaacacctcggcgcggcctgtcagtctgaacccggaaacacctcgacgcggccggtcaatctgaatccccagaaaacaccgcggcgcggcaggtcagtccgaacccggaaacaccgcggcgcggcctgtcaatctgaacccggaaacaccgcagcgtggcctgtcagtctgaacccggaaacacctcgacgcggccggtcaatctgaatccccggaaaacactgcggcgcggcaggtcaatccaaacccgggacatcattgctaccagggcggaggagaatacacgcaaaatataccagggcggaggggaatacacggaaaatataccagggcggaggggaatacacggaaaatataccagggcggaggggaatacacgcaaaatataccagggcggaggggaatacacggaaaatataccagggcagag

SEQ ID NO: 34587 - DNA, 30 bp, Homo sapiens
  chr22:50025291-50025321
  hypo
gtttcagggcacgccgggtgcaggtgtttc

SEQ ID NO: 34588 - DNA, 405 bp, Homo sapiens
  chr22:50054437-50054842
  hypo
tgtgagccccacatcaccagacgcgctgcagctccccgtgatgaccgctcctcctccgagccccgcacacggcgcgggttacatggaaaaggcaccgcagctccccgtgacgtcctctcctcctcggagccccgcacacggcgcgggttacatggaaaaggcactgcagctccccatgacgatcgctcctcctctgagcaccgcacacggcacgggttacatggaaaaggcactgagtgcggcccacaggagaggcggggatggaaccaggaccccaatgcataggctgggggacgcaccttggccacctcccgtggcgggatggttttcccaatcggagatcccagcagggcccatgctggcggctctgcctgtccctggcacggaccactcctcacctgtgga

SEQ ID NO: 34589 - DNA, 50 bp, Homo sapiens
  chr22:50169785-50169835
  hypo
cacatgctgctctggccgacttctgcggagaggggcgtcagcaggacaca

SEQ ID NO: 34590 - DNA, 31 bp, Homo sapiens; identical to SEQ ID NO: 13520
  chr22:50170509-50170540
  hypo

SEQ ID NO: 34591 - DNA, 394 bp, Homo sapiens; identical to SEQ ID NO: 13521
  chr22:50170577-50170971
  hypo

SEQ ID NO: 34592 - DNA, 348 bp, Homo sapiens
  chr22:50171672-50172020
  hypo
gcagtcggctccgatcgtagtagtttgctgagcaccatgaagatgctcctcttgacaagcccgggtctttagacaggctctgtgaaggcaaagaaaggatgccgtgagcctgccatgggggcagatgtgcaacctgtgagtgcaaacacgggggcggcctgtccacgtgggcaccggccgcgtttgaacggaaacttcaccaggccgaaggggccaccaaagacacaaaaacatgttcacaggagcagagctccagggaataggaaatcaggttttaaaaagaaaaaaccttggttcaaaagacaagtgttaacatgaagtcaaaaatgctgacgaaacactttaaaa

SEQ ID NO: 34593 - DNA, 30 bp, Homo sapiens
  chr22:50173709-50173739
  hypo
ggttggccgagcaacggccacttgggggaa

SEQ ID NO: 34594 - DNA, 30 bp, Homo sapiens
  chr22:50175235-50175265
  hypo
acgggatacaagcccgcccctgcccgcccc

SEQ ID NO: 34595 - DNA, 30 bp, Homo sapiens
  chr22:50175965-50175995
  hypo
cgtgacaatgcagccggggatggtcagaaa

SEQ ID NO: 34596 - DNA, 30 bp, Homo sapiens
  chr22:50177926-50177956
  hypo
aggggtctccgcaacggcggcgagtagaca

SEQ ID NO: 34597 - DNA, 30 bp, Homo sapiens
  chr22:50181275-50181305
  hypo
tggctccgccaccgcggaggccgccgccgc

SEQ ID NO: 34598 - DNA, 269 bp, Homo sapiens
  chr22:50191340-50191609
  hypo
gcatgctagtggctcccggaccatgctgatagggagctggcaacacagagcaggacagagtctgctagaaagagcgtcttccacctcctccggacacggcgccagttcttaccgtcttcccaggagaaaggccgccgcggtgccgcagcaggccgctcaggcaggtgcatccccgaggcctcttccaagccgatgctgtccacctcgcgccgggcctgcctcagaacaacacctccctgatcgcgcagcctcaccgcggctctatagaa

SEQ ID NO: 34599 - DNA, 114 bp, Homo sapiens
  chr22:50192074-50192188
  hypo
tacgttaaataaaaacgagaattaagaacacaagggatgtactctagccaatcacacgtttcccggtcaaacggcagcacaaatccacagtcacacatgcggcaggacagacga

SEQ ID NO: 34600 - DNA, 30 bp, Homo sapiens
  chr22:50209492-50209522
  hypo
aatgtgtcgtcctggcgcttccttcccgag

SEQ ID NO: 34601 - DNA, 99 bp, Homo sapiens; identical to SEQ ID NO: 13524
  chr22:50246600-50246699
  hypo

SEQ ID NO: 34602 - DNA, 31 bp, Homo sapiens
  chr22:50250349-50250380
  hypo
cgttctaggtgaaggccgcgctggaatcccg

SEQ ID NO: 34603 - DNA, 30 bp, Homo sapiens
  chr22:50252505-50252535
  hypo
cgttccggtgcccccggagcaccccctgtg

SEQ ID NO: 34604 - DNA, 238 bp, Homo sapiens
  chr22:50296994-50297232
  hypo
ccagggtgggggggtgcggccggggccaccatggtctcccctgagagggggtgctgtcttaggtgccccaagaggccctcgggcagcaagcgtggggtgctgccaaaatacagctccccctgggtgggcaggacacacgtggcctcctggcagacaggtgcctgggtgagcccgctgctcctgattagtcatgaatggcacctggtctgggcgacagtcacccgcaggaagccctgag

SEQ ID NO: 34605 - DNA, 31 bp, Homo sapiens
  chr22:50324434-50324465
  hypo
gatcgtaagtagcagccgggacaccggagtt

SEQ ID NO: 34606 - DNA, 182 bp, Homo sapiens
  chr22:50343412-50343594
  hypo
cccaccaggacccaggttctccgagcagaggatcagatttccggcattgctgcccgggctccacgcatccgggcctcgctcacgggtctctctatacacgggtctccactatacagaaggccgatcagtggcccctgcccctggagcagagcccctcaaccggcagggacacaggcttccca

SEQ ID NO: 34607 - DNA, 30 bp, Homo sapiens
  chr22:50352369-50352399
  hypo
ttcagagcaagacccggggcctagggagag

SEQ ID NO: 34608 - DNA, 109 bp, Homo sapiens
  chr22:50433173-50433282
  hypo
cagcactcaggtgagacgatgtccaggctccagagggtggctcagcggggaagccggagagcctacgtgacccacacgagaagtcttcaagggccgaccccatggccca

SEQ ID NO: 34609 - DNA, 30 bp, Homo sapiens
  chr22:50435398-50435428
  hypo
gctgggcacagcagcgacacccacctggat

SEQ ID NO: 34610 - DNA, 30 bp, Homo sapiens
  chr22:50464993-50465023
  hypo
ctccacctgtaagacgtgcaggggccacca

SEQ ID NO: 34611 - DNA, 30 bp, Homo sapiens
  chr22:50470007-50470037
  hypo
ccccgctgcactggcggcctgcagctccac

SEQ ID NO: 34612 - DNA, 30 bp, Homo sapiens
  chr22:50529683-50529713
  hypo
gcctgtactgtaaccgtcgccccaggttcc

SEQ ID NO: 34613 - DNA, 30 bp, Homo sapiens
  chr22:50654262-50654292
  hypo
tgaggctggccttccggccccagatggatc

SEQ ID NO: 34614 - DNA, 31 bp, Homo sapiens
  chr22:50656978-50657009
  hypo
aggaaggagaagacgccgctgtacttgctca

SEQ ID NO: 34615 - DNA, 30 bp, Homo sapiens
  chr22:50657583-50657613
  hypo
caggtgcagctccacgaagaagtagtcgac

SEQ ID NO: 34616 - DNA, 30 bp, Homo sapiens
  chr22:50686571-50686601
  hypo
catctagggacagttcggagtcatagccac

SEQ ID NO: 34617 - DNA, 35 bp, Homo sapiens
  chr22:50706160-50706195
  hypo
ccccatcgccagggctcgcccgcctattggctgcg

SEQ ID NO: 34618 - DNA, 30 bp, Homo sapiens
  chr22:50720376-50720406
  hypo
gttctgagcagggcacggtgcccgtccatc

SEQ ID NO: 34619 - DNA, 30 bp, Homo sapiens
  chr22:50720656-50720686
  hypo
actgcaggggctccgcgatgaccaccatgg

SEQ ID NO: 34620 - DNA, 488 bp, Homo sapiens
  chr22:50721444-50721932
  hypo
ccaaccagactcagcagctggcggtgacacccacactttacacgggacgccgttgagggtcacccgcacgtcctcctgggagcccgtgtccaggtgggtgccgtggatggtcagtgtggtgccgcccgcctgcggtccctgctgcggctccacactgagaggcttgggctgctgaaagagccgcaggggcactcgggtgaggacggggcacaggacgccctcggtcctgggctggatggtaactgtcgtggggaggcggcgggcagagcccctcctcccggtcctcccgggttcggcaggtccccgaggccgggtgcttacttggaaggtgaactggacattgggaggcgaacggcccagtttcccgaagacgtccacctcgacaccccccgtgaaaggcgtctccgcagcctcgatcacacacacgatcctggcgggcgacaggcagtgtggcccaggcactccccgacccaccccacaccctgaca

SEQ ID NO: 34621 - DNA, 85 bp, Homo sapiens; identical to SEQ ID NO: 13527
  chr22:50745644-50745729
  hypo

SEQ ID NO: 34622 - DNA, 31 bp, Homo sapiens; identical to SEQ ID NO: 13528
  chr22:50765138-50765169
  hypo

SEQ ID NO: 34623 - DNA, 77 bp, Homo sapiens
  chr22:50853284-50853361
  hypo
accttttccactgtcccgacttaactcgctcagaagcacagagcagagaggtcccttctccccgcagtctccagcct

SEQ ID NO: 34624 - DNA, 31 bp, Homo sapiens
  chr22:50861881-50861912
  hypo
tgtttgcagaagaaagcgatcctgaccacca

SEQ ID NO: 34625 - DNA, 80 bp, Homo sapiens
  chr22:50864148-50864228
  hypo
ccgtgtggctgatgctcgtcatctgatgtgcgtgtggaacagtgtctccgtgtgacaagtgatgtcgagcatcttctcgt

SEQ ID NO: 34626 - DNA, 122 bp, Homo sapiens
  chr22:50873265-50873387
  hypo
acactgggcaggggccgggcacttgctctccgaagtgaacctggaggcctctgccacttggctctctgggtcgtgggtctggcaaggtcggggccaggaggccgccccgatggtgcctgttg

SEQ ID NO: 34627 - DNA, 30 bp, Homo sapiens; identical to SEQ ID NO: 13529
  chr22:50874139-50874169
  hypo

SEQ ID NO: 34628 - DNA, 73 bp, Homo sapiens
  chr22:50874674-50874747
  hypo
ctgaccacagtagcagcgccccatcctcccggacccaggatgcacctgccggagcccccgggtgccctgcacc

SEQ ID NO: 34629 - DNA, 84 bp, Homo sapiens
  chr22:50884172-50884256
  hypo
cctgtggggtgggggaggtggcgggaccatgctgggcctgacagggtccaaggccatccttggcttcaacgtcccaccagggga

SEQ ID NO: 34630 - DNA, 30 bp, Homo sapiens
  chr22:50885643-50885673
  hypo
ttgtaaacgcgacgcgttgtcttcacctgg

SEQ ID NO: 34631 - DNA, 164 bp, Homo sapiens
  chr22:50894557-50894721
  hypo
caagcaaacctagacccgtccacttggctctacccaaggggagggcccagcaccaaggcgggcagagggacggggcagtgcagagacctggatcagccactctgagtcctccagtgagcgcaggaaggaggctgggctgggctcagcagcggggcagcctggga

SEQ ID NO: 34632 - DNA, 211 bp, Homo sapiens
  chr22:50895155-50895366
  hypo
tggggctggctgggcccggcctccagggagggggctgagctcccagggcaggggtggttggcaggaccccagcagggccgtgcgagaggagggctggaacacacagattctgagacgtggggtggcagccagtgttagtttctagggcaggactcacgggtcagggaggtaaggactggggctcgggagacgggtcgttagtgtcaggtgt

SEQ ID NO: 34633 - DNA, 441 bp, Homo sapiens
  chr22:50899268-50899709
  hypo
ctgtatctgtgtcacacgaaggcaagcgcttgtgtaaactcgaaatctcagtggctgtgagctgaggcctgggtttgcaaggcacacccaagacacggacttgagggccggcgccccaaggaaaggacaaggacccaaagaccgcacatcaaacagtggacatcaactcaagagccacagtgagggccccagacatgcaagcgtaacaacagggccactgctggagactggcctaaaaatggttcatacaagaaagaccggtttgcaggagaaagaccagggcgggggatgagagccccacccgcgcaccgcgccccacctggaatgtgcaggagcgcagctggagcccgtcctgcaggagctggtccacaggggtctggacgctgatgcgcttctccttggtcagcgcagccaccgggaaggagcggaccaccacctgct

SEQ ID NO: 34634 - DNA, 30 bp, Homo sapiens
  chr22:50900081-50900111
  hypo
gtagacgcgcaggccgtccagcacacactc

SEQ ID NO: 34635 - DNA, 170 bp, Homo sapiens
  chr22:50922549-50922719
  hypo
caagggggagggtcctggaagcgcccacccaggcgccgcccctgtgcttgctccccgagctcagggattgccgagtccacgtaactgacctgtactccacgaggccctgtgggaacggtccaggctggtcctgccctgtggaggcctccgtgcactgagagatgtactag

SEQ ID NO: 34636 - DNA, 30 bp, Homo sapiens
  chr22:50941784-50941814
  hypo
tggccctctcaggacgtgcagctgggagaa

SEQ ID NO: 34637 - DNA, 627 bp, Homo sapiens
  chr22:50942802-50943429
  hypo
agcgctgggctcggacgtaggtgggcggctgcttgtggaagggatacctggccacttggctctggacaaggcggatcactgcagcgagaggcatcagcgtggcccccacagtacccgccctgcccctcccctccccaccccgctccaccccagcccactccacaccccccaagcccgctccgcacctggctccttgccctgcagcaggcgcaagaccaggcttgtgaaccacgggctgtgcgtgtgtgggcccagggctgcaaaccacatctgccagtccaggcgtggctggtggggcaccacaaccgggggcggccggctcaggttcccaggcttgtacatgaactcgatctcctgccaggcaggccgaggtcagctgggcccgctgacctgggccccaccaccctgcccgccctgggagggctcaccgtccagtggtggccgtcgtaactgccctccagcaccacctcaggccgtccaccaagcccagtcatgcggcggaagaggccgtaggagttggccagctgtaggtgctccacggcaccaaacaggcggtgggccccggtccagaggcgcccgtgggtcccgggctccacgtaggagtacggcacctggagacaggtggga

SEQ ID NO: 34638 - DNA, 507 bp, Homo sapiens
  chr22:50944333-50944840
  hypo
gctacaaggccttcccaacagcggttgccagctgtccccgggagccacgctgtccccaacagggcacgctgagcagcgctgaaggccgagccctgtctgcctctctctgacagctgcggccctcacccacctgcgagtagaaagcagccaagcgcaggcgtcgaatgggggcgaagaacaggggcggcacagcgatctcaattaggaaggtggccaccacgctgagcttgtgcagccagaccggcaggtggtgtgcgaaccaggcggcgggcgtgggcaggcactgggtctcgtagtggtaggtgagggctgcaggcgagggcaggagtcagggctggccgagcccccagactaccccaggtccagaccgggcccctcaccagtgagcccccaccacgcagggcagcggctggtcagcttgaccacgcctgaggcgaacatgaggcggaacagcagccatcgcaccagccagaaggggaggtcttcgtggggcagggcccctgcctg

SEQ ID NO: 34639 - DNA, 31 bp, Homo sapiens
  chr22:50958186-50958217
  hypo
acagaggaaatgttaacgtttcttcactcta

SEQ ID NO: 34640 - DNA, 640 bp, Homo sapiens; identical to SEQ ID NO: 13532
  chr22:50970391-50971031
  hypo

SEQ ID NO: 34641 - DNA, 79 bp, Homo sapiens
  chr22:51023315-51023394
  hypo
tttacctagcagagggcggagcgtatacattgatcccaggcctttggtaccatatgtaaggaagcgcaaagtagaaacc

SEQ ID NO: 34642 - DNA, 30 bp, Homo sapiens
  chr22:51023881-51023911
  hypo
atggtgaagaaggccgtgcatgtcagagga

SEQ ID NO: 34643 - DNA, 83 bp, Homo sapiens; identical to SEQ ID NO: 13535
  chr22:51112150-51112233
  hypo

SEQ ID NO: 34644 - DNA, 165 bp, Homo sapiens
  chr22:51149219-51149384
  hypo
cttttttctgaacaaacgtttgactgagccaagcatgatggagttgtgcatatctgtgtgtgtgtgcgtgtctgtgcgttggtgagcggacacgcgctgtctgcacctgcgtgcatgcggcacacatgtctgtgcgtgggtgagtggacacgtgctgtgtgcacc

SEQ ID NO: 34645 - DNA, 42 bp, Homo sapiens
  chr22:51160331-51160373
  hypo
ggaggaggctgacacacgcagctccagcgacccccacctgga

SEQ ID NO: 34646 - DNA, 142 bp, Homo sapiens
  chr22:51171375-51171517
  hypo
acagactgccacatacacactcggtctcacactcacctgtgggttttggttccgttcaatttgggtttttaactttacagggtcagttccgcttcacctccttttgtatggagttccatccggggggtttcaccccctgctc

SEQ ID NO: 34647 - DNA, 30 bp, Homo sapiens; identical to SEQ ID NO: 13536
  chrX:2647654-2647684
  hypo

SEQ ID NO: 34648 - DNA, 42 bp, Homo sapiens; identical to SEQ ID NO: 13538
  chrX:2846776-2846818
  hypo

SEQ ID NO: 34649 - DNA, 190 bp, Homo sapiens; identical to SEQ ID NO: 13545
  chrX:8698867-8699057
  hypo

SEQ ID NO: 34650 - DNA, 651 bp, Homo sapiens; identical to SEQ ID NO: 13546
  chrX:8699110-8699761
  hypo

SEQ ID NO: 34651 - DNA, 31 bp, Homo sapiens
  chrX:9191714-9191745
  hypo
tagtgtaggtaatagacgaagaaaacaggga

SEQ ID NO: 34652 - DNA, 31 bp, Homo sapiens; identical to SEQ ID NO: 13548
  chrX:9240652-9240683
  hypo

SEQ ID NO: 34653 - DNA, 791 bp, Homo sapiens; identical to SEQ ID NO: 13549
  chrX:9433630-9434421
  hypo

SEQ ID NO: 34654 - DNA, 31 bp, Homo sapiens
  chrX:9571727-9571758
  hypo
ggggctgctgtagcaacgtgccaccaactgg

SEQ ID NO: 34655 - DNA, 45 bp, Homo sapiens; identical to SEQ ID NO: 13550
  chrX:10023768-10023813
  hypo

SEQ ID NO: 34656 - DNA, 635 bp, Homo sapiens
  chrX:10085162-10085797
  hypo
gcctgtgtgccagcaccctgacggtgtcctcggggagcagccgcgggtccctagcctccagccgtgggtctctggcctccagccggggctccctgagctcggtcagcttcacggacatctacggcctcccgcagtacgagaagcccgacgctgagggcagccagcttctacgcttcgacctcattcccttcgactctctggggcgagatgctcccttttcagagcccccaggcccctcgggcttccacaagcagaggcggtccctggacacgccccagtccctggcatcgctgtcctcccgctcctcgctgtcctcgctgtcgcccccaagctcgcccctggacacgcccttcctccctgcctcacgggactcgccgctggcgcagctggcggacagctgtgaggggccaggcctgggcgccctagacagactgcgggcacacgcctcggctatgggggacgaagacttaccaggcatggcggcccttcagccacacggggtccccggggatggggaagggccgcacgagcgaggacccccaccagccagcgctcccgtgggtggaagtaagtgcggatgtggcctcctgcggggcgagggttacctgcagggcggaaactgtggggtccagagt

SEQ ID NO: 34657 - DNA, 116 bp, Homo sapiens
  chrX:11783709-11783825
  hypo
ttgcagtctctgaggcggtccacgcgccacagtgccaactgtgacaggctttctgagagcagcgcttcacctcagcccaagcgccggcagcaggacacatccgccagcatgcccaa

SEQ ID NO: 34658 - DNA, 30 bp, Homo sapiens; identical to SEQ ID NO: 13551
  chrX:11948897-11948927
  hypo

SEQ ID NO: 34659 - DNA, 43 bp, Homo sapiens
  chrX:13062332-13062375
  hypo
gcagggactgcccattcgccagcctggacgcccaggggacccc

SEQ ID NO: 34660 - DNA, 87 bp, Homo sapiens; identical to SEQ ID NO: 13556
  chrX:15808572-15808659
  hypo

SEQ ID NO: 34661 - DNA, 100 bp, Homo sapiens; identical to SEQ ID NO: 13557
  chrX:15809045-15809145
  hypo

SEQ ID NO: 34662 - DNA, 83 bp, Homo sapiens; identical to SEQ ID NO: 13558
  chrX:15817993-15818076
  hypo

SEQ ID NO: 34663 - DNA, 123 bp, Homo sapiens; identical to SEQ ID NO: 13559
  chrX:15821796-15821919
  hypo

SEQ ID NO: 34664 - DNA, 88 bp, Homo sapiens; identical to SEQ ID NO: 13560
  chrX:15822232-15822320
  hypo

SEQ ID NO: 34665 - DNA, 40 bp, Homo sapiens; identical to SEQ ID NO: 13561
  chrX:15826354-15826394
  hypo

SEQ ID NO: 34666 - DNA, 123 bp, Homo sapiens; identical to SEQ ID NO: 13562
  chrX:15827321-15827444
  hypo

SEQ ID NO: 34667 - DNA, 215 bp, Homo sapiens; identical to SEQ ID NO: 13563
  chrX:15833798-15834013
  hypo

SEQ ID NO: 34668 - DNA, 57 bp, Homo sapiens; identical to SEQ ID NO: 13564
  chrX:15836708-15836765
  hypo

SEQ ID NO: 34669 - DNA, 111 bp, Homo sapiens; identical to SEQ ID NO: 13565
  chrX:15838328-15838439
  hypo

SEQ ID NO: 34670 - DNA, 536 bp, Homo sapiens; identical to SEQ ID NO: 13566
  chrX:15840847-15841383
  hypo

SEQ ID NO: 34671 - DNA, 99 bp, Homo sapiens; identical to SEQ ID NO: 13569
  chrX:16730853-16730952
  hypo

SEQ ID NO: 34672 - DNA, 37 bp, Homo sapiens
  chrX:16736863-16736900
  hypo
gtgagccaccgcactcggactatttttcattctttta

SEQ ID NO: 34673 - DNA, 30 bp, Homo sapiens
  chrX:18239017-18239047
  hypo
aggagcctggaccacgtctccgcggctgcg

SEQ ID NO: 34674 - DNA, 31 bp, Homo sapiens
  chrX:18247380-18247411
  hypo
gcgcccatgggccctccgcaggcccccagca

SEQ ID NO: 34675 - DNA, 31 bp, Homo sapiens
  chrX:18969304-18969335
  hypo
accgtgccacaggtggcggtgttgtacttgg

SEQ ID NO: 34676 - DNA, 32 bp, Homo sapiens
  chrX:19530838-19530870
  hypo
agggctgggattacaggcgtgagccactgcac

SEQ ID NO: 34677 - DNA, 186 bp, Homo sapiens
  chrX:20135319-20135505
  hypo
acacagtgcacacacagaaggcgtgcgtacgcacacagttcttcatacgatgcttacatgcaacatgcacacacaacgtgcacacccagcgtaaatgcatcttctcacagtagcagatacacactcaaagcgtgtgtagatgtagggtgcagtttctcagacaccgtgcacacacatcctcactca

SEQ ID NO: 34678 - DNA, 95 bp, Homo sapiens
  chrX:20160883-20160978
  hypo
gtgctgggattacaggcgtcagccaccgtgcccagccggttagctcataacgcagtcctttcactcgcccagccgggttgggagcctgatgggaa

SEQ ID NO: 34679 - DNA, 31 bp, Homo sapiens
  chrX:21958399-21958430
  hypo
aataatggtaataatccgaatgggtttaact

SEQ ID NO: 34680 - DNA, 71 bp, Homo sapiens; identical to SEQ ID NO: 13572
  chrX:27999797-27999868
  hypo

SEQ ID NO: 34681 - DNA, 30 bp, Homo sapiens; identical to SEQ ID NO: 13573
  chrX:36854169-36854199
  hypo

SEQ ID NO: 34682 - DNA, 30 bp, Homo sapiens; identical to SEQ ID NO: 13577
  chrX:39729507-39729537
  hypo

SEQ ID NO: 34683 - DNA, 1156 bp, Homo sapiens; identical to SEQ ID NO: 13578
  chrX:39910497-39911653
  hypo

SEQ ID NO: 34684 - DNA, 158 bp, Homo sapiens; identical to SEQ ID NO: 13579
  chrX:39913137-39913295
  hypo

SEQ ID NO: 34685 - DNA, 79 bp, Homo sapiens; identical to SEQ ID NO: 13580
  chrX:39913507-39913586
  hypo

SEQ ID NO: 34686 - DNA, 147 bp, Homo sapiens; identical to SEQ ID NO: 13581
  chrX:39914619-39914766
  hypo

SEQ ID NO: 34687 - DNA, 168 bp, Homo sapiens; identical to SEQ ID NO: 13582
  chrX:39916406-39916574
  hypo

SEQ ID NO: 34688 - DNA, 274 bp, Homo sapiens; identical to SEQ ID NO: 13583
  chrX:39921381-39921655
  hypo

SEQ ID NO: 34689 - DNA, 327 bp, Homo sapiens; identical to SEQ ID NO: 13584
  chrX:39921997-39922324
  hypo

SEQ ID NO: 34690 - DNA, 346 bp, Homo sapiens; identical to SEQ ID NO: 13585
  chrX:39922859-39923205
  hypo

SEQ ID NO: 34691 - DNA, 265 bp, Homo sapiens; identical to SEQ ID NO: 13586
  chrX:39923587-39923852
  hypo

SEQ ID NO: 34692 - DNA, 188 bp, Homo sapiens; identical to SEQ ID NO: 13587
  chrX:39930224-39930412
  hypo

SEQ ID NO: 34693 - DNA, 55 bp, Homo sapiens; identical to SEQ ID NO: 13588
  chrX:39930888-39930943
  hypo

SEQ ID NO: 34694 - DNA, 2833 bp, Homo sapiens; identical to SEQ ID NO: 13589
  chrX:39931600-39934433
  hypo

SEQ ID NO: 34695 - DNA, 80 bp, Homo sapiens; identical to SEQ ID NO: 13590
  chrX:39935705-39935785
  hypo

SEQ ID NO: 34696 - DNA, 127 bp, Homo sapiens; identical to SEQ ID NO: 13591
  chrX:39937095-39937222
  hypo

SEQ ID NO: 34697 - DNA, 1562 bp, Homo sapiens; identical to SEQ ID NO: 13593
  chrX:39955157-39956719
  hypo

SEQ ID NO: 34698 - DNA, 1127 bp, Homo sapiens; identical to SEQ ID NO: 13604
  chrX:40034218-40035345
  hypo

SEQ ID NO: 34699 - DNA, 324 bp, Homo sapiens; identical to SEQ ID NO: 13605
  chrX:40036258-40036582
  hypo

SEQ ID NO: 34700 - DNA, 44 bp, Homo sapiens
  chrX:40631516-40631560
  hypo
gcgacagagtgcccagagactccgtctcaaaaaaaaaaaaaaaa

SEQ ID NO: 34701 - DNA, 30 bp, Homo sapiens
  chrX:41331854-41331884
  hypo
ggcctcggggcagccggagcacaggcacag

SEQ ID NO: 34702 - DNA, 30 bp, Homo sapiens
  chrX:41332942-41332972
  hypo
gcgagccttcggcacgctgccgtccttgcg

SEQ ID NO: 34703 - DNA, 30 bp, Homo sapiens; identical to SEQ ID NO: 13608
  chrX:43379710-43379740
  hypo

SEQ ID NO: 34704 - DNA, 31 bp, Homo sapiens
  chrX:43773722-43773753
  hypo
ttacccctccaacacacgagcacacacacat

SEQ ID NO: 34705 - DNA, 47 bp, Homo sapiens
  chrX:44729992-44730039
  hypo
ggtagccttttttttctgagacggagtctcgctctgtcacccaggct

SEQ ID NO: 34706 - DNA, 32 bp, Homo sapiens
  chrX:44751510-44751542
  hypo
ctgggatttcgaggccgggtacggtggctcac

SEQ ID NO: 34707 - DNA, 37 bp, Homo sapiens
  chrX:44760626-44760663
  hypo
gggacttgttttagtggcctaacgtggtttgtcacgg

SEQ ID NO: 34708 - DNA, 161 bp, Homo sapiens
  chrX:44922873-44923034
  hypo
tgtagcacatcaagaacgctgggaagtacagacactattttgataggcaataatcatataacaggaagtggaagtaatggaaacgtgccttacctgcagcgaaacgcactcactctacctcataaccgcacaaacctgaccagcagcgcagaggagccgtg

SEQ ID NO: 34709 - DNA, 31 bp, Homo sapiens
  chrX:58293596-58293627
  hypo
gaaaggctctggcctgcgggggagtacacca

SEQ ID NO: 34710 - DNA, 52 bp, Homo sapiens
  chrX:70798090-70798142
  hypo
ccgtgggagtggaaagcgacagacctgatcccggaagcgttacagctaggcg

SEQ ID NO: 34711 - DNA, 77 bp, Homo sapiens
  chrX:71485134-71485211
  hypo
aaaaaacaaaaattcaaaaaaaaaaccccacaaaaaacatatatatgtaagttttgacagagcgagactgtctcaaa

SEQ ID NO: 34712 - DNA, 31 bp, Homo sapiens
  chrX:71529505-71529536
  hypo
caagttcacatagccacgtggctgagtgttt

SEQ ID NO: 34713 - DNA, 515 bp, Homo sapiens; identical to SEQ ID NO: 13614
  chrX:73163982-73164497
  hypo

SEQ ID NO: 34714 - DNA, 31 bp, Homo sapiens
  chrX:73812147-73812178
  hypo
ccgatattctccaggacgaactcttcttact

SEQ ID NO: 34715 - DNA, 30 bp, Homo sapiens; identical to SEQ ID NO: 13615
  chrX:80722921-80722951
  hypo

SEQ ID NO: 34716 - DNA, 197 bp, Homo sapiens
  chrX:82762196-82762393
  hypo
actggggaagtgggggcggtacttgatgccaaacatcccgccatttctctctctctgaatttcctgggcacattaaatgcagggcgggtgaggagggtgggggagcggtgaaggttaaaaacaattttcctaggggatggcatcggggcgcggggtcacgaacgttttcctgtatacctattcgtagtgggtctgca

SEQ ID NO: 34717 - DNA, 31 bp, Homo sapiens
  chrX:87063732-87063763
  hypo
ccatggagtagggggccgtgcttgtggggga

SEQ ID NO: 34718 - DNA, 30 bp, Homo sapiens; identical to SEQ ID NO: 13616
  chrX:87762080-87762110
  hypo

SEQ ID NO: 34719 - DNA, 30 bp, Homo sapiens; identical to SEQ ID NO: 13619
  chrX:93928298-93928328
  hypo

SEQ ID NO: 34720 - DNA, 39 bp, Homo sapiens
  chrX:101014376-101014415
  hypo
cagttttgtgtgagtgcgtttgtgcggatattttgtatt

SEQ ID NO: 34721 - DNA, 30 bp, Homo sapiens; identical to SEQ ID NO: 13623
  chrX:103731902-103731932
  hypo

SEQ ID NO: 34722 - DNA, 52 bp, Homo sapiens
  chrX:107070115-107070167
  hypo
ccggcgtggctgcggacgccctgccggcggggaggcccggtgaaacttaatc

SEQ ID NO: 34723 - DNA, 19 bp, Homo sapiens
  chrX:118885581-118885600
  hypo
tgtagcatgtgtcagttat

SEQ ID NO: 34724 - DNA, 30 bp, Homo sapiens; identical to SEQ ID NO: 13627
  chrX:120184126-120184156
  hypo

SEQ ID NO: 34725 - DNA, 25 bp, Homo sapiens
  chrX:123094408-123094433
  hypo
agtcgccgaagagcgaacaccccaa

SEQ ID NO: 34726 - DNA, 224 bp, Homo sapiens; identical to SEQ ID NO: 13629
  chrX:123094492-123094716
  hypo

SEQ ID NO: 34727 - DNA, 125 bp, Homo sapiens; identical to SEQ ID NO: 13630
  chrX:123095160-123095285
  hypo

SEQ ID NO: 34728 - DNA, 152 bp, Homo sapiens; identical to SEQ ID NO: 13631
  chrX:123095554-123095706
  hypo

SEQ ID NO: 34729 - DNA, 66 bp, Homo sapiens; identical to SEQ ID NO: 13632
  chrX:123155215-123155281
  hypo

SEQ ID NO: 34730 - DNA, 142 bp, Homo sapiens; identical to SEQ ID NO: 13633
  chrX:123156379-123156521
  hypo

SEQ ID NO: 34731 - DNA, 80 bp, Homo sapiens; identical to SEQ ID NO: 13634
  chrX:123159688-123159768
  hypo

SEQ ID NO: 34732 - DNA, 166 bp, Homo sapiens; identical to SEQ ID NO: 13635
  chrX:123164809-123164975
  hypo

SEQ ID NO: 34733 - DNA, 98 bp, Homo sapiens; identical to SEQ ID NO: 13636
  chrX:123171375-123171473
  hypo

SEQ ID NO: 34734 - DNA, 78 bp, Homo sapiens; identical to SEQ ID NO: 13637
  chrX:123176417-123176495
  hypo

SEQ ID NO: 34735 - DNA, 206 bp, Homo sapiens; identical to SEQ ID NO: 13638
  chrX:123179012-123179218
  hypo

SEQ ID NO: 34736 - DNA, 153 bp, Homo sapiens; identical to SEQ ID NO: 13639
  chrX:123181202-123181355
  hypo

SEQ ID NO: 34737 - DNA, 75 bp, Homo sapiens; identical to SEQ ID NO: 13640
  chrX:123182853-123182928
  hypo

SEQ ID NO: 34738 - DNA, 136 bp, Homo sapiens; identical to SEQ ID NO: 13641
  chrX:123184023-123184159
  hypo

SEQ ID NO: 34739 - DNA, 279 bp, Homo sapiens; identical to SEQ ID NO: 13642
  chrX:123184965-123185244
  hypo

SEQ ID NO: 34740 - DNA, 109 bp, Homo sapiens; identical to SEQ ID NO: 13643
  chrX:123189976-123190085
  hypo

SEQ ID NO: 34741 - DNA, 113 bp, Homo sapiens; identical to SEQ ID NO: 13644
  chrX:123191714-123191827
  hypo

SEQ ID NO: 34742 - DNA, 132 bp, Homo sapiens; identical to SEQ ID NO: 13645
  chrX:123195072-123195204
  hypo

SEQ ID NO: 34743 - DNA, 105 bp, Homo sapiens; identical to SEQ ID NO: 13646
  chrX:123195619-123195724
  hypo

SEQ ID NO: 34744 - DNA, 307 bp, Homo sapiens; identical to SEQ ID NO: 13647
  chrX:123196748-123197055
  hypo

SEQ ID NO: 34745 - DNA, 214 bp, Homo sapiens; identical to SEQ ID NO: 13648
  chrX:123197687-123197901
  hypo

SEQ ID NO: 34746 - DNA, 72 bp, Homo sapiens; identical to SEQ ID NO: 13649
  chrX:123199724-123199796
  hypo

SEQ ID NO: 34747 - DNA, 263 bp, Homo sapiens; identical to SEQ ID NO: 13650
  chrX:123200023-123200286
  hypo

SEQ ID NO: 34748 - DNA, 94 bp, Homo sapiens; identical to SEQ ID NO: 13651
  chrX:123202412-123202506
  hypo

SEQ ID NO: 34749 - DNA, 176 bp, Homo sapiens; identical to SEQ ID NO: 13652
  chrX:123204997-123205173
  hypo

SEQ ID NO: 34750 - DNA, 141 bp, Homo sapiens; identical to SEQ ID NO: 13653
  chrX:123210180-123210321
  hypo

SEQ ID NO: 34751 - DNA, 103 bp, Homo sapiens; identical to SEQ ID NO: 13654
  chrX:123211805-123211908
  hypo

SEQ ID NO: 34752 - DNA, 151 bp, Homo sapiens; identical to SEQ ID NO: 13655
  chrX:123215227-123215378
  hypo

SEQ ID NO: 34753 - DNA, 134 bp, Homo sapiens; identical to SEQ ID NO: 13656
  chrX:123217269-123217403
  hypo

SEQ ID NO: 34754 - DNA, 225 bp, Homo sapiens; identical to SEQ ID NO: 13657
  chrX:123220395-123220620
  hypo

SEQ ID NO: 34755 - DNA, 391 bp, Homo sapiens; identical to SEQ ID NO: 13658
  chrX:123224423-123224814
  hypo

SEQ ID NO: 34756 - DNA, 128 bp, Homo sapiens; identical to SEQ ID NO: 13659
  chrX:123227866-123227994
  hypo

SEQ ID NO: 34757 - DNA, 79 bp, Homo sapiens; identical to SEQ ID NO: 13660
  chrX:123229220-123229299
  hypo

SEQ ID NO: 34758 - DNA, 2084 bp, Homo sapiens; identical to SEQ ID NO: 13661
  chrX:123234422-123236506
  hypo

SEQ ID NO: 34759 - DNA, 137 bp, Homo sapiens; identical to SEQ ID NO: 13664
  chrX:129139162-129139299
  hypo

SEQ ID NO: 34760 - DNA, 92 bp, Homo sapiens; identical to SEQ ID NO: 13665
  chrX:129146552-129146644
  hypo

SEQ ID NO: 34761 - DNA, 3265 bp, Homo sapiens; identical to SEQ ID NO: 13666
  chrX:129146924-129150189
  hypo

SEQ ID NO: 34762 - DNA, 178 bp, Homo sapiens; identical to SEQ ID NO: 13667
  chrX:129154947-129155125
  hypo

SEQ ID NO: 34763 - DNA, 82 bp, Homo sapiens; identical to SEQ ID NO: 13668
  chrX:129156870-129156952
  hypo

SEQ ID NO: 34764 - DNA, 393 bp, Homo sapiens; identical to SEQ ID NO: 13669
  chrX:129158961-129159354
  hypo

SEQ ID NO: 34765 - DNA, 228 bp, Homo sapiens; identical to SEQ ID NO: 13670
  chrX:129162608-129162836
  hypo

SEQ ID NO: 34766 - DNA, 223 bp, Homo sapiens; identical to SEQ ID NO: 13671
  chrX:129168428-129168651
  hypo

SEQ ID NO: 34767 - DNA, 168 bp, Homo sapiens; identical to SEQ ID NO: 13672
  chrX:129171340-129171508
  hypo

SEQ ID NO: 34768 - DNA, 149 bp, Homo sapiens; identical to SEQ ID NO: 13673
  chrX:129173110-129173259
  hypo

SEQ ID NO: 34769 - DNA, 79 bp, Homo sapiens; identical to SEQ ID NO: 13674
  chrX:129184690-129184769
  hypo

SEQ ID NO: 34770 - DNA, 158 bp, Homo sapiens; identical to SEQ ID NO: 13675
  chrX:129185833-129185991
  hypo

SEQ ID NO: 34771 - DNA, 2231 bp, Homo sapiens; identical to SEQ ID NO: 13676
  chrX:129189827-129192058
  hypo

SEQ ID NO: 34772 - DNA, 157 bp, Homo sapiens; identical to SEQ ID NO: 13678
  chrX:133507340-133507497
  hypo

SEQ ID NO: 34773 - DNA, 185 bp, Homo sapiens; identical to SEQ ID NO: 13679
  chrX:133511600-133511785
  hypo

SEQ ID NO: 34774 - DNA, 103 bp, Homo sapiens; identical to SEQ ID NO: 13680
  chrX:133512033-133512136
  hypo

SEQ ID NO: 34775 - DNA, 135 bp, Homo sapiens; identical to SEQ ID NO: 13681
  chrX:133527529-133527664
  hypo

SEQ ID NO: 34776 - DNA, 45 bp, Homo sapiens; identical to SEQ ID NO: 13682
  chrX:133527937-133527982
  hypo

SEQ ID NO: 34777 - DNA, 480 bp, Homo sapiens; identical to SEQ ID NO: 13683
  chrX:133547516-133547996
  hypo

SEQ ID NO: 34778 - DNA, 278 bp, Homo sapiens; identical to SEQ ID NO: 13684
  chrX:133549044-133549322
  hypo

SEQ ID NO: 34779 - DNA, 135 bp, Homo sapiens; identical to SEQ ID NO: 13685
  chrX:133551197-133551332
  hypo

SEQ ID NO: 34780 - DNA, 131 bp, Homo sapiens; identical to SEQ ID NO: 13686
  chrX:133559229-133559360
  hypo

SEQ ID NO: 34781 - DNA, 3133 bp, Homo sapiens; identical to SEQ ID NO: 13687
  chrX:133559689-133562822
  hypo

SEQ ID NO: 34782 - DNA, 30 bp, Homo sapiens
  chrX:135382443-135382473
  hypo
cacagggagtgagccgtggcgctcaggacg

SEQ ID NO: 34783 - DNA, 23 bp, Homo sapiens
  chrX:142200129-142200152
  hypo
gctggtctcgacaatgttgttca

SEQ ID NO: 34784 - DNA, 30 bp, Homo sapiens; identical to SEQ ID NO: 13689
  chrX:144475782-144475812
  hypo

SEQ ID NO: 34785 - DNA, 40 bp, Homo sapiens
  chrY:5572739-5572779
  hypo
gattacaggcgtgagccaccgcgcccggccaaatagtgct

SEQ ID NO: 34786 - DNA, 31 bp, Homo sapiens
  chrY:7149235-7149266
  hypo
gatgccaagtactggacgggtacaatatgta

SEQ ID NO: 34787 - DNA, 49 bp, Homo sapiens
  chrY:7525417-7525466
  hypo
tggcagcagggggtgcgcgacgggctacagggggcggggaacaggggat

SEQ ID NO: 34788 - DNA, 30 bp, Homo sapiens
  chrY:9385571-9385601
  hypo
gatgcaggcgcgcccgtggctgtgcagccc

SEQ ID NO: 34789 - DNA, 30 bp, Homo sapiens
  chrY:10034536-10034566
  hypo
gtccgcctgtggttcgctgcccaaacgttg

SEQ ID NO: 34790 - DNA, 31 bp, Homo sapiens
  chrY:14374844-14374875
  hypo
aggaaaaggtgggaggcgggggaagcagaga

SEQ ID NO: 34791 - DNA, 31 bp, Homo sapiens
  chrY:14777172-14777203
  hypo
tgtatttgagaatctacgtaataaagaagtg

SEQ ID NO: 34792 - DNA, 136 bp, Homo sapiens
  chrY:15015980-15016116
  hypo
gtatgctcataaagcgcaggcacaccggtagaaaaactagaggggtctggagttcctaggtgaaccccagcagcctaaccctgtcaagtctgtcgagcctctggctggtcacacgtgctgcggaatccactcagct

SEQ ID NO: 34793 - DNA, 80 bp, Homo sapiens
  chrY:15446138-15446218
  hypo
gaacttcaggtacccacgggtggtgatgaggctggaccccaacacgcagcaaaagaaactatcatcggaccgaacaggca

SEQ ID NO: 34794 - DNA, 29 bp, Homo sapiens
  chrY:15446277-15446306
  hypo
gagactacaaggaacgtaaactcatttac

SEQ ID NO: 34795 - DNA, 31 bp, Homo sapiens
  chrY:15562413-15562444
  hypo
aacaagcatggccaggcgcagttgctcacgc

SEQ ID NO: 34796 - DNA, 30 bp, Homo sapiens; identical to SEQ ID NO: 13706
  chrY:16636243-16636273
  hypo

SEQ ID NO: 34797 - DNA, 30 bp, Homo sapiens; identical to SEQ ID NO: 13707
  chrY:16636682-16636712
  hypo

SEQ ID NO: 34798 - DNA, 188 bp, Homo sapiens; identical to SEQ ID NO: 13708
  chrY:16636969-16637157
  hypo

SEQ ID NO: 34799 - DNA, 31 bp, Homo sapiens
  chrY:21186957-21186988
  hypo
ttcctataaaactgctcgtttatttaataaa

SEQ ID NO: 34800 - DNA, 153 bp, Homo sapiens
  chrY:21226201-21226354
  hypo
aaagcagtagcaaggccgggcagaagcagccatggcggcacaatcagggactagcgtcacacgcacatcacacccttctgatccattatatttatttcctttttttttttttgagatgatgtcttcttctgtcccctacgctggagggcaatg

SEQ ID NO: 34801 - DNA, 31 bp, Homo sapiens
  chrY:21238027-21238058
  hypo
cttccggctgggatcccggcagctgcctgct

SEQ ID NO: 34802 - DNA, 30 bp, Homo sapiens
  chrY:21877668-21877698
  hypo
taaaacctccttcacgtccccacagtgttc

SEQ ID NO: 34803 - DNA, 30 bp, Homo sapiens
  chrY:23566715-23566745
  hypo
agggcggggggcgtcgaccagttattgcga

SEQ ID NO: 34804 - DNA, 56 bp, Homo sapiens
  chrY:23568830-23568886
  hypo
ccagaccaaaggcctgcggggtagccctgccccacactctccgtgctcttgcaaag

SEQ ID NO: 34805 - DNA, 19 bp, Homo sapiens
  AC026273.7_55222-119630:48504-48523
  hypo
cccccggccccaggacaca

SEQ ID NO: 34806 - DNA, 47 bp, Homo sapiens
  AC153808.1_1-20788:20460-20507
  hypo
ttcactgagtccttaacgcctagggagggtgtcgccacgtgggcagc

SEQ ID NO: 34807 - DNA, 19 bp, Homo sapiens
  AC208171.3_11673-19430:7279-7298
  hypo
gcctcgagtaaataatttt

SEQ ID NO: 34808 - DNA, 31 bp, Homo sapiens
  AC242209.3_1-39555:31580-31611
  hypo
gctggaatttaagctccggcagacagagaag

SEQ ID NO: 34809 - DNA, 247 bp, Homo sapiens
  AEKP01149809.1_1-6354:1324-1571
  hypo
gaactgtcctggatacagagccgtcccgggtacaacaccgtcctgcgtacagagccgtcccggatacagagccgtcctgggtacagagccttcacgggtacagaactgtcctggacacagagccgtcccaggtacagagccgtcccgggtacagagccgtcccgggtacaacaccatcctgcgtacagagccgtcctggatacagagccatcccggatacagagccgtcctgggtacagagccttca

SEQ ID NO: 34810 - DNA, 171 bp, Homo sapiens
  AEKP01153556.1_1-5252:371-542
  hypo
catcacaatcaccatcagcaccgtcatcaccgtcatcaccattatctccaccactgttgctgtgaacgcatactgcactattatcacctgaggtacagtgacaacgttgtgtgatgctaaaatgtgagcttttctatctgccgatgattcggcctttgtccctctctcctt

SEQ ID NO: 34811 - DNA, 117 bp, Homo sapiens
  AEKP01166227.1_44013-111583:41309-41426
  hypo
aaccagggaaatacaacggaaaacaataagctatctttccttggaagaacggctgaggggctgggccaccttttaattaccttttccctgtgaatggtcctccgctacaagttaccg

SEQ ID NO: 34812 - DNA, 33 bp, Homo sapiens
  AEKP01172922.1_98-3151:2079-2112
  hypo
tgtggtgtgtgtgtatcgtgagtggtgtgtgtg

SEQ ID NO: 34813 - DNA, 81 bp, Homo sapiens
  AEKP01221093.1_87-1602:654-735
  hypo
cccaagcaccctacccacctgcggttctcccaccgggggcttttaagagccagggagcgagggccatccccgtgctccagc

SEQ ID NO: 34814 - DNA, 121 bp, Homo sapiens
  AEKP01221093.1_87-1602:854-975
  hypo
cctccgcacctgggcaaaagccgggaggacggggacccgcagcacaaaggcctgccgggaccttgtgtggtgggacagcctgggaatgctcaaacggggccacagggtcaaggtgtgcttg

SEQ ID NO: 34815 - DNA, 44 bp, Homo sapiens
  AEKP01225640.1_1-1497:730-774
  hypo
ctcgacgccctgggacccttccggggttgggcgggctgccccac

SEQ ID NO: 34816 - DNA, 33 bp, Homo sapiens
  GL000195.1:80191-80224
  hypo
gatcctgttgagaggtgacagcgtgctggcagt

SEQ ID NO: 34817 - DNA, 25 bp, Homo sapiens
  JH636052.4:2022604-2022629
  hypo
ttttcaaacaataaaacaggccggg

SEQ ID NO: 34818 - DNA, 45 bp, Homo sapiens
  JH806600.1:5064465-5064510
  hypo
cctcccctccctgccccgccccgcttctcccgcggctgctcccaa

SEQ ID NO: 34819 - DNA, 315 bp, Homo sapiens
  NW_001838014.1_249000-295694:3952-4267
  hypo
gttctagaatgaacaaggctgcgtgtggatcccacagacagacacccttgggtggccccgaggacgcgggagaaagtcccccttcccagaccggtctcgatctcatgggatcaagttacctggccctaaatccgactgctggagccagagccagagccgtgcggagacacggagccggccgaagccactcagggttggagccgcctcgccacacccaggaccctgggcgctacattgagggtggctgggtgcaggggtgatggcggcggttcctagttggcagccaggagacacgtactcactccagctccagca

SEQ ID NO: 34820 - DNA, 292 bp, Homo sapiens
  NW_001838014.1_249000-295694:7051-7343
  hypo
aaatgtccttcaaatgcagcccgctccgtcccacacgccactcccagaaatgtatcctcgggaagtgctccgagaggtgcacaaacaggcactcgaacaacggcgatgagctcactctccacgacggatcgccagggacgatctaaatatccactcatgctcccgcacgcacgaggttccccagcgctctgggtctcaggccgccggagaggagtatttaatgcgacaccagcgccgctcgtgcgtgctgtgaagagcagccgttaaaagcggttatgcaaatctgtgtttg

SEQ ID NO: 34821 - DNA, 241 bp, Homo sapiens
  NW_001838056.1_145425-224902:38580-38821
  hypo
ccgctcgcgtctcccgcatgcgcattggttgggccgactggcgctccgctactggctgtcaggctgagtcacctttaaataatgccgccgccacgcagcggcagcgaggctcctgctgcagccgaggcggcagctggatcccgggtccagtttgggtcggcgtgggaaaggggccgctggtgtcctgtcaaagggcgaaacacccaggagtcctctcctcaggacctccttgagccgactt

SEQ ID NO: 34822 - DNA, 213 bp, Homo sapiens
  NW_001838286.2_1380778-1470498:80825-81038
  hypo
agcagcaaaaagctgtagctgcgggggcaaaaagccatggcagcgggaggcaaaaagccgcaaaaacagcggcagccagaacaaacaccaaggcggcaaaaagcctcagtggcgggggctaaaagccaaggcggcggggagtaaaatgcctcaaaaagccgtggtggcgagggcagaaagctgtggcttcggggacaagaagccatagcggcg

SEQ ID NO: 34823 - DNA, 592 bp, Homo sapiens
  NW_001838286.2_1380778-1470498:81097-81689
  hypo
gtggcggggcaaaaagccacggcggcaagggcaaaaagttgtggcttcgggggcaaaaaaccatagcagcggggcaaaaagcagtggtggcggcggggccagaaaaaccacaaaatcccgcggcgatggggggaaaagctgcaggggcaaaaagccgcagcagcagggggaaaaaagccgtaaaaagcagcagcggcgggggggcaaaaaccgtggcggcaaaaagcctcagcggcaggagcaaaaagccatggcggcaggggcaaaaaccgcagtggaaagaagactcagtggcaggagcaaaaacgatggctgtggggggcaaaaagccatgactgcaaaaactgcggagtgtgagcccaaaaagccatggcggtggggataaaaagccacagctgcaaaaagcagcggtggtggggataaaaagccgtggcggcaaaaacccgcagcagcacaggcaaaaagccgtggcagcaggggcaaaaagccacggtggcaggggcaaaaagccgcggcggtgagggcagaaagctgtggcttcgggggcaaataaacacggcggccaaaagccgtagtggcagggcaaaaagct

SEQ ID NO: 34824 - DNA, 108 bp, Homo sapiens; identical to SEQ ID NO: 13726
  NW_001838402.2_289580-297926:6068-6176
  hypo

SEQ ID NO: 34825 - DNA, 30 bp, Homo sapiens
  NW_001838715.2_220243-222386:1284-1314
  hypo
acaggcatgagccaccgtgcttgatcaaat

SEQ ID NO: 34826 - DNA, 98 bp, Homo sapiens
  NW_001838987.1_19978397-19979692:119-217
  hypo
cacctggccatgaagatatttttctaaacattagttcatctctttattattgaagatgactttgtctgtctttagctgtcttacgaaagtattcttca

SEQ ID NO: 34827 - DNA, 143 bp, Homo sapiens
  NW_001838993.2_42143-59442:15876-16019
  hypo
cttcacacccagaatgcgggttctgggctcaggtgtgctggttgctcctgccccatgacgctcccgggagaggggactgtggcagtgcctctgcctaacgtgggccaccgtcagagcacctgcggccccgatggttgccacgg

SEQ ID NO: 34828 - DNA, 145 bp, Homo sapiens
  NW_001839646.1_1-5206:1403-1548
  hypo
ctccatggtggcagctgggaggctgcaggggcacgggcgtgccagcgagggtggcgcggaggcgcagaggatgcaagccaccgaagggatgtcaggaatggacgttgcacgggcccagtgtttcgagggaaaggggtctccacac

SEQ ID NO: 34829 - DNA, 301 bp, Homo sapiens
  NW_001839646.1_1-5206:2127-2428
  hypo
agcacctgggaggacgccgggatgcctagcatctgcccctgacgggcagaggcctctggggcactggctggcgaggtggggcttccccggcttggggttctcacgccgccccagcgacctgcggacaccggccacagccccgcgacggactcccctgggacaccggtggcgcaagcacaacttggccctgtggccccgcctgagcgggcccaggctgtcccaccgagcaatggcccagcaagatatcgcgctgcggatcctggtcctcccggcttttgcccaggtgcggaggctactgaag

SEQ ID NO: 34830 - DNA, 145 bp, Homo sapiens
  NW_001839689.1_34352-41752:1477-1622
  hypo
gaaattccagaaggggatgcccgcgatggccctctcgaaaccttctgacggcacccttcccccggaaacccggggacgggaacggcaaaggagactcatttggaccccaaggcaaagcgaggcactgcaagcctgctttgagcgg

SEQ ID NO: 34831 - DNA, 121 bp, Homo sapiens
  NW_001839689.1_34352-41752:1981-2102
  hypo
aggcggcctctgcaatgcggccctcggcgggtgtcatcctgcttcctcgttggtcgccttcgtccacaccagcctgtggggaacggggcttcctcactccacgtgccctgcgcacctgtgt

SEQ ID NO: 34832 - DNA, 25 bp, Homo sapiens
  NW_001839824.1_1-1535:1385-1410
  hypo
cagcggctcttatacaggcccccag

SEQ ID NO: 34833 - DNA, 121 bp, Homo sapiens
  NW_001840841.1_1-4205:1665-1786
  hypo
ccgtccgtgaaattccagccgggactccctgagttggccctcccgacaccttcggacaggaccctacccgcagaagcccgggaacggggaaggtgaaggagacttgtttggacgctgagcc

SEQ ID NO: 34834 - DNA, 104 bp, Homo sapiens
  NW_001840841.1_1-4205:2205-2309
  hypo
tgtgtcaccttgctccctcgtgggtcgcattcgcccacaccggcgtttggggaatggggcttcccacacaccatgtgcccttcgctcctggggctctcccacag

SEQ ID NO: 34835 - DNA, 121 bp, Homo sapiens
  NW_001840859.1_1-2890:1477-1598
  hypo
ccaccactgccatcaccacgccctcccccccaccacaccacccctcggccgcaggcctcgacgcccttggacccttctgtggtggtgccgggtgtcccagggctcatcgccattcatgaag

SEQ ID NO: 34836 - DNA, 19 bp, Homo sapiens
  NW_001840859.1_78656-82292:1286-1305
  hypo
ggggtggagcctgcctgcc

SEQ ID NO: 34837 - DNA, 121 bp, Homo sapiens
  NW_001841051.1_73730-82666:505-626
  hypo
gccagggaagagctggccagagagactgccttcccgagtacaggattcagatctcgtttcagaatcgaagggccaggccccatcgcaggcaggcggcctgtgcaacacggcccctggcagg

SEQ ID NO: 34838 - DNA, 121 bp, Homo sapiens
  NW_001841051.1_73730-82666:745-866
  hypo
ggagcaagggccatccccgtgctccagcccagcaaggccgtgccggcagagtgtatctcccaaccggatccggcacgcgggaatattccctatgctgcccctgctcctccggaaggggcgt

SEQ ID NO: 34839 - DNA, 121 bp, Homo sapiens
  NW_001841145.1_129149-174453:6132-6253
  hypo
ttggccctagggccccgcttgagtgggcccaggctgtcccaccgcgcaaaggcccagcaggccatcgcggtgcgggtcccagtcctcccgcctttgcccgggtgcggaggccaacgaggag

SEQ ID NO: 34840 - DNA, 121 bp, Homo sapiens
  NW_001841145.1_63352-67863:4021-4142
  hypo
gggaacgggtcttcccgcaccctacatgacccgcgcacgtggggttctcccacagggagctttcatgagccagggggcgagggccgtccacgtgcttcagccctgccaggccgcgctggca

SEQ ID NO: 34841 - DNA, 121 bp, Homo sapiens
  NW_001841145.1_63352-67863:4201-4322
  hypo
tccggaaggggcgctctcccaccctcagtcccctcggtggcctacgaacccgggaaaaagtcaggaggacagggaccagcagcgcaatggccttccgggcccttgcgccgtgggacagcct

SEQ ID NO: 34842 - DNA, 142 bp, Homo sapiens
  NW_001841145.1_90215-97412:6816-6958
  hypo
cggtggcacagatgtgcagattaggcgagccgctggaagggtgtcaggcctggatgctgcacgggctcagtgtttctcgagacggagttctccacccagcccaggggaggacgcattttccggggtggggggtgggtgtggg

SEQ ID NO: 34843 - DNA, 121 bp, Homo sapiens
  NW_001842224.1_80-3146:1733-1854
  hypo
tcaggaatctcggccctggccagtgagacgaagcccacaagaaggcaggcgaaagcagacagctgtcaccagaacccagacggccctgctcctccgagatttggagaaggatcgctttcca

SEQ ID NO: 34844 - DNA, 17 bp, Homo sapiens
  NW_001842224.1_80-3146:2273-2290
  hypo
gcctccacacctgggaa

SEQ ID NO: 34845 - DNA, 30 bp, Homo sapiens; identical to SEQ ID NO: 1
  chr1:569477-569507
  hyper

SEQ ID NO: 34846 - DNA, 65 bp, Homo sapiens
  chr1:859735-859800
  hyper
cgacccaactccagcccgggccggaataagttgctgccgccggcggagagcggggctgcggagcc

SEQ ID NO: 34847 - DNA, 30 bp, Homo sapiens; identical to SEQ ID NO: 3
  chr1:860007-860037
  hyper

SEQ ID NO: 34848 - DNA, 36 bp, Homo sapiens; identical to SEQ ID NO: 4
  chr1:877626-877662
  hyper

SEQ ID NO: 34849 - DNA, 30 bp, Homo sapiens; identical to SEQ ID NO: 5
  chr1:894192-894222
  hyper

SEQ ID NO: 34850 - DNA, 30 bp, Homo sapiens
  chr1:894586-894616
  hyper
cggcttacctcttgcggctccccgcagctg

SEQ ID NO: 34851 - DNA, 300 bp, Homo sapiens
  chr1:901740-902040
  hyper
ggcagagacctgcacggctcaggtaggggccaggcctcttccagaaaggctccaccctcgcccaggccctggtgccgggcgggacgtcccggagccccgcctgcccgcgggaggcgggggcaggaggctgtggacagggacccagacttgccgacctgtacgactctggccatggggaacagccactgtgtccctcaggcccccaggaggctccgggcctccttctccagaaagccctcgctgaagggaaacaggtgagcggggcgtgggtgcggccacctgggcgcagggctcccccac

SEQ ID NO: 34852 - DNA, 30 bp, Homo sapiens
  chr1:935124-935154
  hyper
taatacgcgctcggcgccgcttctccatga

SEQ ID NO: 34853 - DNA, 96 bp, Homo sapiens; identical to SEQ ID NO: 6
  chr1:935361-935457
  hyper

SEQ ID NO: 34854 - DNA, 31 bp, Homo sapiens; identical to SEQ ID NO: 7
  chr1:935826-935857
  hyper

SEQ ID NO: 34855 - DNA, 67 bp, Homo sapiens
  chr1:936193-936260
  hyper
atggcgcgggccgggccggaccacgaggagcagaacgtgcgcgtgacgcgagcgggctggtgacgtc

SEQ ID NO: 34856 - DNA, 30 bp, Homo sapiens; identical to SEQ ID NO: 8
  chr1:936595-936625
  hyper

SEQ ID NO: 34857 - DNA, 393 bp, Homo sapiens
  chr1:955507-955900
  hyper
ccccggcgcggcccgcgcgctcctccgccgcctctcgcctgcgccatggccggccggtcccacccgggcccgctgcggccgctgctgccgctccttgtggtggccgcgtgcgtcctgcccggagccggcgggacatgcccggagcgcgcgctggagcggcgcgaggaggaggcgaacgtggtgctcaccgggacggtggaggagatcctcaacgtggacccggtgcagcacacgtactcctgcaaggtgcgcccacccggaccccggcctcccctcgcgacgcctgccgccccgccgggacccccgccccaggccgtgggaaccagccccggtcgctccgcagcccccgctccggctcccttggcgaccgccaagccccgggagggggggtcg

SEQ ID NO: 34858 - DNA, 31 bp, Homo sapiens
  chr1:995029-995060
  hyper
gcccggggcgtggcatcggggcgaggcttcg

SEQ ID NO: 34859 - DNA, 75 bp, Homo sapiens
  chr1:999664-999739
  hyper
cacatgagtcagagcgatcctgggggcttcccgctgtcagcgctgacgcaagggtgggacgaggcgcagggctca

SEQ ID NO: 34860 - DNA, 31 bp, Homo sapiens; identical to SEQ ID NO: 11
  chr1:1003647-1003678
  hyper

SEQ ID NO: 34861 - DNA, 113 bp, Homo sapiens
  chr1:1004071-1004184
  hyper
gcagcaagccgcgggccgggcccatggtggtgcacttcagctgcggcggggcgggcccacgcgggctgtgcagatgcaggtgcggcggggcggggccacgcgggctgtgcagg

SEQ ID NO: 34862 - DNA, 80 bp, Homo sapiens; identical to SEQ ID NO: 12
  chr1:1014972-1015052
  hyper

SEQ ID NO: 34863 - DNA, 30 bp, Homo sapiens
  chr1:1051642-1051672
  hyper
ggcggggcgcgaagcgccctgggaaatgta

SEQ ID NO: 34864 - DNA, 57 bp, Homo sapiens
  chr1:1052181-1052238
  hyper
ggccccggggtctgggcggcgtcgctgccccacaggccgggcgcgtgggtttttccg

SEQ ID NO: 34865 - DNA, 157 bp, Homo sapiens; identical to SEQ ID NO: 13
  chr1:1072535-1072692
  hyper

SEQ ID NO: 34866 - DNA, 30 bp, Homo sapiens; identical to SEQ ID NO: 14
  chr1:1136386-1136416
  hyper

SEQ ID NO: 34867 - DNA, 30 bp, Homo sapiens
  chr1:1259929-1259959
  hyper
ccccacagccctcccggcggctcccactca

SEQ ID NO: 34868 - DNA, 30 bp, Homo sapiens; identical to SEQ ID NO: 15
  chr1:1310108-1310138
  hyper

SEQ ID NO: 34869 - DNA, 30 bp, Homo sapiens
  chr1:1334319-1334349
  hyper
cgggcccgactcgccgccaacaaaggcggc

SEQ ID NO: 34870 - DNA, 30 bp, Homo sapiens; identical to SEQ ID NO: 16
  chr1:1342780-1342810
  hyper

SEQ ID NO: 34871 - DNA, 30 bp, Homo sapiens
  chr1:1371332-1371362
  hyper
gggcgcgggcggagcgtcctgctcacctga

SEQ ID NO: 34872 - DNA, 31 bp, Homo sapiens; identical to SEQ ID NO: 17
  chr1:1434134-1434165
  hyper

SEQ ID NO: 34873 - DNA, 30 bp, Homo sapiens
  chr1:1447359-1447389
  hyper
cccggcgtggctcccgtagccagatgcttc

SEQ ID NO: 34874 - DNA, 157 bp, Homo sapiens
  chr1:1475486-1475643
  hyper
gaggggagcggaggccggggtgggggagcgcaggccggggaggggagcgcaggccggggaggggagcgcaggccggggaggggagcgcaggccgcacgggcggtaaacaaggcgcgggaggtgggccaggcggcgcgcgcgggcggggagcaggggg

SEQ ID NO: 34875 - DNA, 71 bp, Homo sapiens
  chr1:1510422-1510493
  hyper
gggacgattttgtgcgttccctcggtccccgtggggcccatagtcctcacttctgccaccccagagtcgtc

SEQ ID NO: 34876 - DNA, 54 bp, Homo sapiens
  chr1:1510559-1510613
  hyper
cgctcccgtcccgtgccgctgttaccggcctccggccccggctcatacaagcag

SEQ ID NO: 34877 - DNA, 324 bp, Homo sapiens
  chr1:1534863-1535187
  hyper
ccggctcggcggtgaactccacgcactcggccggctcgggggtctctggcgcggcggcggcgggcccagcgcgcagcggcagcggctgcaggcacaggcggtagaggacgctgtcgtgcacgtcgggcagcaggtagtcgcggcaggaggccccgaggagcacgcgctcgcacgggaagcgcgtgtaggcgccgcgccacgagcagttgagcgcgaaggcgcgcacgcggcgcgcggcggccggggccaggcgccactgcaggaggacgctgcggttgcgcaggacgctggcgcgcagggagcggccggccggggcgtgcagca

SEQ ID NO: 34878 - DNA, 31 bp, Homo sapiens; identical to SEQ ID NO: 20
  chr1:1535609-1535640
  hyper

SEQ ID NO: 34879 - DNA, 30 bp, Homo sapiens; identical to SEQ ID NO: 21
  chr1:1550871-1550901
  hyper

SEQ ID NO: 34880 - DNA, 79 bp, Homo sapiens
  chr1:1566945-1567024
  hyper
cgcaacctggcaccctccgcggcccttgcctacccacgcaccccctccccgcctccccctccaccgccccatactcact

SEQ ID NO: 34881 - DNA, 30 bp, Homo sapiens; identical to SEQ ID NO: 22
  chr1:1709188-1709218
  hyper

SEQ ID NO: 34882 - DNA, 30 bp, Homo sapiens
  chr1:1709582-1709612
  hyper
cgtcagcacttccacggcctcctcagcagg

SEQ ID NO: 34883 - DNA, 30 bp, Homo sapiens
  chr1:1710250-1710280
  hyper
tgatcccagcccggcgtcccgcccccaact

SEQ ID NO: 34884 - DNA, 30 bp, Homo sapiens
  chr1:1710546-1710576
  hyper
gccttgcacgcccacgaacgtcctcagagg

SEQ ID NO: 34885 - DNA, 30 bp, Homo sapiens
  chr1:1714256-1714286
  hyper
gccttagtcagtgccgctgtccaagtgcac

SEQ ID NO: 34886 - DNA, 239 bp, Homo sapiens
  chr1:1737717-1737956
  hyper
gtccagaggaagagaccgtgacaggtggcacgtgactcagcttctatctcacctgcgcaacttcactactaacaaacagagcttgccgctgctgccttccctatcctgtattacgtgatttaacaaaatgaatccagagcttaaaaccctgtttcctgggttggtttttcaaggaagggaatcctccagtccctaccttgttggtggtgtagctgtcccagatgataagtttaccatcc

SEQ ID NO: 34887 - DNA, 45 bp, Homo sapiens
  chr1:1747213-1747258
  hyper
gcatggcgtagatcttggccaggtgcccccgcagtgtcctcctcg

SEQ ID NO: 34888 - DNA, 30 bp, Homo sapiens
  chr1:1850260-1850290
  hyper
ggcgggcctggccccggtgacccccgcccc

SEQ ID NO: 34889 - DNA, 35 bp, Homo sapiens
  chr1:1850718-1850753
  hyper
ggagcaaagcccggcggcgcggctttatggggccc

SEQ ID NO: 34890 - DNA, 109 bp, Homo sapiens
  chr1:1851041-1851150
  hyper
gagacgcccccattcgctgggcctccactcaatgcaaaccccgcccactggccccatgcccaacgtaagcctcgcccaccataccccgctcagcgcaatcccctcccac

SEQ ID NO: 34891 - DNA, 61 bp, Homo sapiens; identical to SEQ ID NO: 26
  chr1:1935145-1935206
  hyper

SEQ ID NO: 34892 - DNA, 241 bp, Homo sapiens
  chr1:1935231-1935472
  hyper
cgcggcgccggcggcgtggtttggggcgggcagctccatggcaacggaagactccatcgtggccggagggggagcctcgcccgttctgctccccggctggagcgggtggtttggtccgacccaccaccgaccgcgcgggccggggccggggcaaggaggtcgcgggccccgaggcgcggctgaagggccaggccacaggccgcggggcggggacgtctccggggtcccagacagccaggcc

SEQ ID NO: 34893 - DNA, 83 bp, Homo sapiens
  chr1:1976104-1976187
  hyper
caccgcgcccggcccaatccgcagattttaagcggggacgacttaaaaacaggattgctgagctgcgacgaggggggctgcaa

SEQ ID NO: 34894 - DNA, 729 bp, Homo sapiens
  chr1:1981252-1981981
  hyper
gactcgggccaatgccgcgtccttgacctgggcgaagtgagcggttgcactcacgagtgtggacggcccttccctacaggggaccttggattcgctgggggcggagtgggggctggggcccagagaacccgagtccggacgctcccgtccgtgaccctggccgggttctccgctcctcgcagcttcagtccgcaagtgtgagatgtcaggggacccctggacggcggggccctcgggctggcagcgcgcgccgcaggagtttcgattcggagggtctgggcgaaggccgagaactcgcgtttccagcgagttcccgggggcgccgctccgtcccagaggccggggcccctccggttgccgggcagagccgcgccgcgcgcggtcccattggcgcaggtgcgccgcgccccgcccaacaggtagccccgcccgacaggtagccccgcccgcgcctcgccattgggccgcggccgggtgtcccccgaggattggcccaggtggcggccccgcctcgccctcattggccgcaggtgccaccgcccgccccgggaccgcccgccccgcggattggccgctggctccacctcggtccgccatgttcggacaccgccccccgcccccgccggacggtcccgccccgcgcgccccccgctcccgccccgcgcgccgccggagttccgcggagttgaccgggtcggcgccgtcggtcctgagcgctgccttccgcgt

SEQ ID NO: 34895 - DNA, 281 bp, Homo sapiens
  chr1:1982244-1982525
  hyper
gaggtcgctgcgggcccggggctgtcgcgggaggtcctcggtccccgcccgtgagcgtcacccgcggacacgtcgtggacagcgcgggctccttccccgggaccgggtttccctggggtcggccccgcgccgcgagctcctcggcccggtcattgtggtagacgttttcgctggaaagttgggcggggacgttccggccgcaaacctgtaaggactgaaagttttcatcaagttgtgaaaactcctggcgggtttcttaaaatcagcgtttcctaaacgtt

SEQ ID NO: 34896 - DNA, 157 bp, Homo sapiens
  chr1:2078422-2078579
  hyper
cacgatccatccatctcgtcatccagccagccagccagccatcctccacccacccatcctccagctatcttccattcgttcatctgttgtccactgacctctccatctatccatgtatctattgtccactgacctctccatctatccatctattgtc

SEQ ID NO: 34897 - DNA, 30 bp, Homo sapiens
  chr1:2135699-2135729
  hyper
tggtcctgccagcatcgtgagccgtggtct

SEQ ID NO: 34898 - DNA, 410 bp, Homo sapiens
  chr1:2135929-2136339
  hyper
tggggcgtgacttggcgatcccggtggctccgggcgtcagcttggacctcagacgcccctcacagctcacagccctgtggcctgctctgagggccccgcccgccgccgagcccccgggagccggagaacccgcaggacgtcagccgggtggattccctcccactgcccctgaccccactgcccagcgccttcaggactagcggatgatggacttgtgctaaactggctacgacccctccggagcagggtcctgggtaaatcagcagtgagctgcaggctcagccagccgccgcctttggtttcctcccgccgccggctcaccccacctcagacccgagctagctctccagcctggttcctctgccggaccctcctcccgggcacctcccacgccccgccctcaagccccg

SEQ ID NO: 34899 - DNA, 252 bp, Homo sapiens
  chr1:2136830-2137082
  hyper
gtccccgtgagccccgcgaggggagcctgtcccagccacctcgccgcttcaatttcctccaggtccacaggcccagcccggcgcgcgccgctcgttctgcgacctccagggcgagcgcgcttccggggcggccgtgcaagaggcgtgggaagcgcgcggggggttctgagcgtgcagtcgccgcctgcggacggcgaaggggcgggtgaaacgagtttccagcgtcgagcctgcttcgtttcaaggtggacg

SEQ ID NO: 34900 - DNA, 30 bp, Homo sapiens
  chr1:2158900-2158930
  hyper
tgggaccccagaggcgtccggggcctcccc

SEQ ID NO: 34901 - DNA, 385 bp, Homo sapiens
  chr1:2165785-2166170
  hyper
ctgggctgggtccctcgccttctggggcagcagggtcacggtgggggggctagtcctctctttcagcatcttgtttctcagccgtccctgcggctatttgtgcaatgtctgtctgtctgagtctccgggtgagggcagacaggatatggtgcgaggaagtctggggtaagtgtgagccgaaccccgccctggagtctctcggggttgtggggccacagccccagcttaggttaggccttcactgctgctggcagggcctccagagagaaggcggtggttccggggcctgggccctgactgtctggcaggaggtgtccacgccggcggcccggctctctgtggcaataatgtgtctctttctaaggattgcgaaagttgagggagg

SEQ ID NO: 34902 - DNA, 30 bp, Homo sapiens
  chr1:2322538-2322568
  hyper
cctgcgcctgccctcgccccaagtcctggg

SEQ ID NO: 34903 - DNA, 30 bp, Homo sapiens
  chr1:2323748-2323778
  hyper
cccccacagcgctgcgagttgggctgtatt

SEQ ID NO: 34904 - DNA, 30 bp, Homo sapiens; identical to SEQ ID NO: 31
  chr1:2343721-2343751
  hyper

SEQ ID NO: 34905 - DNA, 765 bp, Homo sapiens; identical to SEQ ID NO: 32
  chr1:2374845-2375610
  hyper

SEQ ID NO: 34906 - DNA, 374 bp, Homo sapiens
  chr1:2457939-2458313
  hyper
gcggaagatctcgtcggggggcagcgtgatgctcttgtccagactgtccccgctgctcccgctgccgctcgctccacactccgccattttgaaagtgcccggccagctcatcagccatggagatatatgcgcatatatttgactgccaaacgccccctcgcatagattatgttaatgaggcgccggccccgccccttccctcccccacccccggcctctgaggtctcggccgctacagggcgagctagggccagtgctgggcaggggtccgagaggcccggggctgcgggcgggcgggcggttatcctccagagatcgcgcatcagcacagaacatctggactgatgttcttttaccgcgctgtccacaggctt

SEQ ID NO: 34907 - DNA, 931 bp, Homo sapiens
  chr1:2460597-2461528
  hyper
aatatcatagaaccccgggcggccggggacttcccagaagtcacttgcttaaatgcaaacacagaacaaccccatggggtcagacacttggcagaagatgggccctgattgtcctaaaacggcagggactctgcacacacattctctgagaatggggctcctgcgggccggccagcttggggccagagccttccggagaagggcgcgtccaagcccggggcggacgacggcgggaaggcgcttccctacaggcgagaggagcaggctcgccctctggtcgtcgggccgcgcgcccgcaggtcccgccgggtcaccagggccgccagaggccgcaggcgggctggtgcgcggcggcggcggcggcggtggccttggcggagagcgcgggcgggggcgcggcgcccggcgccttgggctccttggcgggcgcggcgggcgcggccgggggccgctggaagtggtacagcagcttcatctgcgtgtcgctggcggcgtggagcgtcaggaactgcacggcctcctgcaggcaccacgagtagccttcgctgtagtcctggtgcaggctcttggggccggcggcggcgacgaaggctgcggggagacgcggcggcggtgagcgggcggcggggcgcgggggagccggggcgcggtgggaactcggggcgcggggggcccgggcgcgctcacctttgctgtgcttcaggtagctgacagccatctccaggatgtcggccttctccagcttggagttgggctggtgccgcgcgaactcctgctccagcagcagcttcagctgctcgatgctgctgttgatgcggtcgcggcgcatcttctccaccaccggcttccgcagctgcgggaggagggggtgtcaggctggcccggcacggcgcagggacccccgaggaccggaggccgcggggacagcgcg

SEQ ID NO: 34908 - DNA, 144 bp, Homo sapiens; identical to SEQ ID NO: 36
  chr1:2461950-2462094
  hyper

SEQ ID NO: 34909 - DNA, 30 bp, Homo sapiens; identical to SEQ ID NO: 37
  chr1:2462357-2462387
  hyper

SEQ ID NO: 34910 - DNA, 67 bp, Homo sapiens
  chr1:2472321-2472388
  hyper
ttgctctattataacgcggagccagatggtcttttgggagttgcccccccgcgccccccgccgccgc

SEQ ID NO: 34911 - DNA, 31 bp, Homo sapiens; identical to SEQ ID NO: 39
  chr1:2477831-2477862
  hyper

SEQ ID NO: 34912 - DNA, 30 bp, Homo sapiens
  chr1:2478074-2478104
  hyper
gcaggggtgtctgtcgcctgcgctgggcag

SEQ ID NO: 34913 - DNA, 30 bp, Homo sapiens
  chr1:2478347-2478377
  hyper
ggggacccggtggacgccctggtggccact

SEQ ID NO: 34914 - DNA, 30 bp, Homo sapiens; identical to SEQ ID NO: 40
  chr1:2478638-2478668
  hyper

SEQ ID NO: 34915 - DNA, 30 bp, Homo sapiens; identical to SEQ ID NO: 41
  chr1:2480416-2480446
  hyper

SEQ ID NO: 34916 - DNA, 117 bp, Homo sapiens
  chr1:2517410-2517527
  hyper
gccccaaggtttggcgggttaaaagctgatatgcaaccggcacgacatgaacagtatttcatgattaaagacatcgcgtccatgtataattgagatgctgccgcatttgcggggatt

SEQ ID NO: 34917 - DNA, 30 bp, Homo sapiens
  chr1:2559941-2559971
  hyper
cctacgcacctgccccgggggtgagcattg

SEQ ID NO: 34918 - DNA, 660 bp, Homo sapiens
  chr1:2560231-2560891
  hyper
ctggccccttcccgccgtggtcccgtgacctgacccggccttgagcggggcgggggcggcaggaccctcaggtctctccgcaggatggcagcgggggagtgaggcagccaggtgagcccgggcggcgggagggacacggacgccggtggtccccagccggggctgcgcggccaggcagggagggggtgggcggaggggcgggcgacgggtctgcgccccccaccctccgggagtccggcggaggcggaggcggaggcggaggcgggcgggtgcggagctgcagaagcagcgcgcgggagtcggggccggggcagagctttctggaagggaccgcgggctccctgcaggtcagtgcccctcccgccgcctctgagtccgcagctcggccccgggagcccctgggtgcccagtgcagacccacctgccccatctgacgggcgggctcgggctgggggcaggcggaccctgcagcaggtgcagcggggcgagcgcggagagcgggcacggggacaggcgggggcggggcacccgcactcacctctgcggtcggcgtagaggacacccaaggccaccagggcagcggtcaccagcagcagcagcagcagcagccccccctccaggaaccccgggcgcttctgccctgcacggccggcgctctcc

SEQ ID NO: 34919 - DNA, 60 bp, Homo sapiens; identical to SEQ ID NO: 43
  chr1:2574438-2574498
  hyper

SEQ ID NO: 34920 - DNA, 616 bp, Homo sapiens; identical to SEQ ID NO: 44
  chr1:2984306-2984922
  hyper

SEQ ID NO: 34921 - DNA, 532 bp, Homo sapiens
  chr1:2985203-2985735
  hyper
gcgggccggggcgacggggaacgcaaagcttttaaattagtaatcaaacgcagtaaaacggagcaaaaccagcccggactcgcgtccgaactatcggcgcgtgtgccccgagatccaaggaagtcgtgtggaaaaccgcagccgccgccccatcttcggccccggctggggcgggagcagcagcgcgacgcgccgcgacgcaggggcagggtggggggatagtcacctcgcctccggggccacctgggtccttttaaagtgtccggggtgcgggccccgggcgggagcgccgaacacggaatgttttcttaaagggccagttccgagctgcgctgaaaagggggggggggagaggggggagagataagtgagacgaagaccgagaaggccgaggagagccccccaatcccgcgccgaggcggcggcggcggcggcggcggcgcgacgatgaggatgatgaatacattgcaaagtttttttggccccggcgaggggtgtcagattgagtgctctgtgcgcatgtgcgaaggtg

SEQ ID NO: 34922 - DNA, 439 bp, Homo sapiens
  chr1:2986347-2986786
  hyper
agcaccgcctttggcgtccgccagccgggcgcagaggagggagaccccgagccggggaggggcggaggagggggcgcgggccggcgcccacccggctccgcgggcgcaggggcaggggtggcgacggcgggacagccgcagccacttggggagcaaaatggagacttttgcccgggctgggaactgtggtcgtgaagtttatccccggctgtgccccgcgtggtggagggcgctcctctgggacgccggcagcctgcgcgggccgccggggcgacagtgcctccgacaggagggacccacccggccacctcccgacccgccgctgccgccctcgggcccgcgtggacccctctgtacccgcttgcctggcacagccgggcccggcggggacagagctgccccggccaggctgcccggtcctcggtcttactttctcttt

SEQ ID NO: 34923 - DNA, 506 bp, Homo sapiens
  chr1:2987055-2987561
  hyper
cggaatcggcgccgcctgctcccgccgccccctcctctgcaggccgcccgcccgcccacccgcagaagaggcgcccgggccgctcccctcgaggtccccgcccgacccacgccgttccgtccgcgcctccggggccgggtccctccaggccggcctcgcagctcccggggccgagcccccaaacgtgagccgggtgcgcgcgggactcgcggcggttttccgaagctccgctccctcggctcggggcccgcccggctcgtcccaacagctgccccgcggccgtaggccccgcgctctgtgcaccagggaaaagcagctcccgagtttgtgccggacgctcctgcgccccgccatcggccgttcccggcccctgggtgaggcgcccccttcccgccgcgctccgctgccgggtgccctcggcctcggcctcccgtgacctctgacccctcttggtgcgaacaagaccgggcgtttcgccgccgacgcgaaggggctgtctgtgcgcg

SEQ ID NO: 34924 - DNA, 56 bp, Homo sapiens
  chr1:2987628-2987684
  hyper
cgggcctgctcagagtcgggaccaccgggctgcgtgtgggccgccaggtcaggccc

SEQ ID NO: 34925 - DNA, 385 bp, Homo sapiens
  chr1:3087393-3087778
  hyper
catcccagcagccagggctgtcgggagcccatggccttctctgtctgcagcagccacggtggaggcaggccaccggggaaacgtgtgtttcagctcccagagctcgggctgatggcgccagcccaaacgaggctgtcctccccagcccgtcttggctagagagcccacacagcctcgctgcagtccctaagggaaggctgggataggggcacccctgtcccagcgggaccccgcacccctcagcgccccacggagacctgcaccttccagactgacagtgctcggggccctctctccctcttgcgatttttatttcggggccacgtttgtttacttgcggcgtgacttgctctggcctgtgcacggcagccacaggcccagttgg

SEQ ID NO: 34926 - DNA, 191 bp, Homo sapiens; identical to SEQ ID NO: 46
  chr1:3310353-3310544
  hyper

SEQ ID NO: 34927 - DNA, 50 bp, Homo sapiens
  chr1:3310755-3310805
  hyper
cggtggggggcatcccaggagatctggctcggtgtgtagagaagggagtc

SEQ ID NO: 34928 - DNA, 17 bp, Homo sapiens
  chr1:3310814-3310831
  hyper
tcctgggagtgtctgtg

SEQ ID NO: 34929 - DNA, 525 bp, Homo sapiens; identical to SEQ ID NO: 48
  chr1:3325225-3325750
  hyper

SEQ ID NO: 34930 - DNA, 342 bp, Homo sapiens
  chr1:3370920-3371262
  hyper
agccgctctggccccacgcctggcaggcgactcccgggccggcctcgagggggcgtgggcgcggggagggaaggcgcaggcaccgggcggcggcggctcggcgggaatcgagaggcgcgatccagtccgggcgatcacgtgggctccagccggcccaggtggggctgtgacctgtgacgcaggcggcgccgccacaggtgcccgggacgcgccccgccccctccccggccctccccgcccgggccctcggacccggagcagccccgcccgcccagcgcccacctgcggggccgcagccgccgccctccagccagaccgcgcaggaagcggaggaggcgcccc

SEQ ID NO: 34931 - DNA, 39 bp, Homo sapiens
  chr1:3371630-3371669
  hyper
cctgcttgcccccgcccgctcgctcgctgccctctcttg

SEQ ID NO: 34932 - DNA, 524 bp, Homo sapiens
  chr1:3447460-3447984
  hyper
gactcctcagcgcccacggaccctgtcccagaagcaggcgcgcctgccgggcactgccccgccctgctccctccagcctagcaggcagcgccctggcgcaaactttaaaaacaggaaacaaagggagcgcgccggggagcgccctggccccgcccgccctgcccaggctcgcccggcgcccacctggcctctggtcaccggcgctcacggggtagccggcctggcccaggtgacatgggtagcagcccctccagaggtagcggtagtgcgtgcccgcgacgcgcgccaggccccccaggagcccaaggcaccagagcgcggccagcccgcggtcccgggacgcccccatggcctggtaggccggcgggcgggagggggcgaggaccaaccgcgctgcgccctaagccggcggccgggcgacggggcaggcggctcgggctggttctgggttccgggcgggcgcgcaatcccagccccgggatccgctccgctcggcgccgcccgggagccgctctgggccgggc

SEQ ID NO: 34933 - DNA, 36 bp, Homo sapiens; identical to SEQ ID NO: 51
  chr1:3448358-3448394
  hyper

SEQ ID NO: 34934 - DNA, 57 bp, Homo sapiens; identical to SEQ ID NO: 52
  chr1:3501583-3501640
  hyper

SEQ ID NO: 34935 - DNA, 125 bp, Homo sapiens
  chr1:3527612-3527737
  hyper
aaagcctcggagctcggtccaccacgggcctccagaggccccggggtccctggacgaccggccgagccctcccagctcctgctactcacatgccgggctgcagcgggagcaggggccgcggcgga

SEQ ID NO: 34936 - DNA, 38 bp, Homo sapiens
  chr1:3527759-3527797
  hyper
cggggagcagcagcagcaccaacgccaggaccaccgcg

SEQ ID NO: 34937 - DNA, 16 bp, Homo sapiens
  chr1:3528466-3528482
  hyper
cgcaaaggcagctctc

SEQ ID NO: 34938 - DNA, 49 bp, Homo sapiens; identical to SEQ ID NO: 53
  chr1:3540866-3540915
  hyper

SEQ ID NO: 34939 - DNA, 281 bp, Homo sapiens
  chr1:3541172-3541453
  hyper
ccccgatgggcgcgcgcccccacctgcgctccagaaggccgaagggggcatcccacttgcagggcgggtcacccgctttccccgcgggccaaggggctccaagattcccagcccctccttcccagccgctccgcgacaccctggcaaccggcttcggccccgccccttctcgttgtgtaaacaggaagtgagcctgcgcgtgacggtcgcttccggcccggcgaggggcgggagcgattgtgaacggcggcggggcagagccaatcgcggaaaacggcagg

SEQ ID NO: 34940 - DNA, 30 bp, Homo sapiens
  chr1:3566754-3566784
  hyper
aaaggaaacgcccacgtttcttccgaccag

SEQ ID NO: 34941 - DNA, 97 bp, Homo sapiens; identical to SEQ ID NO: 55
  chr1:3567247-3567344
  hyper

SEQ ID NO: 34942 - DNA, 113 bp, Homo sapiens
  chr1:3567737-3567850
  hyper
cggccttttctgttgccaaaactagacccaaacctctgcatgggattcgtctttgggtccccaccccgtgcgcccagcaaacagtgggtgagccatgaagatgtgcgagtcag

SEQ ID NO: 34943 - DNA, 473 bp, Homo sapiens
  chr1:3567882-3568355
  hyper
cggccagagaacccagtctgcgccagcccggctcgctcgcgaagccacgggcttcactgacgcgactttccaagacgtgggggtcaccatgggcagaggacatcggttcggagccagatcacgggccccataagcatcagaccataagcagcgccgccactgagagccgctcggaactcgcccagcatgtcgggtcccctagccagggcctggtgtacgtggtcgagggccctggaagccccgatggcctaggaggagcaggcgggcggggcggcgggtgtcgctggccggtagagagcttcggcctgacctagcgcaggtctggtgcgcgcagagaacaactccaagcgcaccgacgcccgcgagctccttccaaacaccgaacgggatccagagcccgagcccacaggcggcggccgggggagggagcagggtgctggccgccgcccgggagtgttcgcgtcctgggtgac

SEQ ID NO: 34944 - DNA, 481 bp, Homo sapiens; identical to SEQ ID NO: 56
  chr1:3663486-3663967
  hyper

SEQ ID NO: 34945 - DNA, 30 bp, Homo sapiens
  chr1:3688906-3688936
  hyper
ccccaagggcgagccgtctgggggcagaaa

SEQ ID NO: 34946 - DNA, 30 bp, Homo sapiens
  chr1:3712495-3712525
  hyper
ctgagcaggggcagcgcgccggggcgaaag

SEQ ID NO: 34947 - DNA, 94 bp, Homo sapiens
  chr1:3713079-3713173
  hyper
cttccggggcagcgcgcgccacttccgacctgtgccggaaaagcccatagagaagccacctggctgctagagtgccgccgcgcgtgccatagag

SEQ ID NO: 34948 - DNA, 30 bp, Homo sapiens
  chr1:3773151-3773181
  hyper
agaagaggaaaagccggatctgaaaacaat

SEQ ID NO: 34949 - DNA, 30 bp, Homo sapiens
  chr1:3773943-3773973
  hyper
ggtaatgtggtgtccgtggggcgacgcctg

SEQ ID NO: 34950 - DNA, 226 bp, Homo sapiens
  chr1:3816827-3817053
  hyper
gcgcgccgcggcggcgtccgacgtcagcacagccaatcacagtgcagcaccctcgtcatgtgattccccccccccccccccccgtgttggctctttcgtaagcggcgggcgaaggtcacaggccttgggccagtggtgggacactggagcaggaagtcggcctgtggccggccatgttcatgagggcgcgtcccttggcacccctgtagccgctatgtttcccacg

SEQ ID NO: 34951 - DNA, 126 bp, Homo sapiens; identical to SEQ ID NO: 59
  chr1:3817968-3818094
  hyper

SEQ ID NO: 34952 - DNA, 44 bp, Homo sapiens; identical to SEQ ID NO: 60
  chr1:4004557-4004601
  hyper

SEQ ID NO: 34953 - DNA, 206 bp, Homo sapiens
  chr1:4712665-4712871
  hyper
tgcccaaggggttcctggagccgacacggtccggtccggagcccctccctgccctgctggctcctagtgtgcgaagccggccccttccaggcccactccggttgcaggaagggcctccctggtgcagcaccgcctcctcacaccgctaggtggcagcactgccggcgcctccttccccgccggccgccataggccccgctggttcc

SEQ ID NO: 34954 - DNA, 93 bp, Homo sapiens
  chr1:4713981-4714074
  hyper
agcagctgcgctgggcgatgagggaccgttgggtaattgggggcataggaccgggcttcgctgggttcggggcagaagcgccgaagctccgac

SEQ ID NO: 34955 - DNA, 198 bp, Homo sapiens
  chr1:4714163-4714361
  hyper
cggcccgcgtggctcagctccgccccaggaaacttttcgcgcagcccccgctccatgcgcccccacccagtccttcttcggggccgccccctccccaaagtagctctccgggtccactgggcgcccccgtaaccgggtcggaacctcgaacggcttcgcgtgccatccggttaccctggcaacaccatccggcggcgc

SEQ ID NO: 34956 - DNA, 112 bp, Homo sapiens; identical to SEQ ID NO: 61
  chr1:4715427-4715539
  hyper

SEQ ID NO: 34957 - DNA, 1090 bp, Homo sapiens
  chr1:4715574-4716664
  hyper
cggcgctttcctctatgttgcaaatcaagggacccctcttcgcttcccgcaagcgggcaacggggtgcaccggtagccggaaaggggcgcccgcccggagcctggagcagcaccgcggccctggcggggagcggccgggtctccagggttccgcgcgtccggggtcggggcagcggcgcccgccccagcaacccgggaagtggggccggccaggcgcgcccgcagctctaggagccagcagcgcagtgtcctggccggctgccccggcgcgcctcctccccggggcccggggcgaggcgccggccgctgggcgcggcgggcgcgggggccggggctgccggggaaagctaaagctccgggctcccagcgagagcttcgcaggcggagttggaggaaaccacagccaaacagccactccgctcccccttctcctttctcggggccccggggctgagcaggggcctcccaggctcccagctgccgacccagctgtttgcgggtgacctccgggcccgacgggcgctcacagctggcgggcagctggggcgggagagctggggttcttggggagctccggcggccaccccgctgtaaacacacacgcacatacgcccgccggcgcgcccggggcttgtctgtgtctgggactccagggccagatggaagagggggttcgagcctagagcccgtggtgggggtgtccagaaagacccttctcggcaaactttgccagcccgccggggttctcgggcttctctggcttctgcctggggtggcccagggcccaccagagcacagctgtcgtttttgctgggcaggctgcctctgagccctcgccctcctgccggggcattcaccgagctcgtgcatttgggtcccgggttggaaccgcgagcggggaggacagaggtggaggcggagagcagcgtgcggttctcgagtttgtccactgggatgcactgcgctcccgcgttggggacgaaaaggccagtagttgttagcccgctgcttgagccgcccccactcagggatgaagctgcggggggagtgaggcgaagggagggaggatctagtgcgtgtcctgattttg

SEQ ID NO: 34958 - DNA, 30 bp, Homo sapiens
  chr1:4718196-4718226
  hyper
cttcctcaggggctccgagcgtccacctaa

SEQ ID NO: 34959 - DNA, 30 bp, Homo sapiens
  chr1:4718516-4718546
  hyper
ggatgaagtcaaacgcgcagtccacaaaca

SEQ ID NO: 34960 - DNA, 358 bp, Homo sapiens
  chr1:5772042-5772400
  hyper
catcagataaataccgcactgtcccccaccggggaaggcaccgtcacagctcccgcacagccggtcaccgcaccgtcccccgccggggaaggcaccgtgtcacagctcccgcacagccggtcaccgcaccatcccccgccggggaagggactgtcacagctcctgcacagccggtcaccgcactgtcccccgccggggaaggcaccgtcacagctcccgcacagccggtcaccgcactgtcctccgccaggaaaggcaccatcacagctcctgcacagctggtcaccgcactgtcctccgccggggaaggcaccgtgtcacagctcccgcacagccggtccccgcactgtcctccacc

SEQ ID NO: 34961 - DNA, 31 bp, Homo sapiens; identical to SEQ ID NO: 63
  chr1:5805925-5805956
  hyper

SEQ ID NO: 34962 - DNA, 138 bp, Homo sapiens
  chr1:5907430-5907568
  hyper
gacaaaggcgactctcgcctctcacccccgagctggtttgcggagaaagtccttgagaaacagtgctgggcaaggagcggagcttcggtgaaccgcagagctcctgatcagcaccatggagagcgtcgtcgcctgcag

SEQ ID NO: 34963 - DNA, 79 bp, Homo sapiens; identical to SEQ ID NO: 64
  chr1:6052047-6052126
  hyper

SEQ ID NO: 34964 - DNA, 549 bp, Homo sapiens
  chr1:6052411-6052960
  hyper
cacaagcctgaggaccgaggactggccgaggggcgcgccccgtccgctgccacccgcgggaggagcctcggaaggcggcgcaccgcgccgcacactcagtccaagaacccgcctcgcgtcactgtcgccgtcagggccgcggagccaatcagagcccaagtcgagggctgcgctttgcgagcgccagccaatcggtgcggcggcgggcccatcctgatttgcatgtccgacgacccctcaaccaatggtaatgtgactggcgtgaacaatagccaatcagaagctggaagaggcgtggccccgggcgtcccacgaggtgaagatgctgctggcggaacctgcaggagctagcgggattcgggggcgctaaagtcgcaggggcagggcgggaaggaagatccggcgcggggcacaggatccggagctggagcccccaggtgagtaccggggagaccccggcggggcgcgctttccaccaagctgctccgggacggcggcggcgggtatccgcgaggcccgcgctgcggcaggcgccgcggtcccgtctcc

SEQ ID NO: 34965 - DNA, 30 bp, Homo sapiens
  chr1:6053300-6053330
  hyper
tcaaggctcatccgtcgttctcgctgcctg

SEQ ID NO: 34966 - DNA, 68 bp, Homo sapiens
  chr1:6053624-6053692
  hyper
cggcattagcagcagccggggtacctgcccaccttcccaccccgccaaccagccgcatcctggtgtcc

SEQ ID NO: 34967 - DNA, 197 bp, Homo sapiens; identical to SEQ ID NO: 65
  chr1:6086203-6086400
  hyper

SEQ ID NO: 34968 - DNA, 84 bp, Homo sapiens
  chr1:6137222-6137306
  hyper
atgacagagcgacactccatctcaaaaaaaaaagaaaagcatgttttgaagaacagcatgggaaaggcccgtgacagccaatgg

SEQ ID NO: 34969 - DNA, 366 bp, Homo sapiens
  chr1:6208750-6209116
  hyper
gggtctcgagcagcgcgggcgaagctttgcgggatcggctaccgaggcggggcaggagccggcaggggcggggccttttgaggagggcaggccttcccctgggggcggggcctgttcctggggtggggcggggcgtccggcgcggggcgggcggaacactcacagtacagcgcgggcagagccattcaccgtttgggatctcgggcagcggcgggttgaggcaatgcaggtggtaggaggaggggcaggcgtcgcagcagagcagctcgcccccgtccttgcacacgcggcagaactccatgtggtcgtcctcctcctcctcgcagccgccctcctcctcttcatcgtcgtcgtccttcggctccc

SEQ ID NO: 34970 - DNA, 30 bp, Homo sapiens
  chr1:6239460-6239490
  hyper
gccgggagggaagccgccccatcctgggcg

SEQ ID NO: 34971 - DNA, 548 bp, Homo sapiens
  chr1:6241010-6241558
  hyper
tgcagacccctaggggtggtgcggatctgcgatgtctgtgcccaaaactcccgctcagaagcgacacctgtcgcagagcaggaaggagccgccgccaccagccctcggtcgttaaaggtgaagatggaggccaaagccctcgggagcaagactggaattttaaatgagcgcctccagtctccgcggcggcaagtcttaaagctaccttaagaacgcaaaagttccaggggctggccgaccgccagctctctaaccccagaaggcccgtgaagggagggccccctctcactgcctcgcaggggcactgggggaacccacctgagacacgcaggatcggcagcagtttcccttcttcccgttcaattttattgccagcaaaccccaaacaaaagaccctctgcattcatccctgggcaaggagaggtcggtccagccttctggaaccaaagactggggtgttgggaacccctccatctcccagatccgctttaactacgctgtagatagagaagccgggtcagcccagtgctggccgcctgcaaggggaa

SEQ ID NO: 34972 - DNA, 30 bp, Homo sapiens
  chr1:6259164-6259194
  hyper
ccaggcctcctctccgaaagcacgccgacc

SEQ ID NO: 34973 - DNA, 170 bp, Homo sapiens; identical to SEQ ID NO: 67
  chr1:6265379-6265549
  hyper

SEQ ID NO: 34974 - DNA, 997 bp, Homo sapiens; identical to SEQ ID NO: 68
  chr1:6265788-6266785
  hyper

SEQ ID NO: 34975 - DNA, 38 bp, Homo sapiens; identical to SEQ ID NO: 69
  chr1:6296162-6296200
  hyper

SEQ ID NO: 34976 - DNA, 30 bp, Homo sapiens
  chr1:6301936-6301966
  hyper
cttgaggcgggcctcgcctcccgcagccaa

SEQ ID NO: 34977 - DNA, 30 bp, Homo sapiens
  chr1:6304184-6304214
  hyper
cattgacatgtaaacgagggtccctataaa

SEQ ID NO: 34978 - DNA, 30 bp, Homo sapiens
  chr1:6309328-6309358
  hyper
cgtctttggtgctgcggccccggagagcgg

SEQ ID NO: 34979 - DNA, 30 bp, Homo sapiens; identical to SEQ ID NO: 70
  chr1:6310060-6310090
  hyper

SEQ ID NO: 34980 - DNA, 30 bp, Homo sapiens
  chr1:6320742-6320772
  hyper
gtgccagcgctaagcgccgctcgtgggccc

SEQ ID NO: 34981 - DNA, 216 bp, Homo sapiens; identical to SEQ ID NO: 71
  chr1:6321177-6321393
  hyper

SEQ ID NO: 34982 - DNA, 30 bp, Homo sapiens
  chr1:6321661-6321691
  hyper
ggttgggccagttacggattcacgctgctc

SEQ ID NO: 34983 - DNA, 30 bp, Homo sapiens
  chr1:6453980-6454010
  hyper
cgcatcgcggctctcgctaagatcggccct

SEQ ID NO: 34984 - DNA, 31 bp, Homo sapiens; identical to SEQ ID NO: 72
  chr1:6474547-6474578
  hyper

SEQ ID NO: 34985 - DNA, 383 bp, Homo sapiens
  chr1:6479409-6479792
  hyper
gccacgaggaagagcgacagagaaccaccaagacagaactttggccggctaccgtgcgcaccctcgctctagtcgggagctgggtgtggggcgcgccgtggcctgctgggggtccgctccgacgcgcccaccccacccaggctccgcctcgggcgccgcgcggaaccccctggtgggttcctcccgcaggagcaccccgtccccctgcccccgctccgcgccccaggaccctctgccctccgcccgggcgcgctcacctcccggcccagcagcggcaggatgagccccttaagctggctcaggctctggttgatgcgcgcgcgccggcgcttctccagcagcggcttcaggctctgcggacgggcggcgcggtggttagacgg

SEQ ID NO: 34986 - DNA, 854 bp, Homo sapiens
  chr1:6480096-6480950
  hyper
cgggaggggagaccgcgacgcccccggggatcccgctccccgcctttgcgtcctgtctaccgcggggtggcggcccccagttttccccgagcacctgcgggagagtggtaaaggcgccatcgggggccttcgctgcgtgaccccgagggcaggagggccaggtggggccaggccttgcctgactggagctacggtccctcctctccaatgctgcccttcattcattccccaggctcgggttcagcgtcttctctgagccccgccctgggccgcagcaggggacccagcggttacgggagctcccatgagggacagcagcgggagggacttgcacccccagctgctttatcgggtgaagggctgagctggacgggaaatccgagttccggagaaaggtcgtgacttgctccagtcctcgacgctgggaacaggccgagcctggacaagggccccagtcgctggacgcccggctctaaggagcccgtagaacccttcggcggcttgcctagttaagagtcttttggttaccccactccaggctttgggtggggaaacggaatcctagagaagcagaggcagccctggagccctcggagctcgttttcattcccaccggctaggggtccgggttctcgcccgcaagacagtcagggctcatgtgacgcgcgggcaggacagttttgggtgcgggccccagtggcccgcccaggaccgccttcgcgccgcgtggccgttgctgcggcaaactggctggcgtcccccgcccatctgctccgggctcccctcccccgaccggctggcggggcaacggccacgcccgcgaaccacactgcgaactgccgggcagagagatg

SEQ ID NO: 34987 - DNA, 111 bp, Homo sapiens
  chr1:6483911-6484022
  hyper
gggtgcttcaagatcgctgataggccgcctgcactcccacagccatgtagctcccaccttctgtcagcttttcctcgcgtcctttgggcactagccgctcccacggctggt

SEQ ID NO: 34988 - DNA, 30 bp, Homo sapiens
  chr1:6484601-6484631
  hyper
tgtctgtgcctggacggctctccaattcga

SEQ ID NO: 34989 - DNA, 407 bp, Homo sapiens
  chr1:6484869-6485276
  hyper
agcggaggccaggcccacagccgctccgcctcccggcccgcagatccccgacggccgcaccgcgggctcctctggcccgcaagaacacgtgcatggcgtcctggggaaggcgctgagtgcggagtcgcggcgccgcacgcggcaccatggccctggagcaggcgctgcaggcggcgcggcagggcgagctggacgtgctgaggtcgctgcacgccgcaggcctcctggggccctcgctgcgcgacccgctggacgcgctgcccgtgcaccacgcggcccgcgctgggaagctgcactgtctgcgcttcctggtggaggaagccgccctccccgccgcggcccgcgcccgcaacggcgccacaccggcccacgacgcctccgccaccggccacctcgcctgcctgcag

SEQ ID NO: 34990 - DNA, 203 bp, Homo sapiens; identical to SEQ ID NO: 75
  chr1:6507052-6507255
  hyper

SEQ ID NO: 34991 - DNA, 1589 bp, Homo sapiens
  chr1:6507490-6509079
  hyper
ggtgtcgcatttcctgcaacgtgagccaggtcgggcggggtgaagggtctgaggccaccgcagggacgcatgggctggagagtggggcagaggacagcccccacccggtcactcagtctttggcccggccgcctcactctccctcactgagctgggcctagttgggggcagctgcgatggggtgggaagccacgctgtcacccgaccccgccttacggcccctgaaatccgaggcttgagcgcgggtgtcggtgtcgctttcgtggatggcgatggtttccagatgcaggaggggaagggtggggacgcgacccggagccgggggccaaatatgagaggcctcctctgcccacagtcagccctctcccctctcgggcggggatgaaggtgggggctcagctcccagcttagggagaggcgcagggggcggggtcacatctggccggggacgggtgcagagccgcggccaggtgtggcaaagtagttggcgccccctgtggcatccgcgacggctgggggggttcagcctgggattggcgggccccgggtgatgtcaggccgtcggagcccataggctggctgtgcgcgggtggctgtaacctgagaggaagtatcaggtaacgcaggtgtcgggtcctgccgcccccacagccaggtgcacagcgggggccaccagcaccgtggcaggtaggagcagcccccggacgggcaaccggggtccgtggcaagccggagcctccgagagcacaggctctggagggggctccctccggccccggacccccgaaagacagggctccgcggagccctggggacccgcagtccttctgacagccgagagcggagtgcggccgagggcctagtgagggctaagctgggaggtgccccttcgccagctccccctggcgtcggggctgggccaccccgcccctgggcccgcctcttctggcctcagtgggggcccctgtgccccttggccggtgcccagaacccctccctgtaaggcgggcggagcctgcccttccaccgaggcccccatgaccctcgcccgctgcccactgtgagaaccagggggtctaggaagtcagctgctgcacccctcgacggccgctggccgcgagtccccaggaggtgaagagctgggtggggaggcgtggggggcgcctaccgggcaggtgcccgagccccaccggtcactgtcttcccgcagctgagctcctgtgacggccacgacgggctgcggaggcaggactccagccgcaagccccgcgccttcagcaagcagcccagcacgggggactactaccggcagctgggccgctgccccggcgagacgctggccgcacgcccgggcatggcgcacagcgaggaggtgcgtgcccgccagcccgcgcgcgccggctgcccgcgcctcggccctgccgcccgcggctcactcgaaggcccctccgctcccccgcaggcggcgctgcttcctgggaaccatgttcctaacggctgcgccgcggaccccaaggcgtccagggagctgccaccgccgcccccaccgccgccgccgcccctgccggaggccgcgagttcgccaccgc

SEQ ID NO: 34992 - DNA, 771 bp, Homo sapiens; identical to SEQ ID NO: 79
  chr1:6545271-6546042
  hyper

SEQ ID NO: 34993 - DNA, 30 bp, Homo sapiens; identical to SEQ ID NO: 80
  chr1:6546559-6546589
  hyper

SEQ ID NO: 34994 - DNA, 30 bp, Homo sapiens
  chr1:6614326-6614356
  hyper
ttgggtctccgggccgccgccgcgcgcgac

SEQ ID NO: 34995 - DNA, 30 bp, Homo sapiens; identical to SEQ ID NO: 81
  chr1:6663254-6663284
  hyper

SEQ ID NO: 34996 - DNA, 30 bp, Homo sapiens; identical to SEQ ID NO: 82
  chr1:6663649-6663679
  hyper

SEQ ID NO: 34997 - DNA, 64 bp, Homo sapiens
  chr1:6845232-6845296
  hyper
ttggacagttctttcgggttctggccactaggaagctttgtttaggtccggaaggcgggctttc

SEQ ID NO: 34998 - DNA, 30 bp, Homo sapiens
  chr1:6846145-6846175
  hyper
cccctgctctccggcgggcagggccagatg

SEQ ID NO: 34999 - DNA, 30 bp, Homo sapiens
  chr1:7764722-7764752
  hyper
tccggtgagctcaccgccgcgccccgccat

SEQ ID NO: 35000 - DNA, 134 bp, Homo sapiens
  chr1:7831037-7831171
  hyper
ccctcacttatccacgcagtccctcgccagtggctaatgcaccacgtttacagaccacgtccccaagcgccagcgcggacggcggtgcggacagggagctgtattgacctgcgttctgcgtttcagagcccgga

SEQ ID NO: 35001 - DNA, 124 bp, Homo sapiens; identical to SEQ ID NO: 84
  chr1:7843508-7843632
  hyper

SEQ ID NO: 35002 - DNA, 41 bp, Homo sapiens; identical to SEQ ID NO: 85
  chr1:7843652-7843693
  hyper

SEQ ID NO: 35003 - DNA, 189 bp, Homo sapiens
  chr1:7844212-7844401
  hyper
gcttatataacccgggcgcaccggctcgcgccccgccccagggccaatggaggcctgcggagtcggccccgacgaccaatcgcacggcccgggggcgggaccggtcacgcggcggcagggggcgcggcgccggctgctgaccggcacgcggcgagcctcgagactgcgcgagggcggccccgggggcga

SEQ ID NO: 35004 - DNA, 391 bp, Homo sapiens
  chr1:8002367-8002758
  hyper
gggaactgtggctggggcaggcgtgggctggggaaggacatcgagagtagcttgggccgtcctcctgccccgcggttcccagcacgagctctcccgacagaagaggaaaacgcggcgcgactcggttgggggacagcgctgagatgcggacagatgcggacgttctgccgccgcctgcaggcagagggactcggagatcaggccgcagaagcagaagaaggcagacgggaaggaggaggaaggaaaggagccttgtggcttcgtgtccgaccctcccgcccttggcccgcgtgcctggagccagccccaccgcgcccgcgtttcctcccgcgggacttcccttggccctgggtctgcagcgggtcctgccgagcttccttccctcaggcag

SEQ ID NO: 35005 - DNA, 30 bp, Homo sapiens
  chr1:8021806-8021836
  hyper
ccaacgggccggggcgccgcgtccgcagga

SEQ ID NO: 35006 - DNA, 1211 bp, Homo sapiens
  chr1:8085589-8086800
  hyper
ggagcggggctgaccgccagagaaccggtaccaaccaccgcaagcaatcgccgagcctcccaccccagctttcaagacaggatttacgggtacacggtgtgaacaagacaacgcaaccccctttttacaaataaaaaaaaaatcaaacaagcccccaggcccgaagacgctcatccccgccgggcaaccccgcgagcgcaggctgcgggacgaggaccttcatgctcgccgctcccgaacccccgtccgctcctgcggtcccggtgctgcggggacgtatcccgggcgctcgggtgcatggccccggccagccgaggggccgcgcgacgaccacagccggcgtggagaaggcggcgggcgccggcacttcgcggcgtccccaggcccgggctgcgccgccggggagggtcccgctctccacacctcaatggggagaagcccgcgagcgaccggccggcctctccctccatcccagagactccgcgtcgcggcgaccctccccgcgccctccacgcccccgccctcgcgtcggggagccgcctggatcccggcgcccggcgcggggccccctgagggaacggagcgctgcgtggccctccccaccccctcagcgcgccaggccccttaccccggaggagcggcggctgccccgcggcgccctcccgcgcatgtccgtcccggctggctcagcgccgcgggctcaggggcccggacatcgcgcaggcgcctcttgctggctcgcgctcccgctagcactctgcctcgcaccggaccgccgtcgccgcggctgccgccgccgcctctatatatagcataggccgccgggccgtgaggtcgccgcgtcccgccccgcctcctcccgcagccaatcagggcgcgcgccgcttaaaggggcgatgccgtggccgaggcgttgcgccgggcccaccgtggcgtatcgcggcgctgcagggagccggctttgtctcccggagaggcgtctccgggctgaccgcggccgcagctccgctcctctgcctgagccgtgcggcagccctgggagcctctcaacgccgagctttcctcagaagcccgcggcgacccgggcctcggccgctgttcctgcccgaactgagggcacatcgcgcttcgcgcgggatttcccataaattcaggctccgggcaagattgtgtgttttttcctctccgcgggccgccgctggccgtgtggg

SEQ ID NO: 35007 - DNA, 22 bp, Homo sapiens
  chr1:8277775-8277797
  hyper
cgcagggaaaaggaggatgcta

SEQ ID NO: 35008 - DNA, 30 bp, Homo sapiens; identical to SEQ ID NO: 91
  chr1:8482674-8482704
  hyper

SEQ ID NO: 35009 - DNA, 30 bp, Homo sapiens
  chr1:8483375-8483405
  hyper
tcacagaagcccaccgggaacacgaaagcc

SEQ ID NO: 35010 - DNA, 30 bp, Homo sapiens
  chr1:8483989-8484019
  hyper
tccagggcacccggcgctggaatctgtgtc

SEQ ID NO: 35011 - DNA, 30 bp, Homo sapiens
  chr1:8484402-8484432
  hyper
tgagacccgccaggcggattcagtgaaggg

SEQ ID NO: 35012 - DNA, 30 bp, Homo sapiens
  chr1:8762991-8763021
  hyper
catctttctagggtcggctggaacactccg

SEQ ID NO: 35013 - DNA, 82 bp, Homo sapiens
  chr1:8878158-8878240
  hyper
ggtggggggaagtccggttgatcttgctgttacccgggtcttaattggccttttcagtcattaggacgcggatccatgttgc

SEQ ID NO: 35014 - DNA, 30 bp, Homo sapiens
  chr1:8939514-8939544
  hyper
ttctaggtgtccggcgcgcccccacgtgct

SEQ ID NO: 35015 - DNA, 255 bp, Homo sapiens; identical to SEQ ID NO: 92
  chr1:9188650-9188905
  hyper

SEQ ID NO: 35016 - DNA, 279 bp, Homo sapiens
  chr1:9188943-9189222
  hyper
cgccgtgcccggctgcgcaggtcgggccacagggcgtgcgtggccaccagcaggcccgagccgagcgcggagagtgcgcacgacagcagcaccacggcgcgctccgacggcaccagctcggtgggcggcggggacggctgcatggcgtggggggccaggagccggagcgccgcgaggacagaagccgggccgcgcgtgcggccacgccgccgccgtctgggcaccgaggcgccctaggctcgcgtccaggcgcccgccccgcccgcgtccggccgctcc

SEQ ID NO: 35017 - DNA, 30 bp, Homo sapiens
  chr1:9295281-9295311
  hyper
gctccctccagggtcgccccgagcggccga

SEQ ID NO: 35018 - DNA, 31 bp, Homo sapiens; identical to SEQ ID NO: 94
  chr1:9352659-9352690
  hyper

SEQ ID NO: 35019 - DNA, 190 bp, Homo sapiens
  chr1:9352964-9353154
  hyper
cgctcgggcagcctgcgcgctcgcagcaggaaccaggctccaggcgccggcgccggggccggggccgcggggaggaggcgacttcgctccctgcggcgggcgcggcccgggcgcccgagcctcctcggccttggagagcagcggcggcggcggcaccccgggcgcggtaggcggcgcggggcacctggga

SEQ ID NO: 35020 - DNA, 48 bp, Homo sapiens
  chr1:9353808-9353856
  hyper
gggcgtgtactgggctcggtggcgtccaggttccggtgaggacgggac

SEQ ID NO: 35021 - DNA, 166 bp, Homo sapiens; identical to SEQ ID NO: 97
  chr1:9489049-9489215
  hyper

SEQ ID NO: 35022 - DNA, 48 bp, Homo sapiens
  chr1:9599386-9599434
  hyper
tccccgcccacatccgcgtcctaaccaatgagcgctcgaaatttgggt

SEQ ID NO: 35023 - DNA, 30 bp, Homo sapiens
  chr1:9600100-9600130
  hyper
gtggtgctcggcggcggtccagcctggacg

SEQ ID NO: 35024 - DNA, 117 bp, Homo sapiens
  chr1:9600330-9600447
  hyper
tgcttgcggccacacgcggggtggctaagccagggacccgaactcatatgaggtctggaaggtgtgttgagacacttctcgccggctggtagacgcttccaacgccagagaccgcag

SEQ ID NO: 35025 - DNA, 30 bp, Homo sapiens; identical to SEQ ID NO: 99
  chr1:9649501-9649531
  hyper

SEQ ID NO: 35026 - DNA, 1376 bp, Homo sapiens
  chr1:9711638-9713014
  hyper
gggagtgtgggcggcgggggaaggcgaggccctggaggacctgttgtttttcctgttgcaagtgaaaaggaaacaaagtgggaagtggagtgtgcgggttggcggcaggcggggcgccccggcgcgccccgcctccctccctcgaggctcactcgcgcccagcgcagtcgctccgagcggccgcgagcagagccgcccagccctgccagctgcgccgggacggtaagcgatcgccgctggctgcgtcaggggaggtgggaagaggaccgcggccaggggctttgggagctgcggctgcgctcgggggcgcggggctggctggcgggcgtctctccggcacacacagcccgtgcgccctggccctgggcgcctccccgagtctagcgagccgggtcctgggagccccgggggccgggctgctgggacctgggcgggggctgccctagaggcccggggccgtcccccgtgggcccgccgagaggggcgtgcgcagctccccggcgcctgcactgcgcgccttgcccgcctggcccggcagcggggtttcagctgcgctcacagcggcggtgcggcctccggtgcgccggctgaggcgcgaggatactggaagcgctcagcgcgtgcgcccgctccgagcgctgactagaggaccaggggcctcctctgtacggcagcggggtccacagagagcgcgctggtgatgtcgcccgagtgccctggcgcggagagagggctgcgcacagttcgccggcgcccgggtcctgtgcgcccttcccagcctgggcaagtggggagcggggctgcagaggggccggggtggaagttttcggggcttcctcccggctcgtggacccgcgccccgcctcccagtcccgggcctcccgcgttgctcgccgcgtttgctgcagcggcgcaggcgagatcagctccggatctgcggccgagccggggttacgccggcaaaaccgcccccagctttgcatttccggactttttaaaaaaatactcttacccgtaattcagcctgaatgaggctttttaaaaaaatcgagtttcctgtttttatttaggcttcctcatttgcacctcctcctttgaggtagagaagaggggaactgggacgacctttcgtgggcaccaggatgggggcgttgcagggcggggagacgggggtccagagaaccggggaagggccgctgggaggtcccgaaaagtgcgctgtgggtggggcgagggtgaagcaggtaggggcgagatttccggggtcgcgggtggggggcgccctggagcggccaaggtgcagggtcctcgcgtggcacccttgggatctgcccagtttgcggatggagcgcggggctgatcgggcaggtctcact

SEQ ID NO: 35027 - DNA, 155 bp, Homo sapiens; identical to SEQ ID NO: 101
  chr1:9747556-9747711
  hyper

SEQ ID NO: 35028 - DNA, 152 bp, Homo sapiens; identical to SEQ ID NO: 102
  chr1:9749326-9749478
  hyper

SEQ ID NO: 35029 - DNA, 30 bp, Homo sapiens
  chr1:9970644-9970674
  hyper
tgagtggccgagtccgcgctgagagcaaag

SEQ ID NO: 35030 - DNA, 30 bp, Homo sapiens; identical to SEQ ID NO: 103
  chr1:9971100-9971130
  hyper

SEQ ID NO: 35031 - DNA, 30 bp, Homo sapiens
  chr1:10003557-10003587
  hyper
ggacagtgagggcgcggtaagctccccgca

SEQ ID NO: 35032 - DNA, 184 bp, Homo sapiens
  chr1:10057143-10057327
  hyper
gcaccgggctgaggcggccgggagcgcagcggcttctaggggtgagtgggacccacgcggccccacctgctcctcccgcgcgcggccccacccccctgccccgccccgcctggtttataggtcccggcccgagcctccggccgcccgccgggtttgtcccgcgatccccgaccatgcccgccga

SEQ ID NO: 35033 - DNA, 259 bp, Homo sapiens
  chr1:10092995-10093254
  hyper
cctgacgggggtcacgtgatccctttcaaagatggccgccctgttgttttgatgaataatacttggtggggcgagggggaaagagtaggggtggaggggtaggaggatttactcttccagcgagagctacgcgcatcccatcctccccctcccccctacccgggctccggcgtggaggcggggcgtggccggcctgctttgggaggggaggggcttcccttacagtgctgggctctgccaggacggctgtggggtcgcc

SEQ ID NO: 35034 - DNA, 193 bp, Homo sapiens
  chr1:10271248-10271441
  hyper
cctgggctccgcgcacgttgcagcccggggggcggctgtgcttcgtttgaagccatcgtttctcattttccctctcccctttcctcctttgtggtgggcatcgggcttcggctgggaatgtggttatgccctttgccagatggcgataggaaaggtcatcgcttggcgctgggggagccgagggctcgaggcc

SEQ ID NO: 35035 - DNA, 30 bp, Homo sapiens
  chr1:10490622-10490652
  hyper
caggtacaggaaaacgggggtcgggctggg

SEQ ID NO: 35036 - DNA, 78 bp, Homo sapiens; identical to SEQ ID NO: 106
  chr1:10532823-10532901
  hyper

SEQ ID NO: 35037 - DNA, 30 bp, Homo sapiens
  chr1:10535372-10535402
  hyper
ccagccttgagctgcgagggcttgagaagg

SEQ ID NO: 35038 - DNA, 30 bp, Homo sapiens
  chr1:10566199-10566229
  hyper
cagccagtctctcccacactcatctgtacc

SEQ ID NO: 35039 - DNA, 503 bp, Homo sapiens
  chr1:10853672-10854175
  hyper
acaggaggcataagatcgctggaaacctgattactgaagttcaacaatattccccataaactctccttaaccgcctctaaggtggctaacaagaagggggtgggtggcgggggggcggggcggcgatctctccaattcgccggactctggggacagagatggtggctacctcctggaaaggagaagttctccactctgccctgaagagggtccaggagctcccgcgaggggcacaccctaaaaaccgaagtttgggaagtgggaaagcggctgggggtcgggggagtggcgcgggcggccggagattgcgcaggtcgcgacgcccgcccgggacgcaccgcctggtcgccaccaggacgcaaacccggcgctttgcgctcgggcgccgaacggcccagcgccccctccgggcacgtggagcgcagccccggctcagcccccggggaacaactacccccctccccatgcccggcgcagctgctcctgctcagccgggacagctc

SEQ ID NO: 35040 - DNA, 1643 bp, Homo sapiens
  chr1:10854234-10855877
  hyper
tgtgtgtgtgtgtgtgtgtgtgcgcgcgcgcgcgcgtcgtgggttgggcggggggacaccaagattatccggcgatctgttttccagtcccctcgtgcgctctcaccgcgcgcctgtaccagctcggagacgtcctaaatttactaactttgccccgcgactaccagggccttttccccctcgccaccccctgagtgtaccgggtgtcggcgggacaactacgcacaatgagggccgcacccccacactccactcggtcagaaacgcacactccgccccgtggcccagtgatccaggtttgggggagctccatactcaggagaggcgctactgccgcttttccggtgggcacgcacccgcacccgcaccgtagccagcgtggctggaaggaggtcctcgccgcgcccagagccggctttccaagctgaagctggggcagaggaacttgtgtggaggaagagggggtcccctgcctccctcagcgctccactagcctcccccaactccggacccgggtcggggatgacttggaagaagaatctgcgcccaccccttagagaaaaatctattattattatcttaatctacgcccccaaagtgtccctccagccgtgattgacggcgcatacacctgttcccttcgcggaggagcttccagcgccggggacagacattcgcccaaacgctccgcagcggcccagcaaccgcccgcccgcccgcgcccggccagcccccgccagcggccccagcgcgcctctgcccgcacctcgccaccccggcggccgccccctccccttccagacccggctgcccggcccgccagctcccggcagtgctggcttcggaaagagagagaaagaacagaaagcaaaacttcctggcggccgacggccatcagctgcacattctgcaaatgccaccgagtaaaaataaaccggccgccgctccgcccgtccggctcaccccgggcgcacgaatcggccccctgccccgggagatccctgactcggtctggcccgatcccccattcccgcgcgccccctggatccccgctccccgacgctcctccgtcagtcaccacgctctcctttgccgttaagccggaccctaagtgaccgggaaaccggctctctccctttggtgttccctgcgcccccacaaactacttttttctctgtccttcaccaggtgcctatttcagccctgtgcccttggattcagggctcctcctccccaattgttgagctccgaggtcaccctcagcccaccctgggggaacagaccccgaccgaccctctcccacgctgcagagcccccccggagcgcaccactctaccagcccgctagcccgccagcccagcgtcccacgtccccgggcgcaacttctcttctggcgcacacaacagccggcaacaactcgcccgaactttccccgggacccaggcgggctccagccgacagccgggcagctctgggccgatgccccggctccccgtgccctgtgttgccagcccttcagctggggaggcagggggtggggtggggaagggagtgaggaacgccacttgccgcgcctggagcagcgcacttgagataaacttcccaggcacagatgaaaaagggggcgccgctccccccatcta

SEQ ID NO: 35041 - DNA, 578 bp, Homo sapiens
  chr1:10856314-10856892
  hyper
ccctcccccggagccgcgcgccgggcattcccctggccacggcaggcaacgcgccgccccgcgcccgggtgccagccctccgtgccccctgcctccgcacggccggagttgggtggcagccgccgatcgcaggctggctggctggctcgctcgctcgctcgctcgcccgctccctgctgcaagcggcagccccgggggtggggggggtgcaccgggacagggggagagacggggaggcgccccgggaggcccgcggagctgggggacgtgggggggccgcggcggagggagcgccgagtctcttacctgcacttggggcggctttgggtgactttccaagtccgggggaaaaatgtgtgtgtgtttgggatggagcgccgcgggcgcgcatgcgctgcccaaagttgccggatcccggatttttcgctcccagtctccgctctcgcccgctgtgattatggaattctccgcggccgggcgggcgagtgggtggcatgcaaaacccgggccggatcgcggggccgggctccgctccaccctcacacccccagacctgcccctcccggatccttcccacc

SEQ ID NO: 35042 - DNA, 30 bp, Homo sapiens; identical to SEQ ID NO: 110
  chr1:10890877-10890907
  hyper

SEQ ID NO: 35043 - DNA, 30 bp, Homo sapiens
  chr1:11004281-11004311
  hyper
tgtccaagatctcccggcagctgctgaccc

SEQ ID NO: 35044 - DNA, 30 bp, Homo sapiens
  chr1:11072440-11072470
  hyper
ggcggttggtcggccgaaaccatctgctac

SEQ ID NO: 35045 - DNA, 30 bp, Homo sapiens
  chr1:11072727-11072757
  hyper
cggtggctgggctgcgcttgggtccgtcgc

SEQ ID NO: 35046 - DNA, 30 bp, Homo sapiens; identical to SEQ ID NO: 111
  chr1:11120531-11120561
  hyper

SEQ ID NO: 35047 - DNA, 30 bp, Homo sapiens
  chr1:11160078-11160108
  hyper
ggttgggaagcctgcgattaggttgggaag

SEQ ID NO: 35048 - DNA, 58 bp, Homo sapiens
  chr1:11322713-11322771
  hyper
gcttctccagggggcggggactgttcaaatagacaaaccacgcggccagtggcaggtg

SEQ ID NO: 35049 - DNA, 30 bp, Homo sapiens; identical to SEQ ID NO: 112
  chr1:11333397-11333427
  hyper

SEQ ID NO: 35050 - DNA, 30 bp, Homo sapiens
  chr1:11380408-11380438
  hyper
gggagctcccagtgcggccatatatgcctt

SEQ ID NO: 35051 - DNA, 1290 bp, Homo sapiens
  chr1:11538705-11539995
  hyper
gctccctccggagggcgcccggggatgcccgcgagtgtccaggaggctggtgacctgccaaggctgggcgggctggctggagaggagcgggagcgcgggcccgggagagacttgggtatcaggaaactcggaggcggggctggggggtggtgcctggcccggaccgtctgcaggggcggggaccgacccccaggggtcgctgcgccttgcgcttcccccgcccgcgggcgccagggccgggctgaaccaccgcgcggatcggcagggggagcggcggcgaagacagcgccagacagcgggtcccagagaccgcagcgcgcggcgtggcgcagggtctcgccggccactgattcaaggcgcggcggcgcggagcccgagaggcgccagggattgggcggcagcgcggctccggagcctggctcggacacccccgcgacccgtggtaggagcccggacccaaacaaaggcgggcggcgaataaaaggcggcggcggagcggagtgctcgggttgcgagctgaggactgggattcgcgcgcagcttcccgcggtctgcttgccctggagcggagggggagccccagcctcctgcggctccgagaagcttccccctgcgacttccgcgaggagacgagtctgcgcagcgtggtggccgccgccccccgaccctctgcgcactctctcccgcgccggcggctcagcctagccccgttcggccggccgaggtgagtgcacggccgcggggcgccatccgggcttggtctcggggctgggggatgcattgctaggaggagggggaagtcctccgcgccgtccgcaccccgacctgcttggcgccgcgcgcgaagttctctcgctctccagccagcccgggatgcgggcctcggagccccccgggaaagacggtcaggggtggacagaacccaagcttgccctctacgaccgggccccagctccgcaccatctccccgcgggactgcagcattcttggtcggccaaggggagttggatgttggatgtccaggaacggcaaggcttccgacctctggcccctgcttgtcccctctgagggatatctgggtccataaaagttgagcgtcagtctgaagccgcccttggatcgggctctcgcccatgctagagcggagggaggggacagagtaaggctaatgaccccctccacccactccctacctagcgtactcgtgctctcggagggacatttccccgattaacctggctgcaggtccggccggggagggcgcgtgggggcttggggcgggccgggcca

SEQ ID NO: 35052 - DNA, 139 bp, Homo sapiens; identical to SEQ ID NO: 114
  chr1:11540039-11540178
  hyper

SEQ ID NO: 35053 - DNA, 30 bp, Homo sapiens
  chr1:11618431-11618461
  hyper
cctttggaggcaggcgcatagtcggaggaa

SEQ ID NO: 35054 - DNA, 36 bp, Homo sapiens; identical to SEQ ID NO: 115
  chr1:11624041-11624077
  hyper

SEQ ID NO: 35055 - DNA, 80 bp, Homo sapiens
  chr1:11715182-11715262
  hyper
gctggggtcgccatcgatgtacaggggtccgagcccagactttggggggcattttaaggcacagcgtgggaaggggaggc

SEQ ID NO: 35056 - DNA, 30 bp, Homo sapiens
  chr1:11724223-11724253
  hyper
tgtgggtgctgagccgcccgccgcctggag

SEQ ID NO: 35057 - DNA, 116 bp, Homo sapiens
  chr1:11740564-11740680
  hyper
agcccgccggcccagacgcccccgcccccgggcccgcaggtccagcctccctaccttggccaaagttgaggtcttgtcgtgtgagcgtggtcatccttcccgctacctgagtgttg

SEQ ID NO: 35058 - DNA, 30 bp, Homo sapiens
  chr1:11741518-11741548
  hyper
cagctggggactaacggcagccacatctga

SEQ ID NO: 35059 - DNA, 30 bp, Homo sapiens
  chr1:11750648-11750678
  hyper
cataatttgccacacgctggagaaagaaaa

SEQ ID NO: 35060 - DNA, 37 bp, Homo sapiens
  chr1:11751777-11751814
  hyper
gcccgggcacatcctccggctgcccgcgcacctctcc

SEQ ID NO: 35061 - DNA, 30 bp, Homo sapiens
  chr1:11752479-11752509
  hyper
cgccggtggccccgcgccgtcccatctgtg

SEQ ID NO: 35062 - DNA, 30 bp, Homo sapiens
  chr1:11761922-11761952
  hyper
ttctgtagcagcccacgtttcctcgggggc

SEQ ID NO: 35063 - DNA, 30 bp, Homo sapiens; identical to SEQ ID NO: 119
  chr1:11779788-11779818
  hyper

SEQ ID NO: 35064 - DNA, 30 bp, Homo sapiens
  chr1:11796282-11796312
  hyper
gaacctgaaggtggcgacgggctgggggga

SEQ ID NO: 35065 - DNA, 30 bp, Homo sapiens
  chr1:11822281-11822311
  hyper
gcggggatcgttagcggtcccagcccccgt

SEQ ID NO: 35066 - DNA, 30 bp, Homo sapiens
  chr1:11865337-11865367
  hyper
caacattcactgagcgccaaagggccaggt

SEQ ID NO: 35067 - DNA, 30 bp, Homo sapiens
  chr1:11865843-11865873
  hyper
cctccagcgctccccgcccacaagcacgtc

SEQ ID NO: 35068 - DNA, 39 bp, Homo sapiens
  chr1:11866365-11866404
  hyper
gctgctgcggtgagcgtgagacccgcacccccgaggagc

SEQ ID NO: 35069 - DNA, 30 bp, Homo sapiens
  chr1:11919361-11919391
  hyper
gagcgcggggagcacggggtgactcacagc

SEQ ID NO: 35070 - DNA, 30 bp, Homo sapiens
  chr1:11919607-11919637
  hyper
gccagaaagacctgcgtggagcaaggacaa

SEQ ID NO: 35071 - DNA, 30 bp, Homo sapiens
  chr1:11959126-11959156
  hyper
gcccgcggggttcacggccaggactcagcc

SEQ ID NO: 35072 - DNA, 30 bp, Homo sapiens; identical to SEQ ID NO: 121
  chr1:11994682-11994712
  hyper

SEQ ID NO: 35073 - DNA, 336 bp, Homo sapiens; identical to SEQ ID NO: 122
  chr1:12123217-12123553
  hyper

SEQ ID NO: 35074 - DNA, 220 bp, Homo sapiens
  chr1:12123787-12124007
  hyper
cgcaagggaggacactcctcaccccgttccctgcccagctggagtgagggggcgcgggtgacaagcaggaacaccggaatatgctagcacccacaggtgggaggctggctgaagggctagtggtggggggcgcctccttctcaccccgcgatggctgggactgattcattcattcagtgtgaattggactgagagcactgccatacgcgggaggcgctct

SEQ ID NO: 35075 - DNA, 31 bp, Homo sapiens
  chr1:12226897-12226928
  hyper
gaggtatcggcccagcgatgctggagtggtc

SEQ ID NO: 35076 - DNA, 694 bp, Homo sapiens; identical to SEQ ID NO: 125
  chr1:12227254-12227948
  hyper

SEQ ID NO: 35077 - DNA, 31 bp, Homo sapiens; identical to SEQ ID NO: 126
  chr1:12677601-12677632
  hyper

SEQ ID NO: 35078 - DNA, 30 bp, Homo sapiens
  chr1:12677980-12678010
  hyper
ctgattgccagcaacgtgcaggagaagtgg

SEQ ID NO: 35079 - DNA, 30 bp, Homo sapiens; identical to SEQ ID NO: 127
  chr1:12678340-12678370
  hyper

SEQ ID NO: 35080 - DNA, 150 bp, Homo sapiens; identical to SEQ ID NO: 128
  chr1:12678626-12678776
  hyper

SEQ ID NO: 35081 - DNA, 204 bp, Homo sapiens; identical to SEQ ID NO: 129
  chr1:12679117-12679321
  hyper

SEQ ID NO: 35082 - DNA, 30 bp, Homo sapiens; identical to SEQ ID NO: 130
  chr1:12679936-12679966
  hyper

SEQ ID NO: 35083 - DNA, 226 bp, Homo sapiens
  chr1:13839542-13839768
  hyper
acgcagggagcgcagcgcgggcagcgcggccagggcggccacgctgaggctgcgcaggttgttgtcgttgagctccagcacctgcagcgactccagggtctcgaaggcgtcctcgtgcacgcccaccaggttgttgttagccaggctaagcttcaccagcctcccggccgagcggaaggcgccggcgcccagctgggtcaagttgttgtagctgaggtcgaggaac

SEQ ID NO: 35084 - DNA, 187 bp, Homo sapiens
  chr1:13840392-13840579
  hyper
gggtggccgagtggccgtcgccaaaacgcggccccaccctggcagctgatttccgagatctggcagtaagacgccgcgcgcaccgggcgggctgcactcgacgtctaagttcagctaccaagcccaggagcggtttccctaaggcgtgtcccgggcgtgcgccctgccccctcgcgcccgcctggtg

SEQ ID NO: 35085 - DNA, 131 bp, Homo sapiens; identical to SEQ ID NO: 133
  chr1:13910116-13910247
  hyper

SEQ ID NO: 35086 - DNA, 446 bp, Homo sapiens; identical to SEQ ID NO: 134
  chr1:13910310-13910756
  hyper

SEQ ID NO: 35087 - DNA, 95 bp, Homo sapiens; identical to SEQ ID NO: 135
  chr1:13910793-13910888
  hyper

SEQ ID NO: 35088 - DNA, 715 bp, Homo sapiens; identical to SEQ ID NO: 136
  chr1:14026481-14027196
  hyper

SEQ ID NO: 35089 - DNA, 162 bp, Homo sapiens
  chr1:14075413-14075575
  hyper
ctcttggtctggaacgcgcgctagtcgttgtctttcagcactccgctttccacaccgcacgcttttcagttatgctttacatttctcctcgacttagatttcgtgagcaaaatgggcccatgttttattttttctcgtgcgtgggccgtcgtgaggctttaa

SEQ ID NO: 35090 - DNA, 30 bp, Homo sapiens
  chr1:14076276-14076306
  hyper
ggcggcagaaagtgcgcggacggcgttccg

SEQ ID NO: 35091 - DNA, 234 bp, Homo sapiens
  chr1:14219351-14219585
  hyper
gccgcaccggggtggcggcgcgggctgggggccgctgcagcaggtctcagtccctccctgctgccacgcgaggagtggggagcggcagggcctaggcgtcccgagtggaggatgagccggagacgcctgcgggtccggagctgcaccgcgcccgtgcggcccgcgccgcccgcctcccgcgctctccctttggcagcagccggacgcctggcgcgtgcaggacctggggccgcg

SEQ ID NO: 35092 - DNA, 195 bp, Homo sapiens
  chr1:14219639-14219834
  hyper
cgccagcaaggccagctccccggggaccctggggcagcctcgcgccctgcctgcctccctggactgagacgccgcggggcctgggcagcgctctgccggcagctggtgctggaacacagccggggctgagctgctcccggggaccctgccccttccaggtgaccccaggagaagcagccccgggccggggggcaa

SEQ ID NO: 35093 - DNA, 1868 bp, Homo sapiens
  chr1:14924520-14926388
  hyper
gccaatattcagcccggctaagaagcttaggagctggctaaggctgctcctccacctggatgcacacacagggctagggctgtggagaggcgggagcaccagcggcccacgccgaggaagataggcgctccctcctggggtgggcagcgcaggtctggcctgcgggtggggggtggagagtgagaggcacgcggggcaccagctcagctcccctctggggatttcgtactcgcagtttaaggaaccggtggagcacgaactccactcctgagctggcgcaagcgtctcccttccatggagatccaccccggctcccctctgaggccccctttccaagcaccctctcttccgagcacccagcacctccccaaccttagcacggctcggggcaccagttctccagggcgggggctgccccaccgctcaagggaggggacagagggccggcctcggtccaggcgacccctgcccctcgccaggggcgccaccttggccccctcccgactgccgtccgccgcctccgcccccccggggggtgtgtctccgaagtacgggggcgcgggaggccaagggtgcccccagcctccgaccgagaccccctcccgagccggcggcgaatggtaggctccatttaaagagtgcctggtggcgcgcggtgtccttcttggagcagctctcggcgcccgcccgccggggtctcggcgatcgctgctcctcctcctccttctcctcctcttttttctcctccgcctcctccccccgccgcctcgccaccgccgcggctagggctggaggcgccgctgtcattcctgtgccggaggaaccggcgctgccggtgcctgggggtcggggcgcgggcgaagccgggccgcggaggacacaacaggtagagccgggggtgcccggccgcgcgccccccgcgcatcatgcagctctttgtcacctctctcgcccccaggccaaaatcctgagcatgatggaagacaataagcagctcgcgctccgcatcgatggggcggtccagtcggccagccaggaggtgaccaacctgcgagccgaactcacggccaccaaccggagactggcggaactgagcggcggcggcggccccggcccgggcccgggagccgcggccagcgcctcggcggcgggggactcggcggcgacgaacatggagaacccccagcttggagcgcaaggtaggatcgccccggcgcccagggcggaggaaggcgagcagagcacgcccggcctcggaggtggccggggacccggggtcccccacacccggggcgaaatcgctttgcattctggcttgtaaccctttccgcccggcggtggccaccgctgctctccggctgggagttgcaggctgctgtcattcacgaaaacccgagcgcagtgtgcacggggtcacacggtcacaccggccccggccagcctgagcgaggcgcagccggcgggtcccttccggcatcagaaagtgccctttccgtggcaccagccccctagctccgtgcaaacttttcatgccggggccttttccccaccccccgcaggggtgaatggcacagttccccccacttccttaggctccttcccagagagagctccgggctctgccgccgtggttgggatagaggattgcactgctgtgcacttttctccgcggatgccaaatcccttggctcagttgcatctggactttattttcttctcatttgaggtctctcaggcattggaatctatagatgcaacagtagatgctcagctcagcagggagtttaaatttccgcaaatataaacaccgagagcactttccagggggatactgtagacctcaaaggttgagcggtagagaaatgaag

SEQ ID NO: 35094 - DNA, 39 bp, Homo sapiens
  chr1:15250612-15250651
  hyper
ccgcgggactgagagccgttcccacgtgagaggctccgc

SEQ ID NO: 35095 - DNA, 125 bp, Homo sapiens; identical to SEQ ID NO: 141
  chr1:15250889-15251014
  hyper

SEQ ID NO: 35096 - DNA, 290 bp, Homo sapiens
  chr1:15251254-15251544
  hyper
ctcggcgtggggaccggggctcgggggctgcaccggggggccaggaccgcgcttgccggagccaggcgatcccgcggcgcctggagacccagctccgggctggaccccgcgtctgctgggggaagcgtgggaaaggggccagccctgcgcgaagttggttcggccccctgggaccgcacctgtgagccatgtggcggcccccgcggagtgccgaggggagcccccttcaccgccgcccctccgaggcgaaattgatgcctcgcatttgctaggagcggagagattgctgc

SEQ ID NO: 35097 - DNA, 1987 bp, Homo sapiens
  chr1:15478881-15480868
  hyper
tctgcaggtgtacacacgtggacaccatatgtacccatgaattccgcctttggaagtgaacttgattgcagcctattttcgtctggaggcggtggattcccggtaggaggcgccttcagtcctcggctcgatcctgtgacgccagccagctgcctatcggcttctcagtgtttgaacttcaaagggctggacgctcacccaagaaggggaccccggcctgacctctctcggaattcaaaaaaatctaaggctcagagagggaatgggagctggctcttccctctgtgtttagcatccacgttttttggcggtctggctgaaaccagcccaccctagttcgggcgccagagcaacgcagttccgagggcagatctccaaggggcggaggcagagccgcgggtgagaggcttccgcgccgacttcgggtttgcactccccggagccagaactccgtggcggctccgggcctccgtggatccgagcagagactggctgcccgcctgccactcgcaggctgggaaaacgccagccggtgcctcgccgggaaagttctcggcaaagctggggatgagccctcagcagggcaggctcccggtgcagcgcgcccccatccattgcccgcgcgcaagaacccggaatgggccccacctgggccgggactcgggcgtgcgatcccgagggcgccctggggaccacgcatcgggtggggaccctggccgagggcgtgagctgactcagtttttaaaaactcgcttcctccttccctacttgtgccggtcactcacctcgctgggaaccagcccagggcagaagggggagagggaggcggtggcctccccaggaaggaggagaggtgagtatcccgccaggtaaaggcggggcggctggcggagctgtgcctcggcgtctgcgcctggtgtgggaggaaagcgggtctcccagctccacttaaacccctaaaacctgggacttctagcttgagacattccccgaccaccacccgtcacacacacgcgcgtgcgcgcacacacgcatgcacaccgattctctgggccctagggaggaggggggatcagggctctattttctcccgaccccctcttatccaactcggctggcaagggttggggagaacttaggcccagcccccggcacacgctcagcgcgctccagcggcatacgctggggagtgggtgcccgcctcgctcagctgcgatccctcgcctcgggcccgggggtggtgccgagggccgggagggagggtcggccggtgggcggtgcttctccgggctggaggccgctcctggccggcaccgccctccgcctcccgcggtccctccctcccgcacgccggcgctcccaggccgcgcttcctgcgtccccaacccggtccctgagagggcagtgcgccctctccaccactgcgttccctcggctaagaatcccccgaaccccagccccgcgatcgcggcgcccaccgaggaggccgcccgggtggggcgcgggggtcgcgaagcccgcagtcccggaccgcccagccgagacggagccggacccgccgcctcccgggtgagtctcagccgccgcgccttgcgcccgctgcttcccgcggcgcgctgtcggttccccacagggccgtgtaagggggccgaggcccgtttgggtctcctgtccgtccgtctgtccgccgagcgcttcccgcctggggtcgaccaccgggaggactccgcaccccgcaccctctgcggccgcgccccgccggcgcgggacgctcccgcctcccgggcaccgcgcctggccagctggcctcggctggggaaggcagctggccttgggggccccctgttggcgggaacaggtgctatccgcccggcgggcttcgaacccttggcttcgccagaagcgctttcagcgcgtggttaggagcagaacttcccagtaggtcccaggaaaccaccttggcgctttgctcgcgcatcccttactg

SEQ ID NO: 35098 - DNA, 464 bp, Homo sapiens
  chr1:15573639-15574103
  hyper
ccctgcacggtgccacgccccctctgccgcgcaggccacgccctcatctattaggctggaccccgcggcgcctggcggcgttgccatggcaacgcgcgtacacaggccggccgggcgggcggggtgccgggtgcgagctggagactccgcgggagcgcggccgggaggcttcgccccggagctggcccgacgcctcccgagctggcagggctctcggcggaggtcggagcgtgggcttcctcctcccgccaggtgagtgcggcgcgggaaggggtggcgggccgagaccggggaccggaaggggcggcccagcgaggactagccctggcaggaggaggggtggctccccggccccatcctcctggatccaggctccggtccccaggagcaccccagtagctaccccaacaccagcccctcctttccagatgcaggccccaccccgcccgcggaggaagcccccg

SEQ ID NO: 35099 - DNA, 30 bp, Homo sapiens
  chr1:15735950-15735980
  hyper
ccagtgtttaacagcgagtcgtttccatag

SEQ ID NO: 35100 - DNA, 120 bp, Homo sapiens
  chr1:15853173-15853293
  hyper
caaagagcgcgcctcgtttctatagcaaccaccccaggtccacgcctagacggcgagtggcaagggtcaaaatagattcgcccagtagacgccctcgacctgttcggtcctcgccttcag

SEQ ID NO: 35101 - DNA, 152 bp, Homo sapiens
  chr1:15905372-15905524
  hyper
tagggatccaaggtcgtggaagagccccggatgccaatctgcaccacacgcttacagtccaggagaccctcatccacacaccggcggaagggcgccccgtggtagagcttctctcctagggccttgtcggtcgtgtccgtgtgcgcatccac

SEQ ID NO: 35102 - DNA, 30 bp, Homo sapiens; identical to SEQ ID NO: 147
  chr1:15944302-15944332
  hyper

SEQ ID NO: 35103 - DNA, 96 bp, Homo sapiens
  chr1:16011343-16011439
  hyper
ccccaaacctggcccggggccctgccctcccggagaggggtcagcgaccctccggtcccccactggggcagcggcgcccccgggagctcctgaagg

SEQ ID NO: 35104 - DNA, 30 bp, Homo sapiens
  chr1:16068052-16068082
  hyper
agcatcaggaagggcggccccggcctgtgg

SEQ ID NO: 35105 - DNA, 133 bp, Homo sapiens; identical to SEQ ID NO: 148
  chr1:16085154-16085287
  hyper

SEQ ID NO: 35106 - DNA, 30 bp, Homo sapiens; identical to SEQ ID NO: 149
  chr1:16161658-16161688
  hyper

SEQ ID NO: 35107 - DNA, 30 bp, Homo sapiens; identical to SEQ ID NO: 150
  chr1:16162194-16162224
  hyper

SEQ ID NO: 35108 - DNA, 30 bp, Homo sapiens; identical to SEQ ID NO: 151
  chr1:16176410-16176440
  hyper

SEQ ID NO: 35109 - DNA, 30 bp, Homo sapiens
  chr1:16302446-16302476
  hyper
tccccggccccgggcgattgttgacactca

SEQ ID NO: 35110 - DNA, 30 bp, Homo sapiens
  chr1:16399852-16399882
  hyper
cggcgaggggactgcgcgggtccccggcac

SEQ ID NO: 35111 - DNA, 30 bp, Homo sapiens
  chr1:16400315-16400345
  hyper
ggggacagagggggcggggagactcctggc

SEQ ID NO: 35112 - DNA, 248 bp, Homo sapiens
  chr1:16481257-16481505
  hyper
aaaaaaaaaaaaaaaaaagaaggaaacttctcaccggcccaagtttcctcccggcttcccccttgtggagcctgcggaaacctcgctctgcccaggcaggaggggaagccttgccctcactgttggaaattgaagctggcctgggctgggtggacaggaaggtcttcggccagggcaggagcccccatcctcgccctgaccctagcggagggacaacacccccaccacgcacccgctgcgccatgagc

SEQ ID NO: 35113 - DNA, 900 bp, Homo sapiens
  chr1:16481895-16482795
  hyper
ccccctccccaaaatgcgaggcctgcacagtatgccttctccgcaaaacctcggcaagcgggttagtgaattcaggtcactaagaagctgagcccgcggaaagctgcccaaacacccccttctctaggggactccccacgccccccgccgggacgcgttcccgaagtcgccgcctggactgcaaccgcgtggcctgcgccgcgtcctcttctccgcagcctccgaggcccgtgcgaccaagctgaaaccgcttattctccggagcccctatgaccccgggtgggggccagggctcgcctcgatcgcagcccgtgcgccctccggactccagttcgccgggactgggcgacaccaggtaggttccaaagttgcgcgcgtcaaggagcgccgggctctagggggcactggggcccgggggccaggggtccagacgccgcgcgcactcaccttccttgccctgcgccgccgcggccgcggccagcgcacagccccacagcagggcgaagcaggcgcgggctgcctggagctccatgccgcgcttctcgctctcggtccgatccccccgagcccggctcccgcacacccgcacgcctgcacgccggcctcggtgtccgctcccgcccgccggcctgcgcgcaacttctgcccctcctgccccgagtccttaatggaagttgggtgagaaccgactcctgttcattcatgccctgcgtgacgtcaccaacgcccgccctcaggaatgtctttaaaggggccgggctggcacccggaggagagggaggggaagtccggaggggtttggaggaggaccttggggccctctggactcgcgggctccccgcaggccttccaaagtttgagcgtctcaaagcgccagcgcccctacggattagcccccag

SEQ ID NO: 35114 - DNA, 69 bp, Homo sapiens; identical to SEQ ID NO: 154
  chr1:16514365-16514434
  hyper

SEQ ID NO: 35115 - DNA, 92 bp, Homo sapiens
  chr1:16542924-16543016
  hyper
atggtcattatgttgcgggtggggccggggtccgcctgccttgctgactgaaacagcgtctcccggttgtctgccaccgcctgcttggccag

SEQ ID NO: 35116 - DNA, 30 bp, Homo sapiens
  chr1:16558675-16558705
  hyper
ccatcagccagccgccgccccggcacactc

SEQ ID NO: 35117 - DNA, 30 bp, Homo sapiens
  chr1:16693664-16693694
  hyper
gccttgcgtgcctgcgcccgcgacggaggc

SEQ ID NO: 35118 - DNA, 30 bp, Homo sapiens
  chr1:16766995-16767025
  hyper
tggcgggcgcagggcgctttctttgcgtcg

SEQ ID NO: 35119 - DNA, 30 bp, Homo sapiens
  chr1:17029816-17029846
  hyper
ccaccatctggtggcgtgaagcaggcattg

SEQ ID NO: 35120 - DNA, 31 bp, Homo sapiens; identical to SEQ ID NO: 155
  chr1:17278332-17278363
  hyper

SEQ ID NO: 35121 - DNA, 30 bp, Homo sapiens; identical to SEQ ID NO: 156
  chr1:17306870-17306900
  hyper

SEQ ID NO: 35122 - DNA, 30 bp, Homo sapiens
  chr1:17307200-17307230
  hyper
gctgggtcctaacgcgagctgcccgcatgg

SEQ ID NO: 35123 - DNA, 30 bp, Homo sapiens
  chr1:17337331-17337361
  hyper
tggtgacctggcagcggcccagggcggctg

SEQ ID NO: 35124 - DNA, 30 bp, Homo sapiens
  chr1:17338044-17338074
  hyper
cggggccgagtccccgtcaaaagggagggg

SEQ ID NO: 35125 - DNA, 30 bp, Homo sapiens
  chr1:17380573-17380603
  hyper
gtcgaacatcgcggcgcccagcctacatcc

SEQ ID NO: 35126 - DNA, 478 bp, Homo sapiens; identical to SEQ ID NO: 157
  chr1:17445630-17446108
  hyper

SEQ ID NO: 35127 - DNA, 209 bp, Homo sapiens; identical to SEQ ID NO: 158
  chr1:17591035-17591244
  hyper

SEQ ID NO: 35128 - DNA, 30 bp, Homo sapiens
  chr1:17764680-17764710
  hyper
cggccccggccctgcgcccacccgtctacc

SEQ ID NO: 35129 - DNA, 30 bp, Homo sapiens
  chr1:17765379-17765409
  hyper
attaaagaaggcttcgggacacttccagga

SEQ ID NO: 35130 - DNA, 30 bp, Homo sapiens
  chr1:17766497-17766527
  hyper
gtttttcctgggcacgtctagacaggtcac

SEQ ID NO: 35131 - DNA, 788 bp, Homo sapiens
  chr1:17865913-17866701
  hyper
cgggaagtggggaccccggggtaggtgaaggagcgaggaggtcgccgtgtggccggggccgggccccatccccgcgggcctcagtttcccccctgtactgtggggggccggtgggctgccgggaccgctgggggctcgcagcgggtcgggggaggccacgtctccctcgcggcgcgctgggagcagggagggggcgcggcggccgctgccccggccaccaggggttaagcggtgacctcagccgcggcgccccgggaccgggcgggcgggggcggcgccgcgtcgcgcacggcggcggcggcgggaccaggcctcggagcgcggcgggcgcgggcgcagtcccggcgggcccggacctcgcgggcgggcgggcggcgcggccattggctcgggtggcggcggctgcggcggtgggggcgccgtcccggccatgggcgcccgcggcggcctgcggagctggaggcgcggcgccggccgccaggcgcctttgtgagcggcgcggacgacaaaggcgcgggcccgggcagccgaggtgggtgagtgagcgcgggggccctgcctccgcgggatcctcgcgtgtgccggagtctgcgagtgcgcgggaggcgctccaggcgccagggtcctccgggtgtcctgggcgtgtcgccgtgggcgggcgggggccgtgtccgccgctgtgtccctgtgtctgggtgtgagagccccgagcccgcgtctcccctctgtgtgggtctctccttgtgtcactggagttctggtgttactagggcgagtggcctttgtgc

SEQ ID NO: 35132 - DNA, 31 bp, Homo sapiens; identical to SEQ ID NO: 160
  chr1:17908286-17908317
  hyper

SEQ ID NO: 35133 - DNA, 30 bp, Homo sapiens
  chr1:18427137-18427167
  hyper
acaaatcatgtattcgatggcgccacctgt

SEQ ID NO: 35134 - DNA, 30 bp, Homo sapiens
  chr1:18433718-18433748
  hyper
ggggaaggagcagccgtaattggggaagtt

SEQ ID NO: 35135 - DNA, 219 bp, Homo sapiens
  chr1:18434091-18434310
  hyper
tccctgcaataaatcggcttagcggacgagagccgaacagcccagaaaggattaaagaaaagtctgtataatacgcggagagcgcggcgaggggagggcaaggagggcgggggggcggggagagggggagggacggagggagggcgagaggaggggggtgctcgcgccgccgggagaggcgagcgcgaggcagagagcgcgattcggctccaaactccg

SEQ ID NO: 35136 - DNA, 38 bp, Homo sapiens
  chr1:18434751-18434789
  hyper
gggggagggcgctggccggggtcgctccgagaggctcg

SEQ ID NO: 35137 - DNA, 269 bp, Homo sapiens; identical to SEQ ID NO: 163
  chr1:18435604-18435873
  hyper

SEQ ID NO: 35138 - DNA, 462 bp, Homo sapiens
  chr1:18436536-18436998
  hyper
tgcagagagctgacccggcatcctgacgcctcaaatccctttgcccgcctctgcgggctgcgggaggcgggggttggcgtgcctgagggtgagcgcatctgggccggtgcagccagcgcggcctcggagctccgctgctcaggatgaaggaagagcgcagacgcggatcgcgaatgggaaactttccgcgtctggggcgcagagggagatccgaggcagccgggagccctctcttctccgcagaggagagcacacgagggtggggtccctccttcctccttccaagtctgtgcccagaatggggggcggggtgcgagaagagtccgtgagagacgcaagaggcgggctgtgccggaggagggcgcccttcctggaggtggccgagagaggtgcacctggcagcggctttgcagggccacctgcctccgagggcgcagagaggagcaacccgcgccggccttc

SEQ ID NO: 35139 - DNA, 708 bp, Homo sapiens
  chr1:18437043-18437751
  hyper
cgccctcgccggttctgcccctttgggtggcagagcaagggtgcccgacgctagagagtcgggtctggcaggaggaaggaggccgctgcccctcgcactggctgggccggaagtccttgccctggctccccacttcccagaatcagaccctccaaaggagaaacccacatttctcgggactcctgggcgtgtcctggggcgttttcaactcctccagcccccgtgaaccgtgcctgggcacttctgggaagtcctgcactggagcctgtgcagtggcgccgggctggggatggaggagtggtccttagccgctgttcagccctgggaaacgttccgctgagagcagggtgggggcagccccagttaggggtagcccacggccccagccgggggtctccgggattgcgcgggcggaggtgggcggccctgcgggttctcgggttctcgggttctctgtctccgcagccgcgtgtcagcaggtggatgggatggaggggctgtctccgctaggccgccgcaaccgcaacgccgagactgcgggggctgtgcgcgcgcgagcgggtgtgacgactttatatatttatcctcccttcacacgcccccttcccactgggcggggcctctggcgcggcagggtttcttctccagccccaactgggggagttaagggccctaatcccttgcaggctgcctcgcccatgcccctcc

SEQ ID NO: 35140 - DNA, 909 bp, Homo sapiens
  chr1:18956738-18957647
  hyper
cggcaggaaggtagagtaagaaccggacaccggggctctgacattacacagaaaaggtcagaattcctcccttcaagtcaccctaggccggttcccggggagcctcactggaggaatttcagagggtgtaagacgagggagaagatgagaaatagggcggactctggccctcggaggccagagaaaaggcgagactccagagaggcgccggacccgaggcagacattcccatacagccgggactccgagagcagccgtgggcgacctgggggccggggactcggcggatccggcccattcatcaaaggaaggcactgggacaaagttggccccctccccttctcccccagcccccaactcgccgggatcggctccctctcttttcacggcggttcaaattctcccccaaaacgaggtcgagccggggattagaaaagagggaaaaaaatattcgttggcgatttcttttcgttattggtcctccgctcccttgcgccctggcccccttccctcctcatgaataaaagaaaagtccgaacctatcagatcgcgctcactgcctcctcctcctcctcctcctcctcctcctcgtacttcggtgaacacttttgcacaacttacccagctgatcactcgcgccccctcgcttttccatttctctttccccaaccccgtcaccccctgtctcctccgtccagccctgaaacccgaggaggctccttcttccgtctgtccccgggtctcctaggggacggggctgtgaaagctggtgtggagggagaagcgagtgtggtccggagaaagaaggcgtggagaagagggagggagcgagagcgagagaataaatatataaataaatacgagaacgaaatccactccgcagtctccgggctcggaaactttggcccc

SEQ ID NO: 35141 - DNA, 251 bp, Homo sapiens
  chr1:18958358-18958609
  hyper
cgcttctgcgtgggtttcactgcccggcggccttcgtttcgcaggtcgctagctgccggtctttacccgcagggctgaaattctggtagatttggactcctagtaaatatcaggtcctggtgaatttcagctctttccactatttccagacacttcttccctgacagtttctcggctctcctggctcgctggctgccagctttctactcttgttttgaattattttttccacccccgggattggtcttcca

SEQ ID NO: 35142 - DNA, 30 bp, Homo sapiens; identical to SEQ ID NO: 167
  chr1:18958909-18958939
  hyper

SEQ ID NO: 35143 - DNA, 136 bp, Homo sapiens
  chr1:18959253-18959389
  hyper
cttgggcagcgagacggcgccgggtccctgaattagacagaggcgaagagagcggctccgtgatcaagtgcgcgccggcagccacgcaggcgggagagcgcgcaaacccggggatttgcagtggcactctcctgta

SEQ ID NO: 35144 - DNA, 185 bp, Homo sapiens; identical to SEQ ID NO: 168
  chr1:18959455-18959640
  hyper

SEQ ID NO: 35145 - DNA, 30 bp, Homo sapiens
  chr1:18959876-18959906
  hyper
ttaaggcaaccaggcgttctcccctcccca

SEQ ID NO: 35146 - DNA, 30 bp, Homo sapiens
  chr1:18960370-18960400
  hyper
tgcagcccaagcttcggcctgagggacaga

SEQ ID NO: 35147 - DNA, 30 bp, Homo sapiens
  chr1:18960925-18960955
  hyper
tctcccgacagctgcgtgtctcccacggct

SEQ ID NO: 35148 - DNA, 1710 bp, Homo sapiens
  chr1:18962781-18964491
  hyper
aggaggaggatgaagcggacaagaaggaggacgacggcgaaaagaaggccaaacacagcatcgacggcatcctgggcgacaaaggtagggaacttccctgggctgcgaggccccagcccgggttttcccacgctccggtgtgcgggccagtggttcgctcccgccgccggagcaggcgaccagaactccagcggagaaactctcatgctgcggggcagctgggagccgctcaggctttgccgacagcgccccctcggtgcgcaccccggatgccggctagatgcgaagcccgcgccttctttgcgctatggaggccgggcacggacggcctgtgagtcccgggagagcccggctgcggggctgcgcgcctggtctaccccaatactgcggggagtgcgtcctcccgggctggcgttttggctgctactctcggcgtcgatcaattatttataggaaacttgggcaagggggcgggggacgggagggagggagagaggaaggaggagccggcccgcggctccctaaatgaatttgttaaccagacccccacacgctctctaaacggtcccttgaaaccccgcctgacagttgactgaccgctgcaatcaataaaaattagccagggccgccgcctgactcagccccgcgttgccagggcggactgggggacagagagtgccttcctctgtggcgtgcgccggcagggctgggagtggaggccaagttcccagatgcccagggtcggaggatcgcagtgggggagagacccaggctccacacaccctctccccattcttagcacggcttccgcgggcaggctggagtctgagtcctgcgccatgctttttctcaggatcagctaaggagggcgtttagttttcaagcgcccggaagcccgggaaaggggattgtgcttttgtttcttgacgggaggaagtttcgagagaaggaagggaaagtttttcctcattaccccctccccttcctcattgccctcataattcccctcctaagtctctttgagacttggtaagtgcacgttaaggggcgacagggagagaaacagaaatggaagacccagagtcacaaagactgacagttaaagaaaaggccccaaacacatacgcggagaggcggcaggctgagggaatcggaaagacagtggccatgggaacccgcagactgatggctttggaaaaagtggcgagtgccctggaacctgaaagcttgcaaaaagccagtgttgtttcagtctcccttcagaggtttctcccagcacccctctcctcacgacccaagcactcctagcccaggtctctctccagttctcagaagaccctcccaaccttgaagatgaacttcacagacaaagccggcttactaagacaactcccatctacgcccagcccccacaggcgtggtccgaggaggaaggatgggtggccgggcagccccgtgtgacagcggcctggagcgaagggaaggggcggccattgacagacagggcccctagtgatgccgcagtcccgcccgggacaaaagggcgagggaagaaagggagccagctgtgccgggcgccccgctgtgcccggcctgccgaggggccacgggtctgcggcgggaggcagccctgcactgccaagcggtccttggctaggccagtcggcccagagccctgggacacctgccgggggacccagtccttatttc

SEQ ID NO: 35149 - DNA, 139 bp, Homo sapiens
  chr1:18965005-18965144
  hyper
agcctggtctccagaaagtcccgcagtttttgcgtgacagtgggtgtgctgggtgcgctgattgtgctttgaatggctgtgtaagcgcaagcatctcttagtgtgactgtttacccacgggccttctgatctgaatgct

SEQ ID NO: 35150 - DNA, 81 bp, Homo sapiens
  chr1:18966650-18966731
  hyper
caggtgtggagtgggaaatgacggggaaggatcggaaaggaggggagagcccggagtgtcggttttagacacttgtaaaag

SEQ ID NO: 35151 - DNA, 30 bp, Homo sapiens; identical to SEQ ID NO: 171
  chr1:18967005-18967035
  hyper

SEQ ID NO: 35152 - DNA, 341 bp, Homo sapiens
  chr1:18967249-18967590
  hyper
cccggctttaggcagcgctcggcggtggatatccagtgcgaccagagggagagagggagggggcgctggaggggcgcgccgggccgggggctgggggggatggggcgagcggagaggggcgtgcggagctgggaacgtcccggcggagggggctcccggcggagggggctcccggcgaggggccgagcccacactgggctgacaaggctccccttttcttccctccatccccccaaccgaagaagagagagggggaggcgggagcagagactaacgagaaacaacaatgaggagataactattacaaaggcaaacactggcgctcgcgcgctcgcagcccc

SEQ ID NO: 35153 - DNA, 347 bp, Homo sapiens
  chr1:18967792-18968139
  hyper
gagagcgggggaagccgtcggaggtctgggaaggggtggaagggaggggactgggagctgcggaagagctgagtgttggggggtgcctttgggactccgtggggagccaagaggggctccccagggcgcgcaagaaaagaggctcggttcccggattgagtgaggttcccgtgctcagccggtcttggaacgcaggcacgtctgaaccgggtggggtcccccgctgcgagggcgtgcgggttttgtgttcccctcggggcacgcaccgccacacttgggctgtttcaaggcgtttgtacctaaaagactagtgtgcacggcgcagcggttaaaggaattagatattt

SEQ ID NO: 35154 - DNA, 30 bp, Homo sapiens
  chr1:18969251-18969281
  hyper
tcgccttcccaaatcgaatcaaggcagaac

SEQ ID NO: 35155 - DNA, 1122 bp, Homo sapiens
  chr1:18969637-18970759
  hyper
gggcgccttgggcacgcgtgccaggcccccggtttggcagccgagctgagcgagggtggattgcgaggggcactggggccgccgcggagctctgcgtgtcggctgccagtgaattggccgatttccccagtctgagggtcagcgaacggacctttccatggcttggtcgccctggtcctggaggtgcgctgggcccgagctccggtggagaccaagggaggggtggggagaggcagcggagacagagagccacagaggaggagagagctagaaaattcagagtgagaaagtctgagcgcagcagaagagaatcttgcgcacagtttgaggacgctggaaaatgcggaggcgccgagggaggcgccgagcagcaggaagaaagacaaagagatgcagaatcaccgagagactggccctgggacaggcggatcaggagagccagcgggacctagagacagcccgcgggagagcacgggccgagagggcgagtgctcaaagccgggcagcggctaggggaagataggaggcgggcgagccgcggccgcccttttgatccttcgtggcttcgccttatcagaagcgctttcggtgacatccgcacaaaggcagttcatcatattacagcacgtcccggcggctcgctgcgatcctgccgcttaattagaggcgagcgagctgggccggcagggcgggagggaggccgaccccgaggcgggaggccgggttctgcgctccaacccggggcgctgggcaggggccagcccgcgtgcctggcggtgttgggacgtggagagagggagaggccgggaactgcattcagagcgttgctaaattaacaggccggcccgggcttcactgcccggagagtgaagctcgccgccttccaatttagccgccgccccttctaagttcttgggaagggatggcgctccggccactttcccctcttccaggctgcgaacgctgcggactggagggcgagtaatggggaggcaacccagggcgagctgaaggcttagtgcaactccgggtccaggtcgcacccaccagccccccgcggctgtgttccatcccctcctccgaccgccttgctctccatccgaacccaggtgtgccaggctg

SEQ ID NO: 35156 - DNA, 492 bp, Homo sapiens
  chr1:18971625-18972117
  hyper
gtgtgtgtgcgcgcgcgcgcgtgcgtgcgcacgacagcagagtgtgtttgcggggctggggctgaatttggcagccagcccccaagctgacctctggagtggcccgcgtcggcgggctgggccttgcttcgccacgggttcgagggagaggcggagggaggagcggctgggctgcggagcctcttgccttcactgcactctttgtctgacaccacgaaaagaccgaagatcaaagaggcccccgagcgggacagaaaaaggggtggggcggcgggcgcgataagtagctcggaaaactccaccctaaacttttctgggtcctttccatgggacccagaccctacagaacctcacccaagtgggcgagtgggcggccggccgtgggttctctacagtcccaagcctccgcgagggcgacaggtggagagggacagctacggctgcgggctccaattcaggccgaggtctttcggtgactggagaaggtggaga

SEQ ID NO: 35157 - DNA, 30 bp, Homo sapiens; identical to SEQ ID NO: 174
  chr1:18972421-18972451
  hyper

SEQ ID NO: 35158 - DNA, 30 bp, Homo sapiens
  chr1:18972904-18972934
  hyper
cttttccgtctcggcggtacctgagcctca

SEQ ID NO: 35159 - DNA, 50 bp, Homo sapiens
  chr1:18973168-18973218
  hyper
agtaaccaaacccccgaaagcggctttgaagaggcgaatgcctggtggcg

SEQ ID NO: 35160 - DNA, 87 bp, Homo sapiens
  chr1:18978534-18978621
  hyper
acccatcaaggctcaccggccccctggcaggaggcagcaagagaatcccgggcagcagcggaaaggctgggccggctgggcccacag

SEQ ID NO: 35161 - DNA, 232 bp, Homo sapiens
  chr1:19043510-19043742
  hyper
cggccgcccctccccgcgctccgccgccgccgccgtcgccgccgcgcctttgatccatggcccgaggccgcctgacagtggaaaatgcggggagacaaaaccactcagtcaaagtgattcccaacaactgtctccccgagataaggacgccctcgggctcggcggcctgcttaattcccgctgcccgggcctgggatcccgagcagccgcgcgcctggccgccccccggact

SEQ ID NO: 35162 - DNA, 92 bp, Homo sapiens
  chr1:19043756-19043848
  hyper
cgctcgtccagtcttggtcgcggggcctcggccgtctcgggacggggcaggcggcgaagggacgggcagccggtaagcaagacccttgctgc

SEQ ID NO: 35163 - DNA, 30 bp, Homo sapiens
  chr1:19229113-19229143
  hyper
gaaacggatcaccccggctgtcctccgagc

SEQ ID NO: 35164 - DNA, 225 bp, Homo sapiens
  chr1:19229564-19229789
  hyper
ccgctaccagactcctcgaccccgcagggccacagcgcggccagccccctgcttcttcccgggggctgcggcccctggaatgagcctgccttccagcttcttggccaggacccagccgctctccacctaccctccaggcgcggggccggccagcttcttagcttccttgcagattacgatcaatgcaagataaaacctgagctggccaacgcttagcttttcatt

SEQ ID NO: 35165 - DNA, 30 bp, Homo sapiens; identical to SEQ ID NO: 177
  chr1:19283746-19283776
  hyper

SEQ ID NO: 35166 - DNA, 30 bp, Homo sapiens
  chr1:19577926-19577956
  hyper
tggtcttcgtagaccgcggccgcaggaatc

SEQ ID NO: 35167 - DNA, 30 bp, Homo sapiens
  chr1:19578597-19578627
  hyper
aaggccaactgggtcgggaggcagctcctg

SEQ ID NO: 35168 - DNA, 30 bp, Homo sapiens
  chr1:19638445-19638475
  hyper
gcggcgctggcgggcgcgtccatgcggcgc

SEQ ID NO: 35169 - DNA, 305 bp, Homo sapiens; identical to SEQ ID NO: 178
  chr1:19639207-19639512
  hyper

SEQ ID NO: 35170 - DNA, 30 bp, Homo sapiens; identical to SEQ ID NO: 179
  chr1:19811689-19811719
  hyper

SEQ ID NO: 35171 - DNA, 30 bp, Homo sapiens
  chr1:19812628-19812658
  hyper
gagcctcgggctgacgccatttattcagca

SEQ ID NO: 35172 - DNA, 33 bp, Homo sapiens
  chr1:19970319-19970352
  hyper
ctggtgccgggacgcggcgggctggggcgcccc

SEQ ID NO: 35173 - DNA, 31 bp, Homo sapiens; identical to SEQ ID NO: 180
  chr1:20002970-20003001
  hyper

SEQ ID NO: 35174 - DNA, 30 bp, Homo sapiens; identical to SEQ ID NO: 181
  chr1:20208748-20208778
  hyper

SEQ ID NO: 35175 - DNA, 635 bp, Homo sapiens; identical to SEQ ID NO: 182
  chr1:20512379-20513014
  hyper

SEQ ID NO: 35176 - DNA, 351 bp, Homo sapiens; identical to SEQ ID NO: 183
  chr1:20618134-20618485
  hyper

SEQ ID NO: 35177 - DNA, 30 bp, Homo sapiens; identical to SEQ ID NO: 184
  chr1:20669960-20669990
  hyper

SEQ ID NO: 35178 - DNA, 129 bp, Homo sapiens
  chr1:20692797-20692926
  hyper
gcactagacccaagcgccgcccgtcggtccccactcccgacgggcctcgcattcctggtcctccaccttctgccaagaccctgcccacgcttcccgcaccagccttaggtcccgaggtccccaactttg

SEQ ID NO: 35179 - DNA, 34 bp, Homo sapiens
  chr1:20692995-20693029
  hyper
cgcctgggctcccagcaccgcccctcgcgctcgg

SEQ ID NO: 35180 - DNA, 30 bp, Homo sapiens; identical to SEQ ID NO: 186
  chr1:20693318-20693348
  hyper

SEQ ID NO: 35181 - DNA, 30 bp, Homo sapiens; identical to SEQ ID NO: 187
  chr1:20802803-20802833
  hyper

SEQ ID NO: 35182 - DNA, 30 bp, Homo sapiens
  chr1:20803070-20803100
  hyper
tggccagccgcctccgcccagccgtcccca

SEQ ID NO: 35183 - DNA, 514 bp, Homo sapiens; identical to SEQ ID NO: 188
  chr1:20810323-20810837
  hyper

SEQ ID NO: 35184 - DNA, 324 bp, Homo sapiens; identical to SEQ ID NO: 189
  chr1:20810864-20811188
  hyper

SEQ ID NO: 35185 - DNA, 204 bp, Homo sapiens
  chr1:20811219-20811423
  hyper
cggatcgcccaggcctggcaaaccccctcccaagccaagtaacaatgaaaagcccgtgcgacccgaacaccctagccttccccgcaggaatgggatcctccccacgcaggtccccacgccgtcccctgggggtccctgggaccccctccccacagggttatggagcgagtgcagctgtgactacactgcgcaaaaggcgggggt

SEQ ID NO: 35186 - DNA, 686 bp, Homo sapiens
  chr1:20811626-20812312
  hyper
gggtgggagacctccgcaacccttgttcaggccgcggcgcgggaaaaagggggtgtcagacaagggggccgcgaactcaccccgcttgctccggccgatctggcccagcttgggcggccgcttgttctgcccggcgccgaagaagttgttggtgtcctgcaggcggcaggagaagatctggcccacgtcgccgccgtcgccgtaggggctcagcttctcgtcgccgtagggcagcacctccgacatggtcgcgtccgggggctccgccgcggcgcctcctccgcccgcgtccccgcccgcggcggacagggtcagcggcgctggggccgggggcggccggccggggacggcccgcgggctgctgcggcggtggcgccggcgagaggccgggggacgccgctagggcaagagcgcggcactcgcgcgagcggcccggagagcgcccgcggctgcgctgcgctgcgctccggctccgcgcgcgagtggctgctgctccgccagaggcgagcaggactcacatcctcggcgcgctggggctctgggcgggggccgggccgggcggggccgcgagccgggagggaggagacgtccctgcgagcccggagggcgcgggaccgaggagggcgcaccccgggagccgggcgggccggtcctgcggcgagtgcgggcggcggcgccggttcggg

SEQ ID NO: 35187 - DNA, 141 bp, Homo sapiens
  chr1:20812695-20812836
  hyper
ggagaaatgccggccgcggcgccgaggcgaggcgcggggaggagggcgggaggaggcggggaggaggggacccgcgggcctcggggagagatccctgcgagcggagcgacgtcacggggccgcgccggccggcccgggctg

SEQ ID NO: 35188 - DNA, 173 bp, Homo sapiens
  chr1:20813270-20813443
  hyper
cgcagggcctccaggagggggagggggagagggaaggggcagccccgcctcccgcaggagaagggagcgcctcattacgccgggctcgcccgggatgcctggctcccggcgtccgctgcctccgctggggacgtcccgggtctgccgccctctgccctcgggggtctcccttc

SEQ ID NO: 35189 - DNA, 30 bp, Homo sapiens
  chr1:20834486-20834516
  hyper
ggcacagcgagggccgccctccgctctcca

SEQ ID NO: 35190 - DNA, 483 bp, Homo sapiens; identical to SEQ ID NO: 195
  chr1:20878745-20879228
  hyper

SEQ ID NO: 35191 - DNA, 181 bp, Homo sapiens; identical to SEQ ID NO: 196
  chr1:20879255-20879436
  hyper

SEQ ID NO: 35192 - DNA, 1252 bp, Homo sapiens; identical to SEQ ID NO: 197
  chr1:20879462-20880714
  hyper

SEQ ID NO: 35193 - DNA, 94 bp, Homo sapiens
  chr1:20915864-20915958
  hyper
gcagtggcaagagcgcggctctgtcccttcttcccccagtctccgctggaatgttcctaccctgccgactgccccagaccgcgctcaaatgtgg

SEQ ID NO: 35194 - DNA, 222 bp, Homo sapiens
  chr1:20916181-20916403
  hyper
ctttagatgaaactacggaggtctcgagaggtgacatgacttgcccaaggtcacacggggcgctggtggtgaaaccctgggctggaggttccccaaagccctgctctcttccttccacccactgtgctcagtgctggccagggtggtgacgtgtttgtcgggggtggtcggtggagaatcttggaggagaaaagccagctgggctttcggagtccagcagtg

SEQ ID NO: 35195 - DNA, 87 bp, Homo sapiens
  chr1:20959848-20959935
  hyper
aagtcactgctagaggcgccagtaccagcatagcgcccccacgcgccgagtcggggaactgccgcgggggccggccccgcccaccag

SEQ ID NO: 35196 - DNA, 409 bp, Homo sapiens
  chr1:20987843-20988252
  hyper
cttcctcctcctgccgaaggacccagcacgtgcacaccggaagtaccccatctacggtagcccaatcgcggctcgtgcccgtggagcactacccggaagtgatcgggatacgccgcggctgggcgtccagagccgcagctttggcgataaggcgcggagagcgccgccggaagtgccctggtgggaggtggattccttgaaccctattggtgggagtgaatcaaggccccgtccccctaaagaaaaggctcaatcctagagagacagctctgcagccgcggccaatcaacgaggccgagcgccctttgctccgcccaggccggcctcccgccccctagtctggagcccacttccctctggagcttgcggggtcctccccgggcttgaccgtcgcgtcctggacagggtg

SEQ ID NO: 35197 - DNA, 206 bp, Homo sapiens
  chr1:21044016-21044222
  hyper
gtccacgtggtaggcgccgtcgaaggtgaactgcttgggcggctcgtcggcggcgcccgggttctggatgcagcactgggcgcgcgcgcagtccacagtcaccacgggctggcagcgcagctctcgctcccgctggttcatgggacggcagcgcacgacaaccttcaccgcctcggaggccatggcgccgcgcccaggaccaacgg

SEQ ID NO: 35198 - DNA, 30 bp, Homo sapiens
  chr1:21056767-21056797
  hyper
gagaggggaagggcacgtttcccatcctgc

SEQ ID NO: 35199 - DNA, 65 bp, Homo sapiens
  chr1:21058220-21058285
  hyper
ggcgggcgcgggggtgcgaagcgctccagagtgggctgccggtcccgctgcgctacctcgctcgg

SEQ ID NO: 35200 - DNA, 30 bp, Homo sapiens
  chr1:21112706-21112736
  hyper
aacgctcagatgggcgactgtaactttctg

SEQ ID NO: 35201 - DNA, 198 bp, Homo sapiens
  chr1:21503417-21503615
  hyper
atggctcgggaaaccgagggtgggaagcctcttcggctctttccggagactgctaggggtcgggattcttcggagacgctcgggtgcgtcctcggccgccgttcgggagggctcaggggctaactcgcttcctcggcaaagatcggcgagggaggcttcgctggcttacagcggcgcgggtgcggggcggagggaaag

SEQ ID NO: 35202 - DNA, 333 bp, Homo sapiens; identical to SEQ ID NO: 201
  chr1:21563184-21563517
  hyper

SEQ ID NO: 35203 - DNA, 30 bp, Homo sapiens
  chr1:21672303-21672333
  hyper
gccgggagcctcggcgacctttgtctcctg

SEQ ID NO: 35204 - DNA, 30 bp, Homo sapiens; identical to SEQ ID NO: 202
  chr1:21766353-21766383
  hyper

SEQ ID NO: 35205 - DNA, 261 bp, Homo sapiens
  chr1:21835896-21836157
  hyper
ggcgggggtggtggcccgggccgcgttgcgctcccgccactccgcgcccgctatcctggctccgtgctcccacgcgcttgtgcctggacggaccctcgccagtgctctgcgcaggtaaggattcgacgctgccccgcgccctggttccccagggccccagcggacgtggtccatccccttctgcatcctccgctggccccgtggttgaactttaatggcagggccggggtctccagcgccacgccgcccacagcagcccat

SEQ ID NO: 35206 - DNA, 33 bp, Homo sapiens
  chr1:21836216-21836249
  hyper
cgcgctctgggcgggacaggagattggacgtgg

SEQ ID NO: 35207 - DNA, 30 bp, Homo sapiens; identical to SEQ ID NO: 204
  chr1:21949206-21949236
  hyper

SEQ ID NO: 35208 - DNA, 30 bp, Homo sapiens; identical to SEQ ID NO: 205
  chr1:21985727-21985757
  hyper

SEQ ID NO: 35209 - DNA, 30 bp, Homo sapiens
  chr1:21985967-21985997
  hyper
ccggcgccaggcgccgccgcacgtctccca

SEQ ID NO: 35210 - DNA, 89 bp, Homo sapiens
  chr1:21996302-21996391
  hyper
tggcagaggccacgcggttgaccctcgccagcccattcgcggctcttggactttgtctctggactgggcagctcgcccccgccccagcc

SEQ ID NO: 35211 - DNA, 30 bp, Homo sapiens
  chr1:22110274-22110304
  hyper
gagtttctctggtgcgcaaggtcatgtttg

SEQ ID NO: 35212 - DNA, 354 bp, Homo sapiens
  chr1:22140830-22141184
  hyper
ggacagagtagagttcggggtcgcgccgcgcggctccagtttccgtgccttccgctgcagccgacctggcggaactgtgcgggcagacgtggcagggggacgggctgctgctgcgctcgcacgccgcatcgcgcaggttctacttcgtggctccggacaccgactgcgggctctgggtgcaggcggcagcccccggcgaccggatccgcttccagttccgcttcttcctggtctacagcctgacccccgcgcccccggcgctcaacacctcctccccggccccggccgacccgtgcgcccccggctcctacctgcagttctacgagggcccgccgggggcgccccggcccctgg

SEQ ID NO: 35213 - DNA, 51 bp, Homo sapiens
  chr1:22263554-22263605
  hyper
gccccagccaagttggcgggaggcggcgagcgggaccggggcgcccctagc

SEQ ID NO: 35214 - DNA, 30 bp, Homo sapiens
  chr1:22351533-22351563
  hyper
cccactgctgtttgcgtacaatgaggcggg

SEQ ID NO: 35215 - DNA, 46 bp, Homo sapiens
  chr1:22469042-22469088
  hyper
gcgctcgcacccctggcgccctcgagagccccgagccgcctaccgg

SEQ ID NO: 35216 - DNA, 30 bp, Homo sapiens
  chr1:22587712-22587742
  hyper
cttcactcttcatactggtaacaatggggg

SEQ ID NO: 35217 - DNA, 30 bp, Homo sapiens
  chr1:22778427-22778457
  hyper
cgggcaggagtgttcgtgtcctctatggcg

SEQ ID NO: 35218 - DNA, 89 bp, Homo sapiens; identical to SEQ ID NO: 208
  chr1:22889706-22889795
  hyper

SEQ ID NO: 35219 - DNA, 30 bp, Homo sapiens
  chr1:22890033-22890063
  hyper
ggagagcgagggagcgcgctccctcccgac

SEQ ID NO: 35220 - DNA, 30 bp, Homo sapiens
  chr1:22953268-22953298
  hyper
aggcccacagtgagccgccgcagggcagac

SEQ ID NO: 35221 - DNA, 30 bp, Homo sapiens
  chr1:22999431-22999461
  hyper
aaactcaggtccccccgtttaaaagccagt

SEQ ID NO: 35222 - DNA, 31 bp, Homo sapiens; identical to SEQ ID NO: 209
  chr1:23000015-23000046
  hyper

SEQ ID NO: 35223 - DNA, 418 bp, Homo sapiens
  chr1:23036965-23037383
  hyper
tcagccgcgccagacgctctccggctttgcagcattcaataaaaattgagaaacatttgggctgaaatcgctgctttatctggaggagccacagcgccgggagagaccactgctgcgcggggggagcccggggtctcagtggcccgggcacgcggggtcgccgcgctccagcgcccgcgctgcccccgggtgaccctacgggcgcggtgtggggacccgggctcgcggcggcgcgcggccgccgggggccgggacgcgcgcggggggcggtggcctggcgaggctccccccgcgcccgcggctcaggtgggccgtgcccagcgctggcggagcccgggtccccgttctgcccgggctggatggctcattctgctggctgcgcggtggcggcggctgtgtgtgcgccgcgccttgccgc

SEQ ID NO: 35224 - DNA, 562 bp, Homo sapiens
  chr1:23037774-23038336
  hyper
ggctttgtagccagcccggcgagcgccgcccagggctgggggctgcccacgcgcgctcgccgcccccggctcgggcagccgcctcgcgccggcctggtcttgctccgcacagggtggaggggcgcgggcccggccgtggcggggggcggggggggcgccggcgctcggtcggggctggaaagtttggcagggagcagagggagggaggcaccgcggccggccggggtgggggctcccggcccgcgcccccgagatggggcccggcgccccggagagcagggactggcagagtggaagggagcgcgccagcccccgcgtcggtgcctgcccatcgcccgcggcgtacaatggggtcccctccccgagaggactgcgcgggggatgggtctgtgggcatctctccgccgcgcaaggtctccgggcacccccgccggccaccgccccgcggccgcggcgctcagcgtggcggctggagccccgggaactctccagctgccgccggggccggaccagatgctcttgccatgtgttggccttggccagggtcgcgggccctctcccc

SEQ ID NO: 35225 - DNA, 136 bp, Homo sapiens
  chr1:23345694-23345830
  hyper
agtgaatgaacgaacgcacgcatgcaaacccgaaagtccctggaggaaatggtcaccttcggaggtttagtctggcccagaagccctaagaccacggactgtgccaggtcccactccaaacgccggggagacgctc

SEQ ID NO: 35226 - DNA, 173 bp, Homo sapiens
  chr1:23346197-23346370
  hyper
gtggccgcgcagcccgcgggcctgtcgggcccagccgaggtcgggccgggggcggtgggggagcgcacaccccgcaagaaagagcctccgcgggcctcgccccccgggggcctggcggaaccgccggggtccgcagggcctcaggccggccctactgtcgtgcctgggtctgc

SEQ ID NO: 35227 - DNA, 30 bp, Homo sapiens
  chr1:23347437-23347467
  hyper
tggagatttaatggtcggtctagttggaaa

SEQ ID NO: 35228 - DNA, 94 bp, Homo sapiens
  chr1:23495360-23495454
  hyper
gggccaaattgtgacgtcagcgttctggaaggcggggtctttgtgatgggcggggttgtctgtaggccccgccccctccgtcctttttttccct

SEQ ID NO: 35229 - DNA, 30 bp, Homo sapiens
  chr1:23504131-23504161
  hyper
gtgagccatgaatccggctgcggcacttca

SEQ ID NO: 35230 - DNA, 149 bp, Homo sapiens
  chr1:23543644-23543793
  hyper
ctggcgcgcgcccgtccgagggcacagagaggcgggacgccccgggcccccgaggccccaggaggggcgccgctcccggcctcagttccccgcggacggccgctggggccaggctgcagacgcggccccgagagcttacccgctgcccg

SEQ ID NO: 35231 - DNA, 52 bp, Homo sapiens
  chr1:23543840-23543892
  hyper
cgcggcgtctccccgtcgcggccgccttgtctccgccgcgacccccgccgaa

SEQ ID NO: 35232 - DNA, 30 bp, Homo sapiens
  chr1:23670872-23670902
  hyper
gggcaatcgcttggcgaggcggcctgacag

SEQ ID NO: 35233 - DNA, 160 bp, Homo sapiens
  chr1:23694765-23694925
  hyper
ggctgggtccctcccgcgccgggggttagaccgctgctgtctcagggaggaggtgctcagctcagcccagggaacgcctccgctctgccatctcgaggccgggtcctttccggcagctgcctcagccaatcagcgagcgaagttcgtgaaccactctgcc

SEQ ID NO: 35234 - DNA, 30 bp, Homo sapiens; identical to SEQ ID NO: 214
  chr1:23695515-23695545
  hyper

SEQ ID NO: 35235 - DNA, 30 bp, Homo sapiens
  chr1:23696398-23696428
  hyper
cttggctacgtgcccggaagcctgttgtct

SEQ ID NO: 35236 - DNA, 229 bp, Homo sapiens
  chr1:23748982-23749211
  hyper
gggcctgagctgcaacgtggaggatccgtcttattacaggaagtatgtcctcctctgcctaaccactgctgggcgggtccactttcactcccagagcaggccccacctttctcggccagacgcccagagctccatgcccacccagacactgccgagagcccaggcgcagacgtggctgtaaactggctccatgctgcagggaccctgcggccagacttgcatcttttca

SEQ ID NO: 35237 - DNA, 47 bp, Homo sapiens
  chr1:23857852-23857899
  hyper
cccccccggaaagaacgcgtcctcgaggcggcgattgcaacactagc

SEQ ID NO: 35238 - DNA, 30 bp, Homo sapiens; identical to SEQ ID NO: 217
  chr1:23865146-23865176
  hyper

SEQ ID NO: 35239 - DNA, 607 bp, Homo sapiens
  chr1:23884854-23885461
  hyper
ggcaggagaggttcccggggtcccaggcagaacgggcgccagcacctgcgttctgggcgggggaggaaagaagaccaaggagcagtcagtttccgccgagcgtgccgaggcgggggccgtccgcagactggccggcgccagggaggaaacttggtctgtacctccagctgataactccgcgccccacgctgcccccacccagttggcgccaaagaccacaggcggagcttgcgctacccctcctacttggaattgacactagctgggagggggctgccgaagacagctccctatacaacatggaacagaaagacttgtatttagtcggacccatgtctactttgccagaccctcggccactgcgggagggcagggcccaggcgcatttaaggcttaaatgcacatcacatggaaactgactctgccattcatttgatgcaaccatgggcaagtcacttgtccctctctggcctcagtttccctaaaccgagtgagtggcaatttttcaaaacgtctgccaactccaggacttgccgtttaaacctccctctccaagagaggagatactcacctggaggtgtcaggacacggccgagtcagtggcaaa

SEQ ID NO: 35240 - DNA, 30 bp, Homo sapiens
  chr1:23946279-23946309
  hyper
agaaaacaggacgccgcagaaatcagatta

SEQ ID NO: 35241 - DNA, 30 bp, Homo sapiens
  chr1:24069808-24069838
  hyper
tgggcgctggggagcgggccctgggggcgg

SEQ ID NO: 35242 - DNA, 30 bp, Homo sapiens
  chr1:24105247-24105277
  hyper
gggcctcgggccgtcggtctactcatttct

SEQ ID NO: 35243 - DNA, 30 bp, Homo sapiens
  chr1:24117449-24117479
  hyper
tgggtgccctgtctcgaatctacaaggtgg

SEQ ID NO: 35244 - DNA, 381 bp, Homo sapiens; identical to SEQ ID NO: 219
  chr1:24126328-24126709
  hyper

SEQ ID NO: 35245 - DNA, 30 bp, Homo sapiens
  chr1:24194292-24194322
  hyper
gaccggcagctgcgcgccccagctggccgc

SEQ ID NO: 35246 - DNA, 30 bp, Homo sapiens; identical to SEQ ID NO: 220
  chr1:24377790-24377820
  hyper

SEQ ID NO: 35247 - DNA, 229 bp, Homo sapiens
  chr1:24513458-24513687
  hyper
taggaaactggattcgtttcctgcgggagaggaatatcaaagacccggttctgttcagtcctgggaagaagcaaactgggggcgcgtaggcagggccgattcgcacccggctcgggtggctgcggaccccgtgcctgtcccaggagctccgggtccgagggtaggcgcggcccggcccggggagccctcttccccctccctcccgcggccccgcgcccttacctggagc

SEQ ID NO: 35248 - DNA, 817 bp, Homo sapiens
  chr1:24648323-24649140
  hyper
gcgccgggcctttcatgtggtcgcagcgctctgggtgcctggagcccgcagccctgggcagccccgggctaccgcagggcgcaagggatcctgggctgcggccgagggcgccggaagtcgccgccgaccgcctgggtctcgcaggaaaacagccggcgcccgcgagctgcccagcgtcgggttttcctgaaggtgcgtcggggcccccggggagctggagccgcaggcgacctccccggtgacctgttgttcccctctggagggccggccggcgctccaggcaggccccgttgacagcccaggaagggagagtttcgccgcaaaggggcttggcacacagtaggtctaaggcaccgaggcaggagcgtcccccgcggcctcgctccctgctctctgggccccaccgctgccgcctggagtctcccctcagcctcgcagagacgcgactcggttgggggaaggggactagaaccgtcgcagtcctgaccgcggccgccgccgccgttctatctgatctccaggagcgccggctccagactgcctggagcgctgaaagagttaatcaggaacgcctccccgctgtggttttgtggtcgaaaccatgattgccaggagcaaatttttgtcgtgcacgaggtgtgttattaaaagtcggagctacgctgctgctgaatgaaaagttaaaagccctctttgagttcgggctgtaaaactggcggactgggccgagaggcttgagccaaccctaacggcggcggcccgggcggcgcgggggtcctgcggctccgccagctgctgggagcgggcaggctgcgca

SEQ ID NO: 35249 - DNA, 30 bp, Homo sapiens
  chr1:24739843-24739873
  hyper
cctcccaacttttgcgcactcgcggagcct

SEQ ID NO: 35250 - DNA, 178 bp, Homo sapiens
  chr1:24742003-24742181
  hyper
gctctctgggacagcgggagagggggcaggggagtcgccgcaccattcttcctgtggccgctagggggtccccgctccaggtgagcgccaagctctagccccaggtcgctcccttatgcttcaagcaagctttgcagcgcagccaattgccaggggctgtcccgcctactccccgtcc

SEQ ID NO: 35251 - DNA, 30 bp, Homo sapiens
  chr1:24828796-24828826
  hyper
tgtacccgccagggcgggacccagcctgtg

SEQ ID NO: 35252 - DNA, 30 bp, Homo sapiens; identical to SEQ ID NO: 223
  chr1:24829136-24829166
  hyper

SEQ ID NO: 35253 - DNA, 809 bp, Homo sapiens
  chr1:24882100-24882909
  hyper
atacagctggaatctcgacagcctggggaggaaggagcctttgatcctacagcggcaagagttcttgacacttgccggctgccaagcctgtttcctcccggtctaacgttctgtggttgtctgaatctccagctgcccctcaaaaccttcaatcagattagcgccgtgctcctttaaagaccctactcaaagtgcctggagctcacctgggtgtgtttgtgaggccctttccctctctttaccccgcggaggagtccgacctggaagcctcctgctggacttctctactggactgagtgcccgggagtgccagagccagtcccaaaaaggacccaggagcggggacaccacggggaggcgccgccactccagtgtgcgggaccctggcacccccggcgcgttctccggcctccccaggatcacctgcacggggcggggccgggggcgggacgccccgggcgggggcgggatcccagggtggcagcgccgggcggcggcggggaccctggctgggagcgcggcggtgccggcgggaggccgagcggggctcgacagagcaggtaggaggcgcctggtcgccggggttgcccggggctgcggggagcgaggagcggtccggcccaggtgcggtggcttcctgtccacctgccggccgcgctgggcgaaggagggcccgggggtggggacgaggggtccccagtctcacccccacatctgttggaggaagtgcctggggtctgcgcgggagggcgttggtccggggtggtgggagggaggctgatcatctccagtgggtcttggagacgagg

SEQ ID NO: 35254 - DNA, 30 bp, Homo sapiens
  chr1:24969451-24969481
  hyper
cgaaggatgggtcacgtcacattgcgcgaa

SEQ ID NO: 35255 - DNA, 30 bp, Homo sapiens
  chr1:24969955-24969985
  hyper
cctcctagagccggcgcacccccccccccc

SEQ ID NO: 35256 - DNA, 30 bp, Homo sapiens
  chr1:25071296-25071326
  hyper
aggtgttccccaggcgatgaaaactttcca

SEQ ID NO: 35257 - DNA, 68 bp, Homo sapiens
  chr1:25071567-25071635
  hyper
cctcctttcccccccgcaccagtcccctagagaggcgtacccgggtcccgcccgccagagcctgagct

SEQ ID NO: 35258 - DNA, 334 bp, Homo sapiens
  chr1:25255276-25255610
  hyper
taatgggagcagggacggcctcagcttccagccacctcgggcagcaccacccccagccgccggcccttcctgccctgcccttttctcacggcagctgtgagaggtttaggggaaaaccgaggcgttttcgtttcatctcgctgcccccttaaaaaaatgaaaatgaaacagtcgcctactccctggcataaagaaaaaggtcctctaaatggctgggggctgccagggttaggggtcccccaatctcaactcgccattcgggacgcataatatccccgagcaaacgtctggagagcagtgccccgatcccggcctagcgccgtccggtaaaatt

SEQ ID NO: 35259 - DNA, 903 bp, Homo sapiens; identical to SEQ ID NO: 226
  chr1:25255920-25256823
  hyper

SEQ ID NO: 35260 - DNA, 86 bp, Homo sapiens
  chr1:25257156-25257242
  hyper
gggcctgtgacttctgcaaccccgggctgggggccgcggggtctcagggccggtgacgccgcactgggagccgccccaaagaggtt

SEQ ID NO: 35261 - DNA, 239 bp, Homo sapiens
  chr1:25258917-25259156
  hyper
gccctgccagccgcggaggtgcgggcccggccgggctacagatgcgcgccagctgcggccccgggtgcaggcgcggcgaccgcccccgaggagctgccctttccttgccatccatgcggccaggtctcagacaaaccgatggctttgtgtcaaaccaaggccgccttcctcacctctgataagatggacgccttctgtcttcgcgttttcaggcacccggggaagacccacagaacagg

SEQ ID NO: 35262 - DNA, 30 bp, Homo sapiens
  chr1:25559247-25559277
  hyper
ccccctattctgcacgctgttcctggaaac

SEQ ID NO: 35263 - DNA, 30 bp, Homo sapiens
  chr1:25574221-25574251
  hyper
cttcgaagatggaacggccccgcgtggggc

SEQ ID NO: 35264 - DNA, 30 bp, Homo sapiens
  chr1:25664865-25664895
  hyper
ttcttggctaaaatcgggggagtgaggcgg

SEQ ID NO: 35265 - DNA, 30 bp, Homo sapiens
  chr1:25665317-25665347
  hyper
ccatcttccagcggcgtccctcgagaccta

SEQ ID NO: 35266 - DNA, 30 bp, Homo sapiens
  chr1:25756827-25756857
  hyper
gtcattcgtacccccggtgcgcgctgacgc

SEQ ID NO: 35267 - DNA, 248 bp, Homo sapiens
  chr1:25757171-25757419
  hyper
ctgataggctcagccggggacccagacactataatgattggcgcattcttccgtccttcaaaggggcgggttctagagtcagttttgcctcagcgggccctgggattggccgacagcggtttaccggtggcttctattggcctcccgggccgtccgtcggagccgaggaggcggggcaggcggctggctggtgctgggcgggcgggccccggaattgtcatttctttgtttccgaaggcggaggaggc

SEQ ID NO: 35268 - DNA, 30 bp, Homo sapiens
  chr1:25758589-25758619
  hyper
cttgatacagatttcggtggagaagtaatt

SEQ ID NO: 35269 - DNA, 30 bp, Homo sapiens
  chr1:25869922-25869952
  hyper
tcttctggcgccttcgggcggcctcggaaa

SEQ ID NO: 35270 - DNA, 30 bp, Homo sapiens
  chr1:25870157-25870187
  hyper
tgcggcagcggcggcggcggccggagcggg

SEQ ID NO: 35271 - DNA, 169 bp, Homo sapiens
  chr1:25870617-25870786
  hyper
gggggaggcaggcgctcgtcgtcggtgcctaggggaggaggagagggcgcaggggcttgggaagacgcccccgtcccgcacccctgcgccccagccagcagctgcggcggtcaggagcccactggcccgttctcccgccccctgcccgacccaccgggccaacttttga

SEQ ID NO: 35272 - DNA, 30 bp, Homo sapiens; identical to SEQ ID NO: 229
  chr1:25944087-25944117
  hyper

SEQ ID NO: 35273 - DNA, 30 bp, Homo sapiens
  chr1:26125946-26125976
  hyper
gaggggctggagcctcgccttcccctcacc

SEQ ID NO: 35274 - DNA, 30 bp, Homo sapiens
  chr1:26145990-26146020
  hyper
agaggcccattctgcgcattcttgctggag

SEQ ID NO: 35275 - DNA, 30 bp, Homo sapiens
  chr1:26147259-26147289
  hyper
tcagcgcgttgaagcgctcactgtgtccta

SEQ ID NO: 35276 - DNA, 30 bp, Homo sapiens
  chr1:26186055-26186085
  hyper
cccttgagtgcgtgcggcatatttccctgc

SEQ ID NO: 35277 - DNA, 30 bp, Homo sapiens; identical to SEQ ID NO: 230
  chr1:26232856-26232886
  hyper

SEQ ID NO: 35278 - DNA, 31 bp, Homo sapiens; identical to SEQ ID NO: 231
  chr1:26248902-26248933
  hyper

SEQ ID NO: 35279 - DNA, 651 bp, Homo sapiens; identical to SEQ ID NO: 232
  chr1:26249184-26249835
  hyper

SEQ ID NO: 35280 - DNA, 30 bp, Homo sapiens
  chr1:26324544-26324574
  hyper
ccagacgtttaactcgacggaaatgagaaa

SEQ ID NO: 35281 - DNA, 30 bp, Homo sapiens
  chr1:26324808-26324838
  hyper
gcctgaagaggtgccgccgcgatttctgct

SEQ ID NO: 35282 - DNA, 30 bp, Homo sapiens
  chr1:26362446-26362476
  hyper
caactacccaaagacgcctgggttgtcagg

SEQ ID NO: 35283 - DNA, 199 bp, Homo sapiens
  chr1:26372285-26372484
  hyper
ggtgcgtcggctgccgccaaaattcccgcccgtccccaggctctcgccttaccggattgccggcctggcgtccaacagatgctgcttctccttggcctccatgcagtcccgcgccgagtcccggcagccgcgcagccgccccgccgagtgcgccctgaaagttgcgcgcgggactccgggtggcgctcacccacctgcc

SEQ ID NO: 35284 - DNA, 318 bp, Homo sapiens
  chr1:26372703-26373021
  hyper
gggggggcggtcgccggctgcaaaaggcccggctgtggccccgcacacctgtgcctgcgcccatggggcccgcggagcccacctgccggccgcgagaagtttgccagccttcgcccggcgcggcgccgggtgttgctgagtgaggacggggtgacgcctgcgccccctctcccgcgcggggtgcgccgcctcgccgccgaaaagttctcgactttagtttgtagaaatccgctttggtggtcccgacggcaggaatgtggctccttgcctcggaagagggtctccagaggctactggggccgcgtctgccccctccga

SEQ ID NO: 35285 - DNA, 30 bp, Homo sapiens
  chr1:26438873-26438903
  hyper
acttaggttcgcatcggatgcatcattgga

SEQ ID NO: 35286 - DNA, 30 bp, Homo sapiens; identical to SEQ ID NO: 233
  chr1:26496808-26496838
  hyper

SEQ ID NO: 35287 - DNA, 533 bp, Homo sapiens
  chr1:26551728-26552261
  hyper
cgcgggcaagacgcccatgccaaccagtgagtgggcagccccgggacctcctgcgcagccgccgcagccttgcctgcaaagcagttcctgccgggcaggctgggtagccggactcccagctgcgccgtcttcacggaagcggtgctgatgcgggacctgggggactgcggtgctggggactggccagtcctaccgggggcggggcttgtggaagactgggcgggattttgaagacctaggtcttgtggatggtgaactcacttggggcggggagggaggtggggctaccctggggtcttgggcaaagtcctcgcctggccggcttcgctacccttgtgcttgcgttgcccacaagcttgtagtcagaagaactcgcctgggagggatcgctcctgggagatccgaacgcgggagggcctggagcgcggcggcagctggatagcattcgggcccatccgaataagcggtaaatggatcatttctggggcctccctgactcctcttccagagcctcctaccgacctgctctgtcc

SEQ ID NO: 35288 - DNA, 92 bp, Homo sapiens; identical to SEQ ID NO: 235
  chr1:26560288-26560380
  hyper

SEQ ID NO: 35289 - DNA, 30 bp, Homo sapiens
  chr1:26561012-26561042
  hyper
cgtggttcaccccacggcagtcactttacc

SEQ ID NO: 35290 - DNA, 30 bp, Homo sapiens; identical to SEQ ID NO: 236
  chr1:26606831-26606861
  hyper

SEQ ID NO: 35291 - DNA, 217 bp, Homo sapiens
  chr1:26633063-26633280
  hyper
ggtcttaagccagactcaccacgcagggccgctagccgtcccgcagcgccgccatcttgttgtcacgcggtttcctaggcgaccaggacccgtgcacttctcattggctagtttgagggaggcctgagcaacctgcagacagcgaaggtggatacagtcgcctgtgctcggattctattggcccacagagtcggtattcttcgcgggcgaatcccag

SEQ ID NO: 35292 - DNA, 842 bp, Homo sapiens
  chr1:26662517-26663359
  hyper
aagactctcctcctgcagccccgcctctgccccagcgcccccagccctccgcccctccacgttctcacctgccgccgtggacccggcaggactgaggtcggaaggaggcgggcagagcggcctggtcatcttcgaaagagaagtggtcgcccagaaagtcggggcgggagaaaagctgaatctggaggcagagaggggagatgaggggaaggaggacgatggagtggggccgagaacagcggggaggggaaaggtccgaaatgaggggagagacgtgagcccagcggctccctgcggagtccctgccttacctttgagacgaagtgcagatcgtgctccccgacctgaaggtagggaccgaatcgagaattagggagggtgccggcccctagccttgtcttctctaggtttcagtaccgtccaccccgcggccgcgccctcggccccgcccccttctaaggccccgccccaagcgcccaggcaggtcctccagcccgctacctctgcgtgggggcggggcgcacccgaactccaggtcccgccaccggggaggccccgccccccgcggccggcacgcacctgtaggaccggctgcagcgaggcgagggtgctgttgccagcgccccagtcctcgcagttacgatacacgcccttctccagcacgtactgttccccggagaagcccacctcctggtaggccacccacctgcaggaagggcggggcgcgagtcagctgggacggagcctgcacctctcctggaaccgcccccggctcgcccgggcccgccccgctcccggagcccgggtcacttacacgccgctgagcacgtggatggcctgtg

SEQ ID NO: 35293 - DNA, 234 bp, Homo sapiens; identical to SEQ ID NO: 238
  chr1:26735162-26735396
  hyper

SEQ ID NO: 35294 - DNA, 30 bp, Homo sapiens; identical to SEQ ID NO: 239
  chr1:26735614-26735644
  hyper

SEQ ID NO: 35295 - DNA, 30 bp, Homo sapiens
  chr1:26735998-26736028
  hyper
cgtgcactgagccccgggccattgtccatc

SEQ ID NO: 35296 - DNA, 30 bp, Homo sapiens
  chr1:26736783-26736813
  hyper
ttctgattggccagcgccgccaggctcaca

SEQ ID NO: 35297 - DNA, 384 bp, Homo sapiens
  chr1:26737101-26737485
  hyper
gaggtgtcagagaccggagttgtgggggagggccggagctggagccggagggaaagggaggggaaaggagagggaggggaggggagggggctgcccgcggggggttgggtcattgtcttttagaatttgggagcctttgaaaagccgtgggccctcccaccgctattgtgcgggggaagatgtagcagcttcttctccgaaccaaccctttgccttcggacttctccggggccagcagccgcccgaccaggggcccggggccacgggctcagccgacgaccatgggctccgtgtccaaccagcagtttgcaggttcgagctcgggacttagcggggacactttaggattcaggggcggccaggagccacgtagaagggaggtgg

SEQ ID NO: 35298 - DNA, 30 bp, Homo sapiens; identical to SEQ ID NO: 241
  chr1:26737696-26737726
  hyper

SEQ ID NO: 35299 - DNA, 277 bp, Homo sapiens
  chr1:26758409-26758686
  hyper
gtgctctaatgaagcccggttctgcggcattccaaggtaaggacgctgccttacccagtctctcagcagtcctaagctgccttcgacggccgagaagcgcctcgattcttgcccctggctcatttccctggcgcgttttccagacgcctccgctcccaacgctgggctcaaccctgtcttccccagctggtctcccagcacgtggcctggagcccagcctcccgccccgctcggtcacgtgagcctggctctcacccgcgccggcttccacaccccg

SEQ ID NO: 35300 - DNA, 30 bp, Homo sapiens
  chr1:26798708-26798738
  hyper
ctcttggcgggagccggaacccggagcccg

SEQ ID NO: 35301 - DNA, 30 bp, Homo sapiens; identical to SEQ ID NO: 243
  chr1:26827744-26827774
  hyper

SEQ ID NO: 35302 - DNA, 107 bp, Homo sapiens; identical to SEQ ID NO: 244
  chr1:26855979-26856086
  hyper

SEQ ID NO: 35303 - DNA, 30 bp, Homo sapiens; identical to SEQ ID NO: 245
  chr1:27021694-27021724
  hyper

SEQ ID NO: 35304 - DNA, 30 bp, Homo sapiens
  chr1:27023721-27023751
  hyper
aggcggcccctccgcggccggcgggggaac

SEQ ID NO: 35305 - DNA, 561 bp, Homo sapiens; identical to SEQ ID NO: 246
  chr1:27113545-27114106
  hyper

SEQ ID NO: 35306 - DNA, 100 bp, Homo sapiens
  chr1:27114660-27114760
  hyper
cctttccagcctcccgccctcgtctgcttccggccctgtggcctggtggggctctgcaggctccctcgggagtggtccttgggccgtggcccctctgggg

SEQ ID NO: 35307 - DNA, 30 bp, Homo sapiens; identical to SEQ ID NO: 247
  chr1:27152777-27152807
  hyper

SEQ ID NO: 35308 - DNA, 30 bp, Homo sapiens
  chr1:27191884-27191914
  hyper
ctagagcagcgggacgagccaggatcgcaa

SEQ ID NO: 35309 - DNA, 30 bp, Homo sapiens
  chr1:27226993-27227023
  hyper
cagcccctgcgttgcgagattgtgaaaatt

SEQ ID NO: 35310 - DNA, 30 bp, Homo sapiens
  chr1:27248034-27248064
  hyper
tcatgccaaactctcgggcccacggctccg

SEQ ID NO: 35311 - DNA, 31 bp, Homo sapiens
  chr1:27286147-27286178
  hyper
cttcccccttagtcccgcgaacacacacaca

SEQ ID NO: 35312 - DNA, 118 bp, Homo sapiens
  chr1:27286496-27286614
  hyper
ggccctaccccgcgggcggacccagcctccctcccgtcccgacgctgttcctcggggtgagcaccagcgtttgtcccatcccgacgctgccccccggtgagtgcggcccccgcaccca

SEQ ID NO: 35313 - DNA, 30 bp, Homo sapiens
  chr1:27286929-27286959
  hyper
gctgcacgggccgccgctagggacacactt

SEQ ID NO: 35314 - DNA, 30 bp, Homo sapiens; identical to SEQ ID NO: 249
  chr1:27320113-27320143
  hyper

SEQ ID NO: 35315 - DNA, 31 bp, Homo sapiens
  chr1:27321039-27321070
  hyper
ggaaggactacggatccgcaggaagaggcag

SEQ ID NO: 35316 - DNA, 30 bp, Homo sapiens
  chr1:27324456-27324486
  hyper
gtagtcgcggtcagcgcagccctagagtgg

SEQ ID NO: 35317 - DNA, 250 bp, Homo sapiens
  chr1:27332736-27332986
  hyper
agcgctctagggtgcgccgctgctccaccaggtctggaaagtcgatgaagaagcgggagcacatgtagcgctgcagggcgcgcacatcggtgctgggccggggccggaagccccgcaccaggaggtggcagtacttgaggaggccaccacctcggatctcctcgggactgcgcgtggcgatgacacggtgccgcaggtgctccagggcctcggtgaagtccccgtacaggctttcgcctgtgaccgttgg

SEQ ID NO: 35318 - DNA, 46 bp, Homo sapiens
  chr1:27560814-27560860
  hyper
ctgcaggaactcctcgacggcgaaaaactacgactcccagggtgcc

SEQ ID NO: 35319 - DNA, 30 bp, Homo sapiens
  chr1:27623352-27623382
  hyper
cagccagcagagggcgcacgggcttttctt

SEQ ID NO: 35320 - DNA, 30 bp, Homo sapiens; identical to SEQ ID NO: 250
  chr1:27648442-27648472
  hyper

SEQ ID NO: 35321 - DNA, 30 bp, Homo sapiens
  chr1:27649362-27649392
  hyper
aaccctttgtctcacgtgccatctcagttg

SEQ ID NO: 35322 - DNA, 15 bp, Homo sapiens
  chr1:27684165-27684180
  hyper
tgcgaccaccagggg

SEQ ID NO: 35323 - DNA, 80 bp, Homo sapiens; identical to SEQ ID NO: 251
  chr1:27719136-27719216
  hyper

SEQ ID NO: 35324 - DNA, 30 bp, Homo sapiens
  chr1:27722036-27722066
  hyper
caaaaattcctctgcgctggggtccgactg

SEQ ID NO: 35325 - DNA, 81 bp, Homo sapiens
  chr1:27816285-27816366
  hyper
tccgaaggggacttcgggtcactccctccctccctgagggggtggggtggactaagacgccaccccgcgctgaccgctcgc

SEQ ID NO: 35326 - DNA, 58 bp, Homo sapiens
  chr1:27816423-27816481
  hyper
cggctcgggaagagcggcccggccggggcccgcgcctcccagcggggtctacccaagg

SEQ ID NO: 35327 - DNA, 93 bp, Homo sapiens; identical to SEQ ID NO: 253
  chr1:27816749-27816842
  hyper

SEQ ID NO: 35328 - DNA, 31 bp, Homo sapiens; identical to SEQ ID NO: 254
  chr1:27883559-27883590
  hyper

SEQ ID NO: 35329 - DNA, 30 bp, Homo sapiens; identical to SEQ ID NO: 255
  chr1:27894940-27894970
  hyper

SEQ ID NO: 35330 - DNA, 26 bp, Homo sapiens
  chr1:27895357-27895383
  hyper
agcctggggctggacgcgtacaaaag

SEQ ID NO: 35331 - DNA, 706 bp, Homo sapiens
  chr1:27901985-27902691
  hyper
ccctcgccgcggaggcgccccctagggtcgggcgccaggcgcccctgcccgagctgcgcgcttagctcgctcccccggccggccgcgctctccagctgcaggaaattccagaagctctccatcatccccgcgcagcgcgcagcccgggctgccaaggctccccgaaggagagccacatgccggccggccgcgcggcccgccctcggcccccacccggtccaacccggccgggtagccacgtctggccgggcgggggccaagccggccgccccttcccgcgccccgggcccggcggaatgcgtggcagccccgaccgggggctattttgagcgggaggggagcggcccggcctcggtgttttcggctttttcctggcccccggcccgccaggccgggccctctgctgcccgctgaatgggagggggggcggggtcacgtggcggggggaggggagggccgtcgcgatccgggtcgggctcgggctctgccccggcccggggactggaggcgcccggcagcggtccggacctgcgctctcggacgcggctgagtggcggggttattaatagcgtgcctggctcgggcagtggctccagggcgcccgctacctgcacgcccctcctgcagagagcactggcggcccggcgctccctccgcagcggcggactgaggcctaactggatagcgccaccgtgaaccggcggcc

SEQ ID NO: 35332 - DNA, 30 bp, Homo sapiens; identical to SEQ ID NO: 257
  chr1:27928401-27928431
  hyper

SEQ ID NO: 35333 - DNA, 96 bp, Homo sapiens
  chr1:27928760-27928856
  hyper
gagaattcccgcccccgcttctctccctcctcccgctctgtgcccgctgcccgcctcagggacagccccagctcccgcctccggccagcaaggccc

SEQ ID NO: 35334 - DNA, 30 bp, Homo sapiens; identical to SEQ ID NO: 259
  chr1:27929077-27929107
  hyper

SEQ ID NO: 35335 - DNA, 183 bp, Homo sapiens
  chr1:27929255-27929438
  hyper
tgttcgccaggtaaccgggcacgcggcccaacccctccagccctagccgcccccaaatccctcctccgccccacaccccctccgggtcattaggtccccgcccctcaactccccgagagccagtggatcctagggatttgggggttggaggggaggggctcctccctccgcagtctccccttt

SEQ ID NO: 35336 - DNA, 461 bp, Homo sapiens
  chr1:27960571-27961032
  hyper
atcgcctcctacctcggtcgggaagcccaccccccacccaccagaccgaggattccaaaagggggcgaaggcggagagcaaagggggctgcgcccacccggagccccgcggcggcccagcgcggcccgccctctcgttgccttggaggcagcccctgcgggcactcgcggtcaaaggcaggatttccgtcggggcggcagcaattcccggatccagcggggagcgcgggccgagaccgccgcgggcgcggagggggcgcccggagaggcctgtccctgccgagggcggggacttccccaggaagcggggacccacgcctcgcgcgcccggcaggagtcccctgcagcccggaacctaccgcaagggcgggccgagagggtcgcggggccgcggtcgcggccgctaacgttaccctgcgggctgtgggcttcaccccgacttcggccggctcggaagagggg

SEQ ID NO: 35337 - DNA, 184 bp, Homo sapiens
  chr1:27986360-27986544
  hyper
cccgccgcggggagcggtccagccgcagcgcacgagccctccgccgtcccactgccccccggaaccgcgcgagcctcgcaaaccgctcggcgcccagtctccacctcgccggcttcatgaacgtgccccgggagaccccgacgccctgaagccggcgcggccgccccaccgccccaccgcccca

SEQ ID NO: 35338 - DNA, 30 bp, Homo sapiens; identical to SEQ ID NO: 262
  chr1:28053263-28053293
  hyper

SEQ ID NO: 35339 - DNA, 592 bp, Homo sapiens
  chr1:28198911-28199503
  hyper
ggtactgcagggggcggggggcggggcttcggcggggcggggctgcagggctcccgcgggctggcggggcggcttcggcgtgcggggcggggcatcggcggggcggggctgcagggctcccggggaccgcccgcccgcccctcagtctgagcccagagagccgcggggaccatggagccggtgccgctgcaggacttcgtgcgcgccttggaccccgcctccctcccgcgcgtgctgcgggtctgctcgggggtctacttcgagggtgagcgggggctggaacccctccgagcactcccttggtgtggggcgggggcagagacccggagaagacgttagcaatccggggaaactgcccctgggttcaaatcccgacactgccactggccaagctgtgtgatttggggccgcactcaacctctttggacctcggcttttgctttcgtggaacggggaccgctgacctgccccgcagggtagtgatgaaaagtcagtgggttgaggcgcgggaggtggatgcagccgggccactcctaggtggccccgcggtgcgcatgggacagagctccgaccgcgccgggacgcagcatta

SEQ ID NO: 35340 - DNA, 30 bp, Homo sapiens
  chr1:28241264-28241294
  hyper
aggggctggcagagcggtatcgcaagaaat

SEQ ID NO: 35341 - DNA, 184 bp, Homo sapiens
  chr1:28261537-28261721
  hyper
ccagaggatccagacgccttggaggacttggaacacctgtaacaggacaaggagttctgctcaggcacgtggccacagaaaactacttaggaagcctgtggtgagaacaacaacagtgcctgagaatcccacggctctggggaagtgagccccgaggatgaggctgctcgcctggctgattttc

SEQ ID NO: 35342 - DNA, 198 bp, Homo sapiens
  chr1:28286192-28286390
  hyper
tggtccaggctctagtctccccgccctctcgctttcttgggcctccgggcgcctcaaaggtaaaactaggccatttgaagcctgcgaagcgaagggcagtcggtcttcaggcctagcgggcttggctgggctgggtcggtggacccctgggctggcggcgggagcagagcatcgagcggcttttagctggggttcggg

SEQ ID NO: 35343 - DNA, 293 bp, Homo sapiens
  chr1:28286606-28286899
  hyper
ccttcgggacctggtcctgggcgtgctgggcaccgccgccttcctgctcgacctgggcaccgacctgtgggccgccgtccagtatgcgctcggcggccgctacctgtgggcggcgctggtgctggcgctgctgggcctggcctccgtggcgctgcagctcttcagctggctctggctgcgcgctgaccctgccggcctgcacgggtcgcagcccccgcgccgctgcctggcgctgctgcatctcctgcagctgggttacctgtacaggtgagtgcttcgccccgggaggggag

SEQ ID NO: 35344 - DNA, 44 bp, Homo sapiens
  chr1:28415084-28415128
  hyper
acagtagaaccaatcgagcggaggaaaccgcggcgttagcgtga

SEQ ID NO: 35345 - DNA, 30 bp, Homo sapiens; identical to SEQ ID NO: 266
  chr1:28559015-28559045
  hyper

SEQ ID NO: 35346 - DNA, 6 bp, Homo sapiens
  chr1:28586928-28586934
  hyper
ccccca

SEQ ID NO: 35347 - DNA, 246 bp, Homo sapiens
  chr1:28586972-28587218
  hyper
cgacctcatcctatgtccaccgcactcctgctttggagggagagcgcaggggctctgggggcttggcgggccgcccggtacgcggcggcggcagccaaagctggggggagaggggacaaccctggtcgcggcttccgaagccaagcgcgggttaggctgcgccctgctaagtaagtggtctgaaggcccagaagtttgttttccagaaattcctcccccaccctcccttcgcgccgctcccctcca

SEQ ID NO: 35348 - DNA, 30 bp, Homo sapiens
  chr1:28655624-28655654
  hyper
aaagctcctaggtgcgcgggtggatataat

SEQ ID NO: 35349 - DNA, 30 bp, Homo sapiens
  chr1:28832366-28832396
  hyper
gaaggatccactaccgcgagaggcctccca

SEQ ID NO: 35350 - DNA, 274 bp, Homo sapiens
  chr1:28833049-28833323
  hyper
aactctaaagtacgcgttagacgggcctgggccagaagtgggccatggagacctcgggacccgcagggctgccgcccgacccagcgagcctctgaaggtgcaccgccacccccactgtttatcttactgcctcatagtaggcacattgtcgttctcaatataattgcacacagttttattctggatcctcatttgcctttaagaattttctcaatttttctttttatttgatcgcaccactgcaacctccgcctgctgggctcaagcaattctc

SEQ ID NO: 35351 - DNA, 165 bp, Homo sapiens
  chr1:28879231-28879396
  hyper
ttgtaattatatgtgtctgtgtgtgtgtggttttgttttctatataaagtcagacgagtgtgtgtgtgtagttttgtttgttttctaaatatataaagtcagaaataaacccaagtaacccagccgcctgggccaggtggtatctggcccgccccattccagcct

SEQ ID NO: 35352 - DNA, 30 bp, Homo sapiens
  chr1:28879650-28879680
  hyper
tgagtgagggcagccgtccggggtctgaag

SEQ ID NO: 35353 - DNA, 89 bp, Homo sapiens; identical to SEQ ID NO: 268
  chr1:28879901-28879990
  hyper

SEQ ID NO: 35354 - DNA, 77 bp, Homo sapiens
  chr1:28908943-28909020
  hyper
acagctatcgcaagcgaggagaggactggaatttggagcccaccccaggcaccacacatagcgcaatgttttgccca

SEQ ID NO: 35355 - DNA, 30 bp, Homo sapiens
  chr1:28969539-28969569
  hyper
ctgccccagtgaagcgttcgtctcagcagc

SEQ ID NO: 35356 - DNA, 30 bp, Homo sapiens
  chr1:28969866-28969896
  hyper
gtaattgacgccctcggatggctttgaggt

SEQ ID NO: 35357 - DNA, 30 bp, Homo sapiens
  chr1:28974795-28974825
  hyper
gcaaccggaaggagcggttcctccctcgct

SEQ ID NO: 35358 - DNA, 215 bp, Homo sapiens
  chr1:28994972-28995187
  hyper
tcctccagaggagtcgagaaagctagcttggccctcaattgtggttgaggtgattctttcatttagggcctattttcctcatctatgagtgcgggaaggagagttactggggtctctagcgacctttccaacactgattttcaagggcgaaagaattctgcttaggtaaggcccaaatcccttggctaaggttaatcctcggtgggaccggcaat

SEQ ID NO: 35359 - DNA, 30 bp, Homo sapiens
  chr1:28996116-28996146
  hyper
cccacagatgagcgcgtggtaggaagactc

SEQ ID NO: 35360 - DNA, 202 bp, Homo sapiens
  chr1:29062881-29063083
  hyper
tactctttctgtagtcggctaacagaggatgaccaagcccctcgcgggggcgggggcgggtcactcccggacagggcccccatgaagtttccctggggactgtgtgactccctaggggtcgggttacctcccagatgggggtggggtatcacttgcagctggaaggcaggttcattttaaggtctcgcgggcttcggaggcc

SEQ ID NO: 35361 - DNA, 30 bp, Homo sapiens
  chr1:29138921-29138951
  hyper
cgagctgcagcccccgctcttcgccaacgc

SEQ ID NO: 35362 - DNA, 1107 bp, Homo sapiens
  chr1:29448270-29449377
  hyper
ccaagcgagagacgcggccctcggggctcctccgcacctccccgcattcttcggggctcccggccgtcatctcgccgtcgtctgggcgctctgcggagagaagatgggaggcaaggactggaccgacgggcctctagcttcagggcgccaggttcggggcgcaaatccgggagggaagctccggccgcccagcccaggccgcttggagatccctggcggccacccccggattttcccgggcggcgaggcggggagccgcccgcgctcgggttttccgcagcggagctccgagccaggcacgcgcggcagaagccggagttggcccggccagcgggcggagaggagggaggggggcgcaggctgttccctggcgcatcccgggctgcaaatctgccgcctgcgtccggtccgcaagcccgcgggtcttgggcctcgggaaacgtgcggcccccagctgccgcgtctccagggtaagtacctcccgggctcgaccccacccccgcacgtggctgcaccgtagcaaatggggcgggggcgctcgggcctcccaggtccgcaggggtcgctcgccgggccccacctcccccctactgtgctttacataccgcagcgcgggaggagggggcgtcaccggctccagcctctccctgcccgccccctccttccagacctcctccgcccgcagcgaagctgcagcaggagcgacttgagctagacaccgggaagaccgctcggatcaagaccagccaggcagaggaggagaggcggcgccgacttcgcccaagatttccatcaagtccacgcatgagaggcctctccctcccccagcggtcgtgctggggccacggcagcaggcgggggtgccggtgccgggcgctgggccccgccggacggatgccctcccggctcccccgtcggcccgggcaaggctgttcccaggttgcgacgtttccaattcgggctcctccggatgaatcatccccctttcccgccgcctggcctcctttcccgcctcctccgcccgaggcctccgtggcccgtggcccggtcagagcagcaccgcccctgcgcctcgggatccgggccgcacagcttaagccctcccga

SEQ ID NO: 35363 - DNA, 30 bp, Homo sapiens
  chr1:29450087-29450117
  hyper
cagagaccccgagccgtggaggtagtgggc

SEQ ID NO: 35364 - DNA, 30 bp, Homo sapiens
  chr1:29450554-29450584
  hyper
gtaggcgccctgtgcgcgcctggtgactcc

SEQ ID NO: 35365 - DNA, 30 bp, Homo sapiens; identical to SEQ ID NO: 269
  chr1:29557378-29557408
  hyper

SEQ ID NO: 35366 - DNA, 30 bp, Homo sapiens
  chr1:29562823-29562853
  hyper
gagacgtccgtgggcgtccagacccagccg

SEQ ID NO: 35367 - DNA, 30 bp, Homo sapiens; identical to SEQ ID NO: 270
  chr1:29563362-29563392
  hyper

SEQ ID NO: 35368 - DNA, 30 bp, Homo sapiens
  chr1:29564105-29564135
  hyper
ccggaacaagttgtcgcggcggcgccccct

SEQ ID NO: 35369 - DNA, 41 bp, Homo sapiens
  chr1:29565084-29565125
  hyper
cggccactggccagcgcttgggcctcgccctgcagctccgg

SEQ ID NO: 35370 - DNA, 862 bp, Homo sapiens
  chr1:29585831-29586693
  hyper
cctgcttctcagctacccctgcggtgagtcccagcccactgggggcgcaggggtaaggggtgtgggcggccgcggctcctgcctgcagggggtgcaggcccagctcacgatgcagctctaaccccgcagcaaaggccccacacttctcccgcctgggcgacgtggaggtcaacgcgggccagaacgcgtcgttccagtgcatggccgcgggcagagcggccgaggccgaacgcttcctcttgcaagtgagcgggagcggtgatcttggctgggggcggggtgggagggggttggtggctgcttctggccctgactccccccagattgctgagtccctgcttcatactccagcactgcgcacagcgtcccggccctcccctagctctgctctgcgctttcttgggtcccccattcccccaggttagagcgcggctccaggaacctatgtccgcgcggtgtagtagggacggctaaatggggcccgggtcagagcgagatcgggacccctcgctccgaggcgcccctgaccccctcactctcttccctgcagcggcagagcggggcgctggtgccggcggcgggcgtgcggcacatcagccaccggcgcttcctggccactttcccgctggctgccgtgagccgcgccgagcaggacctgtaccgctgtgtgtcccaggccccgcgcggcgcgggcgtctctaacttcgcggagctcatcgtcaagggtcagctggtggacgccggggagcgccgggacctcaccctcgaggggcggggccggcgacgggggcgggctctgcccgggggcgtggccgtggggggtggggccggcagggtgtcgctggggcgctatctgaagatg

SEQ ID NO: 35371 - DNA, 561 bp, Homo sapiens
  chr1:29804770-29805331
  hyper
tccatcgcagtccgccggccccctcccagcgtctctcgaccccttccccccttccctgtactccagccgcggctgattcctgctgtctgggtggggtccctgtaaggctcaggcggctgactggggaggcgatcccaggaggcacagtggggaggggatagcagggcggaaagaggctgaatcacaaggaggcgggggcggcggctcggtcccagggccatctcagggaccgtgtcggggggtgctgactctgcccatcaaggggagccggacatttatccgccaaagcccgtccctcgcggtgagggtcgctcctgggtgtgggacccctggcttcccgcgctgccctgcccggggctggtctcgtcccaggaccctggagagcggccccaggaggcgtggaggaggggagagagccgagggaagtggtcatggagcaggtgaacgcacaggggcttcggctggagcgccctcctgggaagagcccctcctctgcaaggacctgccgcagcttaaccagcctgcgctgctgtcgccagcgccagttttaaatagccaaac

SEQ ID NO: 35372 - DNA, 289 bp, Homo sapiens
  chr1:30815487-30815776
  hyper
ggagggcgctccagccgaggcccctctgccttcacctgcgccatgaccacttccctcggccctctcccctcctccacgcctcctggggccgctctccagggtcctgggacgagaccagccccgggcagggcagcgcggggagccaggggtcccacacccaggagggcccctcaccgcaagggacgggcttaggcggataaatgtccggctcccctcgaggggcagagtcagcaccccccacacggtccctgagatggccctgggaccgagccgccgcccccgacttgtg

SEQ ID NO: 35373 - DNA, 450 bp, Homo sapiens
  chr1:31158011-31158461
  hyper
accgtcgaggaacccgacaaatgaattaaaccagcaccagcgtgatgagcaaagcggagaaggaaagagggcgctgtgaggagagcgaggctcctccgggaaagctccttctgctccaggtgacagcggagagagatgccaccgcgcggcgaccggcagggccgcgtcccctctgcgtcctagcacagcgacgccccgcccgccacccgccctacgtcacccacagcccccgacaccgccccctcccccggccctgggcttccagtccctgacagtccctgggacgccgccccacaacgcccgccctctctggaccctaggacggccccgggcacctgcatatgatgtgtggccacgcccccgccacagctaattggaccggggtggacacctgaacccagtcggaccaatcaactcctgggttgccccgagacccggaccgggccctgt

SEQ ID NO: 35374 - DNA, 30 bp, Homo sapiens
  chr1:31192150-31192180
  hyper
cgtgccacgcccctcgtgcccccgggaggc

SEQ ID NO: 35375 - DNA, 31 bp, Homo sapiens; identical to SEQ ID NO: 274
  chr1:31192286-31192317
  hyper

SEQ ID NO: 35376 - DNA, 153 bp, Homo sapiens
  chr1:31380838-31380991
  hyper
cccagccgggacggcgacccccagcccgccgccgggtccttctcgcgcctcccaggccagcgcaggggtcccgcttcgtccccggggagacagttcccggagccactgggaggtgggggaacagggctgaggacccgcgatcgggttccctcc

SEQ ID NO: 35377 - DNA, 30 bp, Homo sapiens
  chr1:31538417-31538447
  hyper
ggggtccggagcagcgtttggggccggtgg

SEQ ID NO: 35378 - DNA, 30 bp, Homo sapiens
  chr1:31769232-31769262
  hyper
tatctcagggcagtcgagaggctgaaaacg

SEQ ID NO: 35379 - DNA, 156 bp, Homo sapiens
  chr1:31769776-31769932
  hyper
acgtcatgagagtgcgataccaggattggtggacggagctggcgaccgccctaggcgcgctgggtcttgtgggtggaaacgcgctggctgactggggtcggcgtttagttcagcgcagcgactcggggacctggagctgacgcctagtacgtatga

SEQ ID NO: 35380 - DNA, 30 bp, Homo sapiens; identical to SEQ ID NO: 276
  chr1:32083922-32083952
  hyper

SEQ ID NO: 35381 - DNA, 30 bp, Homo sapiens; identical to SEQ ID NO: 277
  chr1:32110846-32110876
  hyper

SEQ ID NO: 35382 - DNA, 30 bp, Homo sapiens; identical to SEQ ID NO: 278
  chr1:32135815-32135845
  hyper

SEQ ID NO: 35383 - DNA, 728 bp, Homo sapiens; identical to SEQ ID NO: 279
  chr1:32180092-32180820
  hyper

SEQ ID NO: 35384 - DNA, 504 bp, Homo sapiens
  chr1:32180905-32181409
  hyper
cgccctaggccctgcctcctatctggctccgcccagccctggccaaccttagaacctgtcccaaggtccagagaggcctagatgaggggtagcctgcctctgagaggcatggagccctcctcccgcgtggggtcagggaatagaagggcgtcgagggtggcgggtgagggaacgttcctggcgccgcgaacgggaagcctccaggctgcaggacgtagctgcggggacccggcagtctgcgaggctggagtggccgaggccgccccgagcatagaaacagccctgtatacgtgggcacagaaaggcccagggaggcgcctgggcagaagtgtctaggacgatgcctctgccacggagccctggagtgggggcagctgatggctcaagacacatgagctctggtggcgagtacagggacgcggggtttggggaggcccaagtcaaggtccatccttctgggatgaggggcggaggatgggaggcggagcccggtctccagggcac

SEQ ID NO: 35385 - DNA, 170 bp, Homo sapiens
  chr1:32226157-32226327
  hyper
tcccaggatgactcccattcacgctgggtggcgggggaggggcgggccgggggaaggggcgcggcgacgcgcacatccgtcgcgtttatccacctggcagctccaattcgcccgcccgtcactcaccctccgcctccccggcgctcgccgcccgacctgcccaggccgcc

SEQ ID NO: 35386 - DNA, 166 bp, Homo sapiens
  chr1:32226372-32226538
  hyper
cgctcggacccaaggacagggtcctcaggagccgctctcctagagctctgtcgccctgggggacgcacaccctccatcctgcctccggagctggggactgggccgaggggagggagcgaccccctctgtgcagtcctcccgctccgactgccagagagggtcgctc

SEQ ID NO: 35387 - DNA, 30 bp, Homo sapiens; identical to SEQ ID NO: 281
  chr1:32226920-32226950
  hyper

SEQ ID NO: 35388 - DNA, 30 bp, Homo sapiens
  chr1:32228806-32228836
  hyper
agacacgggggacacggccccaattccaag

SEQ ID NO: 35389 - DNA, 963 bp, Homo sapiens; identical to SEQ ID NO: 282
  chr1:32237638-32238601
  hyper

SEQ ID NO: 35390 - DNA, 93 bp, Homo sapiens; identical to SEQ ID NO: 283
  chr1:32410270-32410363
  hyper

SEQ ID NO: 35391 - DNA, 30 bp, Homo sapiens
  chr1:32480224-32480254
  hyper
agtgctgagctccccgcccctttcccgact

SEQ ID NO: 35392 - DNA, 30 bp, Homo sapiens; identical to SEQ ID NO: 284
  chr1:32574074-32574104
  hyper

SEQ ID NO: 35393 - DNA, 30 bp, Homo sapiens
  chr1:32645012-32645042
  hyper
aaacaacagccaggcgcaaggctttgggag

SEQ ID NO: 35394 - DNA, 30 bp, Homo sapiens
  chr1:32645317-32645347
  hyper
ttactcggggtttccggtgcgaggccagag

SEQ ID NO: 35395 - DNA, 47 bp, Homo sapiens
  chr1:32666346-32666393
  hyper
aatgacgcgggtctgacgctctgtcttcgagcgcggctgcggagctg

SEQ ID NO: 35396 - DNA, 130 bp, Homo sapiens
  chr1:32687708-32687838
  hyper
ccccacttccctccttcgctctcttcgcctcggctgcgactggcggctaaggcaggcccagggaagctagggagatgaatccaggagtccggcctctggggttgtagcaggggtcggggttagagggtgg

SEQ ID NO: 35397 - DNA, 30 bp, Homo sapiens; identical to SEQ ID NO: 285
  chr1:32688092-32688122
  hyper

SEQ ID NO: 35398 - DNA, 30 bp, Homo sapiens; identical to SEQ ID NO: 286
  chr1:32757387-32757417
  hyper

SEQ ID NO: 35399 - DNA, 36 bp, Homo sapiens; identical to SEQ ID NO: 287
  chr1:32757651-32757687
  hyper

SEQ ID NO: 35400 - DNA, 30 bp, Homo sapiens
  chr1:32801031-32801061
  hyper
attgggcgggaagccgccccggggcgctgt

SEQ ID NO: 35401 - DNA, 184 bp, Homo sapiens
  chr1:32827549-32827733
  hyper
gtcgctcacctcccggcggttgagaccggtcccaggctagaagcagctgccggagccctggccgcgggagaacgctccggtccaggcggagccgggcaggtctctgtggcgtgcccgggcccgggcgtcgaggagggcagcattgtgacccgggccgcggcgcgctgacctcacagagcacgtt

SEQ ID NO: 35402 - DNA, 102 bp, Homo sapiens; identical to SEQ ID NO: 288
  chr1:32852879-32852981
  hyper

SEQ ID NO: 35403 - DNA, 911 bp, Homo sapiens
  chr1:32930283-32931194
  hyper
cctggactgcattaatacccacgacgtgcttttcgctctccagacaaagagaccggtacttggcaggtccctcaagtgggactcaaaagaccgaaccgagctgcagcctttcgctagcactggtcctcgccccttttggcatcttggtacttgtagttttgtccactctatctttacccgaaaagccagcgctgagaccacaactcccatcaccctgcgagcaccagcgccttcagagcgcatcctccgaggggcaccagcgccattgaccaccctgctggccgaagggcccgccttcccgaggccaggcgctcccgcgattggccagccgccccgcctctcatcggagggcgccaggtgaatgaaaggggggcgtgtcggtgcgcggtgctccgtggctgcgctgctggaacccgctggaaggtgagcgcgaagaagcgggttggcgctgccgctttcgttggtttggggaggattcctagcacccgggaggctggctggagattggggttagcgggcagggttgcccccactcagtcatcctccttcggaccgcttggccctggcaactcctgggacctccgccccgcgagcccttctagcgtggggaggggcaggcgcggccgtggggccccagcttccctgtcattgggtgtcctccgcgtcgtccagccgggggtcgcggcgccgactacttccacggtgaatggtgcccaggcgtggggggctcggccacactggagaagtgccagcggcagcgatggccactttgtccgcgggaggccatgggaggggctaggccttggggtcccaccctcgggggccgtgccctgtagctggttctggtggcctctctgcaggtcgtctgatgctggacgggggagggtctgtcttgcgagcagtttagatgc

SEQ ID NO: 35404 - DNA, 37 bp, Homo sapiens; identical to SEQ ID NO: 291
  chr1:33005605-33005642
  hyper

SEQ ID NO: 35405 - DNA, 30 bp, Homo sapiens
  chr1:33116059-33116089
  hyper
tacttggccttgatcgccttctgttcttca

SEQ ID NO: 35406 - DNA, 30 bp, Homo sapiens; identical to SEQ ID NO: 292
  chr1:33116541-33116571
  hyper

SEQ ID NO: 35407 - DNA, 30 bp, Homo sapiens
  chr1:33168523-33168553
  hyper
cctcccagccccctcgtcttcccgaacctt

SEQ ID NO: 35408 - DNA, 30 bp, Homo sapiens
  chr1:33178039-33178069
  hyper
gacagtggggaggtcggcgtcccagctgaa

SEQ ID NO: 35409 - DNA, 30 bp, Homo sapiens; identical to SEQ ID NO: 293
  chr1:33182357-33182387
  hyper

SEQ ID NO: 35410 - DNA, 30 bp, Homo sapiens
  chr1:33207152-33207182
  hyper
tgccccctgcgggacggaacctcagtgccg

SEQ ID NO: 35411 - DNA, 327 bp, Homo sapiens
  chr1:33207543-33207870
  hyper
cccccgcctgccatggcggcccgcgcgccccccgccgcacctgcggccgaggagccggggaacccgggcggccccccgcgcaggaagaagtcccgctccggcgcgtccggcctccgccgcgccttcagctggctgcggggcaagcggcgcaagaagaaggcggcgggggccgagggcgccgaaccggccgccccccgggccaagaaggcggaggacaaggccaagagggccaagggcaaaggccgaggtaaggcggtcggcacctgggctgagcgcgggggggcgtcgagggtgcggccgagggggctctgccgggggtccgcgcgc

SEQ ID NO: 35412 - DNA, 413 bp, Homo sapiens; identical to SEQ ID NO: 295
  chr1:33219373-33219786
  hyper

SEQ ID NO: 35413 - DNA, 30 bp, Homo sapiens; identical to SEQ ID NO: 296
  chr1:33282953-33282983
  hyper

SEQ ID NO: 35414 - DNA, 30 bp, Homo sapiens
  chr1:33283480-33283510
  hyper
tccaagtcggcgggcgacagatgcccctca

SEQ ID NO: 35415 - DNA, 127 bp, Homo sapiens
  chr1:33283880-33284007
  hyper
ctggaaggcgacaccgtcccgggccgttgcatttgtgagagagagccaaggcagtatcctccaaaggttgggcctgggccaccctttctccggctcctcaagggctggaggcggcgtcaccagttac

SEQ ID NO: 35416 - DNA, 622 bp, Homo sapiens
  chr1:33358605-33359227
  hyper
gctgcctctggccctccagcccgcgccgcgccccctgccggcagcagacggccccgcagcgcagtgccgcccccttggcccggcgccccctttcgaccaccgagcgcgggccgccctgggcccgggtgccagcccggtacttacccccgacgcgcgtgccccggggcacgcgctcctgagcccgccgctccaggccctccactgtcgggccccggtgtcctccaacatctctcctgacccctgcgcccgctcggagcttccacctgcggcgcctttgctcctttcccacccagccctccaagggagcgcggcagggcccgcccgatagccctctcttctgggaggccttcccggacacgccttcccgaagccctcggctccccacgcctccgtgattccccactccaccttgcccaggcgggggcagcaaacgtcagagagcccgggggcgcctctgaatcttgcgggtgggggctcgggcaggctcctctcactccccgcctcccctcccgcccccaggccatttacaagatggtttcgtccgtgatgaagatgccggaggacgagtcgaccccggaaaagaggactgagaaaatcttccgccaaatggacacaaacaacg

SEQ ID NO: 35417 - DNA, 30 bp, Homo sapiens; identical to SEQ ID NO: 298
  chr1:33429475-33429505
  hyper

SEQ ID NO: 35418 - DNA, 30 bp, Homo sapiens
  chr1:33430468-33430498
  hyper
ctgcgcaggcgcttcgctcaaacacctcac

SEQ ID NO: 35419 - DNA, 154 bp, Homo sapiens
  chr1:33438839-33438993
  hyper
gctgccgcagctcccgcagtgttttctgtcaaggtcaagcatacccactctttgacaaggctgcctccgaaatccctcccttgcagtcctcccagccgttcccaccgcctttgccactcatccggcggcagccgtcctcggaccactgcccctg

SEQ ID NO: 35420 - DNA, 77 bp, Homo sapiens
  chr1:33502693-33502770
  hyper
gtgtgcggagtgggcgggaaaacgcgaaggaggacaggaggtcaggccggaaggtatacttcggcatttgacagttg

SEQ ID NO: 35421 - DNA, 30 bp, Homo sapiens
  chr1:33646887-33646917
  hyper
tcgcgggcgccctgcgcctcctgccgcacc

SEQ ID NO: 35422 - DNA, 30 bp, Homo sapiens
  chr1:33647839-33647869
  hyper
ctgcatccaggtctcgcttagggtccccgc

SEQ ID NO: 35423 - DNA, 30 bp, Homo sapiens; identical to SEQ ID NO: 300
  chr1:33721354-33721384
  hyper

SEQ ID NO: 35424 - DNA, 114 bp, Homo sapiens
  chr1:33721592-33721706
  hyper
acaatggccacggccgccggggccccgggagcccccgcgctggggaaggggctgtcctagggccgggcgccggtgccctccccgcgcggctcaggcgggcggaggggggcgagg

SEQ ID NO: 35425 - DNA, 30 bp, Homo sapiens; identical to SEQ ID NO: 302
  chr1:33722120-33722150
  hyper

SEQ ID NO: 35426 - DNA, 30 bp, Homo sapiens; identical to SEQ ID NO: 303
  chr1:33788139-33788169
  hyper

SEQ ID NO: 35427 - DNA, 262 bp, Homo sapiens
  chr1:33896550-33896812
  hyper
ccagcgcgcacgcgcccgcccgttacctgcggtcgcctccgcgctcctcctccacctggccgctctctcccgggggccgcccctcagcccgccccctcggctcggcgccgcgcaccctgctggctgctcggacgctgcccgcggaggaggggcgagggcgctattaccatatattagcataccagcgcgcgtcacgtggccgctccagccaatggtcaccctagaagggcggggattgggcggaacacgccttagtgctgct

SEQ ID NO: 35428 - DNA, 423 bp, Homo sapiens; identical to SEQ ID NO: 305
  chr1:33937918-33938341
  hyper

SEQ ID NO: 35429 - DNA, 1270 bp, Homo sapiens
  chr1:34628643-34629913
  hyper
gctgagcggtgcaagcgccggtgagtcggcctttttctctcccctaggggcaggatatgcccaaggggcagggacaaatctagccagaaaaacaattcagtccgatgccgagacattctccaatcagctaagccagagaccggcctcgcctcaacgtacgtccgggaggcctggcgggaggtagcagcgattcccccaccgcccatgtggcaagtctgggtgaccagcagcgtcggtatgcacagcctcccagtgggtgtgggtgtgcgagaggccagagctcccaggcgcgcgcaccgcgggcgcccctctctgggtgtcggtggctatgactcttagcagaacctaagaaagtcccgtcagctaggaatgagagagccagagctggctcggggcgccctccctgaccaagaaccccaacatgccgcggttaagcggtgggcgacacggtctgcgaggacagactcacaagacgctgaaggccagagtgggccagagagctcgccactcactgacctgccagaggagaggcgcactttcccaagaaggggaactggggtggtccaggccaagccttcagaggttcaatcggtggtttcaaaacaaaacaaaacaaaacaaaaacaaaaacaaaaaagaaaacacggctccaggtcgaaggtgccctaggtctaggcctggccagcaggtgtttcggtttctcccccagtgggtgtcagcctcgcgggctaaatgaaaatgcggttccaggcatcccggtttggacccgtctccacccgggcacacggaactttctagcttgtagctagaactgagcttcggaggggtgctgtgggtaaagcgggagggcaccagtcgcggccagtagcctccacaggggaccgggttccctcgaaggttcgcgtacctcccccgcgcgctgcaagctgcagccagacacccgcgaagttccgggactctccgcacccgctagatctgccccttcccggactcggtcgtcgggagctggtcccgccgcccgcgccgccgctgccgctgccgcagccgaggcgctcggctgcagcagggcgcgggaaagggcactttggcgcggagtgagcaccgaggggaatgtggcagcgcgaagcctggcggcggcactccctcccccgcctcgggctacaacccccaccccctccttcccatccctcaacaccctccagcccccacctgcaccctcctgcaaggaatgcgcgggacccccaccgtgggcacgcgtccacctgaaccc

SEQ ID NO: 35430 - DNA, 141 bp, Homo sapiens; identical to SEQ ID NO: 307
  chr1:34630138-34630279
  hyper

SEQ ID NO: 35431 - DNA, 562 bp, Homo sapiens
  chr1:34630502-34631064
  hyper
tggactcacccgcggcggccgagacgctgagcaacccacagcccagcaacagcagcagaggcggcggcgttggcggcggcgggcggccccagcggctcccggcgcccggcacaagcgccgaaatcccggtttcgccgcgagccctccccgcggggcagccgcagcgccccagctcccgtccccgcgagcgcggcatggcgcggccggcagcgccgagggagaggctccgctcgccgccgaggagaaaggaggtcaggagagctctggagcttttttctgctcggaaaaaatcccggtacgcgggagccctgagcttctgcggctggaatgaaccaagtgtccgcccggccggggagaggcgcgctgcgctctcggaaatgactcgctccaatcccgcttcgcggggttcgcgccggggggcgggagggggtgaattatccccggattaatcactccggagccgcttctccgccgctccaaatgctgggggtggaggcgcagctaaggataaaatattggggggcgggggttcctcttcagcgccacctccacctccagataa

SEQ ID NO: 35432 - DNA, 30 bp, Homo sapiens
  chr1:34631309-34631339
  hyper
accaaagaaggacgcgttccccaagtcttg

SEQ ID NO: 35433 - DNA, 30 bp, Homo sapiens
  chr1:34632103-34632133
  hyper
tgatttggccaaaacggagcgttggcatct

SEQ ID NO: 35434 - DNA, 31 bp, Homo sapiens
  chr1:34642458-34642489
  hyper
ccccacccaccccaccggcgggtcttgggct

SEQ ID NO: 35435 - DNA, 52 bp, Homo sapiens
  chr1:34642862-34642914
  hyper
gctctgcgaggggctccctgggaacgcccaggcgagcgcctcctgcggggcc

SEQ ID NO: 35436 - DNA, 31 bp, Homo sapiens; identical to SEQ ID NO: 310
  chr1:35208445-35208476
  hyper

SEQ ID NO: 35437 - DNA, 30 bp, Homo sapiens
  chr1:35247382-35247412
  hyper
agtgctggacggggcggggcgaggctgggc

SEQ ID NO: 35438 - DNA, 40 bp, Homo sapiens
  chr1:35258569-35258609
  hyper
tttaaggcgcccccgccgctcgtgcggtccagcagggctc

SEQ ID NO: 35439 - DNA, 30 bp, Homo sapiens
  chr1:35331634-35331664
  hyper
tacgggtggagaaccgcgggcccgggccgg

SEQ ID NO: 35440 - DNA, 858 bp, Homo sapiens; identical to SEQ ID NO: 311
  chr1:35351016-35351874
  hyper

SEQ ID NO: 35441 - DNA, 102 bp, Homo sapiens; identical to SEQ ID NO: 312
  chr1:35390565-35390667
  hyper

SEQ ID NO: 35442 - DNA, 1462 bp, Homo sapiens
  chr1:35394586-35396048
  hyper
accggcacacacaatcgcccacagacccacacagtgacacactcggcacagacacacagcgacacgcactcacattcacacacctgcagaggaaacttctctccggatctccccagcaccacgacttcccccacaaccagctggctactccctcccagacccgagcctccagccgggcgagggctgggccggggctggcctgtccccgcggccctgaccgggagcgtgggtccgcggtccgcgtggtcccctgcccgcccctcgggtcgggcccgcgggcagccaggccggggcaggagcgggggcagctgaggaggcccagcccctcccccctcccggggccgggagccgagcgccggagcccggggcgtgggcggcgccggggccgcagccgggccgtgcctggggggcgctgcagagggagccgcgagcgcggccccgtccccactcctccccgcggcttacctggcccggctcgggctccggccgggttacatggtgccggcggcccgggccgggggcgctgcggcgttgggcaggcgggcagggaccggggcccggcactgcggagcccccagctgaggggccgcgccggctgcggagccccaagcgagcgccgagcggcagcgggcgcgggagcgggaggcggccaagccacggaggctggatttcccggggaccgggaaggggaggcggggggatcccgcccgcgcgctccgcccccgcccccgcccccgcgcagggcagccgagcagggagagggagagggagaggaagagggagggggaccgagctccccgcccccgcgcggacccaggagggccgaggtcgccgcccgcgggcggccgccggggtcccggaggagcgcccacctcgctgagcgacggtgctgggggcgcccagcgtaggggcaggaatgagatccccctccccggggacccaggaacaggcacccgaagtgtcacggccacgcacagccgacctgggtacagggacccaagcccggcggcgggcgggcggtcggggaccagctcagcctcacggaccgggtctcgccccccgccgaggggcagtcacgccctgaatgtcacacacagcccccaggcccgtccgcttaggagactctccttcgggctttcccggtcggccgcctgacctcagctcctggcttggggtcagggagcccccctcttcggccccagcccctgccaggatggggcgctgtgcccggcctcggagccgctggcaggcgtcccccacccacagtccgcacagccgaggcatccccagtgtggagggagagccccgctgtacctgccgcctgtgctgggcccccgcccgtgcccactgtgcccgcccgcctctgggccctgagcctgggattgtgccatggcggggtcggggtggggggaaagggactgtccgaagcacagctggaggctgcggagcccggacacaggct

SEQ ID NO: 35443 - DNA, 112 bp, Homo sapiens
  chr1:35396107-35396219
  hyper
cgcccagagcgatgctgtaatgggggggagggggccacggtggggaagccgcagggggaggggctgaagacgtgggggaaggggtggctccggattccggctttccagggta

SEQ ID NO: 35444 - DNA, 30 bp, Homo sapiens
  chr1:35497422-35497452
  hyper
cgcctccctgctaccggaggagcactggaa

SEQ ID NO: 35445 - DNA, 234 bp, Homo sapiens; identical to SEQ ID NO: 315
  chr1:35544795-35545029
  hyper

SEQ ID NO: 35446 - DNA, 30 bp, Homo sapiens; identical to SEQ ID NO: 316
  chr1:35658266-35658296
  hyper

SEQ ID NO: 35447 - DNA, 30 bp, Homo sapiens
  chr1:35658503-35658533
  hyper
aggacccatggggccgcgattctgattgag

SEQ ID NO: 35448 - DNA, 30 bp, Homo sapiens
  chr1:36023264-36023294
  hyper
gatggcggcaacggcggcaccccctactgc

SEQ ID NO: 35449 - DNA, 1211 bp, Homo sapiens; identical to SEQ ID NO: 317
  chr1:36042458-36043669
  hyper

SEQ ID NO: 35450 - DNA, 30 bp, Homo sapiens; identical to SEQ ID NO: 318
  chr1:36107280-36107310
  hyper

SEQ ID NO: 35451 - DNA, 79 bp, Homo sapiens; identical to SEQ ID NO: 319
  chr1:36173594-36173673
  hyper

SEQ ID NO: 35452 - DNA, 30 bp, Homo sapiens; identical to SEQ ID NO: 320
  chr1:36235784-36235814
  hyper

SEQ ID NO: 35453 - DNA, 30 bp, Homo sapiens; identical to SEQ ID NO: 321
  chr1:36549704-36549734
  hyper

SEQ ID NO: 35454 - DNA, 30 bp, Homo sapiens
  chr1:36554311-36554341
  hyper
ccagtggtgaggagcggaaaaccgagactc

SEQ ID NO: 35455 - DNA, 57 bp, Homo sapiens; identical to SEQ ID NO: 322
  chr1:36615128-36615185
  hyper

SEQ ID NO: 35456 - DNA, 30 bp, Homo sapiens
  chr1:36772822-36772852
  hyper
cagcccagagcaggcggacgagctgaagct

SEQ ID NO: 35457 - DNA, 31 bp, Homo sapiens; identical to SEQ ID NO: 323
  chr1:36789069-36789100
  hyper

SEQ ID NO: 35458 - DNA, 30 bp, Homo sapiens; identical to SEQ ID NO: 324
  chr1:36862992-36863022
  hyper

SEQ ID NO: 35459 - DNA, 86 bp, Homo sapiens; identical to SEQ ID NO: 325
  chr1:36863494-36863580
  hyper

SEQ ID NO: 35460 - DNA, 31 bp, Homo sapiens; identical to SEQ ID NO: 326
  chr1:36883607-36883638
  hyper

SEQ ID NO: 35461 - DNA, 230 bp, Homo sapiens
  chr1:36916114-36916344
  hyper
ggaggtgccctgaagacgggagctaattggtctgggtggtggaccgtcccggggggattggtccgagccagaggccggcgcggcgttgggcgcggctggggagctgtgcttctgagagtaggtttccctcgaaagggcgagggccgggccagggctgggggtggtctcgacacagccagcccggcgcttgggaccccggccgctggcgcggggcctcaggttcctataac

SEQ ID NO: 35462 - DNA, 867 bp, Homo sapiens; identical to SEQ ID NO: 327
  chr1:36931642-36932509
  hyper

SEQ ID NO: 35463 - DNA, 219 bp, Homo sapiens; identical to SEQ ID NO: 328
  chr1:36933229-36933448
  hyper

SEQ ID NO: 35464 - DNA, 322 bp, Homo sapiens
  chr1:36936919-36937241
  hyper
ttacaggcgtgagccactgcgcccggccaataggactagatttaacccaggcagtctagcctttgaattgatgcgcttgacctctgtgctcttctggctgccagccccctttacctctgctttctgagaagaccaccggagtgggacgagaggtcccggctgagttataggccacaagggccacctcctgggcttctgaaggcaggtggaaggtgcagctgagctctgtggtgttgcagaggggcaggatggccccagcctggcctgagggtctccaagaaaccacataaccttggatccgtccgctgtcttcctccagggg

SEQ ID NO: 35465 - DNA, 78 bp, Homo sapiens; identical to SEQ ID NO: 330
  chr1:36937668-36937746
  hyper

SEQ ID NO: 35466 - DNA, 30 bp, Homo sapiens; identical to SEQ ID NO: 331
  chr1:36938251-36938281
  hyper

SEQ ID NO: 35467 - DNA, 30 bp, Homo sapiens; identical to SEQ ID NO: 332
  chr1:36939051-36939081
  hyper

SEQ ID NO: 35468 - DNA, 30 bp, Homo sapiens; identical to SEQ ID NO: 333
  chr1:36939438-36939468
  hyper

SEQ ID NO: 35469 - DNA, 30 bp, Homo sapiens; identical to SEQ ID NO: 334
  chr1:36945020-36945050
  hyper

SEQ ID NO: 35470 - DNA, 35 bp, Homo sapiens; identical to SEQ ID NO: 335
  chr1:37498532-37498567
  hyper

SEQ ID NO: 35471 - DNA, 247 bp, Homo sapiens; identical to SEQ ID NO: 336
  chr1:37498597-37498844
  hyper

SEQ ID NO: 35472 - DNA, 794 bp, Homo sapiens; identical to SEQ ID NO: 337
  chr1:37498888-37499682
  hyper

SEQ ID NO: 35473 - DNA, 561 bp, Homo sapiens
  chr1:37500013-37500574
  hyper
gggctcccacctgccccggctgccgggctctggcgggcgggctgcacgcgtctccggccgctcctcctccagccgccgccgatgctatcgcccgggctcgcacaaagccccggagtggagttgcacgcgcgcacactctccctcccagccccctcccctgcgccctgcctcccgcctcccgcgccgcccgccgcccgcgctccctccgcgcactcccccgcgcacacacacttcacactcacacttgccgaggcgcacactcgcgcgctcacacctgcgcggggggcggggaaggggaccctggccccattgtagggggacgcccggagaacgaggactctcctcgcttcccagacgtccccacccgccccgccggccccagtcccttctactgcgagggcacggagcccgggagccaggcgtggagcgcgagagctggcaccgcgagctgggagacggcggcagcccagcggccggaccagctggaggagacgcgcccgccgggagcagcgagaccgggagcccgccgtctgcggagcctggcctcgcggctcccacgcg

SEQ ID NO: 35474 - DNA, 268 bp, Homo sapiens
  chr1:37500602-37500870
  hyper
cgggagactgacccgggaaccggcttccctccccaaccccattcctcctggcagcagagttggggctgggggttcggagaggcagaattcaaagcgaattgtctacgctgggccaggggagctgagggagttggtagaggtgggagagcccaagtcagaccccctgctgtgggaagctggacttgaccgcgcacaggtcctggggctgcggaggaggaagaccgctcacgccttagatgtaggggggcgtgggcgccgggcccgctcc

SEQ ID NO: 35475 - DNA, 69 bp, Homo sapiens
  chr1:37501110-37501179
  hyper
aattactcagttaggcgagtttaatgacctttttgacagagacaaagcggtgccgatacagtagataaa

SEQ ID NO: 35476 - DNA, 165 bp, Homo sapiens
  chr1:37721107-37721272
  hyper
caaaggagccattttcgggcgaagccaggggcccacgtgggagggagctccaggagagatcagtctctgctggcgtggagggggcggggagggggctgtccgtggtgctgaacccaagctatcctaggattgccaggcagtacgaatgaacgctggttaatggaa

SEQ ID NO: 35477 - DNA, 30 bp, Homo sapiens; identical to SEQ ID NO: 341
  chr1:37939709-37939739
  hyper

SEQ ID NO: 35478 - DNA, 396 bp, Homo sapiens
  chr1:37940473-37940869
  hyper
cgcgggtctcgggccgggacagcctcggcgtcaccagctcccggcagccaaccaaagttttccagcaacttttctccccacgggtcaccccagaaacttgccctccccggctccgggagtccggccatgggccttgcgctgcctgggcctgagctctgagtgccggacgggtgggcgaaagtggtggcctcagtggggaagccttgggccccgcaacgcacttccagccccaggattccatctgagagccccgtccctgccttctgggtcccctgggttggcgtgggggttcgaggctttacagctggggtagttccagtcttagttcagactaagttccgatcttcgagccaccagctaacagctggatgaccttgagcacgtttttaatgtctg

SEQ ID NO: 35479 - DNA, 30 bp, Homo sapiens
  chr1:37980345-37980375
  hyper
atgttgggctgaggcgggcggcggcggcgc

SEQ ID NO: 35480 - DNA, 30 bp, Homo sapiens; identical to SEQ ID NO: 343
  chr1:38019537-38019567
  hyper

SEQ ID NO: 35481 - DNA, 30 bp, Homo sapiens; identical to SEQ ID NO: 344
  chr1:38019906-38019936
  hyper

SEQ ID NO: 35482 - DNA, 30 bp, Homo sapiens; identical to SEQ ID NO: 345
  chr1:38061486-38061516
  hyper

SEQ ID NO: 35483 - DNA, 252 bp, Homo sapiens
  chr1:38100240-38100492
  hyper
cgtgctgccagtcgcgacgggggcaggcccgggaggggcgagggcgcggcccgctcacccgcccgctgcgggactgtcctgggcgcccggctcgcctgcgctccgcccgcccgttcccaagttgctcaatctgcggacggctcacgccctcggggccagcgccccacccggcgcatcggtcctccggggcggctcggagctgccctcgttctccgcagcacccgagcggatgccctactctggccggtcgct

SEQ ID NO: 35484 - DNA, 58 bp, Homo sapiens; identical to SEQ ID NO: 347
  chr1:38100533-38100591
  hyper

SEQ ID NO: 35485 - DNA, 30 bp, Homo sapiens
  chr1:38155510-38155540
  hyper
cagcgcctcctgcacggcaagcagaggccg

SEQ ID NO: 35486 - DNA, 257 bp, Homo sapiens
  chr1:38157953-38158210
  hyper
ggccagggcggagccgggtgggttggtggggagggcggggaaacaagcctggaccacaactcccaggagtacccgcgacggcggcggcctcgctgtcgcactcaggctatagggggcgcattgggcggaagaccctgggccggcaggaacttgcttgtgattggatgttgtgggacggcggcttctcattcgtcagcctgtgactgtggagtttgaattgggtggcggttgactgtagagccgctctctctcactgg

SEQ ID NO: 35487 - DNA, 203 bp, Homo sapiens
  chr1:38219755-38219958
  hyper
gctggcccccatatccgcccacgtgcgccccagtgcggagaccctgccctcaccaccacctggatcaggccttccttcttggccactcccaccccccaccctccgcagtgcagcctggaggggggactcacgggtgcaggaagccgagggcgggtcggtgggtgagcgcgcatagctgtcctggcacacgcagaaggtggagg

SEQ ID NO: 35488 - DNA, 314 bp, Homo sapiens
  chr1:38229928-38230242
  hyper
atccagggcccagaccaaccccgcggtcaacgcctcagattccagctcctccggattctgcacctagatatgacgcctctggattcaactgagcgtatagctcccctaaatgcacaatcagaggcaagacgcgggctccagtatcgccgacagcctcaaacccggcaacgcggagcgcgcccggcagactacgctcagaattcagcactgcggacagttccatgatcagcacgtcgggcagcgcccggatccagccccctcgaccagcattccaccttctgttggccacactgtggtctcctagcccctgtagt

SEQ ID NO: 35489 - DNA, 46 bp, Homo sapiens
  chr1:38230282-38230328
  hyper
cgcatctccctgtctccactcttcatctccccgcccccgcacctcc

SEQ ID NO: 35490 - DNA, 265 bp, Homo sapiens
  chr1:38230637-38230902
  hyper
tcggcggtcccaggccgccagggtcccaaaagcagcgcgagacagagctgcatccggcagaggaagaggcgcagcgggtgtggaccggcgcaggtctccatggtccgcagaccgagctgtcagtccggcggcggctcaagccgcgccagcctagcaccgctgagcaatgcccccagaccccagagccagcggggggcggagtctcaccgctcaccatcatccatgggaaccaatcactaggcaccgccgcgggatgccaaccaat

SEQ ID NO: 35491 - DNA, 30 bp, Homo sapiens
  chr1:38260395-38260425
  hyper
ccgccatcggtgagcgccccccaccccggg

SEQ ID NO: 35492 - DNA, 137 bp, Homo sapiens; identical to SEQ ID NO: 351
  chr1:38412696-38412833
  hyper

SEQ ID NO: 35493 - DNA, 38 bp, Homo sapiens; identical to SEQ ID NO: 352
  chr1:38461632-38461670
  hyper

SEQ ID NO: 35494 - DNA, 30 bp, Homo sapiens; identical to SEQ ID NO: 353
  chr1:38478687-38478717
  hyper

SEQ ID NO: 35495 - DNA, 681 bp, Homo sapiens
  chr1:38510052-38510733
  hyper
ctctctaacttttccaagtttcgtttggtgtggccaggagggcagggccccgcggggagcaggggccgcgctatgcggcggtcggtctgcagcagggcagaagccccttcccgtctgggtgtgtgggagcgcagacccctccggcgtggccgggaaccaagccggggctcggatgaaacgaaacgaaaaatgaacactcgaattttttttgttagttttttttttttttttttgcttttttttggggggagggtagggtagggaaatataaggggaaaaataaattaggctagattaaagctttggctatttcctgcttttatacacagacgcggctctcgcgacctcccctccggggccccgataaatacagtatactgcgatttaaattaagggcgcgggcggagttagaaggaccccaggagccgagaggctccacgaataaataaaaaccgtaaaaaaccaagcccggagaaaggggaaagcggggtggggcgcatccttataggagagaagaggcgtgtagcgaataaagtgacagccccccaccctggacccgcaggctcaggagtccacgcggggagaggggatggagaactctcctcgcttcgtcctctctcccggggaatccctaaccccgcactgcgttacctgtcgctttggggaggccgctgccgggat

SEQ ID NO: 35496 - DNA, 1026 bp, Homo sapiens; identical to SEQ ID NO: 355
  chr1:38510773-38511799
  hyper

SEQ ID NO: 35497 - DNA, 292 bp, Homo sapiens
  chr1:38511821-38512113
  hyper
cgcctcgtggccatcctcgtgcagcgcgtggtgcaggcccggccccgcgccgccaccgcccgccgccagcatcccggccaggccgccgccgccgccccccgggtaggccgcctgcgcgtacagcccgagcggctggggctggtggcccccgctggccccgggcgagggcgacatggccgggcccaagtggtgcgctgtgctgccctgcgcccatgccgcgcccgcgtgggccgccccctggtgcaccaggcgcgcgtggaaacctccgccgccgccgccgtcgtcggctcgg

SEQ ID NO: 35498 - DNA, 313 bp, Homo sapiens
  chr1:38512126-38512439
  hyper
cgcctgccttgccgtgttctaggtgcgggccgccggcccaatcgccgccgccgcctcctcccgtgggtagccactgggggtgcgctaggcccacggggtggcccgcgcccgcgcccagccactcgtggtgcatcagcttctgcacttcgcggtacgcggcccctgcatgcaatcgctccgcggccgccgccgccgccgccgccgccgcggcgtccgggtgcataagcggcccggtgcccccggctccgccaccggggccccgcggcaggtactgcgcggtggtggccatgccgccccgcgccctgcgccgcgc

SEQ ID NO: 35499 - DNA, 99 bp, Homo sapiens
  chr1:38580184-38580283
  hyper
tgttatgcaaactcccgctctcctcattcgccagatgaatattcatgactcaggcaatctgtaccagccagactttcctgagggcggcagcttttcttc

SEQ ID NO: 35500 - DNA, 128 bp, Homo sapiens
  chr1:39044125-39044253
  hyper
gggaccgggagacgcgatccggagagcggtgggaagtattcgcctccgttcctcaaacacaggatgcgagcgccctttggagaagtcgcgctcggcggaaacgctaactccccggccaagtgcaaatg

SEQ ID NO: 35501 - DNA, 399 bp, Homo sapiens
  chr1:39269714-39270113
  hyper
gtcaggggcaggcctcggcggcgtccgggctgggggcgaggcgcccacgccccaccctcccgctgtggccgctggcgccggcccgagcgcgcgcagcccggtgcgcttcggcgcccgctgagcccgcgaacctctccgccgcgccatcagcgcagccatcagccgcgccgcgtgctgtcccgcgccccgctgctcgcggccgcgggccaccggcggtaataatgaggcacagcgccatgaccgcggccctcggctgcgccgccggcagcagcgcgggcgccgcattagcatctccgaagccttcctgtgtgttcttttgtgctcattttccagcccgaatgctcggcacatcccggaccgcggacggagccgcaggagccaccgcggccgaacgtagct

SEQ ID NO: 35502 - DNA, 30 bp, Homo sapiens
  chr1:39284362-39284392
  hyper
gcaaagcaggaatccgcactgaacagcagg

SEQ ID NO: 35503 - DNA, 88 bp, Homo sapiens
  chr1:39338989-39339077
  hyper
agcggcgtagctggcgccggagaccgcgactggcgggttgggagcagcactgctcatgcgcggaagggggcgcgcgcctgcgcacttg

SEQ ID NO: 35504 - DNA, 30 bp, Homo sapiens
  chr1:39457656-39457686
  hyper
cctggcctggagggcgggggtgggatgggg

SEQ ID NO: 35505 - DNA, 30 bp, Homo sapiens; identical to SEQ ID NO: 358
  chr1:39483421-39483451
  hyper

SEQ ID NO: 35506 - DNA, 30 bp, Homo sapiens
  chr1:39568220-39568250
  hyper
ggatggccctgaggcgagataacacattag

SEQ ID NO: 35507 - DNA, 43 bp, Homo sapiens; identical to SEQ ID NO: 359
  chr1:39874198-39874241
  hyper

SEQ ID NO: 35508 - DNA, 60 bp, Homo sapiens; identical to SEQ ID NO: 360
  chr1:39874756-39874816
  hyper

SEQ ID NO: 35509 - DNA, 480 bp, Homo sapiens
  chr1:39956619-39957099
  hyper
ggcccagctggaggcaggaggcggagcctcctccgcaaagctggatcagtaccggggacgcagggcgcacagctagggctggcgggggcggcccgactggggcgctgcctgggctcacgcgggagccaggtgggggacgcagggagaagcagccgagcaggtgccgagaaggaggcgcccgcagaagcgcatgcaggggccacggggaaggcgccaggaggcggtgaggggccgcggtggccggaacccgggccggctgctgcgggcagaggaacaggccccacccgcggggcttggctggcaccgcccggctctccagacggggctacggccgcgtgtcgggcccggtggcgaccacggcacaccacggcgaggcagccgggtggcaccactggcgggaccgggacggcgccgcggccttaggatctctgcgccgaggcccgcggcgggagccacgacggccctgaccacgctgacgcc

SEQ ID NO: 35510 - DNA, 35 bp, Homo sapiens
  chr1:39957300-39957335
  hyper
gggaatcgcgccgcccgggtcgctgccggagctcg

SEQ ID NO: 35511 - DNA, 30 bp, Homo sapiens
  chr1:40042417-40042447
  hyper
aagcccgaaagcggcggaggcggcagcgac

SEQ ID NO: 35512 - DNA, 576 bp, Homo sapiens
  chr1:40105060-40105636
  hyper
cgcacacgccccctacgccgacacctgtggcccccgcgctcacctgcctctgcccaggcggtgctggagggctggcccgcctgctcggcgagcccgtcgggccgacccccaccccgctcgccctccgcctgctcggtccccgcatcccggcccttacctcagctggccctcttggcccacgtcgatgggtccgtcggactccccgtcggagccgctcggctccttgggtcgcttcatggcgaacgcaggctgcctggtctcagccccgcggctaaggctcccagtcgggaagtcaggccccgccccggccccgccccggccccgcctcgggggcgccgccaccgccctttcccagggccctttcctgcgccgcagctccgggcgcccaggcgccccctcgcccccgcggtgacgcgccgccgagccgtgggaaggccctaggcggtcgccgccttcatcgacggctgggaggtccggctctgctccgctgtctcggctgccgcgcgctgggtggccttgggcaggtgccctgggaggccccgcggggaagccaggagtccccgtctgtccctgggt

SEQ ID NO: 35513 - DNA, 30 bp, Homo sapiens
  chr1:40137955-40137985
  hyper
tctccttccccgaccgacccacgccagcag

SEQ ID NO: 35514 - DNA, 175 bp, Homo sapiens
  chr1:40157916-40158091
  hyper
cggtccccagccgccgccagtctccggcctcggatgttgacacaaacccgaggcggtttacactgagcgggtctggaagctttcagggccccggcaacacctcctccccgcacttgggggtctccccacagcccgggccggccgcctgggctgcactggcgtctgagagctcctg

SEQ ID NO: 35515 - DNA, 47 bp, Homo sapiens
  chr1:40254995-40255042
  hyper
gcgtgcgccccctgcgcccccagtactgatccagcttcgcgggggag

SEQ ID NO: 35516 - DNA, 87 bp, Homo sapiens
  chr1:40255068-40255155
  hyper
cgggccaggagctctggggcccttctggagcacccgggagccacctgtgcacttctcagtcgccacggccccggtgcaggcctggca

SEQ ID NO: 35517 - DNA, 30 bp, Homo sapiens
  chr1:40420567-40420597
  hyper
gggcctcggtttcctcgcgcgtgtctggga

SEQ ID NO: 35518 - DNA, 30 bp, Homo sapiens
  chr1:40421515-40421545
  hyper
gctcttaaaggagccgcgtccctcaggcat

SEQ ID NO: 35519 - DNA, 30 bp, Homo sapiens
  chr1:40505984-40506014
  hyper
tccaagaccctttacggactgcagcttaaa

SEQ ID NO: 35520 - DNA, 30 bp, Homo sapiens
  chr1:40627048-40627078
  hyper
acgcgctggtgggccgtgggaagatggcgg

SEQ ID NO: 35521 - DNA, 30 bp, Homo sapiens
  chr1:40723945-40723975
  hyper
ggggatgtgggcatcgctggacgctttgtg

SEQ ID NO: 35522 - DNA, 881 bp, Homo sapiens
  chr1:40781095-40781976
  hyper
ttgcagaacaaacggcgtccttgtggtgcgggccggcgccgcctattggcgacgaggggcactacatctccgggcaccccgaagtccccacccccaccacagcgctcacaaagttctcctttgtctgccgcctccctcccgccctggtctcaggttagagacttacgtcgatgccgtcggatccaggcactcccggcggtcccgggggacccggggggccccgctctcccggtggacctctctgaaaaacacacacggggtggggcagtcctcagacagtgcaggaagctgggcgtccccggggctgcaagcgaccctgggagcggggtcctaggggcgcagctcttccgcgaactcccacgtattgagaatcttctgtatagcaggcactgtgtgccattacatgcattcattatcttacagaatactcagaaccgggaggcgggcgctattacgggccccagtttgcagtcgaagaaactggctcagaacgtgaagggtccatggtcactgagagtgggcggcggcgccaggagtccgccctggatctgcccgactccttccactgtgccagtttgcccttgcgcggtcgcggtggggaatagatggagacgtggacagctcaaataaatcacagatggaatgtaaggttgtgcctagcaggctgccggccctcagtgagcggtggctcgggttgttgttcttacgtgaacgacaggcagagacagcgcctcctcctctccccatggtgcgggaaaacccgacgggaaagtgggggaggcgcagagaaaggaggtgtagggaggtgaagcgggtactatcttcccactcggagcgccccttcggcagcacagctgcccggtcctccctctgctaagccc

SEQ ID NO: 35523 - DNA, 647 bp, Homo sapiens
  chr1:40782310-40782957
  hyper
tctctgccctacccgcgcgcccgcagcccccggcggccctcggaagggagacgtgggtaggcgggcagggccgagaggccgcctcggggcgacagcggcgtctggttggagccggcgccccctgggaggcggcgggggcggaggctgcgcagcgggtgaatgagcaccattgtatgccccgccacctgggctccccgggctgccaggaccgggcgccagctcctgccccacgctgcctgtcccgggccgggccgcgcgtctggggacgggtcccgtttgactctccggctcagccacctccattcacggtgccgcgatgggcaccatgtatgcacccaccgaggggacctgcccgcggcgctgtcctcaggtggcctctcgggctaggggtgtcagtaggcgcgggacacaggcagagctcctccatcccggactccagaccccgcaccctggaccctggcagcggaggggctgcgaaacttacaatctgcgccagagcgagcactaccacctggaggagaacaaggaggctgcggggggaggccgtagcggcggccatggctggcggcgagaccaagggggacgggtgcgtgtccgcgcacgcaccgacggcagagtctcccggcgctcctccagcgctggctgtt

SEQ ID NO: 35524 - DNA, 30 bp, Homo sapiens
  chr1:40915881-40915911
  hyper
ggcgagccgggaagcgcgagttccgcccgc

SEQ ID NO: 35525 - DNA, 30 bp, Homo sapiens
  chr1:41131455-41131485
  hyper
ggcctaggggaatccggggagtttggcttg

SEQ ID NO: 35526 - DNA, 238 bp, Homo sapiens; identical to SEQ ID NO: 365
  chr1:41267898-41268136
  hyper

SEQ ID NO: 35527 - DNA, 702 bp, Homo sapiens
  chr1:41284000-41284702
  hyper
caggagccagggtgacgcctttactcccaatcccgactctgaccctggagacccgcacagattcagcggaccctccccctccctccccagtcccctgccacatccccagaagtccccgcctccgggtccgtgcgcggggtaggctggctgtgatctcgccgcccccgcccctgcagacttcatcgtgttcgtggcctcggtggccgtcatcgccgcgggtacccagggcaacatcttcgccacgtccgcgctgcgcagcatgcgcttcctgcagatcctgcgcatggtgcgcatggaccgccgcggcggcacctggaagctgctgggctcagtggtctacgcgcatagcaaggtgaggcctgcaagccgcgcgcggagacccgagggcgtgtctggggcacgaccagagcgggcagggcggagagggcgaggtcagaggggctgtctccgtgctgggaaggggtgtggcctgcgggggttggagccctagcaggaggcgaggtctaagcgggtggggcgaagtggattctgaattaggtaggggcgggcctaggagtccggaccggatcagggggcggggccggagaggcggggcttgagggtttcccctggatgcttctgggtttgaagggaccactcgtaccacaaagtgggcagctgaggtgggacttgagggtggggctggagcggggctagggtggg

SEQ ID NO: 35528 - DNA, 502 bp, Homo sapiens
  chr1:41327011-41327513
  hyper
ctttcactttacggccgaggctggggtcagagaagtgaagccaaactgtcctcccgcaggaggcaaggcctggagggacgccagggtcccagtccggtgccgggccctgcgcacacagccgccgcctccaccctcgcggagggcgcgcgcggggcccagtcgctgggtgcagggtccggcgggcagtcgggccctttctcctctccggcacgccgggcgggcgccggccgccctcagcagctcacggagccggcgggcggcgcggaccccaagtccgagaagcagtcgaactcgctctggcccaggaagagctcgggcagctcgcgcacgcggtgcagcccgagctccagctccagcgacgtcagcgcctcctcgtcgatgagttcggcgtccatgccgcccagggcgtgcgcgggcggcggcggggctgcggcgcttggcgccggctgcgggcccggggggcctcccggagcgttggggggcgcggccgcgcggccggggt

SEQ ID NO: 35529 - DNA, 450 bp, Homo sapiens
  chr1:41327843-41328293
  hyper
gccggctcccccggcccgggccagcggctgctctgcggcgggagacccgggcaccgtgcggtccctgcagctcggccgggcggagcaaaaccaaacccgactggtgccccggcccagcccactactgcgcaccttgcggccgcagcctggggtcacaaaggcccgcaacctgtagtgctccgaaacctccgcgtcgcgtagctgggctcggcgtattcttatacccagaggcggggcttccccgccctcggacgctcattggctgggcgagacgcttctgggcgggccgcgcacgcctgcatctaggtcttggccccgcccctcccactggaaccccgccccttgggactccggccacgccccaggctctgagcaccgccctggggcggggtatttggcactttcggagggattcggtctggccctcagggcttcggaatcggacttggc

SEQ ID NO: 35530 - DNA, 36 bp, Homo sapiens; identical to SEQ ID NO: 369
  chr1:41446123-41446159
  hyper

SEQ ID NO: 35531 - DNA, 476 bp, Homo sapiens
  chr1:41832017-41832493
  hyper
gttgctggcacgcccggcagactcccacgaccacctgctcacacccacccacgagcgctggcgcgcttcgggcccttccggcttcccgggcctcccggcgcccctcccccgccgccgtgcccagcccccccaccccgctctgctccccgcggaccccctcgctcccttccggccccacggcggccgcccccgccacaccccccgcgcaacttagggagctgaggaggcggggctcagggaggcccctggggcagccacgcggcgggagaggagggggcctggaggcagacagaccgacagacagggtgagggccccgcctgccacctggcgccgctccagcgggacgatggcgggcagcgccgtgccaggcggtaattgcagacagactaatttaaagagatgagacggttatttttaactcgcgttaaggtaatgaacggcgcggggggtttgcgggttcgaaagttcagcgccc

SEQ ID NO: 35532 - DNA, 1592 bp, Homo sapiens; identical to SEQ ID NO: 372
  chr1:41847296-41848888
  hyper

SEQ ID NO: 35533 - DNA, 340 bp, Homo sapiens; identical to SEQ ID NO: 373
  chr1:41848942-41849282
  hyper

SEQ ID NO: 35534 - DNA, 525 bp, Homo sapiens; identical to SEQ ID NO: 374
  chr1:41981636-41982161
  hyper

SEQ ID NO: 35535 - DNA, 54 bp, Homo sapiens
  chr1:42128208-42128262
  hyper
accccgggatgccttcgcggccggggtcgcagatgggcccgggcgcggctggcg

SEQ ID NO: 35536 - DNA, 30 bp, Homo sapiens
  chr1:42500952-42500982
  hyper
cagagccgggatgccggcaggacttctgga

SEQ ID NO: 35537 - DNA, 30 bp, Homo sapiens
  chr1:42845975-42846005
  hyper
agccgtgtgaccttcgccataccccggaat

SEQ ID NO: 35538 - DNA, 30 bp, Homo sapiens; identical to SEQ ID NO: 375
  chr1:42846455-42846485
  hyper

SEQ ID NO: 35539 - DNA, 30 bp, Homo sapiens
  chr1:42846885-42846915
  hyper
ccgcactctagctgcgagacttcttggggt

SEQ ID NO: 35540 - DNA, 30 bp, Homo sapiens; identical to SEQ ID NO: 376
  chr1:42922679-42922709
  hyper

SEQ ID NO: 35541 - DNA, 457 bp, Homo sapiens
  chr1:42928781-42929238
  hyper
gaatgagttgtactatcgatacggccgggacaactccgcccccgacccgaaggccaatggtgtgagacataataacagtctccacaagaaccacagtctctggttccactggcgtgcgtcgtctctatggttcccgccggaaggacgcgtctgcgtctctgcggcgagcgcggttgctatgacgcccaggtctccgtaggcacctgcagctagcagctgagcgcgtaggggccgagcgaccccgggacgctcgcggcaccctccgcaggaaaatttccgacttggttcttgaggttcctgcctcagccccaaggaggaaagcacccattctcccctcttttccgcattacgggccttttctgcttctccccagtatggtccgaaactacaggaggggaacccctcctggcccggcctttctattccctggctggagtgattccgcctgaaggagaat

SEQ ID NO: 35542 - DNA, 30 bp, Homo sapiens
  chr1:43147924-43147954
  hyper
tcgactgaattagccgccaaaggtccaatg

SEQ ID NO: 35543 - DNA, 30 bp, Homo sapiens
  chr1:43231616-43231646
  hyper
gcactctggcattccgaaaaatactcattt

SEQ ID NO: 35544 - DNA, 25 bp, Homo sapiens
  chr1:43232901-43232926
  hyper
cggaagctccgcccacgcgccttta

SEQ ID NO: 35545 - DNA, 30 bp, Homo sapiens; identical to SEQ ID NO: 378
  chr1:43233136-43233166
  hyper

SEQ ID NO: 35546 - DNA, 911 bp, Homo sapiens; identical to SEQ ID NO: 379
  chr1:43389628-43390539
  hyper

SEQ ID NO: 35547 - DNA, 63 bp, Homo sapiens
  chr1:43424612-43424675
  hyper
tgtgggcaggacctcggggcggggcctggggcccagcctgtcctgggcggcgctctgcgggga

SEQ ID NO: 35548 - DNA, 30 bp, Homo sapiens
  chr1:43424909-43424939
  hyper
agttctcactcggccgctgggtgacttcgg

SEQ ID NO: 35549 - DNA, 41 bp, Homo sapiens; identical to SEQ ID NO: 380
  chr1:43516647-43516688
  hyper

SEQ ID NO: 35550 - DNA, 224 bp, Homo sapiens
  chr1:43613418-43613642
  hyper
aataagatcccgaccggcgggcgcggggcggggcgatgcaggcagggtaaggggctggcagagtgagacccgccccgaccgggcagcactacccgagcgctgttgcctggagaccacgggacgccgttgcctggagacagcggggacgcgttgcctggagactgtggaaggcccaggcaagagggcgcgtggcagcccaaggccatggcgggacacccaaaaga

SEQ ID NO: 35551 - DNA, 241 bp, Homo sapiens
  chr1:43637577-43637818
  hyper
cggcccctctagcacgacattgaggcctggcttcagaagccctcgggaaaacgcatcctgcaactgcaggacacaatcacggtcactcccaggggtgtaaggccccctctcccacgcccagccccacgagctcggctgacacctacctctctgtctgtgacaagggattcatcggattccgactccgaatccgagagcgggggagtgtccatctcgccgcacgcacgtcccacacctacag

SEQ ID NO: 35552 - DNA, 87 bp, Homo sapiens
  chr1:43638022-43638109
  hyper
aggaaccgctacggcgtttgaaagtgtccgggttgcttaggatccctacaggtagcgcctctggatacatgcgtggtctgctgaccc

SEQ ID NO: 35553 - DNA, 30 bp, Homo sapiens
  chr1:43638350-43638380
  hyper
gggtcggagcggggcggtgctctccactct

SEQ ID NO: 35554 - DNA, 44 bp, Homo sapiens; identical to SEQ ID NO: 382
  chr1:43803508-43803552
  hyper

SEQ ID NO: 35555 - DNA, 30 bp, Homo sapiens; identical to SEQ ID NO: 383
  chr1:43803852-43803882
  hyper

SEQ ID NO: 35556 - DNA, 30 bp, Homo sapiens; identical to SEQ ID NO: 384
  chr1:43804341-43804371
  hyper

SEQ ID NO: 35557 - DNA, 209 bp, Homo sapiens; identical to SEQ ID NO: 385
  chr1:43805019-43805228
  hyper

SEQ ID NO: 35558 - DNA, 104 bp, Homo sapiens; identical to SEQ ID NO: 386
  chr1:43814926-43815030
  hyper

SEQ ID NO: 35559 - DNA, 30 bp, Homo sapiens; identical to SEQ ID NO: 387
  chr1:43817944-43817974
  hyper

SEQ ID NO: 35560 - DNA, 269 bp, Homo sapiens; identical to SEQ ID NO: 388
  chr1:43818176-43818445
  hyper

SEQ ID NO: 35561 - DNA, 155 bp, Homo sapiens
  chr1:43832811-43832966
  hyper
cagcgaaggtgccacgccgagggctggcacacacgtctcctgcctgacacaccacgcaacacctccgtgggctgacacgcatggctcccggccctcacgcagctcggccaccgcccaggcacacgcacgggctcacccgcggggccactcacaca

SEQ ID NO: 35562 - DNA, 287 bp, Homo sapiens
  chr1:43919240-43919527
  hyper
ccagccctcccggcccgcgacgcacccgggggcgtgttgatcagtacaagccgcagccccgcttctcgcgcggcgcgcgccagcgcctcaggcgtctccgcgtacggccaggccacctcgacggcctcgaagcccgagctgcccgcggcccgcacccgcgcggggaggccggagagctcggggaatagccaggacagattggcggagaagcgcagcggcgccatgcctggggaggccgggccgggcggagtccgcgggatccaaaggcggcgggcggcgggcggcgg

SEQ ID NO: 35563 - DNA, 119 bp, Homo sapiens; identical to SEQ ID NO: 391
  chr1:43919541-43919660
  hyper

SEQ ID NO: 35564 - DNA, 35 bp, Homo sapiens
  chr1:43996429-43996464
  hyper
cggctccgcggctctacgagcgagagtgcacgagg

SEQ ID NO: 35565 - DNA, 218 bp, Homo sapiens
  chr1:43997370-43997588
  hyper
atggggaggggccgaacgggctgtacccgcccccaaccgggtgcaacgccctggaggccctggagcgacctgtcccgtgaggacgtggccactcggaccctctccgaaagttcactcagtggccgccccgcgtcccgtcccgtcccgtcccggctccccatcgccgtgccggcgtctctgtctcggctgctttctgttttcctcggcgtctctgcctc

SEQ ID NO: 35566 - DNA, 30 bp, Homo sapiens
  chr1:44399477-44399507
  hyper
aggcccgggggctccgccagcagcaggtcc

SEQ ID NO: 35567 - DNA, 30 bp, Homo sapiens
  chr1:44435612-44435642
  hyper
atcgctatcagccacgcctctaaaacccgg

SEQ ID NO: 35568 - DNA, 30 bp, Homo sapiens
  chr1:44441184-44441214
  hyper
ggatctggctggagcgcttgctccctcggt

SEQ ID NO: 35569 - DNA, 121 bp, Homo sapiens
  chr1:44444588-44444709
  hyper
ccgcagcctgagtccgcccaacctccaggtccccttcctggggagttcgcgctccaatgcaatccccactccccgctaagggactccacggtctgcacccgctcgccggtccgacctctaa

SEQ ID NO: 35570 - DNA, 30 bp, Homo sapiens
  chr1:44445509-44445539
  hyper
ccacccggtctgtgcggcctgcccgtccgc

SEQ ID NO: 35571 - DNA, 30 bp, Homo sapiens; identical to SEQ ID NO: 394
  chr1:44457136-44457166
  hyper

SEQ ID NO: 35572 - DNA, 697 bp, Homo sapiens
  chr1:44870924-44871621
  hyper
tcattcactgattagatccagcgctgagaggcagcactgctccttctctcacgccaactgagtctcttgatctgtacatgcaatcccaggcagctcgcgaacacaaacccggggccagccgcctactgctgctgctgctgctgccgctgccgccgccgccgccgccgctgcctccgccggctctgcgaacccgggacttttcatgcaccacactctccgcctgcttccctccgtgtcctgaaaagtgcgaccgttctcccaaggaatttccacggcaagtatggagatcagaaaggggtgtggacgtgtgtgcgtacccaagaggggtgggtgcgagggcggccggcttgttcaggaacctggctaactttccgggtccgtttcctagggattcgggcggttccctctggacgggggcagggactgggactcggactggcgcgtcttggatcatcgcgacggagcctctcggcatcggcgccctgcgcgctccgtgcgctgcctcgctcaaactttccgtcttgagttttccttaatgtgttttatttggggagggggggaggtgcaagggggagggaccagacgcgggaattggacaagttgggagggtgagggcactgcaagggaagggagcaggacttcttttctccgtctcttaataagccccattcccactttgttcgggtcgatatcgaga

SEQ ID NO: 35573 - DNA, 330 bp, Homo sapiens; identical to SEQ ID NO: 395
  chr1:44872392-44872722
  hyper

SEQ ID NO: 35574 - DNA, 249 bp, Homo sapiens; identical to SEQ ID NO: 396
  chr1:44872923-44873172
  hyper

SEQ ID NO: 35575 - DNA, 123 bp, Homo sapiens
  chr1:44873509-44873632
  hyper
gggtgacccccggggcggggctgctcgggggctggaggtccttggactttggtcgaaggctggcagctctgagcccctgccccgcgggccccgcgcggctgcggaccaggggcccttgcacgt

SEQ ID NO: 35576 - DNA, 99 bp, Homo sapiens
  chr1:44883115-44883214
  hyper
ctggcctggcttggcttggctcggcgcgccgctcgcctggcggctgggctcgctgtagttgtgctcccgctcttcccctgccctcgctccacgccgcgc

SEQ ID NO: 35577 - DNA, 371 bp, Homo sapiens
  chr1:44883751-44884122
  hyper
cgccgtctgagcagaagagagtgggaaccggggtgacggataaggggggggcgcccacgcgacgtcggggtgcatgggagcgcgcgggaggcgctagtgggtgcacggggcgtgagggggacacagcgcgggcgtggggatggccactgcgcggggagggttctgcctggagaaggagggatgggaggaggttgggggagcagggcgcgtggaggagggaggttggacgtgtgtacagcgcctggggacctcgctggccccttggtgcccccaggactctgaggcttctcctttcggcttgaaatgtttttcccttcctgcttttcaaatctgtaaaaatgttccggggaatgtttccgaagtccagggct

SEQ ID NO: 35578 - DNA, 50 bp, Homo sapiens
  chr1:44884203-44884253
  hyper
cgttaaagtctgggcaatttctggaactcttcccacgggaagttttccgg

SEQ ID NO: 35579 - DNA, 43 bp, Homo sapiens; identical to SEQ ID NO: 400
  chr1:45097399-45097442
  hyper

SEQ ID NO: 35580 - DNA, 87 bp, Homo sapiens; identical to SEQ ID NO: 401
  chr1:45097717-45097804
  hyper

SEQ ID NO: 35581 - DNA, 40 bp, Homo sapiens; identical to SEQ ID NO: 402
  chr1:45098108-45098148
  hyper

SEQ ID NO: 35582 - DNA, 114 bp, Homo sapiens; identical to SEQ ID NO: 403
  chr1:45098213-45098327
  hyper

SEQ ID NO: 35583 - DNA, 30 bp, Homo sapiens
  chr1:45139509-45139539
  hyper
ctgttaaccactgccgagaagagtggagag

SEQ ID NO: 35584 - DNA, 30 bp, Homo sapiens; identical to SEQ ID NO: 404
  chr1:45139961-45139991
  hyper

SEQ ID NO: 35585 - DNA, 30 bp, Homo sapiens
  chr1:45205503-45205533
  hyper
gatttaaactgcggcggtttacgcggcgtt

SEQ ID NO: 35586 - DNA, 30 bp, Homo sapiens; identical to SEQ ID NO: 405
  chr1:45252004-45252034
  hyper

SEQ ID NO: 35587 - DNA, 276 bp, Homo sapiens
  chr1:45285010-45285286
  hyper
gttggcgcgatataccgcccctgaacctctagccacaataaggcttaattaatgaccggacgacttgaaagcgccttccactgtttatctcttaaatctgcaacgaaatgcaacaaaaacgcaagaaataaacaatagaagccagtcttactgcacactgcagaagccaataaaccccaaatgtagctcaaaacaaggtgtcacgcaaacttctgatttttttttgttttacactgaatctctgtcactctgactagagggcagtggcgcgatctc

SEQ ID NO: 35588 - DNA, 812 bp, Homo sapiens
  chr1:45285405-45286217
  hyper
tcaagagactctcccgccccagcttctccaataggtgggattgcaaacaggcaccaccacgcccgaataagtttgtgaacatttggtacaaataacaaatgaccaagttccttggttgtagttgcctaacttttaatacttaaaaatgtagcctcaggaaataagaggcctcaaaaaattgaataaaaactcacaactttctctccacggaaatctttagtaaaaggcgaaagatttatgcgctttgaagagaaacccgagtatattcgtgacttccgcttcgaacctcgcagggagaactaacacttaacacacttatggttgttggatgcctgcgtggtacgcactccctatatgtagtttatgcacacagatgcgtgtaagaggcatcatgctctaaaacagtgcagaaatgcgcgcacagagggagtgcaagcatcttgagggtatcttttcgtggtgcaccatgggtatgcaaatcacaggcggctccgggctgttccgcgccaccggggaagccatgggtcactgatctcctttgctctcctatgctcctctctgctggtcctcctgggacccgcaccccgtgggcggcgccgggtgcggagtcctttgcggagctggtgttcgtcccaggggttaaggtcctgtcccgccgtccttacccgcagtaagcctccgggcttagagagagggacggggaaacagacgggcacagacactcaggggcactgggacctcacaggaggcacgaccccacccctcctggaggagatggcatccgatccaattcacctcgaagggtgatatgg

SEQ ID NO: 35589 - DNA, 30 bp, Homo sapiens
  chr1:45308578-45308608
  hyper
tctctgaggggcggcgatcgagtcatgctg

SEQ ID NO: 35590 - DNA, 30 bp, Homo sapiens
  chr1:45477796-45477826
  hyper
ctgtcgctggagtccgatcatgtgatcttc

SEQ ID NO: 35591 - DNA, 30 bp, Homo sapiens
  chr1:45671972-45672002
  hyper
gagaccggtgacggcgagagcagctcctct

SEQ ID NO: 35592 - DNA, 30 bp, Homo sapiens; identical to SEQ ID NO: 407
  chr1:45672720-45672750
  hyper

SEQ ID NO: 35593 - DNA, 295 bp, Homo sapiens
  chr1:45792558-45792853
  hyper
tggttctcacaaccagcagctcggctcactgagacccggtggtccagacgctgctcctggctggggtggcgctgcagggagaaccgcgagctctcaggggtcggcgggtgacttctttccggaagaaagcgaggaacgcgctctgcggggtgagccggactccccaactccggacgatcagcccaggactgagagccccgaagtccccaaccacaagtaagcggccccagaaggacaagtctaggtcgccgtccagagcgccatggccgcgcccgcccttcgtttgtgccacatc

SEQ ID NO: 35594 - DNA, 30 bp, Homo sapiens
  chr1:45965328-45965358
  hyper
gcttgctctcctagcgggggatacccaagg

SEQ ID NO: 35595 - DNA, 978 bp, Homo sapiens
  chr1:45986969-45987947
  hyper
ccagcagagagagtgcttcagcggggacatttgggctcatcgctaactccattccacgtacaggaaaataaagacggggaaagggtacccgaagctccgcagctagtcaaggctcaggacccggaacagccaaatacatagaggctgtcttctacagccacgagtctggatacaggtccattccagaagcttcccgaacccaccccgtccggcaggaggctagtctcggagacccccaccaccagcccgcccagacgccgcgccacgtgctcgagttgccgggggaagactcgactcgagtccacgcttgccttggggttcaaccaggttcccgcacctacgtggggggcccacgagaggggtgtgcgcagcgctcaagcagtctcggactccgggcctcccccggctgcctcacgcatcacagcacccccacccgagcgcgggcgggccccggacaggaggaggaagaggcaacaggcaagaagggcgcgccgcgcctcactccgcaggggccgcactgcccacactcaccagtcccaacacaagtcgcagaaactaaccaccgacaccaggcaagaacaagacgcgcaagagctctccggggcgctgcctttatagccagtagggatctcgcgagagtcggaacggacgggggtgccggaggaggagagagaggagggggatgtggcccgagccccgcccggcgcgccccgccggaatgactcggcgctttccctcgttggggcgggtgcggaaaaatactaataccccaccctgttgcggatggctgaggttggagtgaggcgcccttgtggccgctcccgaacccgaacgcttaggttaatcctagatctctgcggaaaaccaggattctctttacttccaggaccactacgcactgtgccctcaatgcccaaactggagtaagcgtcttagctgctgcccacggaggaccacgtctaaccacaccaagccatg

SEQ ID NO: 35596 - DNA, 30 bp, Homo sapiens
  chr1:46016470-46016500
  hyper
cccgccccttgcaccgcccacgtggccagc

SEQ ID NO: 35597 - DNA, 30 bp, Homo sapiens
  chr1:46050037-46050067
  hyper
tttgctgagagcctcgcgcagcagcggtaa

SEQ ID NO: 35598 - DNA, 30 bp, Homo sapiens
  chr1:46152102-46152132
  hyper
ggccagggactagacgctgcgtctgaggac

SEQ ID NO: 35599 - DNA, 30 bp, Homo sapiens
  chr1:46153906-46153936
  hyper
ttctctccgtgcaacgctggcaagtctcaa

SEQ ID NO: 35600 - DNA, 30 bp, Homo sapiens
  chr1:46216407-46216437
  hyper
gaggcgaagccgggcggtgggaagggactt

SEQ ID NO: 35601 - DNA, 33 bp, Homo sapiens
  chr1:46269379-46269412
  hyper
cgcagaggaggtcgcggcgccggaggccccaga

SEQ ID NO: 35602 - DNA, 43 bp, Homo sapiens
  chr1:46598365-46598408
  hyper
cccacccgctgaggcgccacccaaccgcgccgggaggggggac

SEQ ID NO: 35603 - DNA, 274 bp, Homo sapiens
  chr1:46769061-46769335
  hyper
gacggctccataagcgatatggggaagaatgtgaattattctaaagaaatttcgaagaaattagcacactttccaagtctcttaggagctactattttagataaactcctagatcaattatacttgggtgtggtatgactaaggggatgtttcttagcaaagcctcctcgggtgcaaacatcagctacccctaacctctgcctgcggctggtagtacatgccaatctgagcatgtgttcgcgaccacgatgagtgtgccgcacttccggccaga

SEQ ID NO: 35604 - DNA, 30 bp, Homo sapiens
  chr1:46806340-46806370
  hyper
ggagtctgtagaggcgcgcggagtcctggg

SEQ ID NO: 35605 - DNA, 96 bp, Homo sapiens
  chr1:46859864-46859960
  hyper
ctgatagcctctaggctctggcgcgcttccccgcccctcccgcgcaggcgggcgtgggatcccggctgatccagtccgggttttgcggcggagcgg

SEQ ID NO: 35606 - DNA, 356 bp, Homo sapiens
  chr1:46859974-46860330
  hyper
cggcggcttcaactgtcgcggtaggcagcagcaggctgaagggatcatggtgcagtacgagctgtgggccgcgctgcctggcgcctccggggtcgccctggcctgctgcttcgtggcggcggccgtggccctgcgctggtccgggcgccggacggcgcggggcgcggtggtccgggcgcgacagaggcagcgagcgggcctggagaacatggacagggcggcgcagcgcttccggctccaggtgactgccggagcgtagtgggatgggcgcggcctgagggtactcgcagcggcactttcagccgccggacccgccgagggacaggggatggggcgggcagagcagatgtgtaact

SEQ ID NO: 35607 - DNA, 111 bp, Homo sapiens
  chr1:46913765-46913876
  hyper
gaaggggtgcccacatgcccccgcccgcattcagttcgaaggaccagccagtaggccctgcgccgcccagggaccgcccggcctttgcgtccggcccagctcaagcccctt

SEQ ID NO: 35608 - DNA, 359 bp, Homo sapiens; identical to SEQ ID NO: 408
  chr1:46913886-46914245
  hyper

SEQ ID NO: 35609 - DNA, 78 bp, Homo sapiens; identical to SEQ ID NO: 409
  chr1:46914285-46914363
  hyper

SEQ ID NO: 35610 - DNA, 398 bp, Homo sapiens
  chr1:46932179-46932577
  hyper
cccgccccgccccgccctcctcgggccccgctccttcccaggcgcccccgcgccgccggcgctttgaagtcccaatccggcaaatagagtcaatcaattatgaagggaacaatctggcggcccctcggggagcggcggccgagcgatcccgggggattaggccgcaaatcgcgctgagcctccctaagtgacagcgagagaatcgcgcgcggcggcgacggcggcggcgggagcgggagggagcgcggccgctaacccgattatgcagatccgcggggggcgcggattaggcctcgggggcggcttcgccctaagcggctctcggatttgggaaaagtttactcgggcggagggggcggagactcccccgggcgggcggccgggacttctcccagccg

SEQ ID NO: 35611 - DNA, 57 bp, Homo sapiens
  chr1:46951260-46951317
  hyper
gagtggggagggctctttaagcggcggccgcgctaataacctgtccaggagatggct

SEQ ID NO: 35612 - DNA, 15 bp, Homo sapiens
  chr1:46951644-46951659
  hyper
cgcccggaaggggcg

SEQ ID NO: 35613 - DNA, 379 bp, Homo sapiens; identical to SEQ ID NO: 410
  chr1:46954655-46955034
  hyper

SEQ ID NO: 35614 - DNA, 640 bp, Homo sapiens
  chr1:46955975-46956615
  hyper
gaacgcttcggatccgtcacggttttgcctcatttggaagatattacttcgcccctgaaaaaaaaaatacaaaaaaggtttggatattaagcggagacaaatccttctcagtttggaagggggcggcgcggggagggaggtggccggcgtaatgcggaccagatgcggcctggggagttgcggagccctgggcgggggctggggagggggcgcggccggcagcccagttcccagcctgcggagcgcagaggccgcccacgccctcccagcttcctggtccacgcgaaccccgcagtgctccgggcattgcccgggtctggctttggtctcgcccgcgcagatcccgttcaaactcagctgccaccaagtgcgccttttctctctggattgcgattctgcacgaattttccagttgagggtggttcggcgctcagccagcctctgccctcgaagacgcggccttggtctaggaaccttcaggtgggtgtttggggcgcagtggccctagttccctagaattcgttttgcctcccgcggcctcagccggcgtgggtcaggcgagctccggcgaggaacggcaggctggggccagtccccggagcggctctcggggcgcttctaggggagcagtcaaagggtt

SEQ ID NO: 35615 - DNA, 574 bp, Homo sapiens
  chr1:46956684-46957258
  hyper
cgacaggccaggggccctgatggactgtgcagggtcccgggcaccaccggctgaactttctggcggtcacaaattcccggaacctgcgcaggggcttcgttggcactggtggttcacttaaggagcttgagggaaacctcctcttccccaaattcgcaccaaatctggggccccgacttttcctggattccagccacactcggtttgggaggcagtgggctcctcaggcttgtgatttgcggcaggaaggagtcccggaatggaagaacggggaggacgagatccgaggccttttcaccctctttgcaagcatgcagttcaccaaagccgagaacccaccgggcctggagcgcagcctcagcgctggttccgacccgggccccagaaggtctttttcgtttgagaaaagtcctcggaggccggggcagggtgcgccgatattggtttactaagggcgcctccagtttgagggcgttggggaaagaggagggctttattgacttgatggaccttggaggaaaggggctgtctgtaccgcaagggttgtgtgctccacagccgaggaaattgtgca

SEQ ID NO: 35616 - DNA, 52 bp, Homo sapiens
  chr1:46957824-46957876
  hyper
aggcgaaggccatggcgaaggacaagcactcgggcctcgggatgggctctgc

SEQ ID NO: 35617 - DNA, 335 bp, Homo sapiens; identical to SEQ ID NO: 415
  chr1:46998934-46999269
  hyper

SEQ ID NO: 35618 - DNA, 30 bp, Homo sapiens; identical to SEQ ID NO: 416
  chr1:47009692-47009722
  hyper

SEQ ID NO: 35619 - DNA, 30 bp, Homo sapiens
  chr1:47069777-47069807
  hyper
cccttccgggcacacgagctcactcacaga

SEQ ID NO: 35620 - DNA, 32 bp, Homo sapiens; identical to SEQ ID NO: 417
  chr1:47070161-47070193
  hyper

SEQ ID NO: 35621 - DNA, 290 bp, Homo sapiens
  chr1:47078537-47078827
  hyper
ggctcccagtggctccctccccgccaggtgacactcaccaacacgcgtgggaaagacctcttcgtcgttgatgaggccttcgatccagtccatgagcaatgccatatagcgcggcgcagagagcttggcgggccgccggtactggcgctcgtcctgccagcggtactcgtagcggggcccgccggccatgaccgggcagctggtctcactgcagcgctccgccatagtgccgtagatgaggttgatgcggttgaagaagtccaccacgtgcacggcgatccagtcgtcga

SEQ ID NO: 35622 - DNA, 30 bp, Homo sapiens; identical to SEQ ID NO: 419
  chr1:47644962-47644992
  hyper

SEQ ID NO: 35623 - DNA, 15 bp, Homo sapiens
  chr1:47694979-47694994
  hyper
cgctgagaggcctgc

SEQ ID NO: 35624 - DNA, 184 bp, Homo sapiens
  chr1:47695306-47695490
  hyper
gtctggaacattttcgaaccctccaactgggatcggtctggttcagtgtttgttttctaagcagggaggtgtctacgcggttgcctcctcagccaggtctccggctgccgctacaccgcgaagggatagtcccgggcctggatgggcggaggtccgtgttgggaaaggcgaatagtcttcagac

SEQ ID NO: 35625 - DNA, 187 bp, Homo sapiens
  chr1:47696333-47696520
  hyper
ctgctttgttctcccgccaaaggagccaaaagggacaaactgctgcgctctgggatgattattttaattaaaatagatgttaatgatgacgattgtgatggtgatggcattagcaattacaataattgacaaaacaaaattctttcaacccgagctagggccccactaacccggtccctcccagagc

SEQ ID NO: 35626 - DNA, 344 bp, Homo sapiens
  chr1:47696620-47696964
  hyper
cgaatgtccccacccgaggctcgaggcctggtgaatgtgcccattgtcctttcggggcctctcccttggagcccggcggccgcacccacgaaactgaccagaaatggatgaagccggagtgcagcgggaaccgaagcccgcagctaccggctcgaaggcgccggcctcggcgagcgctgctcagcttcaagcctggaggagcctcccactcaccaacgaacccctcaaacacctaggcacaggcgggcctccgggcagagcagccgccgaccgggcgctgtccgcccacccaagccaacaactggctcccgaatacatcataatttggaataaaatgtgaaatc

SEQ ID NO: 35627 - DNA, 268 bp, Homo sapiens
  chr1:47696986-47697254
  hyper
cgcccccaccagcgcctcgatctctcgctcgccctccccccactcccgcccccagcgatttgcaaacgcacctctaaaggacacaggcacacaggcatacaactcagtgcggacaggaccacacagggtccagccccacagaagggcagcaaacaaacaccacctagcactgccccagaagccgacttggtcagccccgcacactgcccaacaggacacaacgaaatcagtcaaacgcagcggctcacggacacacaatccagcacag

SEQ ID NO: 35628 - DNA, 667 bp, Homo sapiens
  chr1:47697279-47697946
  hyper
cgacgacaccacccaaacacagtcgcaggggccacacacccccacacacagaatcagatccctgctgagaacaccaacggagcacaatcgtacgcaacgaagaaaacgcagaagggcctcgaagggtccacatctacacaccccaaccgcgcaggcacaccacactcggacacagagcctgtcgccaagaagaccacacttagaagcagccaacgccgcccacagttctcatgaacgcactctcacaatcccaccgcatgcacacaaccacgaagaagaaatgaaaaccaaccacagcctcgcgcatttctgtatattgcgtaaggaaaagggggaaggaaggaagagagtctccgaggcgggaggggcggcggcagccggggcgggggcgtccgtggaaaatgcccccccaccgccccccccggccatcgaaaggaaccgagggaaagggagcgaagacctcttttgcggacgtggggaaaaagaggaggaaattgatgaagaattcggtgggaggccgcgggttgcttttcccctagaaaaaggccagaatgctcacgtttttccgctacgggggtacgcgtgtggccattttgaggcccggtcctgagcggcggcggcccggcccctcccgcggcccccgctcccccgcccgccccgcgcccgc

SEQ ID NO: 35629 - DNA, 181 bp, Homo sapiens
  chr1:47698006-47698187
  hyper
cgaggcgcgccggggccgtgtgcgccgcagagataaggcactgccgcgggtccgcccgcccccgataagcgcctcggccattatgggccaaatgattcattttaatttggcaatttcaccggagggagtggggactggttgagcggcgctaggaccggctccggaacgcgctgcggggagc

SEQ ID NO: 35630 - DNA, 30 bp, Homo sapiens; identical to SEQ ID NO: 425
  chr1:47779652-47779682
  hyper

SEQ ID NO: 35631 - DNA, 30 bp, Homo sapiens
  chr1:47799819-47799849
  hyper
ggcttgacgggatgcgggccggcctgtccc

SEQ ID NO: 35632 - DNA, 30 bp, Homo sapiens; identical to SEQ ID NO: 426
  chr1:47800394-47800424
  hyper

SEQ ID NO: 35633 - DNA, 87 bp, Homo sapiens
  chr1:47882250-47882337
  hyper
gggccgccgcctcacgctggccgccatctaccgcttcatcaccgaacgctttgccttctaccgcgacagcccgcgcaagtggcagaa

SEQ ID NO: 35634 - DNA, 30 bp, Homo sapiens; identical to SEQ ID NO: 427
  chr1:47903435-47903465
  hyper

SEQ ID NO: 35635 - DNA, 450 bp, Homo sapiens
  chr1:47903679-47904129
  hyper
gcctgcctcagtcccccgccccctccccgcccgcgcgcaaaacgcactcgccccagaggcagcgcggccgagcccgagccgctgccggagcggagccggagagtggcggcggcggcggcagcggcaccatgaccctgggcagctgctgctgcgagatcatgtcctccgagagctccccggccgcgctgtccgaggccgacgcagacatagacgtggtgggcggcggcagcggcgggggggagctcccagctcgctccgggccccgcgccccccgggacgtgctcccccacggccacgagcctcccgcggaggaagccgaggcagacttagccgaggacgaggaggagtctggtggctgctcggacggcgagccccgcgctctggcgtcccggggggcggcggccgcagcggggagcccggggccaggcgccgcggcggcccgcggcgcag

SEQ ID NO: 35636 - DNA, 329 bp, Homo sapiens
  chr1:47909741-47910070
  hyper
ccagcgccgccgcagcgcgcacttaatgaagttgaaggctcggtgagcccgggtgaagagggtttggaatctgttgaaaggggcgttttgtgacactgattggggcgggggcgggggcagtcgcggaccagacaatgaccgaccaggcgggttttcctgcgcacagggtcaggcgaataaaggcgccgacgctgtttaaacgaaggaccttgtaagagaaagggagaaaagattttgtgtgtggagcgtgcctcgtaaggtttcgtgcttaggagaagttgggaggaggcagctcgcctagagtctttacggaccgaattcggagttta

SEQ ID NO: 35637 - DNA, 30 bp, Homo sapiens
  chr1:47910471-47910501
  hyper
ctagtgggcgcggcgcggcgcagggcggag

SEQ ID NO: 35638 - DNA, 110 bp, Homo sapiens
  chr1:47910748-47910858
  hyper
cgctcgctgtccgcgactttgcatttctcctgcagcaggggtctctacccggtgccttcctcccggcacgctagcctcctcgccgaaatttcgtcgtcccggagtcggta

SEQ ID NO: 35639 - DNA, 597 bp, Homo sapiens
  chr1:47973695-47974292
  hyper
gagctcagtggaagcgccgcgggcgtccttcgcctggccggttccggcgctcttatctggcgggaaagccagctcctctaccgtgtcccctgtgcgcccgcggtcctctgaggacgcccgccccgtaccaacccgtcctggcttccactcggccccggagacagggcgggcgggtggcaccttcgggccccgcggggcgcccgccgcggcgtggggcgtggagagggtggcgacagagcgcgggcggggacagcgcgtgggccgcggggggcggggcgcggtggcgaaatggcttttccagattaggggcccagcccgcactgttgacacagtcataagttttaatgagaaattttgagtatttgtgtgggagacgcagcctctgtgcacagatgctgcgggcgggcggcgcggggggccgtccctccctggggccgccgcggccgcaggcccggcacggattcctttcaggcagaggggaaacatttaaactcgctcacctttgaactgccagggacgctgtttaccttggctgcccgagtggcagttttacagatattaaataccgacccgaggctgagccggggctccttcgct

SEQ ID NO: 35640 - DNA, 350 bp, Homo sapiens
  chr1:48058963-48059313
  hyper
ggctgacctctcagagcagggcggaggattttcacagcacagcttcccgagagagcgggattaagggggaactgctcgggtgggccagagccaggggctagggggaggccgggcggaaacccaaaacctccgcagctgtttccagtttgccgccctggctggaccgcggtggctgcgtgcagagcgagcaaggctgcgcgggcctggagcgcccacggggcgcgggacctctctctgtctccccccgccccgcggggctctctctcgtcctctctgtcttggtggggctcagtctgtctctcgttttctctccctgtttctaagatctcgtggaatcaaagacattttgg

SEQ ID NO: 35641 - DNA, 127 bp, Homo sapiens
  chr1:48173878-48174005
  hyper
aattcactgtttcccagttgtcgttttttattgcaaaggcggattctgcccgtgtgtgttcctttgcgggggcgggggatgggggtagcttcgcgggcaaagatccgatgagagagaggcagagaaa

SEQ ID NO: 35642 - DNA, 30 bp, Homo sapiens; identical to SEQ ID NO: 431
  chr1:48174651-48174681
  hyper

SEQ ID NO: 35643 - DNA, 106 bp, Homo sapiens
  chr1:48175231-48175337
  hyper
aagccgggagctggcgagctgaaagcccgggataattagcgctaattacatgtgtgcaaacagccgcggcagagggcgcgggctaggccgcggggccgcccctccc

SEQ ID NO: 35644 - DNA, 85 bp, Homo sapiens
  chr1:48175593-48175678
  hyper
ttcagcggggaccgggcggggtggggctgagcattctggcccctaggcttctccgactgttttggcctccggagcaacccggtgt

SEQ ID NO: 35645 - DNA, 30 bp, Homo sapiens
  chr1:48176503-48176533
  hyper
ttttgtataccgtacgctttgtatgctgta

SEQ ID NO: 35646 - DNA, 30 bp, Homo sapiens
  chr1:48190103-48190133
  hyper
tgggagctggtctaacgcggtggtacatgg

SEQ ID NO: 35647 - DNA, 196 bp, Homo sapiens
  chr1:48190694-48190890
  hyper
gtcccaagcacatctaccctgcggttcccctgggccaagccgagtcctccccagcacaacagcgcggcccctcggcctccgcttaacctgggcgcgcgggctggctgggccggggccattatgcgggcgcatggccggccgcgccggggcgcagagcaaacttaaccttcatttgggagcgcccagcggccggagc

SEQ ID NO: 35648 - DNA, 282 bp, Homo sapiens; identical to SEQ ID NO: 434
  chr1:48190924-48191206
  hyper

SEQ ID NO: 35649 - DNA, 30 bp, Homo sapiens
  chr1:48462263-48462293
  hyper
ggctaaggtgggtgcggaagcaggacccaa

SEQ ID NO: 35650 - DNA, 73 bp, Homo sapiens
  chr1:48462581-48462654
  hyper
ggcgccctctggggcgtggctgactgtccctgtcggacctgggggtttctctggggccgggctccgtctgttg

SEQ ID NO: 35651 - DNA, 31 bp, Homo sapiens
  chr1:48463141-48463172
  hyper
cgggggggcgaggggccggggccgcgccggg

SEQ ID NO: 35652 - DNA, 60 bp, Homo sapiens; identical to SEQ ID NO: 435
  chr1:48463405-48463465
  hyper

SEQ ID NO: 35653 - DNA, 863 bp, Homo sapiens
  chr1:48937289-48938152
  hyper
ggaatgaaaagcccccgcgccgcgcacatacactctctctcactggaaagttaggagcgaggaaagaactctgaagtgatttgggaacgatctgaaagcgcgcaagttggaagtcgggttgaagccagcatagcggagcaggggtcaggcctctgcgtggccggagtgggagagcgcttctgagaacaagatggggcaggaccgaaggggcgtgaggtcgacgctccctagggatgattcggagggtgaaggaggtttgggggtggttccgggctctcggaggtgactgagggagtccctgagccaatgcccgggggtgggaggcgctaccggtactcactgagctgatctccagcgccagggcgcactgcagcgccttcaccttcggcatccgtgcggggaggggcggcggggagtgaccccggccacgggcccgagtgaggcggggagacctggggctgggcggggacggggaggagacgaggtggcggcggcggtggcagcagtggcccccaggccggggcccgcggtccagcctgggttccgccggagaagcagctgagcgcggggcgcagactcgttgtcatggcagccaggaggggcggggccggaagagaggccgcgcggggcactccagggctacccgcgctgggacgagcgctggaggcggagcttgacgaacgccgagcgaggcggagtcgggcagggggcggggcttccgaaggggcggggtgaggcaaggcagctcttctgtgacgtcaaactgcgcccaaagccggacgaaagggagctgctgtttgtataatgggacggtgctctgttcagggagttggagttcctgtaaggccgtcggagggaacccc

SEQ ID NO: 35654 - DNA, 410 bp, Homo sapiens
  chr1:49242175-49242585
  hyper
aagcagtggctccccccggtcccctccgcccgggcccccggcccctcccggggtcccagcccccgcccgggtcccaccgtccctccccgcccgcttgctcacctgccagcgccaggatctgggccttgtggagcaacagcgcgccccagtcgcggggggcgcgcggggggctctcgggcccggcgcccaattcctccgggccccggtacacggcgtacaccttctggttgtcaaaatccagccgcgagcgggggctgaagtcgcgcacgcacgacacgggcagcgcgtagcagacgttgtcctccaggaaccgcacaaaggcgtacatggtgggcgccgggggcgggccccggtcgggcagctcagcccgcggggcgggcgcggaggtggggatccggcggggggcgcga

SEQ ID NO: 35655 - DNA, 161 bp, Homo sapiens
  chr1:49242786-49242947
  hyper
caatcacagccggagcgcgattcgaatggggagggaaaagggttcagagattcagttgcaataaaaataataacaagagcattgcaggaaaaaaatgcattgattaaaaggtgcgctgcgtgcaggattatattgcttcaacaatcgcgctgccaaattgc

SEQ ID NO: 35656 - DNA, 40 bp, Homo sapiens; identical to SEQ ID NO: 440
  chr1:50489552-50489592
  hyper

SEQ ID NO: 35657 - DNA, 500 bp, Homo sapiens
  chr1:50513715-50514215
  hyper
ggcggagccgcagagcgagctagagagcgagagcggtgagactctgcggacgtcttcccgcccgccgcgctccgccccacccagcctccgcagcctcgggccggatcgcccggcggggaagatgcgcctcaagaaccaggtagaagcgcctcggcgcaggccccgcacccccgactctgcccgccctctgttacggacacccgctgggccacgtggtcgcgactggcttctcccagcggccagcctggccaccccgactcccagggagggggagagggcccttgcaagaggatcctgcccccgcgctgcccagacctgagggctcctggcgaccccacccgcagcccatctggcggctctggccccgcaggtcagggtcacacccctgccggcctcctgagacttcccggccccaggggagagagctgaaacttgggttgacgcgcgccccctccccagcgacaggcgaccccgcagcagccccgcgccactcctctctg

SEQ ID NO: 35658 - DNA, 100 bp, Homo sapiens
  chr1:50717511-50717611
  hyper
gccacccacccccatgcctgtcgagtgcccagttcatattcctgctgcgactgtatctaaatttgcaaatcgtcaccccgtgccccaccatcatgtgtca

SEQ ID NO: 35659 - DNA, 670 bp, Homo sapiens; identical to SEQ ID NO: 442
  chr1:50798646-50799316
  hyper

SEQ ID NO: 35660 - DNA, 184 bp, Homo sapiens
  chr1:50799393-50799577
  hyper
cggcggcagccgcggctgccccctactggcggaaggaagagtcgccgctccggggcccttggcggccgccgctcttcgcgcctccttggcctggctgccacccttccaccctcgggggagaccccgcgctctgtgctcactcggggaagagaggctcaatcacggcctggaccagcactaggga

SEQ ID NO: 35661 - DNA, 30 bp, Homo sapiens
  chr1:50834215-50834245
  hyper
gcgctcacctccagcgttaaacccaggtgc

SEQ ID NO: 35662 - DNA, 362 bp, Homo sapiens
  chr1:50880954-50881316
  hyper
ctgctcagaccgagtcggctccagcttgctttgggaagcattcaggaataaacgtggacagtagcggtcaggaaggagattcccgtttccccttctcccaggaggaaaagaggtaacgctgccgccactgccctctctttccagggtgggaacgccgcccgagaccggggtaccccacactcctccctagcgctgatcccagcggagctcaggccgcagtcccctcctgccggctgcggaagctcccagaagcggagactcaatcgcccccctgcccctgctaccaggccagagtctggagtacagatactggctccctggggcctgggtgtgcgaccccaggccggtcattgcaggtctct

SEQ ID NO: 35663 - DNA, 530 bp, Homo sapiens
  chr1:50881426-50881956
  hyper
cggggcctgggccatggagacgctccgggcccaggaacgggggacctcgggtgccccactacctcactcctagaacgcccaccgctcacgaagccttcctgagctctacccgaaggtgctgacagcctggagctgaggccaaggcgcttgggggcacgctgcttctccctgggcctcctatgttcacggaaggagagtttccgcaaacctctcactctcggccagcagaccccgcttcatgagaggaggagacccactaggggcggtggagaggcgaagtgatccagggtcccggaaagttggacaattccctggaccagatggctctcagtttcctcctctgtaaaatggggccggtaataagcaactctctggattcaccccggtttgctgcgaggatgaactaatataatagtctttaagtctgtgacgctccagatgttcttgggaatgagtaacgcgggtccacaggccgccccctcgggtccggccagagcatcggcaggaaccgaggagcctcgggggaccca

SEQ ID NO: 35664 - DNA, 110 bp, Homo sapiens; identical to SEQ ID NO: 445
  chr1:50882143-50882253
  hyper

SEQ ID NO: 35665 - DNA, 151 bp, Homo sapiens
  chr1:50882460-50882611
  hyper
accttgggatgtcgccggacccagccgaggggaggagtcattcttttcctggagcgggggagtcaccctgcggggagcgggagggactggaggttgaaggagagggtcggcccaggagcggctaatttgctcagctcggcgtgaggaggga

SEQ ID NO: 35666 - DNA, 602 bp, Homo sapiens
  chr1:50882895-50883497
  hyper
gtgaagactggggccgacgatccaaaaactaagagccggggcaaggtgacccctccgcaagggtgcccaagctggggtacacactgtgttccctctgctcagcggtcgcgggtccttcgggagttgtgagccccgcgccactctggtgggataggtcttccgagtaccacaggaagtctcctctcccagtagccccgagggtcggagatcccacgggacctcggacaagcgtctccttagcgccgcggcctgagtgggaaatcacgaccttccccagcgccccacccccaccccctatttctcgaggagcgggacgggattcggcattgttttcttagaaaataacatttatttctagctcatatctatgcaaaggaaagcacaaagtgctgctctgcagcagcgttttccgctgcgggcccttcagtcagggcgtttggcgagtcccgggaggcgaggatgggcccgcgagcgggcggttctggctcagtcacacgtcgctctgttcctgcttcagtgcgcaccttgacggctccttagggacagaccagccgcaggcaagaggggcaggtgggcaggattcatcccgagtttccaatata

SEQ ID NO: 35667 - DNA, 251 bp, Homo sapiens
  chr1:50884101-50884352
  hyper
gatgaggacccaggccgcgcaccccctccgagaacacctgcacctgtctgtagctgctccccctttgctcagccttccccacccaccctcctaaacaaaacccaaaaaccaccttagagtgagaagacgcccagccagggcgcagagagagcgctgggcgaagaggggtcgatggcccgcgggaacagggctggggttcctgtttggggaccggccggctgccaggcccctcgccctactgcttctccgga

SEQ ID NO: 35668 - DNA, 197 bp, Homo sapiens; identical to SEQ ID NO: 449
  chr1:50884690-50884887
  hyper

SEQ ID NO: 35669 - DNA, 203 bp, Homo sapiens
  chr1:50885248-50885451
  hyper
cgagcctgagccgggccgcacctctggggacgacgtcccgggccccgagtctgcgccgtcgggtgataagggcttcaccggcggcggcagcgggctgcccgggcggcctgcctgcagcagcgtcttaggaaacaggtcaaacttctgcaacttggcctctgggaggggagaaaacgtgtcgtgaggagcggttagctagaaga

SEQ ID NO: 35670 - DNA, 1074 bp, Homo sapiens
  chr1:50886010-50887084
  hyper
ccccacaaaaagccacgggggtccagaaaaagagggtggtgctaggcaggcagtaggaagcgaagaggaaaagacataggaaagcagacctgagaaaccagggagggtgcggaagaaactagaaggagggagggcgcagcaagcggttgtccagagggcgttaggaacgcgagaaggggaaaagaaactagggcgtctcagaacctagggcgtctcaaaacctagggtgtcagttaaagggggggggattccttaagggagttgggaaggagcagagggaaagggcctgtggagaagcgcagagcgaacgaagatgcgcaggtttccacctggggagaagacgaagcaaagaagcagggacctgcctgcgtttgggtagaggcgagtaaaaaaattaaagcgtgtacatttcggcccgatgcaggagaaaggggtaaagtgcaaatgctccagaagcgggagaaaggagagtttctgtacccacgctccatacccgaggctgggcgagcggtgaaccctagcagtcgcggcgactggacacgggggttctactctttctgaaccgagacaagcccctgggccccgtgccccagagctacgatcctgctgcccctacctgcggcctggccgcgctctcacctgagccccctgcgccagctgctccgcctccggtccccgcgggcgctcccgctccaggtcccccgccgtcggcggcgcacactgaaccgaagacctcgtaggcgggcctcggggggatgatgccgttggcggcggccagcgccagcccctcggcagtgccgtagagcagctgcagctcgcgcgcctcgttctcctcctgcgcctgctgcctgcgcagcgccacctgcgccgccatgacacgctggcgctccgcgatgagcgtgcacttggcgcacaggcagtccttccagcgacagtagcgtttgtggcccttgagggccgacaccacgccatggttgcgacagcgcgcgcacttgggggtccgcgggtacttctcggctgcccgcagcaacagtggcggcccccgcagcaagccgcctgccacgctcaccggta

SEQ ID NO: 35671 - DNA, 67 bp, Homo sapiens; identical to SEQ ID NO: 452
  chr1:50887175-50887242
  hyper

SEQ ID NO: 35672 - DNA, 200 bp, Homo sapiens
  chr1:50888509-50888709
  hyper
gagtccctcccacgccgcagccccataaggcccaagcaggcccagctccccgcttctgccgcggtctcctctgcttcccgcgttccccgtccctgccagagcccgcgacagagtccttgtgtctccgtccgagagtcccagacctcctctctatgagcgttgcctcctctcccagacccttcgggcgtccctaaggccca

SEQ ID NO: 35673 - DNA, 1234 bp, Homo sapiens
  chr1:50889123-50890357
  hyper
cgcccgctctattgttggtccttagggctccattagacagaattggacaacaatgtggcgcctgccattggccaggggaggcagacggcgctctgattggccgggcccgcgcccggggagccccgcattctgcagtgtccgaaagattcgaaactccaaaagctccactgcgtgcctctgggaggggagggggcgcgccaggaaaggagtggaaaaaagtgggcgaggaggagcgttgaaaatttcctgacaagtagtttccgtgcgcccgagagcgtgtgaattgctcctaattaccgtgtccggtgcgcctctctgcgtagacttgtgtaacctctcggcttctggggcgccggctcggctgcaccgctcttactggcctggggcgcttggcaaagccgagcttcccaagtggctctggagccctgaggcgggatggggggcaggtgacaattcaattactgcggtcggggtaggggcgggacaagggtgcgggggtggggaagggagggtgttcaaggcataaatgccaggacgatttttcctgccttcttcctgctatgtttcggcgcgctcccaaatccgacgagtttggggtagttgggggctgctttggttttttcctcctgtctccttaaagctcagttactttattttaaaagtcctgatacgatagtcatcctggagggtaagtgtggtttatgaagattttcgtgtttaaagagaagctcagcgaagagaaatgagattgcacttcctgtcggtgcccgccacgtccctcgcgccctgagcctttcctctccccgcccctcttttcgcgtccctcagccccttttgagctctcttttcctcacttttcagcatctcgatttcttttccgtggtggtgggattctttttgtcgttattgcaaatgaacaaatagcccccccccctttttttttcttttctaaacgaaagtaaaaagtggcctctgtgtctccgcagattctcttaaactcaggacgcgcatcggtctgtccgaccttcccggcaagagacaaagtcactgctgggaggccccctcggacagttttcagttttaactttcgccttattctcgtcttgtcttgatgtcacggccctgaggaacagctcgttctgcagaagaggtaacaggtttcagattttgtttcctttttgaaaggctgttgcctttcaaacatctggaattaatgccgcggccctcgggcgag

SEQ ID NO: 35674 - DNA, 176 bp, Homo sapiens
  chr1:50891180-50891356
  hyper
gtgagccatggggtcgggggaagagcgccgacaaccgccggattccgcgcaggggccgccaggcgcctgctcccagagctcctttggacaaagttttcgggaaattctattaaaccgaaaacgaaataaactatacaaatctgcctagcttttgagggggcggtggcccaggtatc

SEQ ID NO: 35675 - DNA, 30 bp, Homo sapiens
  chr1:50891735-50891765
  hyper
tctcacccacacttcgacagggcaggatat

SEQ ID NO: 35676 - DNA, 38 bp, Homo sapiens
  chr1:50892245-50892283
  hyper
tctacagttgggccccgggcagaaaaagccaaaaccct

SEQ ID NO: 35677 - DNA, 1086 bp, Homo sapiens
  chr1:50892336-50893422
  hyper
cgtactcttagctcagaatcatttgctgacgcctctgctgtgccaggggctgggggcccgggtgagagggcccagccaagaaaatccaccccatccctattcgcccccggccccatcccccacgcccacgcccaggaactggtggcgtccaaagggactgcgttggggtgaggccggggttgagggcctagggcgcagagccggctggagacgcggcgtggggaagggggccgagggtgagtagtgtagctctgagtaaaagagccaggggcgccgatgggggacccgggaggcattgacttttgcgctgtttgcccgcggcctcggagcaagcagacgccatctgtttgccggctgcgacgcgtcccgtttaattaccctcccggcagcctaatagagatgatattaaactaaatctttctgacattaaaagtaattatccccaaaccggtggctccgggacggaatggcccctcccgcacccaccccttccctggccgcgccggattccgttagtttggctgatactctccgcccgggaatggggcgcagaggaaagggggaaagtgcctttgggagaaggaatctccacgggttgccctacacgcgttttcccgcacaaccacagactctcctgttcctatgtgaacacacgcacgtgtacacacagacacgtagcgacattttcctccagatcaactcatgagtcatgctgatgaagaccctcagccgcgcacaccctctgtggacagggagacgcgcagcttggtttcctgtccccgtcctctgacaccgctaaaatggtcattttccgtggtcatagccacggatctatgccacgacctgggaccgggcataatttcggagccagaaagtactcctgtggtggcgccgggtttctcaggcgctcttccagctaagggccaggagcccagcgatttccctacagttgcttactgaagtcgcaccattctctgcgaggcaggtccgattattccacttgtcaggtgagaaaacagactcggagaggtgagatgacttgttccacattatcacaattagtgagtaacagtgcaaaaatcaaac

SEQ ID NO: 35678 - DNA, 494 bp, Homo sapiens; identical to SEQ ID NO: 456
  chr1:50893518-50894012
  hyper

SEQ ID NO: 35679 - DNA, 238 bp, Homo sapiens
  chr1:50896156-50896394
  hyper
gaccccttgaaatagcgattccgagaatcggctccggggctgatgagccatccagatacggagcttccgccgcactgtgtgaccgtgagcgagtcgccagccctctctgggctcgcctcccggctaccccggagtcagactgcctggaggataggcagccaggccactacttgtggagaaaggagactgtagagaggaggggcattcgggctggttcctgggccgggtcagcctgggt

SEQ ID NO: 35680 - DNA, 30 bp, Homo sapiens
  chr1:50896801-50896831
  hyper
gggtggaggagctggcgcacaagtagacag

SEQ ID NO: 35681 - DNA, 56 bp, Homo sapiens
  chr1:51425644-51425700
  hyper
cgggaagcgctaggcgctcatgcactcggtaaccttcaggcgccccggccgcccgc

SEQ ID NO: 35682 - DNA, 30 bp, Homo sapiens
  chr1:51426095-51426125
  hyper
gaagcttcaagtctcgcaacaggttattcc

SEQ ID NO: 35683 - DNA, 30 bp, Homo sapiens
  chr1:51426399-51426429
  hyper
gcatcctcagactccgtaacacagaagtaa

SEQ ID NO: 35684 - DNA, 30 bp, Homo sapiens
  chr1:51434473-51434503
  hyper
aagggagaagaaaccggcaccctctctgag

SEQ ID NO: 35685 - DNA, 30 bp, Homo sapiens
  chr1:51435600-51435630
  hyper
tgtctttccttccgcggtattttctgcccc

SEQ ID NO: 35686 - DNA, 30 bp, Homo sapiens
  chr1:51435844-51435874
  hyper
aatcacgtgtgaatcgaggggcgggctttt

SEQ ID NO: 35687 - DNA, 354 bp, Homo sapiens; identical to SEQ ID NO: 458
  chr1:51442623-51442977
  hyper

SEQ ID NO: 35688 - DNA, 30 bp, Homo sapiens
  chr1:51983744-51983774
  hyper
aatcgggaagcacgcgccaccagctctgga

SEQ ID NO: 35689 - DNA, 36 bp, Homo sapiens
  chr1:51985194-51985230
  hyper
aagcggacgggctgcggaggcgactgcagattgacc

SEQ ID NO: 35690 - DNA, 204 bp, Homo sapiens
  chr1:52081940-52082144
  hyper
gccaccgcgcccagccaataaatgcttaaattgcccctgtaggctgttagtgatctatccctacttctttgaccttatctcccaccactttctccctggctcactgctccacgcacactgacctccttgttgatccctcaagatgccacgctcactcctaacatttggtctttgcatttgctattccttcgtcttggaaggctc

SEQ ID NO: 35691 - DNA, 30 bp, Homo sapiens
  chr1:52082577-52082607
  hyper
ttgcattctcgcatccgtggcatggagtcc

SEQ ID NO: 35692 - DNA, 30 bp, Homo sapiens
  chr1:52082809-52082839
  hyper
agcaaatggactaacgtgatgaagggctgg

SEQ ID NO: 35693 - DNA, 30 bp, Homo sapiens
  chr1:52083279-52083309
  hyper
caaggccctgtagccggccgcaccccttag

SEQ ID NO: 35694 - DNA, 34 bp, Homo sapiens; identical to SEQ ID NO: 459
  chr1:52194843-52194877
  hyper

SEQ ID NO: 35695 - DNA, 349 bp, Homo sapiens; identical to SEQ ID NO: 460
  chr1:52194940-52195289
  hyper

SEQ ID NO: 35696 - DNA, 792 bp, Homo sapiens
  chr1:52195348-52196140
  hyper
cgccaatcgtctgcctctcacctcctacagcaggtgacccatggccaatcgccaggggtctctttgccaggagccgccagggccagccaatcggggcgacccctccgccggggaggggacgggaaaggggtggggggtgaagggggtgaagggggtgtcccgggggacgggctgaacctcagtcaggaccgcctgcaccgcagtccggggatcgggtcgaggggagaagaaaaaggggtgctcgggagcagcccccggctacctcccctggaggcacagagggcgggggccttggcgaatggctttcttgctggccacttgcggagtgagtagaccccgagggtctgggagaggggccggcccctacccctgagtccccggggtcccggccgccaggccggagcgcgaatgtcgtgctcaccctgcctccttcccgccgccccctggggtgagtaggacgacgtggctgcccgggcccctcttccttgggagttctcagttcctcagcctagatggggtggaggctgaggtcagggcctccagttccaccgagagggcattcgcccccaaatgagactttggaggaggtctctttttttctattcatttttgtggaactctgttttccttttgaaagctgtctcagaatatgattttaagcagaaaagttaagctttctcttatgtgaaagcttaattttgaccagttgcccattaatagaatctccagttgcaggccaagtgttttttggtggtggtttatttttggcacggtgttcgtgcctggccctgt

SEQ ID NO: 35697 - DNA, 30 bp, Homo sapiens
  chr1:52344711-52344741
  hyper
tgagtagtgctccgcgtgtcaaagaaaaat

SEQ ID NO: 35698 - DNA, 30 bp, Homo sapiens
  chr1:52521175-52521205
  hyper
gcaaattattgattcgtgaggtcagtcgct

SEQ ID NO: 35699 - DNA, 30 bp, Homo sapiens
  chr1:52607933-52607963
  hyper
gcagctgcggctaccgcagctcctacagga

SEQ ID NO: 35700 - DNA, 969 bp, Homo sapiens
  chr1:53017721-53018690
  hyper
caaaatgaagaagcagatatacggtatctaagatctcacgcaaaattcatctaagacttcgaaatcttctgaaaagaaaatgtgtaatcaacgttgttaatacaacagtaattcatcccattcaagtacgactagaaatcccgctgatgtgcttctttcaggtctaaacatctcattctttcgcaatccagataccaacaggagtctgaaacccttcgcagaggcgtgcaacacactaggagagcgctatctgtttacaaatacgaatctcagttacccacgtcaaaaccgcgcattaccacctttcgactggggggcgggggagagagaaggcgggcgagcaagaaacaaaatccacacagacacctctgccttctccctacaaggacgagcccggggaaacattcagtatgtattatatgcgtgtatacatttatatacattatgtagtcacctatgtctaagcaagggtgaaagaaaaaggtacacatgacagggaatcgtaactggacccaacagaaatgttcaaaccaatcccgttaactcaaaatccgccccgctggtctacaacaggtttcggtccgggaccgggagccccagccacagtgtggagttcgtccccaaagcgccccaatgccctcctcaggccgcccaggccgccgtccccacctcccttatctcagccttcccctgggacacccgaagcccgttccaggaaagaaagaagtgtcaggcccccagggggcggctgagacgctctcaggccaggcccccgacacctgcgaagcgcggcacctggggagggcgaaccgggggccgcccggccttcccgagcacaccccctcggtacccgacgctgccccgcggccggaacctcgtacctgcgaggcccgcgagctacaggcgcgcgcgacgcctcctcatctcagtggctcctgctctccctccgcctcctgctgccgccgccgt

SEQ ID NO: 35701 - DNA, 30 bp, Homo sapiens
  chr1:53019301-53019331
  hyper
gtgggggtggcgggcgccccagtgctgccc

SEQ ID NO: 35702 - DNA, 689 bp, Homo sapiens
  chr1:53067916-53068605
  hyper
aactgaggtccagagccggacatccaccgcctgcggagggaacgagaacgcggcgcgtcctgccttgcgggccgagcggcgccagagccgcctcctcccgccccccgcgctagatccccccgccccgtctttgccctcgcgacgccgccacctccggaacaagccatggtggcggcgacggtggcagcggcgtggctgctcctgtgggctgcggcctgcgcgcagcaggagcaggacttctacgacttcaaggcggtcaacatccggggcaaactggtgtcgctggagaagtaccgcggatcggtgagtgcgcggggtctggcggcgccgctgggcccggcctcgccctggcggggcctgctggggacgccccgcagcccggtcccccgcgcggtgtggctccgaggacgctccagccgcgcggccgccaaaccccggcccccgccccgctcggccgtgacctctggcgcggcgcccccatcccgcgcccggcccggcccggcccgcggctacgtggcacggccttggcgcggaggaacccgaagcgctcgcagtcggcgcccacttcgctaccggcacctttgggcagcggggtccagaccttcgccgggaggccgggcaccactgcccagcctttgccattcacgggtgaaaaaagtaaccgtagcatcgtgcggcctttccctctc

SEQ ID NO: 35703 - DNA, 554 bp, Homo sapiens
  chr1:53098719-53099273
  hyper
cccgcgccctggcctcgaattcccgccccgccactctggccgcgtcgtgctgtcgttgcgcacccagcgccctcgtgcaggcagggggagcgcagtggggagggggcaggaagcgcaggcagagccaggcgagcacgcggctcccggcccagctccccgcgtccgctccggctcctgccgcgttccagcagccgtcactcccgccgccggcccccgccgcccgccccgcctgcccctacccctccgcgcgggccgggcacctggccgccgctcggtcctcggggccccgcgctgctgtctctgtctcggcttctctcggcccctgggtctcttcgtctctgccgttctcaggctcagctccgtctcgctcggtccctcgcttccccgccgggctctagccggccgtctggtggcccgaggtggcggcgggctgggcgcggggcgcgatgagcggcgcctgcacgagctacgtgagcgcagagcaggaggtggtgcgcggcttcagctgcccgcggccggggggcgaggcggccgctgtcttctgctgcggcttc

SEQ ID NO: 35704 - DNA, 519 bp, Homo sapiens
  chr1:53168676-53169195
  hyper
tcccaaagggttacacgttggtaaaggagccgccccgtgagagagaccggaccaatcacgtttgctgtgaggtcactttggaggcctgagattggtgctcgtgtctaaacggacccgatctttctgagtggctggtgcagctgagggaggttccaggtggcttgctcgggggctgcccagctcgccgtcctctgcagatcccctcgggactctcagcattttgtgggttagccgtggagacgccctgcccttcctgctttggccagtcaaccccctcaagcccgtgcccgtagagcctgcagcccttcctcacctcatcactccccatccccccaagatatagaaaggccgtgacagctgccagccctgcacatgctcttgtttcaacagcggcgattgcacatcacgtagtccccacgtgacctgtcgggcctagggcaagcgcaaagctttcggaaacccgaattattgcaaccttgacttcctgcctgtctctgaggctcccgggctgtgctttaa

SEQ ID NO: 35705 - DNA, 214 bp, Homo sapiens; identical to SEQ ID NO: 465
  chr1:53308393-53308607
  hyper

SEQ ID NO: 35706 - DNA, 375 bp, Homo sapiens; identical to SEQ ID NO: 466
  chr1:53308907-53309282
  hyper

SEQ ID NO: 35707 - DNA, 215 bp, Homo sapiens
  chr1:53387230-53387445
  hyper
ccggacccgccagggcgcgcacttggatctctgagcccccggccgccccgtcggaagcgcagccgcgggcccgaaggggcctccaggggcgcaggaggcacagaacgcgcagcatcggggcgcaggctgggagtgaaggtgcttctccggccctgcaccgtctcggctcccgctgagagctcgcagttccggcgtcgggcgaagccttcgccaat

SEQ ID NO: 35708 - DNA, 30 bp, Homo sapiens
  chr1:53392866-53392896
  hyper
taagggctagagaacgctccccgccccaca

SEQ ID NO: 35709 - DNA, 30 bp, Homo sapiens
  chr1:53393282-53393312
  hyper
ctctggggtcatagcgtctcgggctggttc

SEQ ID NO: 35710 - DNA, 31 bp, Homo sapiens; identical to SEQ ID NO: 468
  chr1:53401231-53401262
  hyper

SEQ ID NO: 35711 - DNA, 30 bp, Homo sapiens; identical to SEQ ID NO: 469
  chr1:53527561-53527591
  hyper

SEQ ID NO: 35712 - DNA, 30 bp, Homo sapiens; identical to SEQ ID NO: 470
  chr1:53528209-53528239
  hyper

SEQ ID NO: 35713 - DNA, 30 bp, Homo sapiens
  chr1:53662228-53662258
  hyper
tcagattccaatcacgtttcttagcttttc

SEQ ID NO: 35714 - DNA, 30 bp, Homo sapiens
  chr1:53662693-53662723
  hyper
gccggctccgggcccggccagtacctgcag

SEQ ID NO: 35715 - DNA, 30 bp, Homo sapiens; identical to SEQ ID NO: 471
  chr1:53686482-53686512
  hyper

SEQ ID NO: 35716 - DNA, 30 bp, Homo sapiens
  chr1:53791673-53791703
  hyper
acttctaaatcagtcgcgcacgcccagcaa

SEQ ID NO: 35717 - DNA, 30 bp, Homo sapiens; identical to SEQ ID NO: 472
  chr1:53792906-53792936
  hyper

SEQ ID NO: 35718 - DNA, 30 bp, Homo sapiens
  chr1:54147856-54147886
  hyper
acagccgctcaccaccggactccgactcca

SEQ ID NO: 35719 - DNA, 799 bp, Homo sapiens
  chr1:54203828-54204627
  hyper
gtattgtcccggggccgagtttgagcaggtcactgccccttcggtggattgcgcgtctttaacataggttagcaccacgacacctagcccaatcagaggtcaaacccacctgattccacgcaaaagccccctcgctcaggagcggttcgcccttccctggtgtggggaggaccccaggcccccgcgccgcggcgcattaccgcgaagtcccacccaaatcctcctccaccgaaaccagcctcctttgcacgaatggtgaaactgaggcctggagcgggtaaggcgcctgttccgcgtcccccagtggaacacggagccggcggcaacgaggattcccagagcagggctcgggcgaagccccggagacggctccgggtaggtcacgggctgcgcgcttcgtcgactctccggggccgagctgcgcgcagaagctggggacccgaacccaaaggcccgagggaaacccccagagactcacccgcgaccacccgaacctggaaaacaggagtcccaagctgggcgctgaatcctgcgacgcgaacccatcacgcgcagccgggacacccacattcctatgcgcagcggaggaatcgagcccgtcgcgcgcgcaaaccggcacagtgggcaatgcccacgcggccgccgccacacacccgcacacccgccgaggcacgcccggggacggacacgccacccacactgccgctggtcagacgctcagcagcgcacaaccacacagtcccacgctctcgccacacgcgcgtgcgatgggggccgcgacagagcctccctcagccct

SEQ ID NO: 35720 - DNA, 30 bp, Homo sapiens
  chr1:54205294-54205324
  hyper
gaagcggacagatgcgaaagtgcttgaaaa

SEQ ID NO: 35721 - DNA, 30 bp, Homo sapiens
  chr1:54303837-54303867
  hyper
cgaccctggcagtgcgtgccacagtgcacg

SEQ ID NO: 35722 - DNA, 30 bp, Homo sapiens
  chr1:54304246-54304276
  hyper
aactgtagtctcgacggccccctgagagga

SEQ ID NO: 35723 - DNA, 30 bp, Homo sapiens
  chr1:54518477-54518507
  hyper
gcaggacaaacttccggtaatgacagcaga

SEQ ID NO: 35724 - DNA, 13 bp, Homo sapiens
  chr1:54665606-54665619
  hyper
ctgaagtcctgga

SEQ ID NO: 35725 - DNA, 30 bp, Homo sapiens
  chr1:54870910-54870940
  hyper
caccttgcctttcccgacccactgctcgct

SEQ ID NO: 35726 - DNA, 31 bp, Homo sapiens
  chr1:54871324-54871355
  hyper
tcgcccaccactcaccgcgggcccccgcgct

SEQ ID NO: 35727 - DNA, 30 bp, Homo sapiens; identical to SEQ ID NO: 475
  chr1:54940518-54940548
  hyper

SEQ ID NO: 35728 - DNA, 30 bp, Homo sapiens; identical to SEQ ID NO: 476
  chr1:54954333-54954363
  hyper

SEQ ID NO: 35729 - DNA, 30 bp, Homo sapiens
  chr1:54955134-54955164
  hyper
gggcggtgtgtgtgcgggggggtgtccaac

SEQ ID NO: 35730 - DNA, 149 bp, Homo sapiens
  chr1:54965081-54965230
  hyper
gcaaagcgtggctccgcagggcaagagggaggcaggcgttctggacctgcacccccaaccccgcccccgcccctgccataggcccagtgcgggtgggcgccgcggccccgcctcgccgagcggcggcggctgccgggctccgggagcgc

SEQ ID NO: 35731 - DNA, 30 bp, Homo sapiens
  chr1:55007864-55007894
  hyper
gcagccccgggtgccgcacccgcgccggag

SEQ ID NO: 35732 - DNA, 54 bp, Homo sapiens
  chr1:55230329-55230383
  hyper
gtgtagccaaagagcgagtacccggctttccccaagatcgttgattggccaggg

SEQ ID NO: 35733 - DNA, 30 bp, Homo sapiens
  chr1:55230610-55230640
  hyper
cagtttgagaaagacgcctttattacagtg

SEQ ID NO: 35734 - DNA, 30 bp, Homo sapiens; identical to SEQ ID NO: 478
  chr1:55266722-55266752
  hyper

SEQ ID NO: 35735 - DNA, 30 bp, Homo sapiens
  chr1:55266991-55267021
  hyper
caggtgggtgggcccgaggagtgccctgta

SEQ ID NO: 35736 - DNA, 237 bp, Homo sapiens; identical to SEQ ID NO: 479
  chr1:55352447-55352684
  hyper

SEQ ID NO: 35737 - DNA, 30 bp, Homo sapiens; identical to SEQ ID NO: 480
  chr1:55353312-55353342
  hyper

SEQ ID NO: 35738 - DNA, 114 bp, Homo sapiens
  chr1:55446288-55446402
  hyper
gggctgggcgacagcgctggacacctggagctgcccgaggacgcggaggagaggtggggcgggcgtcaccaccggagtggagggcgaggcccgggtcccgcgctcccctgggcg

SEQ ID NO: 35739 - DNA, 774 bp, Homo sapiens
  chr1:55462134-55462908
  hyper
tgcctgcgtggacctcgatgcttacctctgtcaaatgggcgtgctctttccctccctgcctcggggtgtcatgggagcccgctcgcaaggatcccgaaagctggggttagcgcgccctctgctggacgatgaaagactccgcgcgctctgctccccagtcccccaggtggcccgggggaggtgaagtaaggcgggagggcggggggactacaggagaggagggggagctgctgcacccgaacatttccagcgcaccctacacacatgtccttacttaatccctagcccgactctgtggaagagcttaggtgagacccattttccagagttcctacctgtttcctacttgctactgaatttcttactcgtagttaccttattttttttttttttttttaagaggagaagcgactcagagagaaaaggggcgaagaaggctgggccgtgtagaggaaagaaaaggcgcgagagaagaagactgcccgggtgaccgcgaggcctctgaggaatggctgaagagcagatccatctacatggggctgggaggggaggtgcggtcaccgctcagccgccgactcagccgagggagaccttggccagcccctgccactccgcaggctcggtttcctcgcctgtgaaatgcgggcgatgactcccctccccgccgcgactgctcatcaccgggtccgagcccagccgctgaccccgggggaagcgccttgctcagcgccgggcggcccacgaggccctgcaggaccgcggctgcggagaccg

SEQ ID NO: 35740 - DNA, 414 bp, Homo sapiens
  chr1:55505133-55505547
  hyper
taatcagataggatcgtccgatggggctctggtggcgtgatctgcgcgccccaggcgtcaagcacccacaccctagaaggtttccgcagcgacgtcgaggcgctcatggttgcaggcgggcgccgccgttcagttcagggtctgagcctggaggagtgagccaggcagtgagactggctcgggcgggccgggacgcgtcgttgcagcagcggctcccagctcccagccaggattccgcgcgccccttcacgcgccctgctcctgaacttcagctcctgcacagtcctccccaccgcaaggctcaaggcgccgccggcgtggaccgcgcacggcctctaggtctcctcgccaggacagcaacctctcccctggccctcatgggcaccgtcagctccaggcggtcctggtggccgc

SEQ ID NO: 35741 - DNA, 30 bp, Homo sapiens
  chr1:56943671-56943701
  hyper
gatgtcctcagaaacgcagggagatgttcc

SEQ ID NO: 35742 - DNA, 30 bp, Homo sapiens
  chr1:57043923-57043953
  hyper
gatgcccctgaagccgcctaccacctggca

SEQ ID NO: 35743 - DNA, 126 bp, Homo sapiens; identical to SEQ ID NO: 483
  chr1:57044386-57044512
  hyper

SEQ ID NO: 35744 - DNA, 66 bp, Homo sapiens
  chr1:57044976-57045042
  hyper
tgcgcagcttggggcgcgctgttgtggcgcgcgtctgagtgcgcgagcgagcgagtgggcagcgcg

SEQ ID NO: 35745 - DNA, 25 bp, Homo sapiens
  chr1:57110714-57110739
  hyper
cggaccccgcgcatctggcgcagcc

SEQ ID NO: 35746 - DNA, 130 bp, Homo sapiens
  chr1:57111084-57111214
  hyper
gggcgggtgaagatcggacactacgtgctgggcgacacgctgggcgtcggcaccttcggcaaagtgaagagttgagtacgcgctccggaccgctgtgcggggctgcctgacttgcgggaggccgagggga

SEQ ID NO: 35747 - DNA, 2750 bp, Homo sapiens
  chr1:57887907-57890657
  hyper
cactgttaaagtgtatttaaccggccagcaggaagggagcaggaaggaggaagaaacgacggcgcggattctcgccccggtccccgccggctggctaggagctgcactggagcatccagctcgcaggagggctcgcccccgggctcgcccccgtccagctcccaggcggagaaaggcgctctcgctaccgcaagccctacatcgcccctctttctaatggagctaaacacaggcgtgcgccgacatccaaacgcacacgcagacaccgacccacgcgggcgcgcaccccagactcggcgacacatacacaccggagcgcacagatgcccgcgtcgcggcgctctccactccgcccgccgccaagagcggagcggtagccaagcgcccccggcctccccacccccacgccattccttcagactctcccagcctaagcggaagtgccccagcagacccccaacaatgaggatttgtgcgatgcagttgggggttgggggtagttcacacggagtgaaacgtacacagtctggcgggtctgggagcagccaagtggcgtccgcctctccaggcagcgatcccttgtgcccactgccccccatcaggcccaccagcaccaccaaaaaacaaaaacagagaaaagaaaaagcgccttaaaaagtgcagagaaaagatgcgccctcccaccaggggtcacaataatactcctcgggacgcagccagcggaggcagggtcctggctgcagcagccaccctggttttgaaatttactttgtacactcacccagtggcccctttcagacgccgcgacacgacctccccccatctcggactccctgcctctgggttctctcggcggttgacaccctcttgtgtgcctgctttatgagccgaaccacagagatttaaagtttccttggtagaaaaaaaaactgagctctctgcatccaagtcagagcgtcgagtctggagcagagagaaggaagaggggcgggctggggaggcgactagctgggcgtggggggagggggtgctggggagtggatggagggggacgagcggcagagaacagagtccacagaggatccgaagaaaggccggggtccgaggaacgcgggatccagttctcacggtgcccgcgaaagggctgggattactgggatagagtcggtttttcgagaggtcgaagccgaatctcagcgctacggaggagtagggaagtgagaacggggttcggccgaatgaggaaaagggtctggccaccagcgagggagggagggagtttcgggagcccaggacagcgggagaaggcaggctcgaggtccgatatagccaggaccgcaggaggaaagagggcgcagggggtcttggagagagacgcgtgtcaggggtggacaagtctggagacaggatcgcgcgtggtcggaagtagggagacaggggcgcggggatggggggcaggacagagaaagagaagtcgcccttttcctcccagcaagtggagggagaaggcgaaaaactgctgcagtcgccatcctcccagcacccctagccaaactgctgagtggcgcgtcccaggagccctcctccgcgccccggggctccagcgaagcctcctggctccccggcgccctgtcctcgcggggcacctgcggcgctgaactcaagggttgccgcgcgcccccgccgcgcctcacctcgcctagcccagagcatcctcctccgctgccgcagccgcccaggaagcggctccccatgcccggcgggcggcggcactcaggcgcgctctgcagcccggggaagcccgggcgagcgccgagctgggtccatcctccccgggagccaccggccccgcgtcagagtagggggaggagaccgccacccgcgcggacccgcctcctcccgcggccccccgccccgccgccccccgcgcccgcccggcgccccgcggcaccgctcacctgctagctccccggccgccgccgccgggccgtgagcccctcgccccggcctcgcggctccctccggggcgctctctgcgcagccggagcgcgctccgagagcttagccgagtggcggtggcgacgaggaggtggaagaacgagcgagcgagcgagcgagcgagcgggggcgccgcggcttgcagtcgcgcctctggagcccctgcactctctctccatcccagcgtggaagggggagagacgagccgagagcgaggggtccccgccccagccgcgccagcgtggagagggtaagggaggggggttgtcacaaagtatccagtgttttctcccccatcaccaccactggacgcagctccgcctggcctctctcatttttctctaagatctacccttttatccaagcctcgaaaacatatgcatacccaaatatatggagtgccaggaagggcgaaaccacgaggggagtctccgcgagggcatgttgcccccacgccccttggcaggagggggcgctcgctcccagccgccagtgcaggttcggcggctcctgttttgactgaggtttcccaggcaaagttcggcaagttgggagggagaaggctggcacgtgtcaagtttccgtcagtcctcaggagagacccgtgcccctgagagcacgcagaccacggttaactccggcttactccccgcgactcccctactcggctcttagaatgactgggagtaaacaatcctccgattcgaagctgtgcgggaggcggctccagcgagtacacagtcagttgctcc

SEQ ID NO: 35748 - DNA, 75 bp, Homo sapiens
  chr1:58715251-58715326
  hyper
acagaaaagaaatgaagagaacgcggactgagcgaggaaatgctcaagaccacaggactgaaccccccggaagtc

SEQ ID NO: 35749 - DNA, 495 bp, Homo sapiens; identical to SEQ ID NO: 489
  chr1:58715359-58715854
  hyper

SEQ ID NO: 35750 - DNA, 166 bp, Homo sapiens
  chr1:58715978-58716144
  hyper
cgagcgggctccgcttttgttccctggggctggcaggtccgtgtggggccagggcgcgcgggagacgccgcggagctgggtatcccggagaggggatgctcactcctagcggctccgctggcagcagtagtggcggtggcagcagaggcagcggtagcaacagcag

SEQ ID NO: 35751 - DNA, 30 bp, Homo sapiens
  chr1:59012469-59012499
  hyper
gctccgcccacacccggcagtcaatacagc

SEQ ID NO: 35752 - DNA, 30 bp, Homo sapiens
  chr1:59012805-59012835
  hyper
gatttttggagggacgcattttaagaaaga

SEQ ID NO: 35753 - DNA, 927 bp, Homo sapiens; identical to SEQ ID NO: 491
  chr1:59042065-59042992
  hyper

SEQ ID NO: 35754 - DNA, 30 bp, Homo sapiens; identical to SEQ ID NO: 492
  chr1:59249868-59249898
  hyper

SEQ ID NO: 35755 - DNA, 454 bp, Homo sapiens
  chr1:59281466-59281920
  hyper
gtctctccccaacccacctatcgtcaccgagattgtaaaacttctaaccgggaagaatcaaatacatgcacaacgggttacaggttaacagacagatgggagcggaaagggacattccagcgcttccctgggcgtgtcgcacagggcaactccaaccacaggcgaattttcctgggtgacagttaaactcctttttgcatgaaaaaatacagattcttattaaaacaataatcgattagactataaaactctcaaagttatttcggatcaaaattattttcggctgtttccacacctttttttctcgattgtgcagaaattcttcacaccgtctgcacagatgggcaaactgagacccggacgagtcccattgagagagagaggcagagccggggttgggagaagactgagatttctgggatccggcttggggtgtttccgctgggtgggggcg

SEQ ID NO: 35756 - DNA, 30 bp, Homo sapiens; identical to SEQ ID NO: 494
  chr1:59369141-59369171
  hyper

SEQ ID NO: 35757 - DNA, 44 bp, Homo sapiens; identical to SEQ ID NO: 495
  chr1:59369442-59369486
  hyper

SEQ ID NO: 35758 - DNA, 431 bp, Homo sapiens
  chr1:59612392-59612823
  hyper
actgtagaaagaagtcgaacgaaatcggaagggggagaggcagaggccacaatcaagacacggaaacgacagtcagtcgaggcagcagagagggtttcacgcgggccagcggaggcgcagggcagttgagaagggaacttgccacggggcggaggggccgcgctccccaccagcgcggcgcgggggcgctaggccagggaccgccgggccagggaccgccggctgcgagcagcgggaacggacctgccccgggtcgcagcggtttttcccgggcggggctgaggctgcagggaggcgggcgttccggcggagggtcacggcctcgccgccgggactttcctggggtggaggtgtgagcacgtaggagccctggcctttccaacttcccaggtcagactggggctgggaccaccctgcgcggccttggatgc

SEQ ID NO: 35759 - DNA, 110 bp, Homo sapiens; identical to SEQ ID NO: 496
  chr1:59762086-59762196
  hyper

SEQ ID NO: 35760 - DNA, 30 bp, Homo sapiens; identical to SEQ ID NO: 497
  chr1:59799495-59799525
  hyper

SEQ ID NO: 35761 - DNA, 35 bp, Homo sapiens
  chr1:60280305-60280340
  hyper
gctcaggcttgtctcacgttgattggccagagccc

SEQ ID NO: 35762 - DNA, 279 bp, Homo sapiens
  chr1:60280812-60281091
  hyper
gcagcctaagctgcccctgtgcgacagcctcatgatctgggtgagtgcgaggaggcgagagggcgagggggccagggggccgaggcgaggagcctggggcgcccggttctcccaggtgagctggggctacctgcacagggtcccggcgcaccctgcccttctcacctcgtgcccttgaccgagagaatgccacctgcgggtcgacgggcaggtgtgtgggcgcgggttggtgtccgggggtgggggtaaaggaagctctgggagcgtaacagtggaggc

SEQ ID NO: 35763 - DNA, 181 bp, Homo sapiens; identical to SEQ ID NO: 499
  chr1:60539399-60539580
  hyper

SEQ ID NO: 35764 - DNA, 521 bp, Homo sapiens
  chr1:61508594-61509115
  hyper
tcattctgtgcaaagccagggcgcaatcctgtgcagtaaacctcccctcgcgaagagggaagcggggttcgctgttgcaccccaggccgagcgccctaggggagagggcgccgcagcgagtcccgagatccgagcccggcctcgacgccggagcgctcccggagctggtccttgcccgaagcgcattaaaacggcgccctctggtgtcagctcgcggcggccgggtaaaagcagtggcgctgggggtagagttctactcgccaccctgttcgcaaactgaaagatccccgagtttagaaagtgtcttgccgctctgcggacgctgtgtccgcggccccgctgtcgcgcagagctgggctgcgatcagaaagtccggctcccctggccccagacagtggctcccgggggaaccagcgtggagggtgaggagggacctggccttcgaaggcaggaaggacagaacccccaagccacgacggcagcggggcgcggggacggccgggctccagccacagaggccc

SEQ ID NO: 35765 - DNA, 41 bp, Homo sapiens; identical to SEQ ID NO: 501
  chr1:61516033-61516074
  hyper

SEQ ID NO: 35766 - DNA, 30 bp, Homo sapiens; identical to SEQ ID NO: 502
  chr1:61516540-61516570
  hyper

SEQ ID NO: 35767 - DNA, 73 bp, Homo sapiens; identical to SEQ ID NO: 503
  chr1:61519331-61519404
  hyper

SEQ ID NO: 35768 - DNA, 512 bp, Homo sapiens; identical to SEQ ID NO: 504
  chr1:61519472-61519984
  hyper

SEQ ID NO: 35769 - DNA, 31 bp, Homo sapiens
  chr1:61522826-61522857
  hyper
gcagagaattgttttgcgtgataaatcaact

SEQ ID NO: 35770 - DNA, 30 bp, Homo sapiens
  chr1:61542314-61542344
  hyper
taacctagggtagacgctttatttcactgc

SEQ ID NO: 35771 - DNA, 340 bp, Homo sapiens
  chr1:61547844-61548184
  hyper
gttacccagtaatgcgctgatcgggggagggggcgggggggccggggagcgagcgggagagcgagcaagcgagcgagcaaggagcgagccacggagagagccggggagcgagcgagccagcctgcgagcgcgagcggccgcggaggctcgggacccggctggccgcgcggcgccgcagccgccccctcccccacaccccctcccccccgcggcggcggcgcgagcgggcggcggctgtgcggtgcggtgcagagcggaggcggaggcgggcgcgcgggcagctcgcgggcacccggccgggccggcgcgggagcgggaaagggtgcgctatgcctttaac

SEQ ID NO: 35772 - DNA, 902 bp, Homo sapiens
  chr1:61548440-61549342
  hyper
gcataccccagcgcccggcagttatgtattctccgctctgtctcacccaggtaagccgcggcgtggatgcggagggcttgggggccggggcgccgggggcagggctggggctgggtggggggcaccggggccgtcgctccggccgggcccagggcgtgcgtctcggtgtgtgtctgtgtctgcgcgtgtttctgtgtgtgtgcgcgcgtgtgcccgcgggtggggggggggatcccgcttaaagaaagtaactttgtttccatgcgggtgcattcctcttgcacggccatttgtgtgggcacatggctaatggcgccctcttattaatgcgttaattaatatcggggcgacggactgcggaacagcagtgttttcggacaccccgcacgtgtttcggcggggttgcagtccatgacacgcagaaatctggctcagcgtttctgctgccgggagcagggattccgtagtgccgcagcgcccggggagggggccgccgacggagcccaccgctcaccccgcacgctcgggccggctgcagtcctcgggtgcggggagacctcgggtgcctgcgcccaacggcccgctccccgcagcctgcgctgccgcagccccccgccgtcttcccgaactcttacttttgtttattgtttgtcagccttcggggtccggccgcggaaaggacgcgggctcccgtcccggccccggcccggacagcgcccctcggacgcgggcaggctgcggctagccctcggctgagcggggctacgtggacgcgcgttcccccgcgccggccgggtggagcctgcgtcctcgccgcgcgccggtggcccgttggctctcccggagtgaaagtttcggggccgagacgagcccacgttgtgcagggcgccgaacgccggagg

SEQ ID NO: 35773 - DNA, 30 bp, Homo sapiens
  chr1:62190977-62191007
  hyper
tgtacccagtccctcgaggcgaattttccc

SEQ ID NO: 35774 - DNA, 602 bp, Homo sapiens; identical to SEQ ID NO: 509
  chr1:62207659-62208261
  hyper

SEQ ID NO: 35775 - DNA, 519 bp, Homo sapiens; identical to SEQ ID NO: 510
  chr1:62208291-62208810
  hyper

SEQ ID NO: 35776 - DNA, 961 bp, Homo sapiens
  chr1:62784144-62785105
  hyper
gcaaagcgccctcggcggcgtctagagcactcggagctgccccattgcctccgcccaaggtcgcggcccaaagggagccctggaaagttcagccaggggccgaggagtgccagggttggcactacggggagacttttgcgacaggagagagactaagagctcgattccaggtagcagtgggagcccgcggcaaagaacgcccagtcccgcaggctgcatcccagaccgcagcgcctagctcggaaaagctgggcgggggctgcaccacctgagtcgcaaggacagcacggcctccccctcctcaccagtgttctccacccccagaattggggcgcggagagccaatctgggctggaaagggagcggcgcccacctttgggcagcccgagcagccccgctccttttctgtcgcagaccccaggctgggaggcgggggcgccaggtcggcccaagctgccgcagccactgctttaaagggagccggggacgcggcgctggggactgggcgaggcgggtggcagaggcaagaggagagtggtcgagcgccggggccaacactcgggtcgcgcagggcgggtgttgaacaccccagcagacgcactgcgggggactggggtcgcagagtcccttaccttggcgagctgcggaagtcctgcgcgaggcggcccgcggtgcacggggccggggcagctaggcgcacaccccggcttcggagcgcacgcaacctccgggtgcactgtccgcgtcccaggcgcgcaccccggggctggcgcaccctggtcgtccgcggcgcgcacaccctccaggcgccctctggccgacggtctcggccctggccccggcgcacccctgcgggcacacccaccgcggcggatgcgggactggccaggcgccgccagccgcggcttcgccccgcgtcgccagctgccaacagcgcccgagtccccgccttcgctagggg

SEQ ID NO: 35777 - DNA, 30 bp, Homo sapiens
  chr1:62902647-62902677
  hyper
ttcaaaggacgccacgttcaatcgcagcgc

SEQ ID NO: 35778 - DNA, 31 bp, Homo sapiens; identical to SEQ ID NO: 512
  chr1:63153559-63153590
  hyper

SEQ ID NO: 35779 - DNA, 30 bp, Homo sapiens
  chr1:63250121-63250151
  hyper
ttctaactcttcctcgctttgtcctgggtt

SEQ ID NO: 35780 - DNA, 30 bp, Homo sapiens; identical to SEQ ID NO: 513
  chr1:63348082-63348112
  hyper

SEQ ID NO: 35781 - DNA, 558 bp, Homo sapiens; identical to SEQ ID NO: 514
  chr1:63539430-63539988
  hyper

SEQ ID NO: 35782 - DNA, 30 bp, Homo sapiens
  chr1:63782973-63783003
  hyper
cctgcccgccctcccgcgtcagcgccccaa

SEQ ID NO: 35783 - DNA, 30 bp, Homo sapiens
  chr1:63783451-63783481
  hyper
gcatgatgaagtgtcggctccgaagggggt

SEQ ID NO: 35784 - DNA, 30 bp, Homo sapiens
  chr1:63784828-63784858
  hyper
ccctcattcccaccgcgtccaggtggcttt

SEQ ID NO: 35785 - DNA, 89 bp, Homo sapiens
  chr1:63785203-63785292
  hyper
cttggcggtaactgacgacctgtgagcttttagctgcaaactgcaactacgcggcaaacaatttatttagcccgacatctagccggtct

SEQ ID NO: 35786 - DNA, 148 bp, Homo sapiens; identical to SEQ ID NO: 515
  chr1:63785618-63785766
  hyper

SEQ ID NO: 35787 - DNA, 305 bp, Homo sapiens
  chr1:63786078-63786383
  hyper
gccccgggcccctgcctttagggctgggcaacccaagcagagcaaaggaggttcctgaatgtgtaaatttccgctttttagctttttttttttttttttttggaccttccgacacttcggttgctgaggcagttgcagacgcgacctctgcagtcctgggcgatggccagccagctcagctcgggtcggtttcgcggaaagctgtctagacggcattgtaaacggttcggagcctgcgggccacaaagctgtggagctacggaaatcaactctgagatgcgttttagggccgtgtgcaacctcgg

SEQ ID NO: 35788 - DNA, 451 bp, Homo sapiens
  chr1:63786797-63787248
  hyper
acagggattgggttccgtgtgcctgccacaccaggcaggctcttgcggctcccaactaggcggcctaaatgagggaggaaagaggaggcgcatcgctgattcaccgcgtcaagagcactgactttccttggaggtgtgaggtccacgcaccccagccacgcacttgggggtcggtttgcggtgcctccccctccagtcccagtgaaatccccacagtttttcctactatcactgacttgccttgcactccgcgtgcattggccacacatcctcgcctcctccacccgctccgccgccggttttcttggaagttaaatcttggaggatttgtccacaccttaagagaagaaaatccacgttagctggcagcaacggagatcccagcatgctggcatgcccaagtctgcccaggttcccccaaggccatgcccgccgcccgggaagtcactgc

SEQ ID NO: 35789 - DNA, 403 bp, Homo sapiens
  chr1:63787282-63787685
  hyper
cgctgcgtctaacctgaagacaccaggcctcttcccggatccactcgacttacccaggccgctgccaatcccagctccttccccagcgcctcatttccgattttttcatatgctaagtcgtttaacaactccaagtagccagttatggcttctttatttataggttccctgctattttacgtcgtttttatttctctcggcaactattctagtagattaatcaatagccattttctgaccttcgggaaccccagctgatgctttttgtggccgcacgaaaaaatacatacaggaaaacacgcccgcatcaagccgggaaagagcaggtaggacctgagtggtttggttgggggagggggaaaaagacatctcagcaggtgtcttccccggaatgagcactgag

SEQ ID NO: 35790 - DNA, 480 bp, Homo sapiens
  chr1:63788286-63788766
  hyper
agccccctgcccccccgctactgtccctgcccgcgccctcccgagctgctcggcgcccggcgtcccgcgcccgcctggaccgctcctgcgccccacgccagggccagaggccgaggaaggcgggctaagtgagggggcgcggcgtggagaaccgccggggccgggagcggtagcgagcgcctagtaccgagcgccagggacggcaggagttcgcggagcgcggccgctgggggcggacggcagagcccgcgccacgcgatgcggggccgccgagtgtgagctgagcccagcgggccccaagccacctgcggccccctcccctctccctgccccccatctttcgggggcactcaaaccctcttcccctgagctccgtggcagcccccgaacaccctcatcgcccgctgccccctccccgccgccgctaccaaccccgaggagggatgaccctctccggcggcggcagcgccagcgacatgt

SEQ ID NO: 35791 - DNA, 577 bp, Homo sapiens; identical to SEQ ID NO: 518
  chr1:63788919-63789496
  hyper

SEQ ID NO: 35792 - DNA, 63 bp, Homo sapiens; identical to SEQ ID NO: 519
  chr1:63789728-63789791
  hyper

SEQ ID NO: 35793 - DNA, 63 bp, Homo sapiens; identical to SEQ ID NO: 520
  chr1:63789849-63789912
  hyper

SEQ ID NO: 35794 - DNA, 33 bp, Homo sapiens; identical to SEQ ID NO: 521
  chr1:63790252-63790285
  hyper

SEQ ID NO: 35795 - DNA, 194 bp, Homo sapiens; identical to SEQ ID NO: 522
  chr1:63791984-63792178
  hyper

SEQ ID NO: 35796 - DNA, 71 bp, Homo sapiens; identical to SEQ ID NO: 523
  chr1:63792231-63792302
  hyper

SEQ ID NO: 35797 - DNA, 105 bp, Homo sapiens; identical to SEQ ID NO: 524
  chr1:63792543-63792648
  hyper

SEQ ID NO: 35798 - DNA, 855 bp, Homo sapiens
  chr1:63792797-63793652
  hyper
cggacccagaccctcaagctgccagcggttgtttaaagtcctggcagatgtcaggaagatgggcccggccgtcgcaccctcaaaagctctttttcgtttaagctttttaaacctcgaagatttagcacaaaatgggaaatgcaaatatcatagacaatgatcgcaagcacttagtggtggggctgggggaagcctgaaacccttgtttgatgttatggaacgcaggcacctgcgacaaacggcactggaaacagctctctcgttgagatttaaagtcaacactactgatatccactttttattccacttaagaaaaaaaaactaaaggaaggggggcagatttatttgcaataaaagaagaaagcgggttgatttttatggggaagattttagctttcggctacacacgcatttagacgtttctactttctctagcactcattcctagaaaaatcaatccagccctgaggcctgtggcccctagagcgttctcaggaccaaggtctgagttgggaccgcccgtatctagttcctcggaggggtggatctggatgtccggggaaaggcgaatgaagagtagagcaaaacatgtgccggctgttgagggctgtcgatgcgatggcagatgtggcctgtagggggcgacgagcagacggaaaacttcgcggtttgtctggaatggtccagccccagccccggacgcctctccttccctcccaggctctgagcctcctgacatccttgcttattctcaggccccggaagcctaggtcgaatctcgagaagctgatttcctcctttcccccgcctgtgtcctgggaggaacagagtcccgaggggagtttgtcctaaaga

SEQ ID NO: 35799 - DNA, 804 bp, Homo sapiens; identical to SEQ ID NO: 527
  chr1:63795342-63796146
  hyper

SEQ ID NO: 35800 - DNA, 30 bp, Homo sapiens
  chr1:63832995-63833025
  hyper
agcaagccagggcccgcccctgacaggaat

SEQ ID NO: 35801 - DNA, 30 bp, Homo sapiens
  chr1:63988799-63988829
  hyper
ggcattctgagattcgggaaagcaccactg

SEQ ID NO: 35802 - DNA, 30 bp, Homo sapiens
  chr1:64059037-64059067
  hyper
ggcctagagtgcggcgtagcccccacccgc

SEQ ID NO: 35803 - DNA, 937 bp, Homo sapiens
  chr1:64239514-64240451
  hyper
aggggaggggagggagcgtgcccgagacgcgggagccgcgaccgctttctgcgaagtcggggagggtgcgggcgttgagaggctgcagcagagggcgctgggtcgccagcctgggccgcgtctcccattggtcggggctggggcgctgggctggagagttggtggaaagtgacaagttgagcgagagagggagcgtggagagctggagcagccgccaccgccgccgccgagggagccccgggacggcagcccctgggcgcagggtgcgctgttctcggagtccgacccagggcgactcacgcccactggtgcgacccggacagcctgggactgacccgccggcccaggcgaggctgcagccagagggctgggaagggatcgcgctcgcggcatccagaggcggccaggcggaggcgagggagcaggttagagggacaaagagctttgcagacgtccccggcgtcctgcgagcgccagcggccgggacgaggcggccgggagcccgggaagagcccgtggatgttctgcgcgcggcctgggagccgccgccgccgccgcctcagcgagaggaggaatgcaccggccgcgccgccgcgggacgcgcccgccgctcctggcgctgctggccgcgctgctgctggccgcacgcggggctgctgcccaaggtaagaggcgcccgccggcccccgcccgcccagaccccctgacccgtggccacccttccgccgtccagccgggcgcgggacacgcaggaagcgccgcgctggctccggggcgcgtccggccacccgccacggggctcgccggcgccgccaggccagggtttgccccggagccccgccaggccagggtttgccccggagccccgcggcgggccggggcgcgcccagggactcgttcctcggtgcgcagcagcgattgtcagcgctgacaggaa

SEQ ID NO: 35804 - DNA, 473 bp, Homo sapiens
  chr1:64240532-64241005
  hyper
cgcgccccagccggtgttcaggcaagtctatcctgcccccaagttgcgagccggcccggaaggcgcggtccaggagggagtttggattttcagtggtgctcgccagagcccaggcggctcgcggatcgacgcaaacaaaagccctgtcctcctggggctccggcggcctcgcatcgccaccgcccccggccctccggccctcccgagagtcatcatagaggccaaaacttgtgcgccgctgcagccgctgccactttgtgcaaaatgtgctgtcagaggcggcctgcggctccaaagtgctttgggtgtgcacgcgcgcgcgcgcgcgtgtgtgtgtgcgtgttacaaacaagagggggaaaagccatctaatgcatatttgattttggtaatctctaaagacaatcgcaacagttagagaaagacttcaccgcaagccggagcgtcttagttcgctgcgggaagctggggtc

SEQ ID NO: 35805 - DNA, 30 bp, Homo sapiens; identical to SEQ ID NO: 530
  chr1:64936232-64936262
  hyper

SEQ ID NO: 35806 - DNA, 30 bp, Homo sapiens
  chr1:64971203-64971233
  hyper
gacctccccgcccccgggccgcgccccgcc

SEQ ID NO: 35807 - DNA, 30 bp, Homo sapiens
  chr1:65210405-65210435
  hyper
gctgagtctcccggcgaagccaccgcgaag

SEQ ID NO: 35808 - DNA, 14 bp, Homo sapiens
  chr1:65210893-65210907
  hyper
cgcgggcctgggca

SEQ ID NO: 35809 - DNA, 419 bp, Homo sapiens
  chr1:65210939-65211358
  hyper
cgcgggcagggcccctcagccgaagcgcacgagggcgccccggacccgatgcccgccgcgctgcaccctgaggaggtcgccgcgcgactgcagcggatgcagcgggagctgagcaaccgcaggaaaatcctggtgaaaaacctgccccaggacagcaactgccaggtactgggacggtgataggggcgacgcgtcccgaggggcggcggggcggcgctccgtgtccaggctgggatcgggggcgcctcagagcggtcctggggagtgggtcggcgccgagtggtgagagcggcccctcggtttgactgagttcttggggtttctagcctgcagacgccctgccagggaggggggcagattgggaaactgaggctctgagtggcgaagcggcttctccaaggtcacgggaatcaggggct

SEQ ID NO: 35810 - DNA, 30 bp, Homo sapiens
  chr1:65432477-65432507
  hyper
gcgaggtcatctatcgcggggagtaaaatt

SEQ ID NO: 35811 - DNA, 601 bp, Homo sapiens
  chr1:65468241-65468842
  hyper
accaagcctgcacccagggagcgctcagtaacgcagcgctgaggagtaggccaccccggagggctccaggtttcagcgcaggcttccgcggagccagctggatgcgtcaccatccgaaagtgcgagcctggccggcggcggcggaggcgggggcaccgcgcagttggaagcccgggcgctcttaccgaaagcgcgagcccggacttccccgccacgatcgatgtggccagtctgcgcctgccgcagttcccgctcgcaccccggcccctcgcagagtcccaggaaagcgctgtggcgggcgggcagtctctgcccccgggaggggacgcacgcacgcgctgctccttccaggtcccggcggggaagcgatgctttcttggcccgggcttggggccagcgggaaccgggctgtccggccgcgccgtcgcgcctcgcacggcgtgagacaacctagctttttttttttttttttttttaagaaaagcattggcaccgcagcagcctcccccgcttcttccctactaggacgcccgcctgactcgccccattgcacaattcttaccgtggaacagccgcgtgactcggcgggagcccaaaagtt

SEQ ID NO: 35812 - DNA, 30 bp, Homo sapiens
  chr1:65532727-65532757
  hyper
gccccgctacccctcgggaaaaacacacgc

SEQ ID NO: 35813 - DNA, 154 bp, Homo sapiens
  chr1:65534603-65534757
  hyper
tggggacgggactcacggaacatcgctatgtgcttattgtgaattatttttattagactcacagagttgaccactctcccctttgtgcatccactgtatggtttttacatttattttctggtgcctttcacagatcagcgtacggcacagttgc

SEQ ID NO: 35814 - DNA, 30 bp, Homo sapiens
  chr1:65613670-65613700
  hyper
tggggatgcctggccgcccggcccccttct

SEQ ID NO: 35815 - DNA, 31 bp, Homo sapiens; identical to SEQ ID NO: 534
  chr1:65614106-65614137
  hyper

SEQ ID NO: 35816 - DNA, 30 bp, Homo sapiens; identical to SEQ ID NO: 535
  chr1:65614490-65614520
  hyper

SEQ ID NO: 35817 - DNA, 296 bp, Homo sapiens; identical to SEQ ID NO: 536
  chr1:65614751-65615047
  hyper

SEQ ID NO: 35818 - DNA, 20 bp, Homo sapiens
  chr1:65622589-65622609
  hyper
cagggcgagactgtgtctca

SEQ ID NO: 35819 - DNA, 40 bp, Homo sapiens; identical to SEQ ID NO: 538
  chr1:65720328-65720368
  hyper

SEQ ID NO: 35820 - DNA, 174 bp, Homo sapiens
  chr1:65731331-65731505
  hyper
aggattctggggttttaaattcggaggctccttaaatattctgccgcagttgggggaggagcgatggacccctaggtctccggaggctacacgtgttccccgatcccgtttccagggggagcccttccttcctattgcgctggtcgtgctcctggcccgcgtgcccaggaaggg

SEQ ID NO: 35821 - DNA, 156 bp, Homo sapiens
  chr1:65731781-65731937
  hyper
ggagctaagttctttgggtgagacgtgcaacaacgcaggccccaaagctctctgcgcgcagcgccgcggggcttggccttctccagtcctcgggagtcagccaccgtctctggcttgttataggattcccacctcgtggtgggcaatgatatatac

SEQ ID NO: 35822 - DNA, 887 bp, Homo sapiens
  chr1:65774900-65775787
  hyper
caccctcccaacccacgtcgtagtagtcccctcccccgaccaccccgccccgtttcccttcaacccccctcctcacgaacctcccctcccttcctacctccctttccttccctccccgcgggccagcggctttggcgctgccctgctgcgcggcggggcgacgcggcgacacctataggattgcttccgggcactcctcagccaggaggtgctggcctggggcccggagctcggcagggccgggcggctccgcggcgttggcccagaggacgcgcgcccccgcccggccgcgtctccttccctccctccctcctcccggcgccccgagccgagctcagcccagggcggcggcttcgcctcgcccggcgaagcttctctccggtggccgctccttcttttccctcctctttgcgtcatgtcgggcacttaatttttttttttttttaattccttcttcagccctttccaccttccatctcccttttcgcttcccaggttgattattttctcttttctccgggcttgcccatgagcctcctcgggagctaccggaaaaagaccagcaacgatggttatgaatctttgcagctggtggacagtaacggggacttaagtgcgggaagcggcggggttggcggcaagcagagagtgaacgccggggcagcggcgcggagtcccgcccgacagcctccggaccgcgccagcaccatggacagctcaggtagcgctgcccgaggggagtgcagcgctgagccccgcgcggcctccggagcctcccagtcgcccggcccgaggcccccccgtggtcccccagccccggtttgcgagagagccgggctggaggcgaaggcttctaataccacctgggtgtcgagtctctaatttct

SEQ ID NO: 35823 - DNA, 30 bp, Homo sapiens
  chr1:65886620-65886650
  hyper
cctttttgcaaggccgctggccttcctgct

SEQ ID NO: 35824 - DNA, 31 bp, Homo sapiens; identical to SEQ ID NO: 540
  chr1:65886883-65886914
  hyper

SEQ ID NO: 35825 - DNA, 441 bp, Homo sapiens
  chr1:65991119-65991560
  hyper
cgccgggtctctcctcccgcaggcccgcggccacccgcagcggcattccccgccgccgcccccgccacctgcgcgaccgccctagccgctcgagtccgctcctcccgctcaggggcggctgcggagggcgcggggcgcacgcgggcggccacccgactcttccctcccttctccccaccccagcctgctcctgctcagccccacctccccacgcactcggctgccctcctcctctcctgagagttgccccgcaccttgggcgaggagttcggagcggccccatcgcagagcccacggccagccgagcgcgcgcgacgcaggtgcccgagccccggcgccgccgccatctctgccttcggtcgagttggacccccggatcaaggtgggacctgcttccctctccgacaccccctattgccacctcttcccgctctgggtaac

SEQ ID NO: 35826 - DNA, 152 bp, Homo sapiens
  chr1:65991605-65991757
  hyper
cgggccgcttagggactgggagtccggggcagcttagcgggaccaccagaggggccagcgcccggcgggcggcgggggtggggtgggtgcgacgccgggcgactctcggctcccgtggggcgaggaagatctggacacacggctgacagcag

SEQ ID NO: 35827 - DNA, 41 bp, Homo sapiens
  chr1:65991783-65991824
  hyper
cgggaccaccgagagagcatgccacccggccaacttctttt

SEQ ID NO: 35828 - DNA, 531 bp, Homo sapiens; identical to SEQ ID NO: 541
  chr1:66258119-66258650
  hyper

SEQ ID NO: 35829 - DNA, 436 bp, Homo sapiens
  chr1:66258671-66259107
  hyper
cgcccccggcccgcgcgccccttcccggggctcctggcctcgcctcagcggctgcaggctcttcgtcgcgggccgggctgcacgcgagcgccctccgggcagactttcgtcccccacccccgggagcgcggaaggctcactcgcagcgcatggtctacccgcgccgggcggagccccggcgtccagagcgctgcggccgcggcggtgcagcagaggcgcctcgggcaggaggagggcggcttctgcgagggcagcctgaggtaagggctgcctaggaggctgcgggtttatttttcctcattctcttacttcatcacacactgaagcctcaatggagagtgtagggtgctgtggggctgatgtggggcaaagagggaatggggccgccgggcctggatggtcgtcttgacggcgtcattgtcgccccttgtaggaa

SEQ ID NO: 35830 - DNA, 30 bp, Homo sapiens
  chr1:66797584-66797614
  hyper
gcctcttacttgtgcgggtcagtgttcgct

SEQ ID NO: 35831 - DNA, 389 bp, Homo sapiens
  chr1:66797899-66798288
  hyper
agagaccgttccctccgccttcttcctcagaggaagtttcttggtagatcaccgacacctcatccaggcggggggttggggggaaacttggcaccagccatcccaggcagagcaccactgtgatttgttctcctggtggagagagctggaaggaaggagccagcgtgcaaataatgaaggagcacgggggcaccttcagtagcaccggaatcagcggtggtagcggtgactctgctatggacagcctgcagccgctccagcctaactacatgcctgtgtgtttgtttgcagaagaatcttatcaaaaattagcaatggaaacgctggaggaattagactggtgtttagaccagctagagaccatacagacctaccggtctgtcagtgag

SEQ ID NO: 35832 - DNA, 907 bp, Homo sapiens; identical to SEQ ID NO: 543
  chr1:66998816-66999723
  hyper

SEQ ID NO: 35833 - DNA, 242 bp, Homo sapiens
  chr1:67218064-67218306
  hyper
cagagggccactcagcggccaagtccggccggggagggccgagggctctgtttgaggtcaccctggagaccggcctcagagtccagggagagtgcgcgggcggccgccggctgaatgaagcctgggacgcgggagccgcgccgcgcgcagtgtctgcagtgccggaggtctgggaggctccgggcgaagcctccctgctgcaggtagggtcgcctctctctgcagcgcgtctggaccccaaa

SEQ ID NO: 35834 - DNA, 167 bp, Homo sapiens
  chr1:67395532-67395699
  hyper
acagttcttgccgccgttgcatcacagcaacatccgtttttcagcaaatgcatttcaaaaacgacctacatgtaaaatattacgtatttttcctctgctgtgtcaatgctggatgtgactcctttggcactgttccttgacctctctgatccgtagacaaccccctc

SEQ ID NO: 35835 - DNA, 742 bp, Homo sapiens
  chr1:67773094-67773836
  hyper
gtcaacaaagtgccacgtctctatggctgtgaacgctgagcacacgattttatcgcgcctatcatatcttggtgcataaacgcacctcacctcggtcaacccttgctccgtcttatgagacaggctttattatccgcattttatatgaggggaaactgacggtggagagagaattatcttgctcaaggcgacacagcagagcccacaggtggcagaatcccacccgagcccgcttcgacccgcggggtggaaaccacgggcgcccgcccggctgcgcttccagagctgaactgagaagcgagtcctctccgccctgcggccaccgcccagccccgacccccgccccggcccgatcctcactcgccgccagctccccgcgcccaccccggagttggtggcgcagaggcgggaggcggaggcgggagggcgggcgctggcaccgggaacgcccgagcgccggcagagagcgcggagagcgcgacacgtgcggcccagagcaccggggccacccggtccccgcaggcccgggaccgcgcccgctggcaggcgacacgtggtgagtgaccagtgactcggggtcggggacagagagagccccaggatcccggaccagcggggtgtctgcgtgcccgggattccgtgtctcgcgtctcccgagggggcttcggcgacggcttctctctttatatatatatatgtatatatatatttttaaagtcttccaatacgatccgaaatggct

SEQ ID NO: 35836 - DNA, 30 bp, Homo sapiens
  chr1:67895322-67895352
  hyper
cacctcagtccatgcgctcacccgccaagg

SEQ ID NO: 35837 - DNA, 30 bp, Homo sapiens
  chr1:67896169-67896199
  hyper
catttctcctgaggcgactctccgcgtcgg

SEQ ID NO: 35838 - DNA, 139 bp, Homo sapiens; identical to SEQ ID NO: 546
  chr1:68001180-68001319
  hyper

SEQ ID NO: 35839 - DNA, 30 bp, Homo sapiens
  chr1:68150311-68150341
  hyper
agccatcagggcaccgaaataatactactg

SEQ ID NO: 35840 - DNA, 30 bp, Homo sapiens
  chr1:68150808-68150838
  hyper
gcatgcaaatgaggcggaaggtggttggct

SEQ ID NO: 35841 - DNA, 30 bp, Homo sapiens; identical to SEQ ID NO: 547
  chr1:68152066-68152096
  hyper

SEQ ID NO: 35842 - DNA, 811 bp, Homo sapiens
  chr1:68297571-68298382
  hyper
tcctaggtgagggccgccatcctgcgataatttacttcgagagctgcgaagcgctggcaagggtgcagtctggtgactagcacttttaaaaacaaagccaaactccgcttttaaaatagagaaggcacagacgcagaccctgcctctgacgacatccaaaagattcattatacacagcctattcaggcgaagctacaaccgccccaggaaatataaactgtgtcggcaaagacagcaggggggagaggaagtaactgatgggaaggaagctaatcatgtgaagtttgtccaactccacacggtctaataaattcccgtttgtttccgctgggagcagccattaaacgcgccctgacacgtgggcgcaggaacctcccttctacctctggtgttcagagatttccttctcgacccacttgtttgtatacaaccacgcccggcaggatgaccaccagatgaccggccgcagcaatgcctccactcagtcccagttgggcaaagtttcactccactgcggcgacgtgaacaagaatcacggcttccttatcgtgagttatgaatgatttaagccaagtttacaggacacacaaagcgagggacgagtgagtgacgggaggtgctaagtgacagcgttttaaagttagctttaattgatatgccctaattaaaatgaaaaacagaattcaccctgccccacgggataactgtcggggcaataattaaaaaaaaaaaaatcacccaagactaagcctcaacctcccccttaccacttgcaaatacagtctgcagaaaagcagcctcgggtccccac

SEQ ID NO: 35843 - DNA, 910 bp, Homo sapiens; identical to SEQ ID NO: 550
  chr1:68298403-68299313
  hyper

SEQ ID NO: 35844 - DNA, 30 bp, Homo sapiens; identical to SEQ ID NO: 551
  chr1:68696694-68696724
  hyper

SEQ ID NO: 35845 - DNA, 30 bp, Homo sapiens
  chr1:68696973-68697003
  hyper
tctcccggggcgggcgctgtcgccgaggag

SEQ ID NO: 35846 - DNA, 171 bp, Homo sapiens; identical to SEQ ID NO: 552
  chr1:68697351-68697522
  hyper

SEQ ID NO: 35847 - DNA, 468 bp, Homo sapiens
  chr1:68698098-68698566
  hyper
tcagaggtgctggagcgcggcgaggatgggaccgggacggaaggcgcccgcacggattcccccggcgcagccggctcgggttcccccaatgcccggagctgtgattgtggccgctccgccgcctgtggacgcttaaaggagcagggaagcggatcacatgacgccgcctccctccctttcttcctccctccctctcgcgcttcctccctccctccctccctctcttcctctaccccttgcccaccagttcggggctcagagctctggcgggtgctggcgcctggctcccgagtctggcctgcaacctgtctctccaaggtctgatgccatttaggggttgctgttgatgttaagcgggttccccctgcccagcttctcacaggtttccttttctggtttccgaagtgcgagatttaaatcaccggtggaccgccttgcagacctttaacttacgcgttgactttagga

SEQ ID NO: 35848 - DNA, 1864 bp, Homo sapiens
  chr1:70032825-70034689
  hyper
cccagggcagcagccgcaaccccagaatgaggagaggacttaagagcaggcacaaggttcgctgccatgactgatgtgaagcgacctgacgcacaagcggagacttttctccttggcagccaacaacctgcagcaggcaaggcgggcgggggaggaaaccccgaggaggcgctcccggccgcctctttgctgagatagcaggagcagcagcctgaggagccacgagctcagcgtcactgagctagtgcgggtgcaggggcgctcaggcaggcgcacaggccgggagccgcttctgccgctcaggcggccgcgctgcagaaagccgcgccgcgctgcccgagcgcccggggctggcccgcgagcgggaggagccggcagccgcgctccgccccgcgctgagattcgtgccacctgcctcgaacaccacggaggcgagaggaacccagagagctcggcctctcgtcccgttctcgaaaagcagcctatcgtgacggagccgggagaaggctagcgtttcaatcctgtgcaggactgggatttttcttctcataatttgggggagccggagtagaggtcagagggacaggcgaggatctcaaaaagagaccgagggttgtgaacatggttaccccctcctatcattggaaaatctccttgacatttttcacactttgaagcagctgcagctggtgtcgtcggaaaagggggtgggaaaaaagagagggggcggggagagcggtgagacacagccaagagccatgagcggcgcctcctcgcctgccaatcctggcacctgtgcgccgagccactgcaccgaggaggaccctactccgggtgaacaccgggcttgaagccacggacacccagccccagtgcagcgggttctcgccggcgggacctgcagccgcccactcgggccaccgccaccgcctcctgcagttgcggagcgctcagcccctccgagacgcccgctgcgccctggcccctggggatcctcgccctgcacaggcgcggcaacgggcaggggttgttacggagttgggtgcaggattcgcctttcctgcttgtctcttctccgcccaggatttattgtctgtggagccttctgggggcggggagggagctgcgcctccgccaccgccgccgccgccgccgctgctgctgcggtcgctagcgcggcgcgctgggcaggctgaggctggggagtggacgcgctcctgcctcccccgccggcgcttcgggcttcccctcagccgcttcccgcgggaacctctccagccgtccacctgaagggcactggcatcatggtctaacgtggcaccttcctggattcccctctatctcctgttcttcctaccttctactccttccctcctcttctcctccgaagaccctggcgcccactccactgcggacccctgaacacttaaggaataacccttggcagctgcacgactacgctctccgaaacctcatgggcagtttctcccgccggcgatgtgagtaaggcacgctcgctccgtggcggagggtgctgcgggggcccggccgcggcgaccgtaggcgcgcgaggtgtgggaccccagaggccggccgggggcgggggtggcagggcgggaggcttcggcgctcgcggggagctgcttgtgcggtggccgagggaggcggcgaagatgtggtaggttgcagagcatttggaaatggggtgctaactgggcgggtgcatgggagcaccgagtagcttgagctggcaagagaccttaaagggttacatactgcgaaaaggaaaggtaaatgttgggcgctggtgctgggaccattggttccgctgaaattaggtttagctcctcgttattatcttggg

SEQ ID NO: 35849 - DNA, 614 bp, Homo sapiens
  chr1:70035029-70035643
  hyper
ctcctttgtgtggcacgagaagctggtgaacctgcctattcccaatccagcgctgggtccccttgaggatcttgcgtcctcctctccgagttattaaggatgcaggacgtgtttcggattcgacgtggaaagagggagggaagcacattagcattaaggtaatcatggcaccctggctcgtggactattagattggctaccagtggtctctaatcttactgtttgcagagtcaagaatgggggcgggggttgggggactgtatagattgccttttaaaatagtgtgacttcataataacggagatggctgaaagattgcttccttacactacttctcggccatcagggctgaataaaggacccgcctccgccctctactccggctcttctctggctgtctcttccccatcaagtcataaagcgagcgggttgggcgagagggcacagctcgaggcagagaagagacggggtcactttcacaactcccaggaatcggcttcagaaaggaaccatctgcgactcccacgttcctttcgaagttctccttcaaaaggaattacaaaaaaaaaaaaaaaaaaaaaagcgatgggggtggggatcggtaagacacaggg

SEQ ID NO: 35850 - DNA, 127 bp, Homo sapiens
  chr1:70671104-70671231
  hyper
tggccgctcttcctcgctgccttcaacagcccttggggtaccgaggtaccgcagtctcttccacctgctttgaaaccagcgcggagatcctgccccgctatccgcttcaggcgcgacatgttcaaag

SEQ ID NO: 35851 - DNA, 30 bp, Homo sapiens
  chr1:70687286-70687316
  hyper
tgttaaagcaggagcgagaacccgagcagc

SEQ ID NO: 35852 - DNA, 30 bp, Homo sapiens
  chr1:70820057-70820087
  hyper
ccctccgcagtgagcggatcttctccccgg

SEQ ID NO: 35853 - DNA, 30 bp, Homo sapiens
  chr1:70820329-70820359
  hyper
gatctcagtctcgccgtcgcagccgccgtc

SEQ ID NO: 35854 - DNA, 30 bp, Homo sapiens
  chr1:70876477-70876507
  hyper
ttaaccaccctccacgttgtggcttacgtc

SEQ ID NO: 35855 - DNA, 1067 bp, Homo sapiens
  chr1:71512797-71513864
  hyper
gctcgacggccatggcgctggcgatgaacaacgaggagagcccgaaaacagtcatggtcagcccgaaaaaggtgcagagccgccccgacgggtcgatgtgctcccaacgctgcttggacaggtacacgacgatgacgaccggggtggtgagaagctgcccgaccaggtcggtgagcgccagccagccgatgcacagcaggaaggacttcttgcgcttgctctcccggcgccggtagctgcgcgacacgagcagcatggccagtgcgttgcccacgaaaccagtgagcagcatggtgatcgggaaggccacggacaccgatccgcaatcctcgccagaccctggagggcgcgtgaggttgccccgcgcctcggcggaacgctcgggcgcccacatgcctgtgtaggagtggttgaggcgggtgcagaagggggcatcccctccgtagccccgggtctccttcatgttggcttcgaggtgaggaggggatggcgtccagagagccgcagcgggagggggcagacgcggcgcgggcggcggcggaggtcggcgtttaccgcggctggggctgggctgccccccatggtgcggggcgcagccgccgccctactccgctgctgggaccgcggccgcggcggcgccagggctcactggcccgggagggagccacgccttcctctctgggaaacctctggtggcgaggcgcgcggaggtgccgagtcccctttataaggccgagggggcggggcgcccgtgggtgtggacagaaccgaggtgggaggagggtgcaaagcaactgagcgcctctcttggctgttgcctatcctgatcgcctgggttgggaagccccagacggtctcctctgaaacgccctgctcctggccggaccgggagcccactggggtctcctccagttctccgctaaagtgtcggtggacggcaagcagctaataagtagcactggacttgcggaccccaggcaaactgccgaggcgcacctgagcgctcgtcctcctgcttcttcaaccacaaacgctcctacagggacgggatccttctcctgaagtcc

SEQ ID NO: 35856 - DNA, 1876 bp, Homo sapiens
  chr1:72747823-72749699
  hyper
ccagcataaacgggccggggctccgggaagaatctgcacctggaattcttgggatgtggtctttccatgatgagcaccaccagcattattgcttgtgttataaagaaggcaaagagggttcaaagagagacagaaagatagaccgaaacaagtacgaaaagcacgccgttcttcctacctaagcaccgccgtgtccccttttctgaccatcatgttgtccacggccgcccaggggaagtccacactctgtccagccgggaggcaggagggtagcaggcagcacaggctgaggagcaccgccgccagccactggttcgagcaacaagcaccctgcaccaacagcatcatgtccatccctgctagggctgctcactctccagcagctttcagctcgcactcccccaccccctggtgctggcgagtcttcccgggaaccaggcggcgcgccacaggatttttttttttttttttttttttttttttttttggtgggtgggtgggtttcttttctttctttcttccccccaccccagttgttgggtgttgtttctctctttttgtttttcggtgtttttgcctcccctcctcctcttcgctttccctccctccctcccctccctccccctggcaccacactacacctcctctcggttgcttttggccgcgtccggagtgtgtctaattctcgggcggctcgcacaccatctagcgaggaggcgagcgcgccggcgagtgagggaggaggcgcggcggcgggggaggaggcagggcgagcggcggcggcggcggctgcaatcccagcagcagcagcagcaacagcaacagcagcagcagaagcagcgcggagcgctgcgccggccgccggctcccgggctcgcgcgcgttgccaagcggccgtttccttagcaaccccgccaggggactggggatggagaagggagggggattaaaaaaataataaaaaaagaaagaaaaaagatagcaagaaaaaaaaaagaaaagcaagacaacgaaaaaaaaaataggaggaactgtatcacaattatgcaaactaagggggaaagagaggcaccttagaatgaaggctctccttactgtcgtaagcgctagagggattctttgctagaaaagtctccgtgtcagggctggggtgaagagagctgaggggcgctttgccttccctcaccggtgcgttttacctctcgaggcaccgtaagtttgaagtcctccaagttgtggtcggcgccatcatgacgccggcgactgtgagttgtttttttgtttattttcttctaatcttgcctgggtggctacgctgcagttagcgagcagccaactagttctctctgcgttttctcgggaataggtagggacggtggcggggcgctgcttttttgcggggacacgaggaggtgcaaggccttgcggcagagcagcttgcgtgtttgtggcggtcggcccgtatggattgcaggacgcccctcttttatctgtgggtgttgacactaagttgtgtgtgtgagtaggggattgtttatggtcaacatggagtgtgtgtgtgatagagagcgtgtcgtgcgcgcgggggcctgtgcacgcgcggcacgcaggcgcgctgggagggacggggcgggtcatgctgggatgtagagtcgggaaaagactgcaatcaagtgttttaattgtgtagagcccaggcggtccagttatgtaagaggcagtttaacccatttgagcctatcaggccgaataatcggcgcatccgagtcaaggcagggcagagttaaggggtttaacgagtcgcagggttgtatttcttaacagcctccacaccgcgttaacaggcttgctcctccgcggtgcagagcggtaacct

SEQ ID NO: 35857 - DNA, 955 bp, Homo sapiens
  chr1:72749731-72750686
  hyper
cgccgggctgttttcagccctgccctggcccaaggcagaaggagatactaggcgtggggccacccctactcttttttcttctttccttcttgaactcatttccagattcaagatccttaagcttttccgggccatttgcaaatcaatgcgagaaccgaggctgagtcgttagcagttacaccaatcaatcttgttcagcgaggagtttgggaagcagagcggggaagtgaaaatggaaaataagtaattaaaaaataagctccctccccctcacacactttttcccttcctccaccccatccccctttagcagtgtttgaagaagatattctttgccagatcccagttcttcttttggaggaaatgaagcaaaacctcacacgtccgtaactcgttttccataatgctagcagggtcatttggcaaagcgcaccgaagcaagactctctgcaggggtcagcatccggctgcctccgcagactgagctctttacgaggcaggcagggagtcgttttgcttggtggtagcagtgttcagagtgatttttatcgccatgcacggggatatatggggaaagggaagggttcccatcacctgtgaccacccagactggcttacagacgaatccttaactagcaacacctccctgctgaactggcactccaaggctgggcagctaacggagacatttgcgtcaggagtcactgatgttagtattctgccttaactctcaaaaccgactcggaaactgagagtgcaatagtttcaaccgcattttgaaacatcaataaaatgttagtcatttgcggatgaatgaaaacattttctttaccgtctggtatgctagggaaataattgtgaaatgacagactctcactaatatcgatgccaaatacctaagtaacactgtcatcttgttaactgcatttttctatcttgcgtggcacgctgatgg

SEQ ID NO: 35858 - DNA, 30 bp, Homo sapiens
  chr1:74663884-74663914
  hyper
gggtcagaaacaaccgggcggaggcgcacc

SEQ ID NO: 35859 - DNA, 43 bp, Homo sapiens
  chr1:75594038-75594081
  hyper
tcagcaagagtaggcgtgggaaggtggcgctcttccccacagc

SEQ ID NO: 35860 - DNA, 86 bp, Homo sapiens; identical to SEQ ID NO: 562
  chr1:75595904-75595990
  hyper

SEQ ID NO: 35861 - DNA, 216 bp, Homo sapiens
  chr1:75596135-75596351
  hyper
cgccagtggattcccgggtgtcccgcgtggagcaggcttgcccagctgggaagcccatcaaacctcagtcttggcccacagtgggagagagaccagtgggtcccagacggaggccctcgcccgcttttggcgacctccactggcgtgaataaaagcacccctctcttaccctcagaaactgtgggtagcaaggtataaaacggagtctgggaccgg

SEQ ID NO: 35862 - DNA, 149 bp, Homo sapiens
  chr1:75596709-75596858
  hyper
gccctggaggtgggcggtgagggccgcgggccagggaaagctcgggtccgcaagagcagggctctgtttctgcgcctgcaggccgcccgggagtcctggatgcgcctcctttgaccacgttttctctcaggctccagctgtgcctcgcc

SEQ ID NO: 35863 - DNA, 16 bp, Homo sapiens
  chr1:75596929-75596945
  hyper
cgggaatccgagtttc

SEQ ID NO: 35864 - DNA, 254 bp, Homo sapiens
  chr1:75597153-75597407
  hyper
ctgatgaaggatgtttataaacggcgcctgcagtgcgagctgagtgtgaaaatatcagttttatgccttttgataagaattaccgaggcggaaggctcattagacgattacaaatttcgcagctgctcgcagcccaattaggcagctcttcgggtgagtggaagctgtgggggtcagggcgggttgatgttccctctctccagcccggacctccaatcaaggcctggctccacgggatctagaccccttccctg

SEQ ID NO: 35865 - DNA, 614 bp, Homo sapiens
  chr1:75597967-75598581
  hyper
attcccctcttcttgcacactcgacccccagccaaaggcttataccgcccaggacatagaaattgactcaccgcccagaggcttacagctcaaggaggggtgcgcgcagctgcaccccgggacaggtcagcatcccacaaggcgcctggagtaaagcgaggccagaccaatctttcacgtcttctgctcctgtctgacgaccattcttcttccccaagcccagaaacctctaaaaatgaatcattttctccacttatgcagagatagacgctcttagatcaaggttagtattttgaaaacctgactgagagccgcctgattaggcgagggtgggtggaaagaccgcataaatgcccgcacccccgccctgcttccctaacacagctccagctctctctggatctccaaatgacccgcgcgataaattctcctcgatagtagccagacagtaccccagattcactttaaaccctaacacacacacacacacacacacacacacacactgtaattaaatatccaaaccggacctttatgtttaattccactttcaacgaaatcctgctctatacacgacctgatggcgccaatgttctgcacgactctgactttcc

SEQ ID NO: 35866 - DNA, 1009 bp, Homo sapiens
  chr1:75600109-75601118
  hyper
aggaattttaagaacggttcatcagaaagtggtcaggccacagcggcctctttggacgaagacacacttgtagcattatccttctcggcatcagcttttattagtggatcggggcgggggaggggggagatcggcagacacggacagcctctgaccctctggagttggtatgtgataagcagccctagcagtgccatgtattggaagaacgatcagatgtttgtgtgtaaactagtagcaaaggacgtgccggagctggcagttccccctgagaaggtgagcgagccgacgcctggccagaccagctgaatcgcagtgtccttgaaactcgagttgtttgggctcctaaacaaggttcagaaactacctgtaacggcctcatcttcagacctggcaattttttttttttattacgtagtagcgttagtcagtaatcattgcactccctccccaaaagctcacttaacctgagacatggagactgtaatttgggagatgaagcctcgagcctaaggcgctctcaggtccatgtgagtcgtgcttttgttctatttgctgtggtgatcgtggcggtccgggagagtgggtcgggaggactgggcggctgtcgggtggaaccggagacctggctcgtttcgttcggctgcccgcggacacttgcctgccctgaggcacacctccctctgcggggctccagaaaggcctccgggatccctgggcttgccgggagagccattttacctaaaatgccaaaagaaaaccgcagggcacaaaacgagtcacgcggtttgtctgagtagactggggaagctgacaagctctcacctcactcgggaggcaggacctgtgggtatttggtgttttaagtttgaaatcatctgcagcctgtctgagggcctcagcaggacgcgcgcggggcgcccctgactatttctttgctccgaagccggttggggacaccaggcgaaagcggagctgttctgtttaaacgccctttgtgtgtgaggac

SEQ ID NO: 35867 - DNA, 248 bp, Homo sapiens
  chr1:75601187-75601435
  hyper
cggtccgggaggcccccaggttggtatcttgcctggtgcttccagagggagggagaaggggaggcgaacagtcagaaatgcagaagtgcgagccgctcgagttcggggtacccacccgcccccgagctagagtttttggaaacgaaagcggtctaagcccagggacgctgcgttttcgtttaagaacaaaactccagcaaatacttggaaacacttgagtaacgcgcgttgtttctttaaaacatttt

SEQ ID NO: 35868 - DNA, 491 bp, Homo sapiens
  chr1:75601917-75602408
  hyper
cggtgttccccgctccgctatgattgacgtctggaaagaaagagctttgtgaggggatgattgttattaacttgttatccccggcgggggggcggggaaccgacgtgcccgggtgagcgccggagacccggagcccggggagcgcgggacgagctaccagcgctcgggtggcggccgccagcggccagcgaaggaggctgcgcgccagcccgcccgcggcgcccgggctcaggcgccgtgacggctgcacgcgctgccccgcactctgagggccttcattagctcgctccccgcgccgaggctggggcgggcagcacgctcggaacttctgatctgtttctccatactttctccccctcctactccgcagtgtcaggggctcatgtcagaggagtgcgggcggactacagccctggcggccgggaggactcgcaaaggcgccggggaagagggactggtgagtgcggaggggctcgcgtgctggcaagact

SEQ ID NO: 35869 - DNA, 409 bp, Homo sapiens
  chr1:75602818-75603227
  hyper
gctcctcctcggccccgctgtccccgtcgtcctcgccccggtccatggcctcgggctccggctgccctcctggcaagtgtgtgtgcaacagttgcggcctggagatcgtggacaaataccttctcaaggtaggatagggcctcgggtgcgaggcccaaggggagcgggcttagcgtgggagctctgggaaaagagtaatgttcctcccaccaacctttccgttcaagttctgggtgaaggttgtaggcttttgcagaaaatcagcccagtttagggcaactcatgcggtgggataaagtgagaagaaatcccagactcttctatgtcgttgcaaaacagctaatgtgtgacacatcctggtctggacgcgccggatgtgtgtggatgcgctggagtcagccactggctt

SEQ ID NO: 35870 - DNA, 577 bp, Homo sapiens
  chr1:76080388-76080965
  hyper
aaccccaaaggctcagtaagtcgctgcctcccaggtcattgggcccattgtgttgaaatccaacttcgaacgacgccccttccttgccaccatcctcaggtccagttcccccgcgcacagccttcctcaccgcgcatggtgtcgagcccacttccacctctctgcagtgctgcagacaacctctagggctctgcgagtcccccagcgagagctagggagccgacaagctgcgacctctgcgagtccgcgctgcgggagcgggtggcttgcacctgctccccgcgcgccggctctgcgacccctaggcaagacgcagcccaggaggctccctcccgagtcgcgccccggaccacgccgcaatgcctcgtcaccccagcaacaagctcttccttgtcctccccgccatcgcttctctccgcgaactttccaactttggaagcccgggttccaaaggagcaacagggagactgcttagccggagccactgcccgtctcgacaggttggggagcaggaagtagcctgcagggactcggccggtagcaagtccccttgaccgcagggaaaaggagaggcagc

SEQ ID NO: 35871 - DNA, 1185 bp, Homo sapiens
  chr1:76081200-76082385
  hyper
tgctaggagcccagtcgcttctctccccactgcccagaggctaggaggtgcaacagatagatacccaagctcgccgagtagcaaaggggtggggtgagagaggagtctccaggtttccccaggttgcaaaaggggcacaaactcctgtcagtgtccccggaggccaggggaggtgcagcggcgccgcggtttcccccaccccctccccggacacggcaaactcttccccggcaggagccttccacttggccgcgcctggatgtaaacaggccggcccgaggggcagagggcgggtgagagaggggaggcggcgaggggaggagggagcgggactcacccttgatgctggggggctttctcttcttggccatcttctgtccccttccctcccccggaccccccacgcgcttcctccggctgccgcgcagctcccaggcgagccctcgccgcggctctcagctcagcgagctctttgttgctgtgatggcatctgcgagcagcagcggcggccgggctgcgcgctcagctcggctcggctcggctggggcgggcgccgccgcccctctgctctcggccgcgccgctggcccccctcttgcgctgctgtggacgcggtggctgctgcggcggcggcggctgctgtgctgctcctgctgctggagggggcagcgctgggtcccctgagcgcccgcccagcgctgacctcccccttctccacaccctccctcccccacgcccccacccccggtgtcccgtctgagccgccagcccccatccaaccggctaccgcgccgtcatccagcagcctctactggaaagacaacggtggcggcggcggggagctgctggggggcgcggagagaccgcggccatctggggccgggaaggagaaagccaggcagagtctgatggagtctgcctccggcctgccttcctctgggccttcgaagccccctctcaaaaggccaggacgcgctgggcccaagaaagacacccgtcttcacaggccaaccagaactctggccacctgcgggaggacggcactgtcccttgcgacccggcccaggagccgtcctcctccacagcctcctcgaggatagcgagcccgaattccacgcgggcgatgagccccgaagcgcgcggttgcctctgcccctcccgaaccgagaaggaaagaggggagagg

SEQ ID NO: 35872 - DNA, 240 bp, Homo sapiens
  chr1:76251751-76251991
  hyper
cgcaggactttggacgcaggcagtgaggacacctatgagcgatcagtggggtcctacggcagccgtggaactgctctgccttgcaggcgaaagtgtggtcagctatatcggagcgcgatgggggcctgagaggcgcatctgcgcaggcgcccggctcctaagtctacccaggaactgaccctgctctctcctttccctgttagacatggtaagtgtgagtttagcgctgctgtccggatg

SEQ ID NO: 35873 - DNA, 850 bp, Homo sapiens
  chr1:76540051-76540901
  hyper
tgcccaaagtctccagaagggcgatgccaaacccactcaactttgacaaagtgtgaaacgtctgtaaaaaggagttctctgatgtgtgagaggagacggaaccgagaagaaaaggccgtactctgccccccgcgggacccaggtccccgcctgctgcagagcgcactctgcgcacgtcgagccgcgaaaggttcacagaagaaaacaagagaaagaagtagcaggcactgaggagccgccggcgccggcgcccaggacggcacgtgacccgggggcggggccgcgcgggccgcgggccagtggatggggacgggggcggggccgcggctcggggggcggggtctgtggcggcgcagcttacaccgcggtccccttatttggatctgcgggaatgtgggctggagaggtcctgccgtggtaccagcctccagcctgcccccaggactgcccctgacccaggcgcgcccgctgctcggtggcaggagggccggcggagcgccatggcctgcatcctgaaggtaacgacttggatctgtggctcggacgcgtggttggccagccccttgctgctcagaggcacggagtcagccgcggtcccaccgcatcctcatctcagttgtcttttcctggcattgattttctttttgttcctttggcaaatgcatatggagggagattctgaaacatgcagctggcacagcttcttttcccaccattcctgcctcctgctcgcgcctgcattgaaggagctgcagactgttggctccaggggagagcagggctgtgtgccgaataatggggatggtagggagaggaggggtgttcccgcgggtcccgcggctctgtggag

SEQ ID NO: 35874 - DNA, 457 bp, Homo sapiens; identical to SEQ ID NO: 571
  chr1:77332976-77333433
  hyper

SEQ ID NO: 35875 - DNA, 344 bp, Homo sapiens; identical to SEQ ID NO: 572
  chr1:77333579-77333923
  hyper

SEQ ID NO: 35876 - DNA, 217 bp, Homo sapiens; identical to SEQ ID NO: 573
  chr1:77334168-77334385
  hyper

SEQ ID NO: 35877 - DNA, 348 bp, Homo sapiens; identical to SEQ ID NO: 574
  chr1:77334408-77334756
  hyper

SEQ ID NO: 35878 - DNA, 46 bp, Homo sapiens
  chr1:77334795-77334841
  hyper
cgcgggtaccagcctgagcgttcctctgacccggaaccggagggtg

SEQ ID NO: 35879 - DNA, 30 bp, Homo sapiens
  chr1:77684950-77684980
  hyper
cacagccggcctcccggctgtggtcaaatg

SEQ ID NO: 35880 - DNA, 1504 bp, Homo sapiens
  chr1:77747293-77748797
  hyper
aggtttttcctgggagttcctcggagacccggaggtaaccgtgtatgtgcgtgcgagtgtgtctgtgtgcgtacaaggtccggagaagcgaaacggtcgcaggttcctacagaccccgaccctgttcccttggccacctggtccccggtagctgcatccctgggcggcgcacgcagtgaagcgtcgcgctctggcgccggtgccgcaccgaggggtatgactacgaccccttgcgcgtgcccgcccccacctccgcacctcgcgccagcccgcgcagcgtgaccggcagccgccgcagacccggctcggggaggcgcggagcgcggcgcgctgaaccggagaggcgggccggctgctgccttgcgttcgccacgctgtcctccctcctccgctccctgcgccccacccctggcggccgcgctgcctggcagcccgggaagccgcggcacagctgctcggcgcctgcagctccggctcgggggctggaaccgaagcgggggcggcgggagcgcggagaccacagcccccggggagaggcggagggggtccctggcctgggcggagaggctgagctgagtgcgcgtgagaaagagggctgcaccgctgctcggcgcggactctgccagccccagcttcagccccggctcaggtcgccgcagcccgggagcctccccgcttgcgccccaaggcacgcgcggcacagccatgaacaccaacgatgccaaggagtatctggcccggagggaaatccctcagctttttgaggtagggctagagctggccgacgggcggtagcatccggggactgcatctcaggggttcgggttgaggcagccgcgccccgtcccaccttccccacacggggcatgtaatgaaggggcttgtagaagcgcactcgcccgctcccccgagggtagtcgcctttcccgcgggttgccagggtccttgtcagaaggctgggcttagaagcctgcatctcacagatcaagtttcagtcttccagcagggttctgaaagcagcctgctcccatcgcgcccctcggatgtggacacccagggtgggctgcagaccgcggccgggccgcactctctgggggcgagggccaggtcaggtggctgcactgtcgcccagcagcgagtaaagactcgaaactgagggagccagagccctagtcactctgctggtcgagggtcggaacccctgggggaaagaggaaatgtggacgaaggcagcccttcctggagacagcttggaagagagggatgaagatgcaaaaagcaaaacccaacctatcaagtgccacctccccggtgacaggcccccagccttgctctgcgctttcgctgaatgaactcctgagcacgtttttcccgttgcctaggaagggttgggccgcaggtttcgccagtgctcgacaacccacctggagatagcgggtcggggagggagctgcgaggggggcggactcctgttgctcagtcttcagaccgcagcacagcatca

SEQ ID NO: 35881 - DNA, 30 bp, Homo sapiens
  chr1:78148589-78148619
  hyper
ctacataaacagagcgcagtgcgctgcccc

SEQ ID NO: 35882 - DNA, 30 bp, Homo sapiens
  chr1:78225421-78225451
  hyper
gaggggcagtgtcgcgtcaggagggccgga

SEQ ID NO: 35883 - DNA, 69 bp, Homo sapiens; identical to SEQ ID NO: 578
  chr1:78354048-78354117
  hyper

SEQ ID NO: 35884 - DNA, 779 bp, Homo sapiens
  chr1:78354190-78354969
  hyper
gtgttttggaacagctgcagccggcgctgggcccgcctggaatgcgggaacaggctgcacaccaggacttttatggaaacttgctgctggagacggcggcggcggcggcggcagcggcagccagaggactcccagcggctggagcagaagtgttagcggccagagctcccagacccctacccacagccaggcgggacgcgcacagtccctccacgcggaaagaagtaccttcgccggtcaccggctcctgcagggtgagaagagttgggggaacgtgggctggggggagtggagacggaggtgtcgggtcccctggtgggggcgggggcgggaacggcggctgcagagaggcgctcggggtctgcggcttctggccgtgctccgctgcagctccggagggcgccgggcgccatacagctgtggtccgcgctggccccggcccgggcgaaccctgccttggagccgcatcctgcgggctcggcggggtgcctaccaggggctgccccagggtctgaaagtgtcggccggccttgggcttctggttgcaatgtctttgccctgctcccctgcgccttgtcggctgagtttcgggtgcgttccctactgtagggagggagccctctgtgagcggagtgggtgccgatccctcggctgaacccttggggtccttagggaagttcagtgccgtcccccaccacttgccccagccgcggtctccgtctctgccagcagtgccagttaagaaatcctttctgatcggtctctgtggaagatgggga

SEQ ID NO: 35885 - DNA, 30 bp, Homo sapiens
  chr1:78444538-78444568
  hyper
tcgggattccgccgcgcggtccacacttac

SEQ ID NO: 35886 - DNA, 85 bp, Homo sapiens; identical to SEQ ID NO: 579
  chr1:78444894-78444979
  hyper

SEQ ID NO: 35887 - DNA, 30 bp, Homo sapiens
  chr1:78470625-78470655
  hyper
attgaatacagagacgctgtctgcttgctg

SEQ ID NO: 35888 - DNA, 818 bp, Homo sapiens
  chr1:78511527-78512345
  hyper
tggtgataggatgagggactacgtaactttctttctctccagatccatcccgggggaggctgggcgggcgggcggctgctccggtccaggggtggaggtcggggccctgacccgacgcagccaggcggaagcgcggctgccattggaggctgcttttacctgcgcggggcccggggcgcaaagtccgaggcgccggggggaggaggcggcggacggcagcgcaggtgggcccgcgctctcggccctgcaagatgcccctgaagctgcgggggaagaagaaggccaagtccaaggagaccgccgggctggtggagggcgagccgacgggcgcgggcggcgggagcctctcagcgtcccgggctcccgcacgcaggctggtcttccacgcgcagctggcgcacggtagtgccacgggccgagtggagggcttctccagcatccaggagctctacgcccagatcgcgggcgcgtttgaaatctcgccgtcggaggtaaggcgccaggtgctcaggctctcccgcctctccgccgcgccgcgccgcgccgcgcgtatttctgtgggcccaggagggttgagcggcgtttcccggagcgcgaaatccgatgccgtgttgagtccgccgggggcgtcccgggggaaagtgagtgtgccttccctggaagggaaaatttaacttggcaggaccgcagaaagtcacagtcccccttgctccgagatctggcctttgggaagcgggttgagggaggcaacctttcttccgcttgcaaatgtgtttgctccagatgtcccggattccgccggccgttcaaggcgtgag

SEQ ID NO: 35889 - DNA, 236 bp, Homo sapiens
  chr1:78956555-78956791
  hyper
agctctgatgcatccgagcacggtgccctcttctctcccagtactgctctgtgcccatggaaaagggggcggaggcgagagagaagaggaagaggcggaggtcactcgcgcgccccatccctcccaggctgccagcgcagctaggtgcagagggatcccaggagccgcgcgcgccccgcagtttccgcgctaagggaacgagtgcgcggaggggacgagcggctggaccacagccg

SEQ ID NO: 35890 - DNA, 686 bp, Homo sapiens
  chr1:78956874-78957560
  hyper
cgtcttctgctcctcagagagcccggctggcggcctgggatgacaaggtaccatccctccagaggctgatcccaatgcatcggcttcgcttatctagacccagatttaatcaactcaccccctgagacacccagccacagcttctgctggctgagcctgacactgagtttggaccagattccccaagctagggagacgcatagagaaagaagggtactcgagctaacccatccccattctgagctgctctgcgggggattgggtagaaagggtctcagaagagggaaatcggcacagattccgcttctcgccgttgcggggttccctgcgggcggcactgcgagttcctcacccgggcacgtcctcactccccgtgcccgggatgagggagaaaacagccctttggcgtttgagcaattgcagaaagtttcagcgagttcgttagtttggagggaatgttgcgaggccaggccgaagggcgggggggatagtaacgggcgaaagtcgaactgtgagtaagacctggagaaggcgaccgtcctgggggtagcctaggcagttccactcgggctgggcgcaggaaaggctggctccggaattcccagcctccgggaaagctagctgctcgggaaacgccaatcgaattagctcagagaagagtggccgtggccttgtgtatccagtgt

SEQ ID NO: 35891 - DNA, 87 bp, Homo sapiens
  chr1:81880256-81880343
  hyper
tgccctggacactgccgccgtgatacgataggtggcgctctcccctctgagtccatgtgaacgatctccgaacgtgctctttggagg

SEQ ID NO: 35892 - DNA, 54 bp, Homo sapiens
  chr1:82265930-82265984
  hyper
tttagctggctctacgtaactacaaagaaaaaaatcatcgcaatttaaaaaaat

SEQ ID NO: 35893 - DNA, 892 bp, Homo sapiens
  chr1:82266785-82267677
  hyper
gcttgggcgcacagccgcagcagctgctcaaatggagtggaaaacggccattgggcgacaatgagttatagattatctgctccacgttttgtacttagctgcctgtaatcttcttttgagtttgcccgagccccttgctggaaaactcaggagggagagatttgtcctttgacgctgtacacgctagtatgtttatatgattagcccaactggcggggagggcggatttgggggaaggaggaggaggaggctggaggtgactccagttcagacctcgcggagagtctgtgtcaggacttcgcattcccccgtctctctctctctccctctcgctccctctcactctctctccgctcacacacacgcagaggtgctggggcgaaatcgggagcttaccagagaattccttgggattgttggggggcatctcccctccgctgctgtgtgtggcgtggctcttcccggctactccttgcttccccgagcccgagtctgcgccgccagccttccttggggcagcggccaccgctcagccccggccgggagatccgaaatgtgaggaggggtcgccgccgcctcccgccccaggccgcagggtcggcgcgagggatgctattccggccgggcgctcggggggctgaggggcttcgcctgacaaactgagttggcctcgcgcccccggcgccctcccgcccgtcgcttcgaagggactcccaagtctgcgcacctctgtcaggcttttgcttccaccacccctttcgctctgattcccgatttttttttcctaagggagcgtgcggtctgggggtgtgtgcgtgtgtgtgaaagacctctctcgaagagcggcgtgtgggaaactgcgggaaaatgttgacttaaccccaggagccgc

SEQ ID NO: 35894 - DNA, 557 bp, Homo sapiens
  chr1:82267739-82268296
  hyper
cgccgtgtccggccggggagctgcggcgctgcctcccgcgcggactcggcggccgaggacccgctcgcggccggcctcggccctctccggccggggtagccgctgccctccgcgcctgtccccgcgcggcccccacgccagacggccctccctcggggcgcgctcgcagacggaggtaagagccgcaggagcgaacaatgtgcctctgtgcccagcttcggagacctgtttgctttgcgcctccagtccgggggtggatgctggaggcgcagggagccgcgggttaatggggctcggctgttgctgttcggctggcccagggggagacccgcgctcgctcgggctgctcgctccctccccccaatctcctcttggaaatcgatccgcagaactctcagtccggtccagccggcttctccttttctcgtggagccattgtaacgctctccaggcatcagtctagttgccgggggcgctggcaagggggttaggatgaggctcccgtagccatgcattttttaatttcataaaagcttggggtcgcaaggttccgcccg

SEQ ID NO: 35895 - DNA, 461 bp, Homo sapiens
  chr1:82268573-82269034
  hyper
tgtggtcgggccgccgccgggactggctacgattgggagcggcggggctgctgctgccagggcggcctcgtgggtcgggagggtgcaggggccggggacccggcgggccacggggagggcagagagcctcccggagccgcagtgagagggcagcagcgggccgcgttgggcctgcgggagaagttacggagtgtatgctgctggagtggctgtggggcagggagcctcgggagcttggtttgtgggatgggggtgccactggggagtggcgacgagagaaaggcgtgggaggagcgcgagggaaggggagacccccgcgctgcccgagcgtgggctccttgattggctggggcgaccctcaggcagagggggcgagggcgagccaaaccatggaagcgccccagcagtgtggaggtgcgcctgcgagacttctgcgcttgggacccgtaaagtttgttcct

SEQ ID NO: 35896 - DNA, 30 bp, Homo sapiens; identical to SEQ ID NO: 586
  chr1:82269243-82269273
  hyper

SEQ ID NO: 35897 - DNA, 34 bp, Homo sapiens
  chr1:82269507-82269541
  hyper
aggcatagatttaacggacgtagttgattcattc

SEQ ID NO: 35898 - DNA, 69 bp, Homo sapiens
  chr1:84326246-84326315
  hyper
gacaactgtcactcccaggcccggccactcgccgtctcagcgccccctcgcggcccttctctacccacc

SEQ ID NO: 35899 - DNA, 361 bp, Homo sapiens
  chr1:84326357-84326718
  hyper
cgtcccagatcccgccagggcccactcgggctccagccgctgcctgggacagccaaaggccggcccgggcggttcttccccaggtggtccggggcgtcccgggccgcactggcctggcccatgggccccgaagaaggcgctcacccaaggaccactgtccgagcggcttcccccggcccggcctggtgccgcgtccccaccagcccggggtggcaggttctactcgggaagcctgttttatgtcttctttcacgcccatatcacaccgacaagggtgaagctgtggaacttatacctcggctgggccccgccgccaactcctagggcacgggaactgcgcacaggccggggttccgcgagg

SEQ ID NO: 35900 - DNA, 1159 bp, Homo sapiens
  chr1:84543140-84544299
  hyper
taaccccgaggacaacgtggtgggctgagcgaatacctcaatgtgcgagagaacgaaaagctcgaaccacgaccgtgcctagggaccaggcttttcctgtggccgatgcggggcagatgcagacccagaggccacccttgcgcgcgatctccaacccgacggtgcggctcctctcggacctggagctgtggggagaaggcagccttttagtgaggagccgccgcgtggcgggacgcaaggaaaaccacccgagccgctgaacagtattccgcgactgcactccagggcaccgggaccgccagggtgaggagggactctgcgttctgcaaagctagcggttcccactccacctcccactatctcagcgatgggcacgcgagcgccagcccgggcgaccgcgggggaagaagcggtccacgccacctcaggcccccgccccaggctctgccagctgggggtccaccgcccgcccccggggtcccgggcctgcgcgtcacttccggcgcgcgcgcccgcctgcgaagatacagtcgggccagggcctggcctgggcgcgcggctgcccgggggcgcgcagagagggcggaccgcgcgaagggggagtgtctgcccgccgccgccactgctgctgccaccgccgtcgccgccgccgccgccgccgccgctgctgctgccggtgctaaggagttcgctggagccctttcctcagacccggcccggtcttcgcgcccggactcctggcgccagcgctaggcgcactcaccgctctgacgggtgcagacgcgggagttgtcccagactgtggagtggcgggcacggccccagccccccttcccttccctgaccccttcttgccatcgccccagacatggggaacgcggcgaccgccaagaaaggcagcgaggtggagagcggtgagttgaaggccgggtctgggtatccgctgggcgggccggcgcggggcaccgagcgccctccgggtcgcagcttctgaggccgcgggcacgggccaggcctagcagcggccgccgggagtcgttctggggggccgggagaccagctgcctttctcctccattccgaccccccagctccgcgttgagagctgaacgcgaagggccggatgtggggatcctgggaagagcgttccctgggattcc

SEQ ID NO: 35901 - DNA, 100 bp, Homo sapiens
  chr1:84544390-84544490
  hyper
cctgctttcccccctcgccgactctttgggagctacaggtagtgctgtgggtaaggttggctcttctccctccatcacttgggtccgacccaaccttatc

SEQ ID NO: 35902 - DNA, 30 bp, Homo sapiens
  chr1:84944961-84944991
  hyper
accatggcgaaagccggggataagagcagc

SEQ ID NO: 35903 - DNA, 30 bp, Homo sapiens
  chr1:84972302-84972332
  hyper
cggcgtgagtcacccgcacacccccgcccc

SEQ ID NO: 35904 - DNA, 30 bp, Homo sapiens
  chr1:85039791-85039821
  hyper
aggaaggccctcatcgagtggtcaaagctg

SEQ ID NO: 35905 - DNA, 57 bp, Homo sapiens; identical to SEQ ID NO: 589
  chr1:85040190-85040247
  hyper

SEQ ID NO: 35906 - DNA, 30 bp, Homo sapiens
  chr1:85156619-85156649
  hyper
ttccaggagagccacgtgcgtttgccaaag

SEQ ID NO: 35907 - DNA, 316 bp, Homo sapiens
  chr1:85358276-85358592
  hyper
atgttatatccctaggcttcacgagagaaccccagtttcctaatcaccatcgatggcaatgagactgagtttggaaagaaccacgtgtgcaaaggcagacgcaacccgtgcggcgctctcctggcctctgcgcccagcccgccagccctcagcagcggacgcaacgccgattttgcatctagattgctttttgctcctagcggggaaaaaggtgggaaaagagcaagttgtgccatacacccgccgggagagtcttgtcccggggtttggagtgggtctggagcccaggcttgcacgccaggcaaccccgaaaagc

SEQ ID NO: 35908 - DNA, 456 bp, Homo sapiens
  chr1:85358751-85359207
  hyper
cgcatgccctcggggtcgagcgcgacggggcgaccgggcgccgggctccagccgggcgcggagaagcagcggaggacgcggcgggcgggcggagcgcctcctctccagcgacccctgcgacgcgtccagagccaaaggaaagtttggcggtgcgagggagggacctagggacagcggcccctccctgccccgccccgccccgccgggtgcgttcgacgttcccactggagagcgtccccaacctgcaaggccgcgagctgcgctcaaaggggcccgtgcgagccgcgggagggcagcgctcttgcagacgcgttcctgcctgggatcgtccccaggtgggtggtcggccggccccgagagggaaaagcgcccactaaaggaccgctagtacccacaagcctcacggagccatacctcggagctccgtattagaacgcagtccctctgcccctctgt

SEQ ID NO: 35909 - DNA, 30 bp, Homo sapiens
  chr1:85462468-85462498
  hyper
gactcctcacctgacggttaacctgaaaac

SEQ ID NO: 35910 - DNA, 172 bp, Homo sapiens
  chr1:85462938-85463110
  hyper
cggaccagcctccccgcgctcccggagaagggggtcggcgacgcggaggcggggtgggggccgtaggggatggaaccgaggcgcgcgcgagaagagccgaggaagtaagcagtcccaaaagggggcggcggtggggcccccagggaggcgtggggcacgccaagggcgccgt

SEQ ID NO: 35911 - DNA, 30 bp, Homo sapiens
  chr1:85464095-85464125
  hyper
aacagacaatcggtcgccgttcgtgaatct

SEQ ID NO: 35912 - DNA, 30 bp, Homo sapiens
  chr1:85513581-85513611
  hyper
gctgctttcagccagcgcagcgacccgggc

SEQ ID NO: 35913 - DNA, 198 bp, Homo sapiens
  chr1:85527760-85527958
  hyper
tgtgaggcatggaccgagcctgttagacctggggtcaggccgggccactgtcattaatatacttaagacacaaaactctttccttggtagtggaaagctgctggcctcacccggttcgcgttgagtgacgtcacatagtggcaaccaatcacaagtctgctttgaaagatactgttagggagcggacactgtattggt

SEQ ID NO: 35914 - DNA, 162 bp, Homo sapiens
  chr1:85666111-85666273
  hyper
tcttgactgtcactgccggcggcctgaggaaggaggggccttcctggcggtctcctttgccactgcgtatcacagaggaccccgctggatccctgaaagggcttcccgaggagcagccgtggtccttgcagcctggaggctggaggccggtgggtgcagccg

SEQ ID NO: 35915 - DNA, 312 bp, Homo sapiens
  chr1:85666851-85667163
  hyper
tcgtagtagtcggcgtcgtagtcgtcttcgtccttgtcgtcttcctcctcctctccgctgtcctcggagccctccggggagtgcggaggggcgtgagcgagcccatggctctggggggcggcctcctgcccgccgcgcggccgaggcccgagcgcccccaactgctccgggtgccctccggggacccgcgccccgggaccccacgcctcaggtgacggcgagggctgctgtaggctccgcccgtgtcccccggcgtgctcacgtgggagggtgtctgcggcaccccaggcgtctcccgcggctgccgaagag

SEQ ID NO: 35916 - DNA, 30 bp, Homo sapiens
  chr1:85667776-85667806
  hyper
ccgccaccgctgcacgaggtgtgtcttagg

SEQ ID NO: 35917 - DNA, 30 bp, Homo sapiens
  chr1:85724687-85724717
  hyper
cttggaggcagcaccgcaggcacttcggcg

SEQ ID NO: 35918 - DNA, 364 bp, Homo sapiens
  chr1:85773952-85774316
  hyper
actcagtaaggagggcccaggcgtccaaagcccaccagggggcagcggcggcattcttagccccacttctccgcgctcaaaggccggctgagaaaacgcgagtgactacccgagggcgctgttactccacaatttttctgcaaaagctaaggtcggcaaacatggatattcggatttccattgtttttgaggctaaatcaaaagatgcctctggggaaaaggggcaacatgcactgtcggatcggcattcatatggaaaaacagaggtaggaaacattttatacattttgaagatactttgatgtgcagtaattttgaaactttcgtagggcacctgtttttcaatgggcggtgtagagtaatg

SEQ ID NO: 35919 - DNA, 1012 bp, Homo sapiens
  chr1:85929934-85930946
  hyper
gggcaccgacaccccgttaattcatccagcttgtcctgctccgagcgccaggcaggacttgggggcttcggtgtcacgactggcgctgccccctggagggacgcccagcctccacccgccctaccggagcggcacccctcgcggccctcgctccctgggaaacactcagagttgcactgtcgtcgctgccgtttaattttcacaaataaaaatgcccgtgagacggaatcccccgcccacccacctgcccgagaccgtacaaccacattgaatcggatcctccagaaggctgccggcagccgggaggtgtgaacaatgaacttctctctgactctctgacacacacacacacacacacactcgccccccgacgggaagttgtgaactactagcccgagggccaatggcgcgactccccaggcaacacggcggccggcggcgggggagggcctggcgcgcgccccggccgcgcccctcgagtcggcagttacctccttcctccggctcggcgccccgggtcgggtgatgagggccgtctcctcgcacaccacggccacgtcctccacgaagacgcagtccggaaggctctcgtcggccggcagctccaccacctgcagccccagcttgctgcccagcacgcccacgtagagctggtgctgccgttccgcgcgggcgacgtccacctcctcgcccttggcgcttctcagcgcgtgctggccgagcgactcgggtagcgcccgcaccacggcgtgggtggcccggccgaaggcggcggggtggccgagcccggccatggcttcgggaggcttaggggcggcggcggcggcggaggcggccgggtcctgccgcgggcagcgcgcgctgagcctgcgagcgcccgtcggctcctcttggcagccgctgaatgtggtgcagaaggagcccagctcgcgcccggagccctgcccgcgcgactgagcatgcccagagctccgggcgccggcccgcgcgcatcccgcgcgcccactccggc

SEQ ID NO: 35920 - DNA, 30 bp, Homo sapiens
  chr1:86042134-86042164
  hyper
aggccaggagaaaccgagagccagctttac

SEQ ID NO: 35921 - DNA, 150 bp, Homo sapiens
  chr1:86045826-86045976
  hyper
acactcctcttccccgttctactctttcaacagataacttgcctctcaccttcgctgtaaaaaagcaaacagctcactgccttcccgggtgagggcttcagtggctgcccggtcaactcgcatcaccaaacaaaacgacttttgttcctc

SEQ ID NO: 35922 - DNA, 203 bp, Homo sapiens
  chr1:86046413-86046616
  hyper
tataaaaggcgggctccggggcgcctgggcagaccgcgagcgagagcgcccccgagcagcgcccgcgccctccgcgccttctccgccgggacctcgagcgaaagacgcccgcccgccgcccagccctcgcctccctgcccaccgggcccaccgcgccgccaccccgaccccgctgcgcacggcctgtccgctgcacaccagct

SEQ ID NO: 35923 - DNA, 193 bp, Homo sapiens; identical to SEQ ID NO: 599
  chr1:86046830-86047023
  hyper

SEQ ID NO: 35924 - DNA, 190 bp, Homo sapiens; identical to SEQ ID NO: 600
  chr1:86047064-86047254
  hyper

SEQ ID NO: 35925 - DNA, 1373 bp, Homo sapiens
  chr1:86621178-86622551
  hyper
accagggcatccagccaaagccgcgcaacccctggtccgagcccttttcccagggaaggcatgggagcaggtacagcgcccaaaggggaggtggggtgcccgtcaggacccgcccaaaacctccgcaggaggggcaggcccgcccccgtgtcctgctcccctccccagtccccgccgcgagtgccacttccccagtgacagggcaatgatcagggcgcagcctcggctcggatgggcaacgtttgttggccttctaaccagaggggattgcctctgagcccgtgggtaaaacaaccccccgacgcccgaggttctgcagccacccccttccccccgctggcgacccttcctcacgcctgagtccagtggtccaggctgcgcacactgaccctgggggacctctagcgtcacagcaatcgccaggctggacgccctgagaagcacctcggggaagcaggacctcgacagggccctgcgggaggagaaggggaggagggcgcgagggcggcgggagctggagccagagagatcgtcggagcccagctctggagcttagggagccgctgccctggacctcgggactcgcgccagcgagcttttcctctcgagccaaaagatcgctttagcataaactgtctgagatctgctggcacgaggcatcctttcaaacacggtattttgcaagctgagaagacaaggggaagataccgcgggtactcggccgctcctaaagccaaaaagtgccaaggagccggacttcagatctccatcaggctcagcagaaccagggggtggagagaggggttggtctaacccctaccctacccggcgggtgggctacttacgtttttgccgtgggggagacttttccacgccttgttctgtgggctcttaaatgcatttgtatgcatttgtccgtgcagcaaagcgctaacggaaaacagaagccaactctgaactgcttagggtgcaggtactgtccatgaaaaagggaaaaaacaatcacatgaaaaccatgcttcaaacccgcaacaagaaaaaaaggaggggagggggtgaagtcgggaggaggtaggaaatagcacccgaaggggaggacaggcttcctagctctctggctcggtaacgaacgagcccagggttgcgctccccggggagggcgggcgaggaggtaaacctcactgggaggcctcggggcgccggcggcagcgggagccgggctgctagtgcagcactcaagttcacttgcggttcaaaggcgactctgtgactccagtggagtcctctgctttgggcctgggaggagaaaggggtgggggtagggaaggagatgaagtgggggaggaagtccttggaaacagcccgcgcccgaa

SEQ ID NO: 35926 - DNA, 30 bp, Homo sapiens
  chr1:86861424-86861454
  hyper
cccggtcaggacttcgttctgcacaagccc

SEQ ID NO: 35927 - DNA, 30 bp, Homo sapiens
  chr1:87170609-87170639
  hyper
aagctggcggccgacgcaggcaccttcctc

SEQ ID NO: 35928 - DNA, 30 bp, Homo sapiens
  chr1:87380171-87380201
  hyper
aaccaagagcgaagcgcaggggctcttccg

SEQ ID NO: 35929 - DNA, 348 bp, Homo sapiens
  chr1:87617582-87617930
  hyper
ttgcagttgtgaaatttcactcggttgattcttgtgagaaccgaagtttgttttaattgtcaattaaagcgaatggtgcttgggtccctgggatccagggaacctcagggcggtgctcgcctctgcccggcagcgagagagggacccggtgcgggcccgatgacagggtcgaccgctgggggtcaggataagcttgcagagtggccccgccgccgtcctgaactttctcgggaggggaaggcggctgtgtacagaacagcacgccctgggaagcaaaggcctgtcggagaagttgatgaaagatgcaccttaggtgtccccgagcagggccgccggcctccccagagg

SEQ ID NO: 35930 - DNA, 128 bp, Homo sapiens
  chr1:87793798-87793926
  hyper
tccccgaggggcgagcgggcgcgggtcctcagggtccccgtgcgctgagaaggcaggtgaggccccgccctgcgtctcgactccggatcccgggtcgcgaagggcagcccaagcgggtccccggcccc

SEQ ID NO: 35931 - DNA, 243 bp, Homo sapiens
  chr1:87800821-87801064
  hyper
ccttcccccacccccggctcccgacccctcagctccacccaagcgccccaagtagcttcggaaactccgtttctcttcctcgaaccgtctttcctccacccccacctcgggcccgaagactggcgcggaaagtgcagcgagaggaggaagttcggagaccggcgggtggggctccaggtccggggagggcgaggaaacgcgccggaagccagggtggcggtcgtcggctggccctcgctccct

SEQ ID NO: 35932 - DNA, 30 bp, Homo sapiens; identical to SEQ ID NO: 603
  chr1:87907740-87907770
  hyper

SEQ ID NO: 35933 - DNA, 311 bp, Homo sapiens
  chr1:88928296-88928607
  hyper
cgtgattaaccgcgccgaggactgcagcaggcggcggcgctgccctttctctgcgtgtctctgggcgcgtcctgcccgctccccgcgccgcccgcgctcctctcgccgcagctgccgctggggctgccgcgggcgccgctcagccggagcgcgcctccgcccggcccgcccgcgccccgcagcagcgcgctcgctccttaaccacttcgccgctgcctttcgtcggggccgcgagcggggcgacggccgcccagcgcccctggcacccctgatctccagccggggctcccggcccgcgccttggtggctgg

SEQ ID NO: 35934 - DNA, 30 bp, Homo sapiens
  chr1:89149699-89149729
  hyper
cctccccagagactcgagcccagtcctttc

SEQ ID NO: 35935 - DNA, 30 bp, Homo sapiens; identical to SEQ ID NO: 605
  chr1:89356949-89356979
  hyper

SEQ ID NO: 35936 - DNA, 30 bp, Homo sapiens
  chr1:89357182-89357212
  hyper
cttcacggcgactgcggtgcccgcaacaag

SEQ ID NO: 35937 - DNA, 30 bp, Homo sapiens; identical to SEQ ID NO: 606
  chr1:89664392-89664422
  hyper

SEQ ID NO: 35938 - DNA, 30 bp, Homo sapiens
  chr1:90098324-90098354
  hyper
cctccctcagagtccgccaggtgggcgtct

SEQ ID NO: 35939 - DNA, 614 bp, Homo sapiens; identical to SEQ ID NO: 607
  chr1:90098723-90099337
  hyper

SEQ ID NO: 35940 - DNA, 30 bp, Homo sapiens
  chr1:90229080-90229110
  hyper
ctgcagaggcgtatcgccagccacgacaag

SEQ ID NO: 35941 - DNA, 173 bp, Homo sapiens
  chr1:90286175-90286348
  hyper
atcagagttttagtcgacgggacagcctccttcgcccaggacgggtgaaggctcctgaccatgcctcgcagctaactggcagctgcgcctgcccggcaccgagccctgcccaggtggacgcttgcgagagcattacggcgatggttatgtaggctgccgttcttcccctccca

SEQ ID NO: 35942 - DNA, 46 bp, Homo sapiens
  chr1:90287492-90287538
  hyper
agcttgtttggaggcgtgggctcttgggagcgggacttctgctcaa

SEQ ID NO: 35943 - DNA, 30 bp, Homo sapiens; identical to SEQ ID NO: 610
  chr1:90308584-90308614
  hyper

SEQ ID NO: 35944 - DNA, 768 bp, Homo sapiens; identical to SEQ ID NO: 611
  chr1:90308852-90309620
  hyper

SEQ ID NO: 35945 - DNA, 30 bp, Homo sapiens; identical to SEQ ID NO: 612
  chr1:90461125-90461155
  hyper

SEQ ID NO: 35946 - DNA, 213 bp, Homo sapiens
  chr1:91170440-91170653
  hyper
actcaaaataataataggagacgggtaagaggaaatggataacagaagtttgggcccggctctgcaaccaggcacgcccaggtagctgccactcaatggctgaagagaaggcaatgggagagcccctgcaatcgcgcagccagccgcgagggtagtagtcacgtgatgccgctggctagaattgtttggtgcgaacatctggctcttggtggt

SEQ ID NO: 35947 - DNA, 1059 bp, Homo sapiens
  chr1:91172188-91173247
  hyper
gagcaagaacccgcacggagccggcgcgccgcggctgggcttcaaggccgccgcgccaaatccctggctgcgacgtgtatgcgaatcgttaggaggaggcgggaggacagccacactgagggcctcttcactaaagaatgaagtctgacggcgggaatgggggtgggtgggggcgggaatccatcagctccacaaagtgacagggcccttttatcgtaaatcaagttcaatctcgctctcgcgaaggtcctcttttttcggcggagctcccgcaggggcgactcgctgtcccagaccagatagtagcaagagctgggagagacccaaatctgcagggagagggcgcgggctgagagccgcggtggggagcagggcctgggcccagcgcgacctgcagggctgctgcctcgggagcgcttctgctctgcctgcggtggccgaggcggcggctcgccgagcgcgctccgagctgtgcgaacagaggaagtatgtgccagttagaagggttccgccggccacctcgtcgcagccgcggcgcaaggtcttggagccgcagacctgaggcccggctcctccctcctcggcttccactaagaacttattaaatagggacgattcacagttgatctgtcactgagcactacttaccccgagatctttgggtttttgaattactttattgatctgaagattttgttctttggaatgtgaccctgtttggacttagagctaatcaggaaacgctgccggggaggttgctttgtaatcactttgcttacctccccccgggcgccgccgacccttcctagacgcctccgctgcggccgcctaggcttttacccggaacccgccagcccaggttacctagctccacccggcgccctgggagctgtctgtggtgctagcacacagaaaccgggagcgggagacccagtggacaaggagaggagagaggagacaaactgagaatgtaaggttaaccgagacggtccacccagcaacactcaaactgacaaagaccttcaaaattcagccggaaggaccgggggaaatagtccc

SEQ ID NO: 35948 - DNA, 109 bp, Homo sapiens
  chr1:91176449-91176558
  hyper
gggggctggacgcccgccgccagggactgagaaggcaacgatcaaagccgccacaagggtttgttagctggccctctccaagtcccccgggggcgtcctaattgctcgt

SEQ ID NO: 35949 - DNA, 30 bp, Homo sapiens
  chr1:91176795-91176825
  hyper
gcaaagttggccgccgacttagccagcacc

SEQ ID NO: 35950 - DNA, 230 bp, Homo sapiens
  chr1:91177941-91178171
  hyper
ccgtggatgagcacacggggcaccaggggccgctgcagctggggatggggtgctggaggagtccggtacatgctgctgtacatggcagcggcagccgccgccgccgtagtgctgtccatgctgcccagcaggcttgggtgatagaaataaggcgatggaaacatcctctgcagcgccgagtagttccctgcctcggccagcaactccaggcccaccgctgtctgccgctt

SEQ ID NO: 35951 - DNA, 30 bp, Homo sapiens
  chr1:91179609-91179639
  hyper
aagcaaggacatttacgccgaggctggtgg

SEQ ID NO: 35952 - DNA, 210 bp, Homo sapiens
  chr1:91180138-91180348
  hyper
gcagccaggtccatgcgatcctgcacgctcaggtacttctgccgctcaaagctacgctccagttgattgagctggtggtcggaaaaagctgtccttgcttttcgaggcttcttggctctcacagggggactctcacggctactcgtaatctcccggtctccttcctcctttgtccctaccatagaaacccagccacggtggtaagttagc

SEQ ID NO: 35953 - DNA, 481 bp, Homo sapiens
  chr1:91182127-91182608
  hyper
cgtggcatttgatgtcgctctgggaatcctcccgcttgtcgagtttggtcttgctgtcctcctgctcgagctttggcctgaagctctcgtgcactgcgttgctctcctgcttcggggtgtggtggggagaggatacgctggtgctgtagggtgcacatgccgccagaggtttgctgtcgcccaagatgtccttaattaaaaaagaagacgtggaagtcctgggggccgaggcggccgagcccagctgctgggggggcggcggcggcggctgctgtggcggcagcggctgctgctgttggggcaaaggctgcaaactttgcgtcggggccgcggccggcggcggcggctgctggctgtggtggaggtggtgatgatgctgggtcgcgtctgctaccagatgcggctccgggggctccatggtgactgagataggagaagaaggcgccgtccctacggtatcaatctccgaacagggagatgg

SEQ ID NO: 35954 - DNA, 108 bp, Homo sapiens; identical to SEQ ID NO: 616
  chr1:91183087-91183195
  hyper

SEQ ID NO: 35955 - DNA, 360 bp, Homo sapiens; identical to SEQ ID NO: 617
  chr1:91183250-91183610
  hyper

SEQ ID NO: 35956 - DNA, 741 bp, Homo sapiens
  chr1:91183775-91184516
  hyper
cgagtccagtggtcccggtgtccacaatcacgagtgcgaggcaaagggagagggaggaagagatcagagggagaccagagaaagggaaccaaaggggagaaagaaaaaaaaaagtagcaaggattcgcccgttttcttaagtcagaagagagagagaagaggacgggaagggacttacctttaggctccagcgcggcggccctcgcagcctccccaaacgcgcgcgggaatagtccgaagacattaagagcggaggaaggagatccctgaaggaatccacagaaaagtgtgtcacttcaggcgccggagccttgcataagcgggcgggtcggctctgggctctgatttctcgcccgacgaacccaggcgctcgggctcagcccggcgggaggcggatccctgagagggacacagccgggtccgcgtccaccaggcgctctcggggaggacgaggcctgaggctccaagctggggaaccagcctggtctccagctggaaaaaatgcctggccagacgctttctcccgaacgggggagctaatgcccgaggcgttctctggtggcgagggcagccacggttcactgcggtgtcgggcgggcgcggggctcaggacccatagcggctggtctgcagcccgcgcccctgccgcgccccgcggcagtccgtccacctctgtcccccggcccctttcggcgagcgctcatttggaaaggaaacagtcactgcggatccacttgggac

SEQ ID NO: 35957 - DNA, 30 bp, Homo sapiens
  chr1:91184755-91184785
  hyper
atgaatctgcgaggcgggcatcgcttccgt

SEQ ID NO: 35958 - DNA, 40 bp, Homo sapiens; identical to SEQ ID NO: 619
  chr1:91185268-91185308
  hyper

SEQ ID NO: 35959 - DNA, 166 bp, Homo sapiens
  chr1:91185347-91185513
  hyper
cgggtgactgggccccgccgggtggggtcgggccactgtaggctggagcggggttggatcaaatgcctttggcgcgggaactgagtgctggcccgggagaccctccggagagctcgcgggctcggcctcggcctcggcctcggccttcggccgcggttaccgaaac

SEQ ID NO: 35960 - DNA, 340 bp, Homo sapiens
  chr1:91189124-91189464
  hyper
aaattgaaacctccccgccccgttttctgcctttggtgcaggcggggccgcgttcccagataccgtgagaggccttggggcgcggaggttgggggcagcctcggtcagctttctcagtctctcccaggtctacagaatacgccactggacaagtgcctaagcagcgacttctggtccagacacaccgcccggggagtaagtagttgcgtcgaagaacaactcattcagcagcagttaacaccgacgtttcctcctagaaagagctcccgcaaagcggggggatgtgacctgtgggcccccagcaggggtaggaggcagttcagcccgagagggggcgctc

SEQ ID NO: 35961 - DNA, 30 bp, Homo sapiens; identical to SEQ ID NO: 622
  chr1:91189724-91189754
  hyper

SEQ ID NO: 35962 - DNA, 226 bp, Homo sapiens; identical to SEQ ID NO: 623
  chr1:91190088-91190314
  hyper

SEQ ID NO: 35963 - DNA, 30 bp, Homo sapiens
  chr1:91190564-91190594
  hyper
gggagccgcaatctccgcgcggtcgatggg

SEQ ID NO: 35964 - DNA, 85 bp, Homo sapiens; identical to SEQ ID NO: 624
  chr1:91190863-91190948
  hyper

SEQ ID NO: 35965 - DNA, 250 bp, Homo sapiens; identical to SEQ ID NO: 625
  chr1:91190984-91191234
  hyper

SEQ ID NO: 35966 - DNA, 309 bp, Homo sapiens
  chr1:91191289-91191598
  hyper
cgcggccggacagagcccatcagctacaacgcggaaggcctctgcacccccttgggggcgggaggaaagtactgccagtcctgcctgggggccgagggtaacaagcaccgagcctctcgctccacgcagggccagctgcccagctcagcgaagctcttgtgatctggtgcgtgtctctcgctcttccctccccatcaaagaagtaaactttctacctactccccctaatccgatcgtttagagctgctgttttccttttgtcagattcctcctccccgatcagtctgagtacacgatcagaactgctca

SEQ ID NO: 35967 - DNA, 30 bp, Homo sapiens
  chr1:91192010-91192040
  hyper
gactgcaagcaattcgtcaaactgtgcaag

SEQ ID NO: 35968 - DNA, 136 bp, Homo sapiens
  chr1:91192435-91192571
  hyper
gtggggcaaggaggccgcggaaacgcggaacggcttcggggagacggaagcgcccaatgagattcaccctgcagcccgggtccagcccaccttcctcggagattgccgcggccctcgaacccgggcctaggtcttc

SEQ ID NO: 35969 - DNA, 136 bp, Homo sapiens
  chr1:91194580-91194716
  hyper
ttgatgtgatatgaccgtatcagggaaacaaagctaagtgcagtcaggatctgttagtacagtggcttttgatggaacagctgaggcacacatcgcccgtggcatggactccggggccgaacgctcacgaccaaga

SEQ ID NO: 35970 - DNA, 203 bp, Homo sapiens; identical to SEQ ID NO: 628
  chr1:91195143-91195346
  hyper

SEQ ID NO: 35971 - DNA, 208 bp, Homo sapiens
  chr1:91195986-91196194
  hyper
aaactctcccccacacccaggcgcgcgcacgcacgcgggcacgcagcagcgatggggatgtaggtcaccccgcgggttagggccacgcgcccgcactcccgccgcagccgcaaccgcagccgcagccgcagccaacgcggccgcggagcgacgcagtccgcagcctcgaatttccagaaattccagcactggcagcagcacgtctagt

SEQ ID NO: 35972 - DNA, 201 bp, Homo sapiens; identical to SEQ ID NO: 630
  chr1:91196225-91196426
  hyper

SEQ ID NO: 35973 - DNA, 1199 bp, Homo sapiens
  chr1:91316201-91317400
  hyper
tggactaacagcatgtattagcgtgacagagactaaaaagctaagaaccgccgtgcgatggccggctttgggcaccgggggtgggggctacgctacgcgtgaagggcctcagtcctcgggctttagttcaggaagaaaatgaaagctggaggtctcgtgggcgggactggaggcggccagataggcaagaacccgcaacaggagtagggacattttttcttcaaattccaatcccatccagcgatagacaggcgcgtgggtctccctcctccacgaccaccacacaatggcacacacttttgctggaaactgaaatcgaagtctctgaggcaggctggggcccaggccggcagcggggaggggcagggtccagccacctcggcgtggccttggcgagcgctccggggtcagaggccgtcgttctcgccgcgctccacagcgcgtcacccgctgccctagcgacccccgggcgaccccggcatcgcctggctgcgccgtcccggcgggccggccctctccacgccctctcctggggtttgcggtgggcacagctccctccagactgggtctctccactagcctcctccccaactgcaacgtgggaaccagagctatccgagtcacgagccccaagtgcacacaaagcccccaacggggccacggcgcctccacgcctcgctacctccagctccaggagcgcagaacgcagcgccctgggtcaccgcgtctgccctgcggagcagccccactgaggggaagcctcgggcaggaggtgagaccccgcgcacgcaagcacccccgccccaagcagggccctctgcccgagggagactctcacctcaaataaacgggcgctgccgcctccagggggaggacagcgggcggagaatactcacgctgggcccagccgcgcggggacttcgctgggaaccacgcgcgggctcccgccggggagcggagccccagcctgcagtcctgcgcccgccccagcaccgcctcctcggaagggaggcctctaccgtccggcggcggacctgcagccgccgcgggagacgctgccccgccccccggccccgcccttcggcccatccccgccccgctggcctccttttcccctgccccctccctccgctcctcaacgcccgccgggtgcaatctgctctctccgggagacgaacgcgaagcgacgtggaaaccct

SEQ ID NO: 35974 - DNA, 30 bp, Homo sapiens
  chr1:91487021-91487051
  hyper
gtgcattgcaatggcgaccgccaggctccc

SEQ ID NO: 35975 - DNA, 30 bp, Homo sapiens; identical to SEQ ID NO: 632
  chr1:91869999-91870029
  hyper

SEQ ID NO: 35976 - DNA, 118 bp, Homo sapiens
  chr1:91870347-91870465
  hyper
tcctcacctccctgcggacagctcctaggccagtcgagcgccgatttatcagcccctctgaggaccgccaagcctggctaagccgagctccaagcaatggatcgcccaagcccccaac

SEQ ID NO: 35977 - DNA, 30 bp, Homo sapiens; identical to SEQ ID NO: 633
  chr1:91904864-91904894
  hyper

SEQ ID NO: 35978 - DNA, 141 bp, Homo sapiens
  chr1:91966292-91966433
  hyper
gctggccaaggcggcgggaagaaaccccaccctcttgcgcaaacgcccagtagcggaatccgcggggtcgagggctttagtgtgcgcatgtgcaaccagagcggcggcgggaagtgttgcgcaggcgcatccgatcgactc

SEQ ID NO: 35979 - DNA, 30 bp, Homo sapiens
  chr1:91966640-91966670
  hyper
aagtcgcgcgcctgcgcactaagcatctgg

SEQ ID NO: 35980 - DNA, 98 bp, Homo sapiens
  chr1:92350626-92350724
  hyper
gctcacagcaactttacggggcaagtactactatcctcacttcacagctagggaaatggaacggttttcttcttccagcttttcgtgaggacaccaaa

SEQ ID NO: 35981 - DNA, 31 bp, Homo sapiens
  chr1:92351055-92351086
  hyper
aacaaaccattcccaccgaagctgtcacgcg

SEQ ID NO: 35982 - DNA, 280 bp, Homo sapiens
  chr1:92351378-92351658
  hyper
tgcagagcccacagcccgggcgggctgcagcgccgcggggctgggccggcacgtacctcggaggcggtgtgtccagcggagatccacccgcagcaagttggaggaaagcggcggcaagtttccccgcccagcgctcggcggcggcgagctccggcagctgctgcgccgcggcaaaactacgccatccggacccgctggggactctcacctcctgcagggagctccgggaatcgcgcagggaaagtggccggggcgcgagagccgccgactgccctccttc

SEQ ID NO: 35983 - DNA, 503 bp, Homo sapiens; identical to SEQ ID NO: 637
  chr1:92495399-92495902
  hyper

SEQ ID NO: 35984 - DNA, 30 bp, Homo sapiens
  chr1:92545647-92545677
  hyper
ctcgcccagtctttcgttggaaaaaagtgt

SEQ ID NO: 35985 - DNA, 239 bp, Homo sapiens
  chr1:92546025-92546264
  hyper
gggtaggagccgagcgttcggtcggaaacgcccccttcttcctcctgggcggggcaagtgaggccaagtactgggcctccagggcgtcgtacctctgtgagacatggctcgctgtggggaaggcagtgcggcccccatggtacttctggggtccgctggagtttgcagtaaggggttgcaaaggaaggggccgtgtgagcggcgccggctgaaggcgacggtgtcggagcagctcagcc

SEQ ID NO: 35986 - DNA, 144 bp, Homo sapiens
  chr1:92764407-92764551
  hyper
agcaccaagtccgccgcggctcacggccaaccgcgagccctggccaccctgaacctctccacaactccacttaccggccagaaccctcgcctctcccagccgccgccacctcctccggcgtcttagcccgctcttctggccccg

SEQ ID NO: 35987 - DNA, 30 bp, Homo sapiens
  chr1:92764818-92764848
  hyper
caggtagagtaggccgaaagcttcccaccg

SEQ ID NO: 35988 - DNA, 36 bp, Homo sapiens
  chr1:92946277-92946313
  hyper
gtacagcaagcccgccgctgccgtgggcctctcata

SEQ ID NO: 35989 - DNA, 60 bp, Homo sapiens
  chr1:92946604-92946664
  hyper
ctgggcttcgtccagcgatgggcacattgacttctccgaggctgtggaggcacaagggga

SEQ ID NO: 35990 - DNA, 924 bp, Homo sapiens
  chr1:92946768-92947692
  hyper
gtgcgccaggtgccaggctcgccccagggtaaaacgtggcccgggccctggggcctcgcaggccactataggaggcagaacagtaaacagatcattgaaaagacctcgggagaggaggtcgtaaattctgtgcgagtgcagcggaggcgctcggcgttccgaggatcttttctggctggacccgcgcacctggagatcctacagggaagggcgcatctataaatgcccgtagttgagctgttaagaaggagaaggtggcggccgttcggcccctcacagcactcaagggcggaagggtccagccaccagcgcaggcactctcccagcccctacatgttcccattcaattctttttcttcccagaatccaagaggaaggagggagaaggtccataaatgcggccccgaactacccgaaaggctgctgtctgaataaacccgaaggtattaagatttcacgaagttaagtgcccagtgtacgtagcaaaggagcagcaggaaaggggcttttgggcttaaattgacagccaaatactccccattcctgttacagtttgatggaggcggggaacctgaatttctcagagaataactataactcataaggtttagccaccacctgcaaggagacagctctgaattctcggcctgctacgcccccacccacgtgaattttgctaaaactagtgaccccaacgcatgtgagtgcatacggcatttacaaatgtgtgtgtgtgtgtgtgcgcacaacactccagttcaggctggccacttcagtgagaggctgtacccggagtttcgttcggaggggttcggggcgcgcccaatccttgtctggccacttgacgccctggcaggaagaatcctcccgccgccggctcccagacacacttgctggagctatggttttcgccaagtcaactca

SEQ ID NO: 35991 - DNA, 1365 bp, Homo sapiens
  chr1:92948264-92949629
  hyper
gccggatgcctccttcccctacgaatcagctcccttctcccggaaagactctccaactccccgttagcatttctacgcccaaggtcgcgccaattcccccccagcactgccgggtccctgcagctcccgcccaagaggttcccagtgggttcctacctggagacgcggagggtgacgggggcctccagaagtcctcaaactccgagctccgttcgcagacgctgccttcgcagctgtctggggatgcggaggctctgtctggggcttcggtcagctgcgattcgggggacaaacggtcccggggctccgccttcgccccgcctgcatttgaagtgctgtctgcaaagaggaggcaggtgaggggctcaggctgggaccggttgagtctgagggtgctgaaggctcccccaatcccccgaccagggcagccgagcgtcttcccctctccacccagaccccggccgggaaccctctcggatccgagggcaggcgcagagaggccatggcacctaggagacaaacccggaggaaccaggacagtaggaaacaaaaacagcagcaaaagggacgttggggcagcccctcccagctccggactaatggtgtgccgaggtgcagtaggcatccgggggagcagccccgcctggcccgcgcgcgcctcgcacctgctcggctaggcgccggtacattctctaaacggagggaatagtctggtcctggggagcgcggctggtggtagctgtgagccttcttgcttttgacgagaaatgagcgcggcatggtggtccggcactttccccactgcgccccaagagtccctggagccgctgtcacccacggtcactccgagggcttgctcagccccagcccggaggagacctgagagggaaagaaaaccaggtggagacgtgggtcagtactctccggtgcggcggactgggcacccaggcggagggagagcgcgggccagggaggcgcgcagagggcccacgggaggaggggcttgaccctgctgcgccgcgcttaccaggtggcacttggacaggtggcgcgaacccgccgtcgttgccgccgccgccactgacacagctcagcggtaaaacctgtcccggggccctgtctcaggcccctttcctcctccctgcccacgccccccagctcctcccctttcctagcgaagctcgctccggcaatcaaactccctggagagctgtagttcccatcgggtgggttaccccaactcagctactcatcgcctgcctggctgtgctttacggctggcgagggagggcggggacacgcggatcggtttaggggccggggatgcccagtggtcgaggacccggaaggggcaaggagccaaga

SEQ ID NO: 35992 - DNA, 2763 bp, Homo sapiens
  chr1:92949853-92952616
  hyper
ctcactagtgccccacgtaggagaaactttgcccttggactcccggctgcggcgggcaccggtcgaggctgcggcgagccatcccagaccatggagacctaacctcgggaatcaggtcccgggaaaaaagcactttccgttctgctcaccaaaaaatcttgtcctagggaggtggagcccgatccacgaacgttgactgggaaatgctaggtgtcccgagtcggtagtgcaccgacaatttagcagacaaaaaagacaggacgccagagcgcgcaggctgcattagcagagagcgggggtcgggcccgggcccgggagggaactagctgcccggggcgtcgctctcattaacccccaatcagttcacctaataccaggtcgaaatctgagcgcagcgggagggcgtggctgcgcctgccgctaggctccagccggctccgggggcggtaccccacagtcgaggtggtctggagtaaacgaatctgccttcctcccggggtgaaggcgatggtgaccgggttcacacgtgagctgcagtacagcagttctccgtggcctcggctggttcagaaacgagggtgctgggaactctgggccggggcaggacctgcagtcctccggcttcgcgctgtttccactgccggactaggagcccctcggcttcctaggcaagatgcaggccacacagtctacgtctgtccgttggcgctctcagctcaaacgagtcctacaggccttggtccctgtagggtgcaggccccctgctccagatccccagccccattgtgtccccttctccggaggaatgggaatagacctgggagaaaagacgcctgggacgtgtcgcggggctcccgcgaagtttcccgctacccaagcgccagaatgcccctaggggtgagagtgccatccgcctccctccggggtggctcctagggctagagctttgtcgcttcctgcacttctcgtccgtacaattagacgccacaaaccccaaacccaattctttaaacagccacgaaactcggaagaaaagaaaaacggagtggcgttgtcccgagggtcccgctgcagcttggacccacgttggctgggagcgggacagatgggggcggggtaactgtcagcgccggagctgggtctgggctggcgccaccagagaccaggcggacgcggaggccgcctccccacccgggctgtaagcccacgcctctctcgcaccccggcccgctttgctggttcctgtggggagcgacagagtttggaggagataggggccccggggcctgggccgagcgcgtgggaaggcaaccccgcgctgcagctggcgcgggaggtggggcggcccctccgcgcgctcaggcctctcctcaccgtccgggcccaggaaggagggagccgagggcgctaagggggcgtcctcccgagcgcagctgccgccgcctccccaccagatgtttccttccctggtggatttggctcccctgccgaaccaccagaccgcctgctgcgcgcccccagctccagatttccagtcacactgcgcgggtcgcgccctaacccagctgccggagctctctgggctcccgcacggcggtccgcagcaggtgggaaaccgcccgcgccctctgatcgcccccgcagtgccagtgctctgcgagtccccgcggccgcccccaccagggcaggaggcgcagaacaggctcggcggacctacctgcggagtcacggcgcgggcaccgcgctaggagagttttcaaacggaatcttgctttcgggagagaccgctctatctctctgacttaaaaaaaaaaaaaattctccttccgagctcagcccccaaaaccacaagcttcacttcctgagcgttactgagtcgctcgcatagccctcccagacctgctcccaacccccgtcgggcggccgggcgcgctcctttgcgcaagtggccaggcggtggggggcctggcctttccagcccgtcccgcgcgccccttagtagtcctcccagttctctccctgtgggtcggcaggggatgggggaaattggaggtccggacacttaggcactagaaatgacttgaaagaaaatgaactattcttggctccagggagacttccgcagcgagagaagccacagattgaggacacagattgactggcgagagaggggtggggggcgccccgctccgaggaccctccccgcccctcaggcctcggtcacccgccccccccacccccgaccccgccgcctcctagggctgcaccacccccgggtcgggaccgtgaatcaccggcccgcggtgccgccggcctggagcccggcgagtggccacggcgtccgcagagcgaaacctgccccgcaggccccgaaatagcttgttgtggaaacacttggggataaatacgcccaacgaggctgaaaataccttgacacccaatccgagaggtttgctcatttcccttcggatttaggtaatggttaaatttggaagaggtgggcgagcgccgagcccccggcggagagggccctggcggcgcgtcccgcgggcgcccggcgggaccggtgggcgcaccctccctgcgcggagctcgccggctctcgaccgggtccgctcagccttcgactaatttccggtggtcggagctgcaaaattaaaggccgcgcgggggcagcgccggcggctgctaggctgactccgccctgccggggcaagccagggagagcgggacctcgcacgcgggctctgccaccgcctgagg

SEQ ID NO: 35993 - DNA, 428 bp, Homo sapiens
  chr1:93250630-93251058
  hyper
ctccggggtccggcccggccgcgtcaggagagcccaaggcgcaggcgcgggagggccttaaagagacccggcagcctctaccgcagaatgggttggagcaggttaggggccgggcgggccggccgagaaaaggagaaggcgaagggattggacggagtgcagaggaggcggggaaatcgctctcgccctccgcctctctttcaaagcaccagccttcagtcctgcaagtcgccgacttccccggccactggaaccgccccttccatgttaaaacggtagaagacacaccccctcgggggcccgaagcgaccccgagcttaggactgcaggcctcgcgctgccgcaccgacgcggagcctgactttcagggccctggcacgcggtgctgacgcgcatgcttcggaaggcagccccgagctcccccagag

SEQ ID NO: 35994 - DNA, 30 bp, Homo sapiens
  chr1:93544519-93544549
  hyper
cagggaaaagaaatcggcccagcaagatgc

SEQ ID NO: 35995 - DNA, 30 bp, Homo sapiens; identical to SEQ ID NO: 643
  chr1:93645945-93645975
  hyper

SEQ ID NO: 35996 - DNA, 160 bp, Homo sapiens
  chr1:93646314-93646474
  hyper
ctccgagttgtgtccgaggcttccacgcgcaggggcccgggaaagggtcagaggcttcctaacgcagactcgagtgcgaagcgcgcagtcgccgggtgggtctctccccagcgacgatttgggtggtgagcgactgcgccttggcgtggggaaaccggct

SEQ ID NO: 35997 - DNA, 30 bp, Homo sapiens
  chr1:93811316-93811346
  hyper
gtgcttgccaggaccgtagcaggcggaagc

SEQ ID NO: 35998 - DNA, 30 bp, Homo sapiens
  chr1:93811862-93811892
  hyper
cagttaggcgacagcgcccgcccctctgag

SEQ ID NO: 35999 - DNA, 1012 bp, Homo sapiens
  chr1:93913453-93914465
  hyper
cctgcaggaggagactcgaccagcgagaggggccagcgagggtgaccaggtgcccgcttggggaccccgccggcggtggccaggctagcccaggtcctccccgatcccaggatgcactgcgccccgccccctccccgcgccgcgttccgcctcccctcggccccggccccctcccgcccagcgcggggaggcggggacgcgtcggcggcggaggcttctccagtcgcgtctttctcactcactggggagcccggcggtggcggcacctttcgaggtagacccgctgagctgctagcccgccggccagcgagtgagaggtcggacagactgtggagccgacagactgaaggacagcggcaccgccagacggccagaaagttccgccatgagctggggcacggagctgtgggtgagtcggggagaggggcgccccgcacggaccccggcccctgagaagcgcgggttgggcgggcgccgcggaccctcggcggtgaaagcgcgctccgccgtcctcggtccggcgctggcggagggtgagggtcccgctcgtctttgtgtgcagactcctcttcccttctcggccgggggtctagggggccgctagtccgtgctcccgcctttgccgccgtggtgcagctcgggcggcgcccgggacggccgggggagcagcccgcgggctcctgcgtgcgccgtgatcccctcttgttccttctccctcctccaccttcacttttcccgacgcctggcttcgcgcccggcggctcctctcttcctttgtatctctcctcccggaggcgggggagggggcccattgtccccaaggggcgctgttcgagggcggggaggggaccggccgcgattcctcgcccgggccaggtccgcggggctagggcgtcgcccgtctggggcggcgccgcccagagccctcgccccaggtatggggacccaggcggctttgttcggagcccggcctcgggccagccaggcccagcccacacgcacatttctctct

SEQ ID NO: 36000 - DNA, 144 bp, Homo sapiens
  chr1:93914735-93914879
  hyper
gtgtctggccaaggtacgggcggagggtaataggtcggagaatttgctcctggcgccggcgcggaagggtcgaggtgtggagggcagtgatttctcaggtgcggagggcagtgatttctcaggtgcggccgggagaactggggg

SEQ ID NO: 36001 - DNA, 30 bp, Homo sapiens
  chr1:94146690-94146720
  hyper
ggcttccaccagagcgctctgggccctcgc

SEQ ID NO: 36002 - DNA, 202 bp, Homo sapiens; identical to SEQ ID NO: 648
  chr1:94312191-94312393
  hyper

SEQ ID NO: 36003 - DNA, 30 bp, Homo sapiens
  chr1:94344644-94344674
  hyper
actttcagccgacgcggcttggatgctggc

SEQ ID NO: 36004 - DNA, 30 bp, Homo sapiens; identical to SEQ ID NO: 649
  chr1:94374253-94374283
  hyper

SEQ ID NO: 36005 - DNA, 657 bp, Homo sapiens
  chr1:94702420-94703077
  hyper
agggcaggtgggagcgggaatagaatccaggcaagaacacagacccatagtgatcaggagcacggattccggagcaaaagcgcctgggtttaggtcctgacgctgccaaccactagtctgtgtgcttgggcaggtttttaacctcggtttccccgtgtgaaccgagtcgaacaatcatggagtgttctgaacattaaaagagttaaaatgtgcaaaggcttcagaacagcaggcggacccgttgtacgcgctgtgtgctaactttaattacgatcgtcaccgtctgctcccggccaccgctggcgtcctccccagctcgtccgcgcctccctcgccgggcgcgcccctagccccggccggacccttcccgtggactccagtcctggctcgaggacacccgtccctagcgcagcctgccaccgcttccactcggggccgccccgcgggcctcccggaccctggacggcaattcgcgggcgctcgcgcgggcaaccccagcccggagccacgaccgccgcggccggagcaagcgccacctcctcacactcaccacggcgctccatctcgcgtgccggacgcggacgcccgccccacacctacggccgccgccaccgccgagggctggagctcgctgcccccatcccccacggcctgcgg

SEQ ID NO: 36006 - DNA, 425 bp, Homo sapiens; identical to SEQ ID NO: 651
  chr1:94703103-94703528
  hyper

SEQ ID NO: 36007 - DNA, 287 bp, Homo sapiens; identical to SEQ ID NO: 652
  chr1:94713017-94713304
  hyper

SEQ ID NO: 36008 - DNA, 121 bp, Homo sapiens
  chr1:94884614-94884735
  hyper
gtctaagtcacttggacgaggtttggctcgattcccgactaactgctattgaaagtcgcgagggtggcttctatgaaactattcccggtccacttggcaggattgccgtctaaagtggtga

SEQ ID NO: 36009 - DNA, 874 bp, Homo sapiens
  chr1:95006823-95007697
  hyper
acagtccaattactcggacaccccgagcaaaactctccagcggaaggggcagcggggtctggggcgccaactccctccctgcaactcccgccggcgcccgacggactcggttcattcaagccgggctgggtgagcgcagccgagtcccgtaggcgcgggggacaacatgggcgccccggggaaccagggcgagcccgctgccagccaggactgtcgcctccctcctgcgtgtggcgcgccccgggcttccaggggctggtgccactcacctgaagcgccggccacctgggcgaagacccagccgagcaggagcgtccgagcgacggcggtctcggggcgcgggacccggggccaggcaggggtctccatgtctaccagttggcggcgagatcgagcgggttccgtggcgcccgtggggctggggaggttgggctgaaggcgccctgggccggccagagggagtgcgagggggtgcggggagctcgcagtcttggggagccggtgccccgcgcgctataaagggccggcggcgcgctctcccgcgcctctgcccgcccccggcgcccgcccccgccgctcctcccgactccccgcccccggcccgggtcacttgccgtcgcggtgggcggcccccggcgagtccacacccctgccccgcctcctcccggtaggaaactccgggaccctgcaagggatgactcaccccagtgattcaaccgcgccaccgagcgcggagctgccctggaggacgcaggcgggtctagttgcccgggtcccccaaggcccccggattcacccaggcccgcgactccgacgtgcagcttaggtgggttgcaggtctatggcaggaaagggagggcgccttggaagaatt

SEQ ID NO: 36010 - DNA, 106 bp, Homo sapiens
  chr1:95008026-95008132
  hyper
gttggctcaggcatcgcccggtacgaccagagatagtgactgaggaagagcagcctcacatctggcagtttgcctctgggagaattccagcgtgacatctgcagct

SEQ ID NO: 36011 - DNA, 668 bp, Homo sapiens
  chr1:95285586-95286254
  hyper
tgctcagggcagaggccgaccacccgcccaaggtcgtggcggcgccggctcagctttagtcgtcaaagtgcacatcctgggagccgctgcctcgaggtggttgaggcgagagggcagggaagcgtctgagcctcttcctcccaccagagcaggaccccagctgacagcgggtgagctgggcagaaacccatgccgggaagaggcggacccagtggaccgcagcgcccgcagtcgccgggccaggcgcagaggcgaacgggaggcggcgctgcaccgtgcccgcccctccccggcccggccccggctccagccccagccccagccccagccccggccccggccccggctcgcgggcgctgcgtctccgcgtacaggaggcggcggcggctcccagtcaccggcccccgccggcgagcgcacgatgcactgcctgggcgccgagtacctggtaagcgctcgcagcctcggccctcgggggaggagccccggggaagggtcgagtcccccgccttcacgcaccttccctgccggacgcttccgcctttcccgcgcctcggggatcccgcccccgcttagtaccttggggccacctggcggggaggaacctggaccctgctccagtgctggggcggaggcgggggagacgcgggccgcggggcgcaaacttg

SEQ ID NO: 36012 - DNA, 239 bp, Homo sapiens
  chr1:95391394-95391633
  hyper
gttctgtgcacagttccgcgccgattggctggtctctccccccagaaacccctgatgtcatgggcttggaatgcagggagggaggaaggaaggagaggatttggggagggggacgcctctcatctctttcccaggccaaaagtcctaaagataaacctaacgcattcttgggctcagtggcaaagctgagcgtcaccaaatcccaatcgctccaaactataagccgcctcagcaaacaa

SEQ ID NO: 36013 - DNA, 996 bp, Homo sapiens
  chr1:95391846-95392842
  hyper
agactgtgatgggtcccggaccggcttccgttcctcggggcccctggggtcggcgggacattaggcggtctctctccccgtggggaggcgcggagtccgccagcacccggggcccgggcagatggcgggggctgcggcagcggctcgccgggtccctggccgcgcagacgggctccgcctaagggcgagtggccacgcaggagcgcccccttcccggagggcgcgttctgcagtcaccaaacggcccccgagacccccgcagccggaaaggctggcgccgcgggactccaggcgcccgggaacccaccgccagccactagtcctgtcccacggcgcgggaacaaagccaggcgggtgcccgggagccggccccgcaagcccggggactggacgcgaccgggacaggcagagacgctcgcgccgcctcgacggcccctctccaggaaaacggtgagccacagcgcgaagagcaaacgaagcacggcccagcgccaggccagcccaagggtgccccgggggcccccgcgcccgcccgagccaggcgtaccttgttcttgacttcggccgagagcccataggaagggcccttgttgaagtgggtcatggtggttcgggcggcgggaagagacagcgctggggtccggggtctctcgcacttcgcttccccgctcctggccccgaggagtggccgccgcgggggatgctcgaactccctcctctgggaggcgcaggagacggccgcggggcgcgggcggtgcctgggcgactgggtccaactgggtgctacagagcctcgagctccgctgcgaagcacccggctgcctcgctcgccgcccgcacctcggttccccacaggccgcccccgcctccgcctgggccttcgaggattggccgccgggcccgaccaatggagggccgcctcctcccgcctctgcgccgaggggcggtgcggccaattgaagggccgcgggggccgctttccctcccgctccctcc

SEQ ID NO: 36014 - DNA, 53 bp, Homo sapiens
  chr1:95392887-95392940
  hyper
cggcggctaggcggccccgcccccgggctaggcagggcgcctgggggcttccc

SEQ ID NO: 36015 - DNA, 205 bp, Homo sapiens; identical to SEQ ID NO: 661
  chr1:95428538-95428743
  hyper

SEQ ID NO: 36016 - DNA, 122 bp, Homo sapiens
  chr1:95538360-95538482
  hyper
taacgtccatggaacgaagcactacccatattcgcaggattaggaaaaccgccacagctcctgcggccgcagctagaacgagaacgcacaccatgcagagaaacggcgcatgcgtccaactt

SEQ ID NO: 36017 - DNA, 30 bp, Homo sapiens
  chr1:95582314-95582344
  hyper
caacagaggggttccgggtgtaggtgtagt

SEQ ID NO: 36018 - DNA, 827 bp, Homo sapiens
  chr1:95582741-95583568
  hyper
ggatctctccgctgcgacttcgggtgttagggtttttgggctctttccgggacccaagttccagggcaagaaggtctgctcggcggcccgcctcggggccccgcccactttggccagggtcggagccgcccggagcgggagccggagcccgagcggccgcggcccctttaaggagcagctctgcggtaacccgagcccgcagtccgggcgggcgcgacggccgccgcggtagctggagcctccgcgactgcacctccaagcggcccggaacccgcggcttccctggctcccgtgagcatctcaccgggcggcactggccagcgccagccctcgggccggcccggatgagcagactcctgtagacacccgccgccctctcccggctcggcgcagccgccgcccgcgcgcgactcgccccgggacccggcacaggtgacgccgtttggagggggggttggggaggaaggcgggcttgcctcgccccgcggctcccccgcgccagccgccaagcgcagcccgcggagaggggtgccgcggcttcccgcccctggcctagcgcggccgagagctcctgcgcctggaggctgggtgggcgtccggcgcgcgggaggcggcccggggctcccgggcgggctccggcaggtgtgtgcggaaggctcagcatcgtccccgcccggcgggccacggcgtcgctccgggagcaaatggtgtcccggggcccgcggcccccgcgccgcccgggcgccccgcattcctctcgcgtttctcgggctgcacgattccggctgccctgtctgcctggcggtgcctctcgggtctgagcttaa

SEQ ID NO: 36019 - DNA, 30 bp, Homo sapiens; identical to SEQ ID NO: 663
  chr1:95699559-95699589
  hyper

SEQ ID NO: 36020 - DNA, 247 bp, Homo sapiens
  chr1:95699850-95700097
  hyper
gggaggtgctgagccgctcaggtgactacccgcgcgcgggagggacagggcgccctcaggggccacccgcgttcgctttgcgtctcctccccaccacggagcctgggcaccccgcctgggcccacgtatggggaccgggttagttgaatgatggaatgacacgcccggaggccggagtggtgtcgcagcgggcgggagtgtgaggcgaccccagaaacactaagagagcggcgcggcccactggggc

SEQ ID NO: 36021 - DNA, 30 bp, Homo sapiens
  chr1:97187304-97187334
  hyper
cgcctcggcaccttcggcaatttccgtcgg

SEQ ID NO: 36022 - DNA, 20 bp, Homo sapiens
  chr1:98386546-98386566
  hyper
gccaagtgacagcagccgga

SEQ ID NO: 36023 - DNA, 310 bp, Homo sapiens
  chr1:98386618-98386928
  hyper
cgcggggcggcaacgcccccggggcggggctgcgctctcggtcctgcggctcccgcgccaggcacggcagccgcagcccggccttcccagttcagcccgctccgcgccccagcctgcaagcagaagggagggagggagtagagcacccgctctggggactggcctttaatctctaaactgctaaaaacagagctaggcaggcggggccagataggagggatccccaggcaaaggtaaaagcagtccgcgctccaagcaacaacttgcactttttcttttcttccacagaaaccccgcgagatgtagatac

SEQ ID NO: 36024 - DNA, 1008 bp, Homo sapiens
  chr1:98510915-98511923
  hyper
tgtgccacactgcaaccaatccggttcccatcctgtttctccaccccttctcggagaatccgaaaagaaaatatgcgttcctgagagacccgccacacttccgatctggaagttccgcggggacccagcccccgggcccccgccccctccccatctcggccgccaagtctggttgcggagcagcgcggccggccgggggtggggctccggcaccgccccgggctcgggattcgcgaagtcacgcgcttccgcaggcttgcgggggcaccttcgcccacggacacgccctttctgcggaggcagcccccagcgaccctctgcccagcttcggcgcctcactcgcgacgctcccaaactgctcaaggcctttcagtcgttcccaactttagaaaatcgccccgtccgcgtctctccctccagccgcaccccaccgtggagaggagaggagcggactgggaacgccgaaccgccccgcaggctcggggaaacggacccccttccgctccccgcccatccccttcacctcgccccccgccccctgcgcgaacccattttccagtcctggtcaccagaggcgcagcgcacagcctttccggtggaaccagtgcgaaaacacccgaggaaatgaaaagaacaagaaagtgctaccttggcaaccacgggcgtttagtggccagctggtgggctggggagggcggccgctgcccccctgccgctggtactctcctcgactacgcgtattcttaagcaataacaacgtaatccgtattatccacccaagaatacccgtcaccgaagagagtcagaggaccaagctgccgctgccgctgctaccgctgccgctgctaccgctgccgctgctactgccgccgccgccgccaccagaactcttgctgctcgctgagcccgcccctgcctggggatgggctgagcttgaccgggaccataaatccataactcgatttccctaaagaaggatccaaagctgtgctcggctgcttcctgccc

SEQ ID NO: 36025 - DNA, 178 bp, Homo sapiens
  chr1:98514267-98514445
  hyper
cggaacaatatcagcggaggcttaggtccgcattaagtacctttgttcatcgactcctgcaagccatgtttattagaatctacatttctctcgcgccccaataactagaggtgtgttttgcgggcagggggctttcagcaccttttgatctctcaaggccaccgcgactgattgacgg

SEQ ID NO: 36026 - DNA, 276 bp, Homo sapiens
  chr1:98515026-98515302
  hyper
ctgcttcttctctccgagtgccgggttacagtgttaacaagccttgggaagggacctcggcgcctcgcgctggctgtgccccagtgccttcgcgtggtggcggcttgctcatgcttccgaggagtcccaggcgatagccttcagctgatgcgagcttccagaaaggagtggggaagggaaaaaatcatctaatgcaatcaaatcgatctgatctacaccatctgtcgcctgccactatacacaaacgttaaaataggaaaacggaaaacactgaca

SEQ ID NO: 36027 - DNA, 937 bp, Homo sapiens
  chr1:98519026-98519963
  hyper
ggtcccgaaaaccgccggaggccaggtgtcgcggacgggccccgggctaaactctcgtctggcgaagtgaagagcgcaaagtctccaggcccagcgcgccttcgcggggcaggccggacaccctagccccgggccgggctcgctcttctctgaagccctggagcgggcaaggggcaccattctggccacaggaactctagtttcagcagccgcagcccgccagcgctggctcggaccggggcctcctctgggagagtaggagagcgaaaaaatcaaccaccaccttggatttcagatcgaggaaaggaagccaaagcaaaggtgtggttacacaggacatccatagacaaatcgttgcctctctaagtgggcctgagctttgcggctccagaagcgcgaggcgcggttggtgcggacgcgggggcgtgggagtcatcgctctccccgcagccctggccgagctctctgctgtcctcccgagtttgggccagagaccacggctcactccctaacgccctcgcaaggacggctgcccgtcgggccaagggcgccccgggctggaggccggagcaagacggccccgcgggactcgggagccttggtaaggcggaggctcagaccccgttcacgaaaacgcctggctcctccaggatttgtcaggtcttaagcagctccgagaaggctccgctggctcttggggaaccccgctgtgcggctcacccccgtttgtctctctcaagctctcgccctcctcccctggtcctcccttctccagatcccctgccctgcccgaggtccgggccgcgcgggctgagcccaatacgcccggagaagagcgccggagccccctgctggccggacgcggcaggcgcggcggcccgctcggtcccctccgccccgcgggctctgcccagcccggacccgcctccaccctcca

SEQ ID NO: 36028 - DNA, 969 bp, Homo sapiens
  chr1:99127041-99128010
  hyper
aaccctttctccaacgtagccggagtccgagagtcccagttccgcccctccagcccgccccaggccaggtggggatgcgcccggcccgggccagcgctggtcccggcagttccgcgtctgcgcagcgggcgaggggctggagcggggccggccggggaggtgcaggagacgtgggagccaatgggcacgctcgggggagccgggctggcggcggcggtggcggccggctgggcgcgcactctcgggatggagggcgagcgccgggcatcgcaggcgccctcctcgggcctcccggccgggggcgccaacggggagagcccggggggcggcgccccctttccgggcagcagtggctcttccgccctgctgcaggcggaggtgctggatctggacgaggacgaggacgacctggaggtgttcagcaaggtgagggcggcggcggcgagtcccgggaaacttccaaggcaactccgggcgttgccagcattgcgccgacggctgcctctggcgcgcttgccctcccggggcggtggctctgagctggggacgagtgaggtcccccgggctgctggaccccgcctgccagctctggccgcacccggggccgcgtcgcctcggggcctcaaaccgcagccgctccctcctccgcactttgaccttccgttcggcggggctgtggcttagtggagtctgcaaagttgtgatttgttttccctttctgcttctctgacacagacatcttcctcgcggcagctcccgaacctgggaggctggtggctcaaaaccgctcccgccagctgcttttcgggcgaggccagccctgaactctgggagagcagccaagtttagagaaattattcttaatttagtgttgttgcttgtggatttgagacttgggtgagtctcgggtcttgtgggaataggttctaggaaatctccctgaacaggagaaaacggttgtttctaaca

SEQ ID NO: 36029 - DNA, 285 bp, Homo sapiens
  chr1:99469776-99470061
  hyper
ggtgtgggggggtgacgtgtgggaagagctgggggcttccttcgcacccaccctcacgcgccctagaatgtcctctggggaaggggctgcccataacttggaggaacttagaaggcaaaacctactgcgccccaacccttagaggggcctcaaccccgaaggcgaggggcgagatcagggactcggcgacgagggcgagcgcccccgggcttaccacgagcacggggaccccggcggccagcgagtagaggagcacggggggcacggcgctgctgtcctccgggc

SEQ ID NO: 36030 - DNA, 318 bp, Homo sapiens
  chr1:99470211-99470529
  hyper
cgggcagcaggggcatgcacgcctcccgggccgggccgagccgagccgagcgggcggtcgacgcggtgggccccctccccggtccgccgaggcagccaccgggggcgcggcggcggaggcggcgggaggacgaggcacgggaggcgggatggagccgctggaggaagaggcggaggcaggtccgggcttcgaggcgccggcaggctgcagaggaggcggctacccccggacgagccccctctcccctgcccgccccctgcccgccgcaagcgccgcccgccccggcgcggggtcgcgagggagggcggggagtcccgg

SEQ ID NO: 36031 - DNA, 385 bp, Homo sapiens
  chr1:99470582-99470967
  hyper
cgctgggtcaatcccccaggctagcccggaggaggcgctgcgtgggcggacggggcggcagccggcgggacagcggcacctgtacccctcacagggcggacgctgtggggctggagaagctcctggcgggggtaaaatcaaaagggggggaggggaggcagtagagatggagcttccagaaactcttccgaggcaccagctgagaggtttaagaaacccgcacaacgcctgggaaaatggtgcgtggacgcgtcttccgagcgcaaagcccaccaaggcgcaaagtgccgatgcggcgcccagagtttcaaccggtgcgttcagcctgcatccctcgaattccttgacccagcccggggctggagcctggcggtggtttctaggc

SEQ ID NO: 36032 - DNA, 33 bp, Homo sapiens
  chr1:99730206-99730239
  hyper
ccctgcttttatttcgtcgaggtgagttggccc

SEQ ID NO: 36033 - DNA, 41 bp, Homo sapiens; identical to SEQ ID NO: 673
  chr1:100316317-100316358
  hyper

SEQ ID NO: 36034 - DNA, 82 bp, Homo sapiens
  chr1:100435243-100435325
  hyper
tttgcccttccttacgcagtggacaccttggcaccctctgcaaacagacagtcccgcagaggccctcgacgagtgtcactcc

SEQ ID NO: 36035 - DNA, 30 bp, Homo sapiens
  chr1:100435536-100435566
  hyper
ggaccgcgggaacccggaaacgcctgggct

SEQ ID NO: 36036 - DNA, 139 bp, Homo sapiens
  chr1:100437130-100437269
  hyper
gggattacaggcgtgagccaccgcacccggcccccaatatgattctttcttttttccttttattaaacaagtattacttttttccacatatcctattttttagccaaactagtcgttaattagacgtccagtttctgaa

SEQ ID NO: 36037 - DNA, 189 bp, Homo sapiens
  chr1:100503349-100503538
  hyper
ttaatagcttaggacgtctgtttccgtgagcaggtaacaactttttgaaacaaattccctcatctgctgaagaagggggacaaaaacggcccctatcgcccagaaccgttgcgaggatttagctagctggtgacgccggagcacgaagttgtacaggtagccagcagcacccacgcgagcccgcggtta

SEQ ID NO: 36038 - DNA, 37 bp, Homo sapiens
  chr1:100503798-100503835
  hyper
ggaagaagaagaaacgggccgcgaaccgcagtatcat

SEQ ID NO: 36039 - DNA, 30 bp, Homo sapiens
  chr1:100504484-100504514
  hyper
ctggggcctacattcgaacctgctagtttt

SEQ ID NO: 36040 - DNA, 30 bp, Homo sapiens
  chr1:100598363-100598393
  hyper
ggctcatgttggctcgctgcctcggctggt

SEQ ID NO: 36041 - DNA, 30 bp, Homo sapiens; identical to SEQ ID NO: 676
  chr1:100731519-100731549
  hyper

SEQ ID NO: 36042 - DNA, 30 bp, Homo sapiens
  chr1:100731841-100731871
  hyper
tctgaactactgggcgggagccaacgtctc

SEQ ID NO: 36043 - DNA, 30 bp, Homo sapiens
  chr1:100817026-100817056
  hyper
ttgttcaaacagtacgtagagcctcgcaga

SEQ ID NO: 36044 - DNA, 66 bp, Homo sapiens
  chr1:100817824-100817890
  hyper
cagcaattggtggacggcaacaaagccttagcaaccggctcctagtgacccgcggggcgcctggta

SEQ ID NO: 36045 - DNA, 30 bp, Homo sapiens
  chr1:100818192-100818222
  hyper
tgagagctggtctgcgtttcccaggcgcgg

SEQ ID NO: 36046 - DNA, 30 bp, Homo sapiens
  chr1:100925335-100925365
  hyper
ctaaaaccaatctctcgcaaaaagcactca

SEQ ID NO: 36047 - DNA, 277 bp, Homo sapiens; identical to SEQ ID NO: 677
  chr1:101004539-101004816
  hyper

SEQ ID NO: 36048 - DNA, 992 bp, Homo sapiens
  chr1:101004842-101005834
  hyper
cgctgggggcagctaccgcctgctacggggtgggctgctgggcctcggactcacggtgtccctcctctcccactgcctcgtggccctgaaccgctacctgctcatcacccgggcgcccgccacctaccaggcgctgtaccagaggcgccacacggcgggcatgctggcgctgtcctgggcgctcgccctgggcctcgtgctgctgctcccgccctgggcaccgcggcccggcgccgcgccaccgcgagtccactacccggcgctgctggccgccgcggcgctgctggcgcagacagctctgctgctgcactgctacctgggcatcgtgcgccgcgtgcgtgtcagcgtcaagcgggtcagcgtgctcaacttccacctgctgcaccagttgcccggctgcgccgccgccgccgccgccttcccgggcgcccagcacgcgccgggccccggtggcgccgcgcacccggcgcaggcccagcccctgccgcccgcgctgcacccgcggcgggcacagcggcgtctcagcggcctgtcggtgctgctgctctgctgcgtcttcctgctggccacgcagccactggtgtgggtgagcctggccagcggcttctcgctgccggtgccctggggagtgcaggcggccagctggctcctgtgctgcgccctgtccgcgctcaatccgctgctctacacgtggaggaacgaggagttccgccgctccgtgcgctcagtcctgccgggcgtcggcgacgcggcggccgctgccgttgccgccacagccgtgcccgcagtgtcccaggcgcaactgggcacccgcgccgcgggccagcactggtaacctagccggggcccgagggaagcggagatccccggcttccgacgtccttgggcaccgtcgcctccttccctcctagggcatcccctgcctgaacgaagacttccgccgcgaagcccgatagatcgggggaaaatggggccttcgaccccagcgggct

SEQ ID NO: 36049 - DNA, 64 bp, Homo sapiens
  chr1:101491303-101491367
  hyper
agcaactgcaaaagcgccggctccgtgcagagaaaaggcccacgccgccggcctcacctacggt

SEQ ID NO: 36050 - DNA, 31 bp, Homo sapiens
  chr1:101701802-101701833
  hyper
cgaggatctggggtggcggggggagtacagg

SEQ ID NO: 36051 - DNA, 980 bp, Homo sapiens
  chr1:101702033-101703013
  hyper
gggaccagggcggtgcgctacgagactccgggccgtcctctgcctcctcagacttttcgagagaaaagttttcaaagtctctccaccttttttttttttcaggggctcgggagaatcctctccacagccagggatcagcgtctatctgggcgagggcagtgatttatacagtagaatccaggggttaccgggctccgccccttctctctctctctttttttctttcatttgttgtttggggaggaggggttcttttttttttttttttttttttttttgcttctgccccagatctttcctggacagtgcgtctcagcagttcagatccgggggcccccagctgacagagggcgtggggggttaaggcattaacccctcccagcctcttcctgaagaaaccacccagccttggcgcggcgctgggtgacttcgcgtagcaggcagggaactggccgcggcgagcgggactggccattggagtgctccgctgcggagggaggggaccccgactcgagtaagtttgcgagagcactacgcagtcagtcgggggcagcagcaagatgcgaagcgagccgtacagatcccgggctctccgaacgcaacttcgccctgcttgagcgaggtagggggcggcgaatggcgggggtcgcgggcgcggggagcccggttgtggtagggcttaggtgtcagaaacgaatttttaagtcgaacgaggcaaacaaaaacttagaaaacatgcatctccgggcgctgaaaatttgcatctctgggctactaaggagcccatctcgatcagattgttcttgggcacttgtgatttatggagttcagaaaaaaggttaattcccaactgtggaacctacgggtgtaggggcagtgaaaattgcagttggtcggaggaataggagggaaggcgttaaattttggaaatcctatagacaaagaatatggtgggtggtgtggagcgtgggtaatggctt

SEQ ID NO: 36052 - DNA, 30 bp, Homo sapiens
  chr1:101703237-101703267
  hyper
taggagaggagtcaacgtgttgggggactg

SEQ ID NO: 36053 - DNA, 89 bp, Homo sapiens
  chr1:101703554-101703643
  hyper
ggtggggtgggggggcgcggggggaggcggggagaataagaagaagaaagaaaaggcagtcgcttcacggaggcgctaagctttcctgt

SEQ ID NO: 36054 - DNA, 623 bp, Homo sapiens
  chr1:101774904-101775527
  hyper
atttgccgcagcaaacgggaaaataccaatttagctctgtttgctgcagcttcgcagctttaccaggagagggcgccgacggacctgacttttgccttgcctcgcagtagagcccaactagagggtaaacagcagccacagtaagttctagctgttgcagaaataaattacaaatacatgtaggaaaaaggacttcaaaaggctgcggtatcaaagtggcagttaaagagaaggcaacgctcagagttgcaggtggagcagcggcggctgcatcagcgtctcaaattgcgaaaacattttgggctgaagtatttctttgtagcatttcgtggagcccctttcctttgatatacactagccttccgacttccctttgttcttttttcacacgtcaggttttatcgctgacaagctccaacgcgtcaaaggcgttagatctgagggctgcagcagccttcgcggttccgcattgagctccttcctgcagccctctgcggaggtcacggccacgtgtgggcagggaaggccccctacccacttcctcattcggacccgtcacctttagccggcgaccaccttttgatctcttgtgttgcacttgtgtcccccgtttctcctccagc

SEQ ID NO: 36055 - DNA, 122 bp, Homo sapiens; identical to SEQ ID NO: 682
  chr1:102462575-102462697
  hyper

SEQ ID NO: 36056 - DNA, 30 bp, Homo sapiens
  chr1:103572708-103572738
  hyper
agtcgctctccctccgtgggtactgacagg

SEQ ID NO: 36057 - DNA, 512 bp, Homo sapiens
  chr1:103573575-103574087
  hyper
aagcagtaggaccgacggcaatctcccacctccccaaatccattttttcttacctcctctgacctctctagcttggaagaggaaggtcaatgcgagggttgttacggtgaaatcccagagccaccgtttcgttttccacctagaggaccacggctccatctccgagccccgcactcacaactgtgaactcaacccacgaaattgcgactgcagaccaacttcgtcctttccaaggtatcgccagggatgtttgctacacagccattggggagggagagggggaaaaagtcaaagggctttttcttctaaatttgatggtttgcgttcttcgtgtctctagccctttcctctccctctgagttggccccaccggccgggaccctccggccgcgaccctctgatccttcctctgccgggccctgccttcagaatgaaggcagatgaggggcttccaccaacaagctgagagtactgtgtgcccctaaaggcttcatgccgtcagtgggctggac

SEQ ID NO: 36058 - DNA, 246 bp, Homo sapiens; identical to SEQ ID NO: 685
  chr1:104068473-104068719
  hyper

SEQ ID NO: 36059 - DNA, 1770 bp, Homo sapiens
  chr1:107682706-107684476
  hyper
gttgcctcagcgccccgaggtcgtggagcggcagcagctgcagccggagcagcaccagcaacagcaacagcgagcgggacggagttaggaccgctcggagcgcacaggtctcgaggtagtataaggtttgctatccttccacttgctggcagttgcagaagaagatctgctttttaagtgaaacgtacatgccacccctccgagggctgcggcttccccgggcttgcttctttgccgctcctctttccggctctcgcgctcactctttaattggcactggcccctaagtttgccaggagctcgctgcccgctcggagcagggtcccggccgggagccgctggtgggggcggggagtccgggagccgcaatccagaagcgtcgtgggccatgtatatttcatcaaacggactttgggtgcgtcgcgtctcactgccatcagtgctatgtgcagtgacatttctgacttgagtggaggaatgcgcgaaggaaacccgggcgaaattggtattagaggatcttcttggcgccaatgctaattgtcctgatttatgccccttctgactaagctcaacgtcttcatctgaaataaaatgaaagcggtgccaagcggcatagaaccgcctggccgctggttctgatccccgggaaccagaaaatcgtcctgcggcttgaaaaaaaaaaaaagaggaaaaaaaaaagaaatagaaatagaaaaaagaaaaaatatccctcagtaaaagtttaaggcgagaagtgtcagaggcagcggagcgaggaggcgcggaggagagccggcgagcaggggactgggctggcacgacctccgaaggctgagatctcattattaatatcactatatttttggagggagaggcacctttctcatcctctcttcctctccgcccacccttactccctccccctcatctacctgtcaaagtcactgatcttttgcatttcggaagaggacgtcaacgggaaggaattccccctctgggtgcgggctccgagagggggcgacttgcaggaggctccccccgggggcggaggcgaaggtaattaagcggcggggagtggcgggccggcgctgggttctcggtcctcggggtcctctcccgccggcggccgggcgcgatcggaatccccgggctgcggcggtggcggcggctcgggtcctcacgcccacccctcccgctccgcccgctcccgcctggggaggaggctccgcgggagctgccgccctccgcccgtacgccgcccgcgggctccgctgctgcggccgccgcccgaggcggaccaggctggctgcgcagggccgccgccccgcgccgtcggctcggctcccgcccggcgcaagggcaaacgagccacacggtaagtgcctgcggctcgcctctcctactgcgacccgagcctctcgcccgtgcccctctcccccgggtttccccaccccccgccgccccccgccccacccgctgcgatgcacaggcgggagggaaggctccgggtgggcgaggaactttgtaaagcgccccgaggaggcagcgcgcggagccctacgcgcacacacagcggcacacgctcacacccacacacaagtcttcccgggggtgcgccccgggccggtgatgcgtcctcttgttgtgtccggagcccaggcgtggggtctgagcctccatccgccgactgacaggggccccgcgctctccctctctcacgcacacctggccacacacatcgctcaggcggcttgtcgttattttttcttt

SEQ ID NO: 36060 - DNA, 31 bp, Homo sapiens
  chr1:107842875-107842906
  hyper
ggctcgtcacatgccacgttttctttaaaaa

SEQ ID NO: 36061 - DNA, 30 bp, Homo sapiens; identical to SEQ ID NO: 688
  chr1:108506276-108506306
  hyper

SEQ ID NO: 36062 - DNA, 532 bp, Homo sapiens
  chr1:108506544-108507076
  hyper
ggcagctccagccccaggagccgaccggcaccacagcacctgagcagggcactgcaggaaggaaagcggaatctctagtgaaacttctcatttcctgtcgctgctgagagaggctggactcgctccttctcacatggcttaggaagagctgtaaacgggagcttgccggctggccaccagctcaggggccctgggggcggcctccgggttctgctccctgttcttccctttgaccaatgtcactcctggacagataacgggaccaaacgcccttcacttcctcgagtcctcatgtatgtcatggttcctcttttaggaaaacatgagtacaagacgcaaagcaaaagaagagactaaaggcaaattaccccatcacctcgtttcgtccctccccttcgttattatagaagagcttgatcaaattccctttgtcgcgccacacacacgcagagtaggtgaagggcaccctaagacaacttatttctttcccgcctcacagaaagcctttacgaaatcctcacaccatctccgg

SEQ ID NO: 36063 - DNA, 227 bp, Homo sapiens; identical to SEQ ID NO: 690
  chr1:108507148-108507375
  hyper

SEQ ID NO: 36064 - DNA, 112 bp, Homo sapiens; identical to SEQ ID NO: 691
  chr1:108507494-108507606
  hyper

SEQ ID NO: 36065 - DNA, 872 bp, Homo sapiens; identical to SEQ ID NO: 692
  chr1:108507657-108508529
  hyper

SEQ ID NO: 36066 - DNA, 38 bp, Homo sapiens; identical to SEQ ID NO: 693
  chr1:108508549-108508587
  hyper

SEQ ID NO: 36067 - DNA, 885 bp, Homo sapiens
  chr1:108742392-108743277
  hyper
tctgttaccggggtcgccggtcgcggccccacgcccgagtttctgaagccaccggagcgctgggcgccacagttcctccttcctctcctggcaacgcctcaagccgccgccctcctcggtcctcgcagtgtccccagcgcccgcagccctccctacgctcaggcggcgccccggcggcgacccacctcctcggcgtcctggcccagagggatgcccaggttcctgagcccctcctgcagctcgccgatgtccaccactccgtccccattgcggtccagtgcctggaagagggtctcgtagcgcgtcggctgctccgcgtcctggcaggccgcggtgggcagcacgaagtcccgcagccagcgcaacatggtcccagaggcgcaggcggcctggccgaggaagtcacgggagatcgagggctgcggggcgagaccgggaccagcgcgaggccgggctgggcggggcgcgcggcgcaacagcgtttggggcgccgtcggggttgcggctgcggcgcgcagggcgcagggcgcaggagcggagaccccacccgagcccgcgcggagcgcagggtgtggccgtcccgccgctgctggggaggagctcgccgcgctggcctcggcggcactggccgggcccgcctccagagagccggaagtgagggagctgggagctgggtctcgggaggtgctgtgcggacccggggtcgacctctgcccagttgccagtcccgctgtcagcatgcgggtccgaggaagaggcccccagcaggtccagggctgcagcgtcagcgcgtcggtggcttgggagcggggtcttgaagactggttactccacttaaagaccctctcgggccggagccttggcggtcagcccagagctgcttct

SEQ ID NO: 36068 - DNA, 656 bp, Homo sapiens; identical to SEQ ID NO: 695
  chr1:109203572-109204228
  hyper

SEQ ID NO: 36069 - DNA, 30 bp, Homo sapiens
  chr1:109235040-109235070
  hyper
ggtcattttgtcggcgtcgggtgccctctc

SEQ ID NO: 36070 - DNA, 30 bp, Homo sapiens; identical to SEQ ID NO: 696
  chr1:109257153-109257183
  hyper

SEQ ID NO: 36071 - DNA, 31 bp, Homo sapiens; identical to SEQ ID NO: 697
  chr1:109420435-109420466
  hyper

SEQ ID NO: 36072 - DNA, 30 bp, Homo sapiens
  chr1:109584679-109584709
  hyper
ccctcccggcccagcgactcctcagctcag

SEQ ID NO: 36073 - DNA, 30 bp, Homo sapiens
  chr1:109585007-109585037
  hyper
tagcagaacgggtgcggcaatagcgtgaga

SEQ ID NO: 36074 - DNA, 172 bp, Homo sapiens
  chr1:109618423-109618595
  hyper
ccccgaactctgtccgctgaattcactaaggcaagcagacccgatcctgaactctgcctccgctactgagcccgaaggagtgaagaaaagacaggttttggacagagacggtcactcaccgtggggtcttcttcctcatctgccatcccactagcacgccaactcacagcgt

SEQ ID NO: 36075 - DNA, 94 bp, Homo sapiens
  chr1:109632944-109633038
  hyper
ctcatttcatttgcaacgttcagacgcagtctgactagatttccatccggagtaaggaagagcagctcaagggcagtcacggaggccgcaggtg

SEQ ID NO: 36076 - DNA, 68 bp, Homo sapiens
  chr1:109633329-109633397
  hyper
ctcctgatagcgttcggcgctcgcctctcggcccttgctcctgcgtactacggcttcttccagtcacc

SEQ ID NO: 36077 - DNA, 19 bp, Homo sapiens
  chr1:109633440-109633459
  hyper
cgccgctattaccactgaa

SEQ ID NO: 36078 - DNA, 30 bp, Homo sapiens
  chr1:109643350-109643380
  hyper
tggagctggaaggtcgcggaggcctttttg

SEQ ID NO: 36079 - DNA, 1107 bp, Homo sapiens
  chr1:109656100-109657207
  hyper
ggcgcttgggaaattgcggctaaggcaaactcctcgcttaaactcggatcaactacagtgtcagggcttctcttctagccggttgtaaaagcacggatggatttggcgggatgtaagatctccaggagtggccttcgtaggagggaacacgtactggggcctcttccaggcgacgacgtctggagggtgatctctccatcttctttctctcggttcacacgccacgtgtgcaacatcggagatgctcataaaataacccctggcccgaaagggcagtagaaaacggaaatttgttggctggcttggaggatgcttccactgtgttcttcacacgagccccgggcctgcctgttgggccggttgcgcaccccgggcgcgcgctctcccgcgcccacgccgcgcgcaccagcggcggcggctgccatggcgacccgcaggtgagctgcagaggcgcgcgtggtccctgccccacccgcgcggagccagagaggaggcggttgtcaaggcgacgtgggtaggaggagaggacagagggaggaggaaggatgggcggtgttggcgtagccgcagggaggtgactgaagcgagcctggcctcttgcatcctccgcctgtgtacctccctcccctttttttccgccttctgccagcagaagcagcagccgcagcacctgagccgctactgccgctcactcaggacaacgctatggctgagcctgggcacagccaccatctctccgccagagtcaggggaagaactgagaggcgcataccccggctgtggcggctgctgctctgggctgggaccgccttccaggtgacccagggaacgggaccggagcttcatgcctgcaaagaggtactgccgcccccctacccgatcccgctttggtcacaaaagtcttggatccaggcggagaccttggggacccaggcgcagagagtttcagacgccacggagtttagatttctttggggatgaggcgtggggggagggaagaggagccagtctggcgtcatgaggaggccagcacattggaggactcacggatagatcatcctcacagattgggatgctgagctcagcgagaaaggtcccagccccaag

SEQ ID NO: 36080 - DNA, 30 bp, Homo sapiens
  chr1:109756399-109756429
  hyper
gaggtatagtcccacgcccacccactctcc

SEQ ID NO: 36081 - DNA, 30 bp, Homo sapiens
  chr1:109791931-109791961
  hyper
accatgattatcatcggctgtgtggcttcc

SEQ ID NO: 36082 - DNA, 30 bp, Homo sapiens
  chr1:109792502-109792532
  hyper
gggcagtgggagcccgggctcgtcggaggg

SEQ ID NO: 36083 - DNA, 618 bp, Homo sapiens
  chr1:109940218-109940836
  hyper
ttgttggccagcttggcgacgaagtcccggacccggccgcactcctcgtcctcgcccggcgcgctgcgacgccaacggccgccgcggggaaacgcgcccccggctgcggccgcccgcagcccccagctcaccccgatggggccagaccagcgcggcagcggcgcagcgggcggcggcggcgcgtccagccggtcctggctgagggtcgacggcggcagcagctgcaggaggaggaggaggccgaggccatggggccagcgcgagaggccgtccgcagctccccagggccgctccatcgccgccgaatgccgccgacgccgacacctgccgcccggcgcgcccgcccacccccgccggcgcgcgccacacccccgagccgagcgcggcgctccttggatacgcgcggccgggcctctccgccccataggctggccgcctgtccctcttccccggcccactcctcattggctcgcgtcgcctccggcttcgggggtcctggattcggatgctaagatgcgggactgattggctggaacggggcagagactgctgaggtcaaccccgcctcgcccggcgtctcccgggcccggcttgtggagttcacgtaggagcttctca

SEQ ID NO: 36084 - DNA, 31 bp, Homo sapiens; identical to SEQ ID NO: 701
  chr1:109941101-109941132
  hyper

SEQ ID NO: 36085 - DNA, 30 bp, Homo sapiens
  chr1:109968965-109968995
  hyper
ggaggcagcggctacgcggggattctgagg

SEQ ID NO: 36086 - DNA, 30 bp, Homo sapiens
  chr1:109969512-109969542
  hyper
gggcggtaatgagtcggctacagtgggtct

SEQ ID NO: 36087 - DNA, 30 bp, Homo sapiens
  chr1:110009267-110009297
  hyper
agcacgaacagcagcgcccccgcgtcccag

SEQ ID NO: 36088 - DNA, 234 bp, Homo sapiens
  chr1:110009755-110009989
  hyper
gtgagtcgctgccccggccccgggctatttcgggagcctgggctgtgacgctgacctgaagcaatggagccagggtgggggctggggaggtgctgcggccgggccacggcggaagggtggggggcggcgacaggtgggcgggggaggggcgggctggggctgcttctccggacttagtggcaggagggtgaagagcgaggcatgcggagtcccggattcggtccttctatgtgc

SEQ ID NO: 36089 - DNA, 31 bp, Homo sapiens; identical to SEQ ID NO: 702
  chr1:110052254-110052285
  hyper

SEQ ID NO: 36090 - DNA, 30 bp, Homo sapiens
  chr1:110091071-110091101
  hyper
ctctgcagatccgccgcccaacccagccgc

SEQ ID NO: 36091 - DNA, 30 bp, Homo sapiens
  chr1:110162473-110162503
  hyper
tggcgcggagccggcgagattttggtgggg

SEQ ID NO: 36092 - DNA, 188 bp, Homo sapiens; identical to SEQ ID NO: 703
  chr1:110185990-110186178
  hyper

SEQ ID NO: 36093 - DNA, 37 bp, Homo sapiens
  chr1:110230682-110230719
  hyper
cgggtagaggaggcaacgggtacgtgcagtgtaaact

SEQ ID NO: 36094 - DNA, 394 bp, Homo sapiens
  chr1:110282800-110283194
  hyper
acccgccctctccgcgtcagtctctttgaccgagcggctctaccgttgagacggcactcaccccacgaatatcccagtacccgagaaccatagacgactcgcacgacatggtgacgggcttccgagccttcgaggactagggaaactgtgagcgggaggggctttatacccgacataagggggcggggcccacgcgcgggcgccctgactccgcctccgccccgttctccgtcccttgcctccgcggctccacagggccgtgcgcaggcgcgactaatgccggcgttggggttcagggcctggcgaccccgaggcgggacccgggcaggagtgctgcaggagagcaaaggacccgaggttgaggctcctcccttccccgcgggtgggagccaga

SEQ ID NO: 36095 - DNA, 148 bp, Homo sapiens
  chr1:110453159-110453307
  hyper
cggtccgcagagggcgcggggaaggcagggtggggacgcggtggagcccgcgctcgtttgctgaaggcttggaagtgcagcgcagaagacagagggtgactaggaagacgcgcgagcggggctggccggccggcgggtgggggagggg

SEQ ID NO: 36096 - DNA, 422 bp, Homo sapiens
  chr1:110453530-110453952
  hyper
ccgcatcccaggacagcggtgcggccctcggccggggcgcccactccgcagcagccagcgagcgagcgagcgagcgagggcggccgacgcgcccggccgggacccagctgcccgtatgaccgcgccgggcgccgccgggcgctgccctcccacggtaagcgacggccgcggcgctgggcccgggacgggctggggcgggggctcggcggccaggcggccgggagcggcccctcggagccgacagcctgggcgcgccggctgcactggcccggcgttcccgccgcggacgaaccgcctttgcgcacggactgggccctggcgccagggcggaggccggtggcggccctgcagctgcaccgggactgccaggcttccctgggaaacggagggctgctcaccccattgcacggaggggaacactg

SEQ ID NO: 36097 - DNA, 243 bp, Homo sapiens
  chr1:110526884-110527127
  hyper
aggaagtcacaaagcgttgtgcagaaaccagactactctgagtcagttctgccccctatgaagtcaaaaagacaggcacggccccttgggaaggagctttaatccaaagggcctggggctgggccagtgagtgagtgggctgtctcgagccccggacatttcctaggaatcgctgtaggatgtgtcgtgtggggctctggtctttgctcccaaacacccctttcatgcgcctctgaggccttg

SEQ ID NO: 36098 - DNA, 30 bp, Homo sapiens
  chr1:110528062-110528092
  hyper
tggatgaagggcctcgaagacgagagtggg

SEQ ID NO: 36099 - DNA, 47 bp, Homo sapiens
  chr1:110577139-110577186
  hyper
cttctaacactggccgccacacttaatatggcggccagggaaatttc

SEQ ID NO: 36100 - DNA, 252 bp, Homo sapiens
  chr1:110610425-110610677
  hyper
ccgtgggcaggaccccggtgaggcctcggtgcccttcttgggggttctcagcgttggcccagaagcctcagcccgggtctaagaacttgggactctcctcgactttggcgatcggccgggtcatccggctcagggcctcagcggcagcgggcaaaactctagtaggagtctcttgccgagggcgtgtttcgacgtcagagccaaactcgggacagactagccaagcgcggacggcgcgagagtggctggcag

SEQ ID NO: 36101 - DNA, 182 bp, Homo sapiens
  chr1:110610715-110610897
  hyper
ctctcagcaaagggcggcctggggctgcgcgggcggcggactgcaggcgggagaagagcgaggtgcgccaggctctggggcgcgcaactgcccagcctcgtgaaagatcgcgccgcagatggggcgcagctgcgcgctcactcgtgtggactggaaacgctccgagccggttattttaaaaa

SEQ ID NO: 36102 - DNA, 231 bp, Homo sapiens; identical to SEQ ID NO: 707
  chr1:110611045-110611276
  hyper

SEQ ID NO: 36103 - DNA, 79 bp, Homo sapiens; identical to SEQ ID NO: 708
  chr1:110611434-110611513
  hyper

SEQ ID NO: 36104 - DNA, 140 bp, Homo sapiens; identical to SEQ ID NO: 709
  chr1:110611653-110611793
  hyper

SEQ ID NO: 36105 - DNA, 840 bp, Homo sapiens
  chr1:110626790-110627630
  hyper
ccctcgcgtggccgggcgcagatccccgtgcacgggtcctccgcacacccttgccagcccgcagggattgttcgccgcgttggtgactccttcccaaaatgggaataaaagatcgaaatagctagtaagcatgcaaagtttattgtcaacctcaagtctctataaaaccagatcaaagggaacaggcgtttggtttcttcccagatcgctggggggcctcggggctcaggaagccccaggagtccagcccgctgccgctcactgcgctcttctctccagccgggtccaagggctcgagcatcgcaacctgcggcctgagttggccccgggcgcacgcgagggaaatggatgcagtgcccgtgaacttggggcctgaataattgataacaacccgctgggtgcccgtcgcgcggccaggcctgcggggagcggagccggaggcagcaagcaaaggaaacgcacgagccgggagcgcgggcgcgcggggccacgaaagaccgaccgactgtccgacgggcggtgggacaagaggacggatgctgtgggggggccccggaacccgccgccacaactcgcggcccacgcgggtcgcagccgccagccgtagggagctgccgagcagcgacgttccgcattccatcgggttcccgcgccctactgggcttgtgcggcgcagtgcctgcgtgtgctttcgttttctcaaggccattctgataaaacatacgtgctggttccctttcttttctcagaatgattcttcaaggcgaatgactcgaaatggagatttcttctaacaccgcgtgatcaccgacaacttttgcaggacgggatgaaactcct

SEQ ID NO: 36106 - DNA, 478 bp, Homo sapiens; identical to SEQ ID NO: 711
  chr1:110672762-110673240
  hyper

SEQ ID NO: 36107 - DNA, 529 bp, Homo sapiens; identical to SEQ ID NO: 712
  chr1:110692967-110693496
  hyper

SEQ ID NO: 36108 - DNA, 264 bp, Homo sapiens
  chr1:110693736-110694000
  hyper
cgtacgcacgggttggacaccgggcttcagcttctggtgctcagaagggcccaagaactccggaggaaattgggcttagctgcggaggcaagcgcccgcggagaaccggagggggcctgtccggcccatccgcggcttgaaactgcgcgcccagggcgcagttccactgggagcctcttacgcagctggagaccccagccccagccgctcggcctcaggcctgtgaccttgacagtaacattggcaagcgaagcagaactgtca

SEQ ID NO: 36109 - DNA, 13 bp, Homo sapiens
  chr1:110753206-110753219
  hyper
tcggccgccgccc

SEQ ID NO: 36110 - DNA, 384 bp, Homo sapiens; identical to SEQ ID NO: 714
  chr1:110753509-110753893
  hyper

SEQ ID NO: 36111 - DNA, 399 bp, Homo sapiens; identical to SEQ ID NO: 715
  chr1:110753957-110754356
  hyper

SEQ ID NO: 36112 - DNA, 30 bp, Homo sapiens
  chr1:110880351-110880381
  hyper
atagggttgaggaccggatcaatacaagaa

SEQ ID NO: 36113 - DNA, 30 bp, Homo sapiens
  chr1:110881005-110881035
  hyper
agctctcgaggtcccgcgtgttacgtgtta

SEQ ID NO: 36114 - DNA, 30 bp, Homo sapiens
  chr1:110881805-110881835
  hyper
aacactttgggtcacgtgaccgcagagtgc

SEQ ID NO: 36115 - DNA, 1036 bp, Homo sapiens
  chr1:111148992-111150028
  hyper
tgcctagctgcgaggcggcttggcagcagcgagagggggagcctggaggaagccggcttccggactggccccctgccgacccaatcccgccggccccagggcggggaggggtctgggccctctccccatcgccccgggctccggccgggattccgttcggcgcactcagcgctcgcctccgcgcagaggaccagaccctcccgctggccgcggccgctagcgccaccttaaccccctcctgcccgcgcggtcggctcctgctgcgggcccaagcgcagttcagctcttaagcccccggcgtccagccgagggaccgccgaggctcagtgtccaacccaaaatcccggaacctgatctctgggggtggggagtagcctgcgccaggctgccgccccagatctcagcttccttttaagcgcgggggctcggcggcagcccacggccccagcgaaggggaaagccctctctgcagcaaagccgtttgttattctgtgccgaagaggcgaatgcagcccggccgtcccaagtggttcaggtcctaccaacccgcgctatttaccagacatggttatgctgccagctgcacttcccaccacccaccagctcctctccgtgccctccgccccgcgccacgcaaaccccagagggtcccgagcccattctgtgcactcttcttgagcagggtgcaagttccccttgatctccccggtctgggacctgccgagcagacggcagtggtcggcaagggcttgccgccgcggactcagcccaagcctgctgcgctgcaggctgcgccgccgggtgccccgcagcccctctgggcgccgcagccgggcagggaaggcagcacgcgccgcgcaacgccccgacacggatttacccttccggatgggcaccggggcctccatgttcctaggttacggccagcgccggcagaaccccggcagcgggcggcggcggggtgcgggcggccagccgggagccggctctgcagtcccgcgggcggcgcgtacggagctcccggccgccgcccgca

SEQ ID NO: 36116 - DNA, 258 bp, Homo sapiens
  chr1:111216714-111216972
  hyper
cacgatggcgatgccccgggccggcccggagctctcggggtactcgaagagcagccacacctggcgctggaagtcgcggcggggcaagggccgctcctcctcccgcaggaagccctcgtcctcgcggaacttctccatggcctcctcgcccagctggtagaagcggatctcctcggagaaaatgtcgatgggcacgttgaccggccggcggatgcggcccccggactgatagtagtagaggatggcgtcgaagctggg

SEQ ID NO: 36117 - DNA, 697 bp, Homo sapiens; identical to SEQ ID NO: 718
  chr1:111217194-111217891
  hyper

SEQ ID NO: 36118 - DNA, 59 bp, Homo sapiens
  chr1:111217923-111217982
  hyper
cggcccgtgggccgggagagctcccgccgcggccccgcgggcgccggccccctggcctc

SEQ ID NO: 36119 - DNA, 30 bp, Homo sapiens; identical to SEQ ID NO: 720
  chr1:111289424-111289454
  hyper

SEQ ID NO: 36120 - DNA, 995 bp, Homo sapiens
  chr1:111505976-111506971
  hyper
gagatctactcggtccgcctattaaacttgagacgctggggtcccgcggagccgctgtgtcaggctctaaagaggttttacatttcccagaggaaagcgctctatgggctttaagcgccgcggagacaagcgcttcccgcctgggtggcgcactctgcgggctccaactcctctcaactacacagcgtccggaaacgacggccgactccacatccctaagacggacagaggggcagccgtggggaggattcgaaaccggtacttaccaacgcgaggcgttgcctgaattttcctctgcgggtttcaggaagaccctccgtaggttatttgacattttagtggggagaaaggggacacctcatccagaaaagtgggaagcgtggggccgagtttcccaatggggcgagaaccagagcgagggaatgttgggctggagttgcccacagcaactgtgaggggttcgaccttaacggagggcgacagcgggctctcgagagggtgtatccccaggcttcgggacgaggtcgcgcaccgcgcagaaaccggaaggctcctggcggtggactgcgccctcacagccctacgctgagagagaatcggcgtgagtctccgccctcagagcctacgacaactctccagactccgccggagcaggcgcagggggcgtggccttggtggcaccacccccaacagagcctggtcagtgctgaagactgcgtcagtctggctctgccgccccgcccactgaagccgatagctggagcaaagctcggtcgggcgtcttccggggtcgtcacgtccggttgccaaggtgactggctcgctaaagcccaacccttatgatgcaatccaatggcaagtgatatttgctatcttttcttccggatcaaggaacaaatcgcaaaagaaagctctcccgacacctacgcaaaataaaatgtttccggggtcaatcataaattttctgcttctgtgctcgccgctagcgtacgttt

SEQ ID NO: 36121 - DNA, 30 bp, Homo sapiens
  chr1:111682929-111682959
  hyper
gtaaggctgcggagcgcggtcaccggacgt

SEQ ID NO: 36122 - DNA, 30 bp, Homo sapiens; identical to SEQ ID NO: 722
  chr1:111683411-111683441
  hyper

SEQ ID NO: 36123 - DNA, 749 bp, Homo sapiens
  chr1:111746590-111747339
  hyper
ctttcaggcacactgcggttgcaccacaagcttcctggatggaaggacacgtggccccggggccccacaacggcttcctgtgtcccgccgcctccccctcgccccctcaggcctggcctcgccgtccccgcccccacctgaccctcttcccctctccgcgcgctccttcccgctcacctgcccccgcgcagcctcctgagtccccttccaactgctcccggatctcgacgccccgtgccgccctccaccgggccccagccgccagccctagccccggctccccggtgcccacgccgtccccccgcgctctccccggccggcactaacccccatggccgcgcttcagtctcaggctggctcgaaggcggcggccgagcccatccatggcccctggagtgcccggctcccgctcccagctccgcgctggccccgcccccctatccttgacctccgcgggtccgacactttcactttcacgcggggggaggcctaggggacaggttcggggcggcgcggcgcaccttccggactccggcccaacccccgggcgcacctgggcgggcccgctctgccctcgccctgggcagggcagcgtggggtggaagagggcgctcgacgcgcgtccgggactgggcggcgccacctcgttcccaccctccgtggggctcccggggaggcttgacttagcgaacaccctgcagtccgcaaaagcgcatgtcctggctgaaatcaccgtcttccaggtggcc

SEQ ID NO: 36124 - DNA, 30 bp, Homo sapiens
  chr1:111888704-111888734
  hyper
ttcttttaaaacctcgcgccccctccccac

SEQ ID NO: 36125 - DNA, 30 bp, Homo sapiens
  chr1:111991158-111991188
  hyper
tgagctcaaccctacggtaccccaagtctc

SEQ ID NO: 36126 - DNA, 30 bp, Homo sapiens
  chr1:111992158-111992188
  hyper
tgaccatgctgtcccgggtggtactttccg

SEQ ID NO: 36127 - DNA, 30 bp, Homo sapiens
  chr1:112298274-112298304
  hyper
ccaccgcaggcccgcggcgccctctgcagg

SEQ ID NO: 36128 - DNA, 30 bp, Homo sapiens
  chr1:112299248-112299278
  hyper
ttgtttttttccttcgcagatttaattgtt

SEQ ID NO: 36129 - DNA, 30 bp, Homo sapiens
  chr1:112531638-112531668
  hyper
cggggtggaagtggcgtcgggcaggaccag

SEQ ID NO: 36130 - DNA, 828 bp, Homo sapiens
  chr1:112532951-112533779
  hyper
gcggagtgtaccgacgcgggtgtgagcgcgtgtgccagcgagggtgggcacgggggtgagcgtggcaaggtgagctgggtttgggggtgggggaggagcagggagtacggcgtgagcgtaagttcgggggcgtgtgtggctggggacccacggagaggtggcagggagggccggcgtgtgcgcgcgtggggtatgtgtgcacctagctgtgtgtctatttctcgctgactgtccacagggcagcagcacctgcttgagaccaagcccggcgacctggcaaggtggggccccctaccgcgcaatctttgcggctggcccccggctctcagctccgagtgcagaggctgaagaggtacccgggggacacactgcctctaaccccacctatgagccgctctcctctcggaggacgaaggcaccatcagaaggtcgagattcgccctcctctcccgccacgtctacccactacctagaccgggagtctggacttgggagcgtgaactctcacccgagccggtccccttacaactggagcccgcccagcccctcagtccctccctgaagcccatgggtccccactgctccgtgcctcgtcgacccaggatggggagtgggaaggtcagcatgtgcccacagggccaggtgtccggcccagattcccaccctcagggcggcggcgcgcaaagggcgcagtccccgccgctgggcggacccgcggctccggctttcccggtgtctccagcctcggtgcccggaatcctggatctcggcctggcgctccggaagcgaggcagctccgtgccccagcagggacggggaacgcttggc

SEQ ID NO: 36131 - DNA, 36 bp, Homo sapiens; identical to SEQ ID NO: 725
  chr1:112938561-112938597
  hyper

SEQ ID NO: 36132 - DNA, 528 bp, Homo sapiens
  chr1:113051156-113051684
  hyper
ccatttcacagaagcgcaaggatggaggaaatgagtgcatcctccgtgctcagcgccggtgtcactgtaggttggggacaggagggaagtgcccgcatccccttcccgctccgccagcctggccgtcacccatagaagtggggctgctgagtgaagggcgctaggacccggtggcgcggtgtcggcagggactgggcgcttggggcgcaggagggagccgcggcgtcccgtcgcagcgtgcgggagcaggtgggggtgcagcgcggtggcgcgcgggagccccgaggggcggaggcggctgctacacctagggcgtcgcggagcgccccgggcttggcgcgggcggagccgccctaagggccgcgcgtgtccccggcctcggccccgccccgtcccgtccaatgagagcccgcggccgaaggggctgtccgcacactaggcccgcagctcccttcagcgccgcagaccccctgacaccgcacccggtcctcaggcagcgcgccccagaccccgggttcggcacgccgt

SEQ ID NO: 36133 - DNA, 64 bp, Homo sapiens
  chr1:113052056-113052120
  hyper
cgtcctggtggtaagtgtggctctcaggctgggcgggtgaggcgcttggtaggagaggccggag

SEQ ID NO: 36134 - DNA, 30 bp, Homo sapiens
  chr1:113216759-113216789
  hyper
ggaatgcaacgaagcgcccaaatatgtggc

SEQ ID NO: 36135 - DNA, 168 bp, Homo sapiens
  chr1:113217028-113217196
  hyper
aaggctgggggaggcgctggatgagcttccccattccggccgcagccgacctagatcccagccctgccctttgctctcctgcttttcactgagtcccgaggctctggagggtgggcgtgagggtagccctggctgaggctcggaggtcctcccgggctgttcagaggg

SEQ ID NO: 36136 - DNA, 191 bp, Homo sapiens
  chr1:113249225-113249416
  hyper
gcgtccagaccctgccgagcagtggcaggccccaatggtcacatcccgcccctattcccgccatacctccctcctggcctggaggaattcccaccccatcccactctaggtcccctgcggccgcccaccctgggggctggggcgtctgagttgaagttccctcgcccctcgcccggcggggcaggttccgg

SEQ ID NO: 36137 - DNA, 161 bp, Homo sapiens
  chr1:113249974-113250135
  hyper
gagcggggggagcacgacccgggtggactcagactctgcccagccttcaatcccctaggggaggaccggcgtcgggaaagttaagaggtgctcggggtggggtcaggaagggccgctgctgccctcctgtggccaagcggccacccgctcctgctgcacct

SEQ ID NO: 36138 - DNA, 446 bp, Homo sapiens; identical to SEQ ID NO: 728
  chr1:113256959-113257405
  hyper

SEQ ID NO: 36139 - DNA, 30 bp, Homo sapiens; identical to SEQ ID NO: 729
  chr1:113258351-113258381
  hyper

SEQ ID NO: 36140 - DNA, 1588 bp, Homo sapiens
  chr1:113497848-113499436
  hyper
caaagtaataaaatgttaaaacgcatgctggaaaaaaaaaaagacgtacttggaacaaaaaacttgcatcggaccaagtgtaacgctatcctccagatttctctcaacagggccgccttaagtccatgagtagaagggcgctgcggcggacgctggcagccacaggttgaatgacaaagagcccccgtcagcaccactcccaggagtctgcgggctgccccgtcccctccgcaaagtctactcgaaccctgcagtcacgccttggctgtggggaatgcggctctccgcaccactctcgcaagtcaccaggtggggcaaggatcggcgggccaagaaggttggggcggacaatgtcacgaatcataaataacttctgccccgagtcccttcccttggggcagaagcggccaggagagtctggaggtaccacatgcagcagcctcatgttatcccttttccagatcaaagcatctctcgaggagcctattgaagacttaggggggaagggacttccccaccgtcaccgggcaccacgacccaactcctcggccaggcctgggaccggcatcttagcacggggcccgcggctcggctaagagaggcgctgaccccagcgcctcaaggtctccttcaccagcactgcagtccgaggccacgcggctgcctgtgaccacgatgccctctgctgggccgcctccctccgccggagacaaagtctcccaaccccggaggtcccctccgaccccaccagggcagcgagggcaccgtggggtccgcgccgcgtgccgccggctgttacccaactaaccgttatatgcgcggatcgcagcgccgagcgtgtgcgtgacgtggtggcgcaggctggagttccacggggcccagggtccggctcccgtccttcgctcgctgcctcgtttgcttgttccagtacccacgcagctagccagtcacgtcgcagctcaccactttgtctggccgggccagcgaggctgccttataacccgccggggccggagcatgcgcgcagggggcggagtcgtctctcccggccgccgccccctccccgccacacagacatccgaactgcagcccgcgcctccacacgctttcagccgcgcgcgccctctagctcgcccgcgcgcgccggcgccccctccccgccacgtgaccggcgtcccagtccgacccgcgcgctgcgcccctgctgagcggcgcggagctaccacgccctgccagactcgcccttgggtccctgtctgacgagctctaggcaatctgccctcgttcgggacacaaccatcggtctcacccctcagtttctgccagagaaaaaggaaaagtcaccgagaggcctgaccctgacgggtgggggagatgcgcgtgcggagtagcgggaagcgactgaggagcggggaatgggcagcatttgaatggatgcgggtgccgctggcacccgggaagacgctgggggccggcgctgtagagccgggcatgggctgggatgtgtttggattccaatccgggcctgacaccagttcagtgacctcgggaagttccccaaccctccgggcctgtttcctccctctga

SEQ ID NO: 36141 - DNA, 706 bp, Homo sapiens; identical to SEQ ID NO: 732
  chr1:113932572-113933278
  hyper

SEQ ID NO: 36142 - DNA, 778 bp, Homo sapiens
  chr1:113933305-113934083
  hyper
cgctcgggcgctgagcccagggaccagccggcggcagtgaccccgcccgaagccccttctggaacctcctggggacaattcccttttcctttcttcagcctaacccgcggtggccctcgcggagtccggtcagccccggggagcgcagccgggaggggcgtccaaggggcgtctcgcgtctgggaacggccgggcccccagcgggctgtggtcgcggggtgggggccggagcggcgaggccccccttaccgggctgcgcgggccgcccagggcccccgggctgagacggggccggagcggcgccccggccgcccgcgcggggtctcccccatggtgcagcggggttcgggatgtcgaagacgctgaagaagaagaagcactggctcagcaaggtgcaggagtgcgccgtgtcctgggccgggcccccgggcgacttcggcgcggagatccgcggtggcgcggagcgtggcgagttcccctacctggggcggctccgcgaggagcccggcgggggcacctgctgcgtcgtctcgggcaaggcgcccagcccaggcgatgtgctgctggaggtaaacgggacgcctgtcagcgggctcaccaaccgggacaccctggctgtcatccgccacttccgcgagcccatccgtctcaagactgtgaaaccaggtacgccggccctgcgtatctgtctcggggtgttggggagaggggcttcagggtgggcgtcctgggagcggcggcacctccccaccgcgtattgtcccgggtaatcttagac

SEQ ID NO: 36143 - DNA, 30 bp, Homo sapiens
  chr1:114300641-114300671
  hyper
ggcatggtggctcacgcctgtagtttgaga

SEQ ID NO: 36144 - DNA, 245 bp, Homo sapiens
  chr1:114302509-114302754
  hyper
tgtttgttgagcgaacgaatcaatgtttgcgtgaatttacgctgccctgggaggaagggccaggctgcggcttagtgactcccttcctctcccgcccctcagcagctctgggtctggagctttctagtgctcaaaggtgtagggggaaaagaggaacaagtattgggcagtcacagctttttccaaattagggtaaagttaggtggcggcaggaacaggttaattagggccgatagaggtcagga

SEQ ID NO: 36145 - DNA, 30 bp, Homo sapiens; identical to SEQ ID NO: 734
  chr1:114354673-114354703
  hyper

SEQ ID NO: 36146 - DNA, 85 bp, Homo sapiens
  chr1:114355229-114355314
  hyper
gggcggtgagttgccgccaaccgccctaacggccgaaacaatgttaatggctttcagagtctggcggcgcgttcccattatcatc

SEQ ID NO: 36147 - DNA, 30 bp, Homo sapiens
  chr1:114448373-114448403
  hyper
cacctcttgcatcgtcacctacaggtatgg

SEQ ID NO: 36148 - DNA, 156 bp, Homo sapiens
  chr1:114471833-114471989
  hyper
aggtaatccctcaccggcagtgaagctcctctgctaggcactgtcgtcccgtacactgcccaagctctgggggtgtcacactaaactgtggtgatgtcacactagctgggatgacattttacagttggatcccgtaccaccgccaggcacctttaa

SEQ ID NO: 36149 - DNA, 590 bp, Homo sapiens
  chr1:114695146-114695736
  hyper
tactccctcccgccccggaccctccagatatcgggacaaagaagccccgcggcagccggcgagcgtggctgccgggcactggtgcagcaggtaaataccctgggccggccgccacgtcgccgaccctcccgcagctcccgccgccagggcgcgacacgccattccccctgccgcgactccccggagacgccgcagctgcgcgccagggtccagcccggcggggatcgggctcgggactcacccgctccggcgagctcgactcagctcgggctcccgcctcggctaggcagccgcctggggctgcgtcccgcgcagggtcagcgcggatcgggcaggaggcgccctcttggcaaagtcggctagaggcgccagctcagtcgcgcaccggccccgagtccgagtccgagagggacggagggagcgagttataggggcgagagggggtgggggaaggacgccgcaacaccctcataccctcccccaccccgccccctgtcccccgccccccagcggagacgcggaaaaccactcgcagccggagagacacccggacacaaagacctcgtgccagccgcagacccaagtttctc

SEQ ID NO: 36150 - DNA, 383 bp, Homo sapiens
  chr1:114695799-114696182
  hyper
cgcacggacccggggacctcgacactcgctaggaggcaagccctattcctcagccgggcgcccctcgtctcccgctctctccatggacccctctcctggcaaatcgcccgcagagcgagcttggagatgcgagggaaactgaagccccaagggtgccccgtcctgggagcctggctgtctgcggggtcccccgcattccgcagtagtaatacaggagggccgggggcttctaccccaacctccgctccccttcgggtctctcctggctgtgcaagcgatgggccagagggctggacgaggctggctcccaatccagaatcccgagctggggagttctctctaggttctggggctcctgggaccggggctttggggaagggaga

SEQ ID NO: 36151 - DNA, 114 bp, Homo sapiens; identical to SEQ ID NO: 738
  chr1:114696349-114696463
  hyper

SEQ ID NO: 36152 - DNA, 594 bp, Homo sapiens
  chr1:114696540-114697134
  hyper
cgcccctcacgtggcatcccgcggcagctggcgagtctggcgcctcgcggccgccccctctacactcagggactggcctgagtccggggggtgggggtttcgaggcgggaagccgggctgtcccgaatctcggagggtgcaaggccaggaaagagtccgggttcccactccgcattcactgcctggtgtgaccttgggcgtctctgagcctcaattttcctctccgtaaaggaggtgtaatgattttaagtacttcacggactccctggggatagaaagatcgtgtttgtgaaaacactgggtaaactgccacatgccacacgaatgacagagaaatagataaccccgtaacagaaagagcgacggtcaggcagggtctgggaggaccttggccgaggttcctgacgggagcagttagactggcccccgagtcccagcttcggaggtagaagaccccaagacaggcgggcgatgcgaactgcaagactttccgagctccgcaatcctgcggtccgcggtacccgcatgttgctatggcgacgggaggcagcggccgtctctctccatggcaacgggagggaaaagtttctggca

SEQ ID NO: 36153 - DNA, 31 bp, Homo sapiens; identical to SEQ ID NO: 741
  chr1:114697994-114698025
  hyper

SEQ ID NO: 36154 - DNA, 169 bp, Homo sapiens
  chr1:115124337-115124506
  hyper
gctaattttgaaggcgggtccgcccggtatctagaaattgccgggctggtttgttttgggcggacgtgacgtaacgtcttggcttgtctgcgtcagcgaaaggcctcaatttcctgtcctctgcttactgcccctttttttgcctgcgaatggcggcgatttgaagttg

SEQ ID NO: 36155 - DNA, 30 bp, Homo sapiens
  chr1:115212644-115212674
  hyper
tcccgggtatcactcgggtccgctccgtcc

SEQ ID NO: 36156 - DNA, 392 bp, Homo sapiens
  chr1:115212882-115213274
  hyper
gcagttccagcaggcgggcgaccagtgtcaccgtcgtccggccaagccctcgagccagagctccatcgccttcgcctgccgtcgcatcggccccacggagacggccctatgcttcatgtgaaggtttactcttcacaactactcaacaagataaagcctggcttaatcagggaatccaagcactgtttcctaggctgacctcagtgagcaaacaattgcactacggtgccaacttgaaacgtcaagagaagcaaataactctcgcggcacctcaggcttggaatctcagaacgggggtgccttgatactcccagtgcgtgaggtcagcccccacgccctgttgagacacacatgcctaagcgctccgcctgcaacacgctcttgcttaggta

SEQ ID NO: 36157 - DNA, 30 bp, Homo sapiens; identical to SEQ ID NO: 744
  chr1:115252199-115252229
  hyper

SEQ ID NO: 36158 - DNA, 72 bp, Homo sapiens; identical to SEQ ID NO: 745
  chr1:115256505-115256577
  hyper

SEQ ID NO: 36159 - DNA, 95 bp, Homo sapiens; identical to SEQ ID NO: 746
  chr1:115258667-115258762
  hyper

SEQ ID NO: 36160 - DNA, 30 bp, Homo sapiens
  chr1:115300425-115300455
  hyper
cacctagagctctacgagtgcccaccttga

SEQ ID NO: 36161 - DNA, 196 bp, Homo sapiens
  chr1:115323252-115323448
  hyper
gccgggctcagctacgcgactcgctcagatcttctgggagtctgtctcagcattacaggcgtcatttccgggcacgtttacaaggtgtcttggtaggcgcaatgggcgcctgcgcagtggcagcctattttgcgggttgacccgctttaacctgcggcttccttgcagtccttccttgcgcggagccccagaccta

SEQ ID NO: 36162 - DNA, 196 bp, Homo sapiens; identical to SEQ ID NO: 747
  chr1:115631841-115632037
  hyper

SEQ ID NO: 36163 - DNA, 535 bp, Homo sapiens
  chr1:115632104-115632639
  hyper
ggggagcggcaggctccggcggggagggggcggagcggggaggaccggggcggggcctccggggggcggggcggggcccggcggggaggggcgcgtggaccccaagcggcgtggctggcgacgggtgggggcgccagcgggtggagatcgagcagcccgagggagcacgttcgctcttctcccggacccagggaccaccttccttccctccagtgggcgcaccgccgccggctatcggagcacctgcagggcgggagcgcccaccggggactggggacccatttaatcagcgccctgtgcggagaccggtttgaggcccgggcgatgcttgagggataagcacttggtctcgtggctatggaaatctaggaaggtgacctcgggtagaagagctaagtggggtcggaggttgccccgaagctggcaggaccagtcgcggggcacctgactgagtgtccagggctgcggctccgcggcgcggagcaagcacacaagcagcttctaggggaccctccctccggcccctcccccctcc

SEQ ID NO: 36164 - DNA, 5 bp, Homo sapiens
  chr1:115632692-115632697
  hyper
cgccc

SEQ ID NO: 36165 - DNA, 648 bp, Homo sapiens; identical to SEQ ID NO: 750
  chr1:115880146-115880794
  hyper

SEQ ID NO: 36166 - DNA, 78 bp, Homo sapiens
  chr1:115880872-115880950
  hyper
cgagctgctctcacacaggcttcttgaattcttagcccctcctcccgtactcctgagtcacacgctccaaatcctggc

SEQ ID NO: 36167 - DNA, 1147 bp, Homo sapiens
  chr1:116184426-116185573
  hyper
gacgaggtgagggggacgccggccgagccccgccctccgctgcaggtgggccggccccgcggcggggccggcagcgctagctgttcttggctcgcggccgcgccgggctcgcagggctgggctcgggctgcggggcggcgccgggacaggaagcggaaagcagcagtgcagcggcggcggcggcggggctctgcctctccaggagcccagcgcaggccgcagagccggggccgctgtgagccgagaccgcgggccgcggagctcgggcggccggcgcggaggtgagtcccgcgagaggccgagcgctgcgcggcggcggtccccggggcagaccgttggctgggagacgcccccacctcggaccccgcgtgcccctgcgccctcctcccgcattcgccccgccggacttcgaccccgggtggccggctcccgcctcgggccgggggctccctcccctcctccggagcgctccgggtagtgcttcctctgactccactcttctccccatgcgttgcgcccctcctggccctgccgtgcgatctccgccgcaccccactccttggggtcccggggttccctgctcacacctcggacgtccctttctccccgggctggcctttggagtgcgccccttcggtgcgcgtgccggggcggcgggcaggccggcagggagtggccgagcgttggaggcaccgggcggctgcagcagccgtgcagggcgggagccgggcgcgcaccggggttcccacccctggcggggctcgacccgggcgccgcctggcccttcgccaggaaccgggacagagctggtctgtgtgcacacctcgctcacaaaaaattgagccggccctggaggcctggggggcgagtccggttgcgcctcggagagcgcaacaggcaggtaggagtttactttcaaaaacgccggggtggagcagaggcgcctggcgggtctctgcccaaggtgtccctgctggaggaaatctcaccgcgccggggcagccttcgccaccggcaggacctcatttccttctgcagtctttgaactgccccaagcatcgcgcctagagaagtgtgaagctttataaaaatttaaacgcgtccgtggtggcggcagcagtggggcggagccgcggcctggctgctg

SEQ ID NO: 36168 - DNA, 438 bp, Homo sapiens
  chr1:116370914-116371352
  hyper
ccaaggtcccgtggccgcgatcccacctgcggcgtccgcgtccgcccgctctccctgaggtctgcaccctgagaggaggggcgagcgagccaacttggggcagggatcaccgtgtccacaggcgcccactggtgtggcgtcctgagagtgcgtgcgtgagcgagcgagcggcttatcctagactgaagacccagggaaacagatctgtgtggaggatgtttctgttttcagcagaacagacgcagcccccgagtcagtgccgtcagaagacacgtcagtcaattcagtggaaaacacttccagtgtgaggcgttcgccggcgccccttagacgcggccgggtctgaggcgcctgccgagcgaggtggcgcggcccgggagctgtggtcgaagcccctgggcctggcgtgtaggctgcgcgggcggcggcgggctgggg

SEQ ID NO: 36169 - DNA, 2211 bp, Homo sapiens
  chr1:116380294-116382505
  hyper
agccccagaagtggctcatctcgggtgtctccacgaggttctcctggcctggaaaatcccccctgcgagcccccgggctcgccagacaaccccacctgcctgcgtcggaaaccttccctcgtcgccctgctgaccagagagaacaggtagcgagcttcttccccggccgtctctcgaggcggccgtctcgctgggccaccgcagcctccgccacccgagcgacggcgcccgtccggatccgtagcgtttcgcggacgccgggacaggcggccccccgcggcgcaccccgccctacacgtccaggacgtggttgagataggagatgtagcagatggccaggcgcaggatctcgatcttggagagcttcttgtccgggggcagcgtgggcagcaatttgcggagctcggcgaaggccaagttgaaggcttccacgcggatgcgctcgcgggtggcgtgggccgagcggtacttggccgtggcgcgccggcggcggcgcttctcctcgcggctcagctgctgcgggtgcgggtagagcgcggctcggctgccgcccttgccgtcgccctcggcctcctccaccggctccaggtccgacacgctgccgagcaccttggtgtccgtgccgcccagggactccggatccgagtgcgccgagctgggatggtccgaatctgctgcttggtccggactcagcatcattttggaggctgaggaggggtcggaaaattaatcagtaaaaggaatcagggtattttgctggaaggatggctgccgaggcctaccacgccggtcctcccagcggacgcgcggcccgggccccctccccacagcaggccggcgcgcgacgcgggagggcgccgataggatctggcccgagggcgcgagccctgcgcctcgccctggcgcgggagccggcggggacgcggttgacccaggccgcatactagactggacacctcgacttgcagacggccacagcgggcctgtggccctgggcctggggaacaaccgcaggcctgtggggtcgcgactgggtttttgtgcctcttccggccaaatgccaaccgcgctattcctcctccctcccttcgtccccttcccggacaaacgagcgatttcgaacaacgaatacatctgggttttcacgggggcggggagacgcggggtgcacttctcgccccgagggcctccggcgaagcaacccggcagccgcggcgcccgagggcctggcgctggtctggggctgcgccgggggcgcctggctctggggtgcggccggtcaggaatccccatcctggagcgcaggcggagagccagtggctgggggcgggaaggcttcttggacccctcgcgcttctccgaaatcgtaaagaaatgactaaacaaacgtgggggagcctttaaaaagaaaattgactccgatgccctcgcaggctcccggagcaccatctgtcacgcagacagccacacacataggggacctagggacacggcgacgtgggatcagacaatgcgcccggcagtctggcgaccaccttgcgggaaaatgccggcagccgggccgctgagggaggagaggatgcagagggaagggaagagaagggaagggcccggggcggggcaggcggggactagcgggtgcagcgcgtgttgtcccggcgggagctgcatctctgccggcaaagttcgggcgctcccggaaccggagctcggcaggctgcagctgtccccgggtggcctggccaagtccgggcatgtcggtgcttagccttcctctaacttaactgtgccctcttggaaacgccacctggccaggcttctctggggcgcctggagcactggcccggactgtgcgccttctgggagggggccgctcagaaccgctgggcttccgggtaattcgggcttcgagaaagggcccggcaggaggagaaaggcccctgcaggggctgcacgcaccgcccctgggcgtcgggagtgaggaccaggctgagaactcggggccccggcgtgggcagcctccacgacgctcggcacgggagaaatccgcgtcggcgacgtataggagcgtttgcttctagagaaacaaaagcaaggggatgggtgatcggttcccagcaccgcacttgcagaggagcgaattgggccaaaacagctttaatttccctgcgaggaaatcaggtcctctacggcaaaataaaaacaaatgct

SEQ ID NO: 36170 - DNA, 30 bp, Homo sapiens; identical to SEQ ID NO: 756
  chr1:116518723-116518753
  hyper

SEQ ID NO: 36171 - DNA, 30 bp, Homo sapiens
  chr1:116519010-116519040
  hyper
gcgtagcccggctgcgctccccgctccccg

SEQ ID NO: 36172 - DNA, 686 bp, Homo sapiens
  chr1:116710668-116711354
  hyper
gctgggatcgctgtccgcagcaccagccttctcctgggacgtgttcagaaagagggaggctacagtgggcggggagagaagaaggaagagaaggtgggcagaaagggggcaagatgaagcggcaaggaggaaggaaaggagaagctaaggagggaggatggggaggcggcgacaatggccgcgctaccggtcgcccactgtgctgcggtgggtcggggcccactgcccctcgctggggcacctggggagggggcgctggggcacctggagagggcgcgcaggagcagcgggccgagccttctgcggggatggggtgggaagagaagaaatgaagacacagaggagtagaacaaagaggcgggagcaccccgccaggggaccgggaagggtcgaggaaaactgctgccgcgccccactgggttttaacaacgcccgggatgggggaagggctcccacttgcgccccaagcgcatgcggagaaggttcggcagcgcctcctgccggccgcccggagggtccgcggtggcgccagccccgatcgcagccgcgcaggcccgagggcccctacccgcacggtgaattgtcttccacgcactagtattttctcctcgctttcaactgaatggcggcattggtttcactatttccttcctggagctgtggttgaggccgactgtcccagctag

SEQ ID NO: 36173 - DNA, 30 bp, Homo sapiens; identical to SEQ ID NO: 758
  chr1:116915294-116915324
  hyper

SEQ ID NO: 36174 - DNA, 30 bp, Homo sapiens; identical to SEQ ID NO: 759
  chr1:116961198-116961228
  hyper

SEQ ID NO: 36175 - DNA, 30 bp, Homo sapiens
  chr1:117113603-117113633
  hyper
ggccggcctctgcgcgagtgcccagccaca

SEQ ID NO: 36176 - DNA, 339 bp, Homo sapiens
  chr1:117209808-117210147
  hyper
cactcctgggaattcccgtcacctcctaccgagcccgggcgccgcaggtagccccaccctccgccagggcaaatcgggaaggggctccgcggtggggccgcgactcccggcccccgccccaaccgtgggagctctgcgcgcgacgcgtcccaggtggccccgctattgttttaccttgcagggtgtttatatctcgctgattggaaagaaaagaaaccggggaagaagggagtccggagctccgctttcagctgccggagcgcgctcgcagcgcgcccgcccagccaggggaggggtctcgggcccgacccggagctcagccggcgcgggcccgctccc

SEQ ID NO: 36177 - DNA, 41 bp, Homo sapiens
  chr1:117215386-117215427
  hyper
ttgcgcccccgcccccgatggagcttcgaagatgactttat

SEQ ID NO: 36178 - DNA, 1088 bp, Homo sapiens; identical to SEQ ID NO: 761
  chr1:117452333-117453421
  hyper

SEQ ID NO: 36179 - DNA, 23 bp, Homo sapiens
  chr1:117630869-117630892
  hyper
gaaaagtcggctgggcgcggtgg

SEQ ID NO: 36180 - DNA, 30 bp, Homo sapiens
  chr1:117664961-117664991
  hyper
ggtacaagcactcccgcggctccccgactt

SEQ ID NO: 36181 - DNA, 31 bp, Homo sapiens; identical to SEQ ID NO: 762
  chr1:117695844-117695875
  hyper

SEQ ID NO: 36182 - DNA, 30 bp, Homo sapiens; identical to SEQ ID NO: 763
  chr1:117909184-117909214
  hyper

SEQ ID NO: 36183 - DNA, 30 bp, Homo sapiens
  chr1:117910210-117910240
  hyper
ccgggaagcgcgggcggccgagaactcctt

SEQ ID NO: 36184 - DNA, 30 bp, Homo sapiens
  chr1:118148621-118148651
  hyper
cgggggcgtggtcccgccgtataagaacgg

SEQ ID NO: 36185 - DNA, 30 bp, Homo sapiens; identical to SEQ ID NO: 764
  chr1:118149004-118149034
  hyper

SEQ ID NO: 36186 - DNA, 76 bp, Homo sapiens
  chr1:118149461-118149537
  hyper
gatccaagccagtgacttgtgcgctgcgcgtctctcagaaacttcttgggaatgcggtgtctgtgaaacctgcttc

SEQ ID NO: 36187 - DNA, 30 bp, Homo sapiens
  chr1:118150244-118150274
  hyper
acagcaacctttcaacgtgagtaaattggc

SEQ ID NO: 36188 - DNA, 64 bp, Homo sapiens
  chr1:118472434-118472498
  hyper
gagagcattatctgcggctccgattttgcagattctggctgaggcgttcgtgatgtcagcagca

SEQ ID NO: 36189 - DNA, 30 bp, Homo sapiens; identical to SEQ ID NO: 765
  chr1:119168297-119168327
  hyper

SEQ ID NO: 36190 - DNA, 32 bp, Homo sapiens
  chr1:119526899-119526931
  hyper
cccaggcctctggaacgcagctgctgtgtggc

SEQ ID NO: 36191 - DNA, 282 bp, Homo sapiens
  chr1:119527236-119527518
  hyper
cgagagccaggctcctccgaggctggtcttgaggcacttctctagtagcttctccaaaagactgagagtgccggcgtaggtatgacagtgagggtacctcacagacccttctccaaagtctggcgggccttggggtttttcggggccaccaggctcggtggaatttttgaaacgctttcgaaatacatagtttcctctgtggagtgagtgcctacaacgcgcaggccggactgatcccccgttgctgcaggttggtgccccaagctgcgggtgctcgggcgc

SEQ ID NO: 36192 - DNA, 143 bp, Homo sapiens; identical to SEQ ID NO: 766
  chr1:119530005-119530148
  hyper

SEQ ID NO: 36193 - DNA, 306 bp, Homo sapiens; identical to SEQ ID NO: 767
  chr1:119530201-119530507
  hyper

SEQ ID NO: 36194 - DNA, 555 bp, Homo sapiens
  chr1:119530553-119531108
  hyper
cgggtctctccaccctccccctgcgtcctcctccgccctcctctgccggatccgacctgcgcccctacgctggcccagctgctaggaactagcgccccgagcgccgcccgctcgctgcatgagcgcccgagtcctgcttcccacccaccggggcaggcgctcacagactgtgtccactgaacttcatcttgtttttgttattattattattctctctcctctctctctctctctctctctcccctccctctctttttctctcctccccctctctctctcttcctctctgccttcccgtcctccctgtgatccaaacttctgggaaacttttttttccgctaaattcctcccttcccgaggaacagggggcaggcggtgcgctcctgtccgaggggtgagggagagggagggggaggaagaaaaagactgagggggaaaaaagccagcccccaaccaatagcgaggagggaacaagagaaactccgagagcgcgaaccaatgagaggaagggagagactgaggcccgggccaaagcgcagcgccagtcgtcccctg

SEQ ID NO: 36195 - DNA, 30 bp, Homo sapiens
  chr1:119535485-119535515
  hyper
gtttgcaataaaatcgcaggttttgccttt

SEQ ID NO: 36196 - DNA, 13 bp, Homo sapiens
  chr1:119543201-119543214
  hyper
aggggctgagtcc

SEQ ID NO: 36197 - DNA, 37 bp, Homo sapiens; identical to SEQ ID NO: 770
  chr1:119543273-119543310
  hyper

SEQ ID NO: 36198 - DNA, 733 bp, Homo sapiens
  chr1:119543760-119544493
  hyper
tttttgttctttccactcccccgagggtgattctgttagcctcgcaggcccttctcccacccgtcatttgaagtcatcgaccccggggcagccccaacagttctgtgcgggcctgcgcgcaccgccctcaccttgcgcgccaggcatctcacctcagccgggcaggtgcagaggtgacaggcgcggcagccgcggttcgtccggccgaggggcaggaggaggctggccgccgccttctgctgcccgcaggctgagggggcaggggagggggaacagggctgggaaactgccgtcagcgggtcccggccccgcctcccgaacgcaacgtccaggaaacctcagaactttctattgtctgagaagcttcactgaacaaattgtccctaaaactttagagctgcgaagagcggatcagggcaggttctagtgtggccctgtgccccggagcctgcctgccataaagtgtgaccggaagcccccccccccccgcccactgtcagaaccactgaggagagaagagcgcggcgccttagtgccgccctgcgtcgtggtcgggaagccgagcaagcggtgtggacgccccaggagcagggggatccaggcctaaactcatgggttccgaatgggcaagggagcagaatcaagcatcggtgggcgcttatagaaagcgcgtctgtcttggaacacccttaccagggtacccaaccccagcgccaggtttcctggccttgca

SEQ ID NO: 36199 - DNA, 81 bp, Homo sapiens; identical to SEQ ID NO: 772
  chr1:119544706-119544787
  hyper

SEQ ID NO: 36200 - DNA, 30 bp, Homo sapiens; identical to SEQ ID NO: 773
  chr1:119545260-119545290
  hyper

SEQ ID NO: 36201 - DNA, 30 bp, Homo sapiens
  chr1:119548809-119548839
  hyper
atccagatgccgctgcgttcaagctctccc

SEQ ID NO: 36202 - DNA, 682 bp, Homo sapiens; identical to SEQ ID NO: 774
  chr1:119549052-119549734
  hyper

SEQ ID NO: 36203 - DNA, 364 bp, Homo sapiens
  chr1:119549914-119550278
  hyper
cgtctaccccaacccgggtattaccctcttttccgtcttctagaaggggaaaaccatgctgttttgaattcaacatatttagattctgaaaatcgacggcccttcccttctttcctaggaaggcctgccccgtaggcacaaccttcggagaaacgggcggcgcgtgagttccctggagccgcctcctgggcatccaggctcctgtcgcacggctggtgcggcgcccactgggcgtggggactgggcccaaggctcccgggaccgggtcgtggttaacgccgaggccaagcccttcgaagaactctgagttctctgcctgacgttttgtccctcaggaagtgtcccttcccgacttttgagggtg

SEQ ID NO: 36204 - DNA, 215 bp, Homo sapiens
  chr1:119550505-119550720
  hyper
gcacagcccaggaaacgggaaaggccactgtctgcttccctttcgcagattctatccgctggcacgcgaaggtcacacgggctctcaatgctaatttggaatgggaagcaccacgaagggttgaggtagcctggtggccctgactgcgcagggtgcggacagtgagcccgtatccagcttcgctgccacgcgcctagcagcccggcggccccggc

SEQ ID NO: 36205 - DNA, 321 bp, Homo sapiens; identical to SEQ ID NO: 777
  chr1:119551013-119551334
  hyper

SEQ ID NO: 36206 - DNA, 30 bp, Homo sapiens; identical to SEQ ID NO: 778
  chr1:119551790-119551820
  hyper

SEQ ID NO: 36207 - DNA, 30 bp, Homo sapiens
  chr1:119683315-119683345
  hyper
gccaatcccagtctcgcgactcctgcttgc

SEQ ID NO: 36208 - DNA, 388 bp, Homo sapiens
  chr1:119870167-119870555
  hyper
cctgactccaagtggcagccccggggcgagcatgtgatgtcaagctgggcagaggaaagcggagctgtgcaccggcctgtgtactgtaagccggcccgggtcgtaaaagtgtcagcacgcgatatatttcttgcaggggatcctctctggctcttgccagcgcctctcccccgtggctggcagccgccctagccgggcctgcaaacagcggatgccccaggtcgctatccctccgccctgccccggagcgccgggccctcacgttctcgctccagcctggggtctctcacgtggcatctggccctggggacggtgcagcggaggagttaattgctgtcactcctgacttcagcgaaagaggtcgatcgtggggtgagatattgaagct

SEQ ID NO: 36209 - DNA, 86 bp, Homo sapiens
  chr1:120190363-120190449
  hyper
tctgatgcccccttcggtggtcggcgggacggtcctattccctcttgcatcgctgtctcctccctcaagtctcagcctcctcctcc

SEQ ID NO: 36210 - DNA, 293 bp, Homo sapiens; identical to SEQ ID NO: 780
  chr1:120190519-120190812
  hyper

SEQ ID NO: 36211 - DNA, 509 bp, Homo sapiens; identical to SEQ ID NO: 781
  chr1:120190871-120191380
  hyper

SEQ ID NO: 36212 - DNA, 30 bp, Homo sapiens; identical to SEQ ID NO: 782
  chr1:120336067-120336097
  hyper

SEQ ID NO: 36213 - DNA, 30 bp, Homo sapiens
  chr1:121280597-121280627
  hyper
ccaaggaactccaaaattaaacccagccct

SEQ ID NO: 36214 - DNA, 30 bp, Homo sapiens
  chr1:145644968-145644998
  hyper
tgacactctacctttcagctgtcagtggaa

SEQ ID NO: 36215 - DNA, 2 bp, Homo sapiens
  chr1:147775410-147775412
  hyper
tg

SEQ ID NO: 36216 - DNA, 48 bp, Homo sapiens
  chr1:147775495-147775543
  hyper
cggcaagatgtgcctctcaggttttccgaggctttggagcctgcacaa

SEQ ID NO: 36217 - DNA, 30 bp, Homo sapiens
  chr1:150488790-150488820
  hyper
tttgcaaagtgcagcgccaaatgctgcaga

SEQ ID NO: 36218 - DNA, 30 bp, Homo sapiens; identical to SEQ ID NO: 783
  chr1:150521186-150521216
  hyper

SEQ ID NO: 36219 - DNA, 30 bp, Homo sapiens
  chr1:150534237-150534267
  hyper
aaccctgtgggggacgacagagttgcccga

SEQ ID NO: 36220 - DNA, 30 bp, Homo sapiens; identical to SEQ ID NO: 784
  chr1:150534764-150534794
  hyper

SEQ ID NO: 36221 - DNA, 30 bp, Homo sapiens
  chr1:150551999-150552029
  hyper
caaacattgccagtcgccgccgccgcctgg

SEQ ID NO: 36222 - DNA, 113 bp, Homo sapiens
  chr1:150586170-150586283
  hyper
ttccctaatcataaacgacacttcagacatggaccttaacgtcaaaccaggattcatgatcactaaatgactttccttttgtacgtgtgagcaggtggcgttcaccaggggtg

SEQ ID NO: 36223 - DNA, 62 bp, Homo sapiens
  chr1:150601696-150601758
  hyper
tactgagtgacaaacgacccaactaaccagcgccaaagcagcatgtcgtgttgaagctcacc

SEQ ID NO: 36224 - DNA, 30 bp, Homo sapiens; identical to SEQ ID NO: 786
  chr1:150602085-150602115
  hyper

SEQ ID NO: 36225 - DNA, 30 bp, Homo sapiens; identical to SEQ ID NO: 787
  chr1:150669240-150669270
  hyper

SEQ ID NO: 36226 - DNA, 459 bp, Homo sapiens; identical to SEQ ID NO: 788
  chr1:150669480-150669939
  hyper

SEQ ID NO: 36227 - DNA, 30 bp, Homo sapiens
  chr1:150849174-150849204
  hyper
ggaatccaagatggcggcttcagcagcccc

SEQ ID NO: 36228 - DNA, 107 bp, Homo sapiens
  chr1:150947648-150947755
  hyper
acccccaactgctgtgcggcccccggtccccgccagggtgggcacattcccacttccagccccacggggcgcgggcggaggagggtgcagcccggggatcctgccca

SEQ ID NO: 36229 - DNA, 25 bp, Homo sapiens
  chr1:150980790-150980815
  hyper
gagttgcgggactacgtttcccacg

SEQ ID NO: 36230 - DNA, 30 bp, Homo sapiens
  chr1:150981637-150981667
  hyper
cagtttctgtctggcgggctgaactcattt

SEQ ID NO: 36231 - DNA, 30 bp, Homo sapiens; identical to SEQ ID NO: 791
  chr1:151020534-151020564
  hyper

SEQ ID NO: 36232 - DNA, 82 bp, Homo sapiens
  chr1:151020765-151020847
  hyper
tcaggctgacttcaagcctgccgcgctcccccgggaggtctactgaggacctgccaggctcgcaggccaccctgagccagtg

SEQ ID NO: 36233 - DNA, 30 bp, Homo sapiens; identical to SEQ ID NO: 792
  chr1:151031280-151031310
  hyper

SEQ ID NO: 36234 - DNA, 30 bp, Homo sapiens
  chr1:151032245-151032275
  hyper
agaactggagaatgcggacacctagatgag

SEQ ID NO: 36235 - DNA, 30 bp, Homo sapiens
  chr1:151042861-151042891
  hyper
aaacctggccgccccggaccccgaagaagc

SEQ ID NO: 36236 - DNA, 239 bp, Homo sapiens
  chr1:151043248-151043487
  hyper
cctctgtttctccacgagggggggttaaaggcccccaaaacatgcacacatgaaaagggcaaaaagtaaccgtccttgacagggagtcttaactagagaaggaaacgggactaaactggcgggctccgtggaagcgtggccggcagcgtcccggacgaggaggtgaggaggaaagaagagatgtgtggactccggggggcgtcagggctggaaaggaaagtgccgtgagaagtcacacc

SEQ ID NO: 36237 - DNA, 30 bp, Homo sapiens
  chr1:151119202-151119232
  hyper
ccgccctcggagggcggctagacaccgcct

SEQ ID NO: 36238 - DNA, 30 bp, Homo sapiens
  chr1:151119510-151119540
  hyper
gctgtcagagcctgcgcgatccgtcctccc

SEQ ID NO: 36239 - DNA, 30 bp, Homo sapiens
  chr1:151171002-151171032
  hyper
aggtcgggcgcatgcgcagtgctcggattt

SEQ ID NO: 36240 - DNA, 894 bp, Homo sapiens
  chr1:151512577-151513471
  hyper
aagcagccccatgtcgctcccaagccccacctttgtgtaaatctatgcgagcaccgatggggcatgtcccagacccattggctccgcccacctcacctcctcgcctatcgttagttctctgcgaaaccgcgaactgggggcgcggcctatcttcagccccgcccctgatgggcctatacaagggggcggttccgcgcgcgcccgcccagttggagccagacagcggggtggacaagtggcgtgtgtgctgcgaccccgagggaagatgaacgggacgcggaactggtgtaccctggtggacgtgcacccagaggaccaggcggcggtaagaaaaagcgctctcgctgtcttctccgttttgtattcccggtttctaagtccgccccttccgtgccccgcgccgtgttggctgacatcacctggtgcccggctcgcgcggtcagccctgcgcggcgcttctctctttttattcttttgcctgcgacgggcagtgggagtcgcggggtgaagactcctttgaggctggagggttcggggcgtccctgccctttggtaggacactgcggctcctgcctgggactcggcgccggcgagcccgtgcttgggccgcgggtctcaggcgtcttttgggcagccacattgggtcataagagaatgagctcaagcgactgggtccctgagcgcctttggacgttgtgtcctgccgaggaggcttaggctttcccgtgggtcgagggtcctggtgacctccgaggccctccaaagaatttcatcatggtgctttggatgatcagtaacaagaaaaatggtagagtaaattacagggcttggactggagggcggggggcaagtaggggacggtaggactcaaactattccgagattggctaggga

SEQ ID NO: 36241 - DNA, 30 bp, Homo sapiens; identical to SEQ ID NO: 795
  chr1:151566301-151566331
  hyper

SEQ ID NO: 36242 - DNA, 212 bp, Homo sapiens; identical to SEQ ID NO: 796
  chr1:151566652-151566864
  hyper

SEQ ID NO: 36243 - DNA, 35 bp, Homo sapiens; identical to SEQ ID NO: 797
  chr1:151584887-151584922
  hyper

SEQ ID NO: 36244 - DNA, 414 bp, Homo sapiens
  chr1:151689188-151689602
  hyper
ccggctgctcccgccgctggggctgcctgctttcccggtcacctgggtcccggagctctgctctccggccgcgctctcctcaacaaaaacctcccccctccacacccccctccccactcccacctcctttcccctgacatcagtgatgtcagtctcaggggtcgaatacaaattctctaccctggagagggacgcacaatccaggcacgagccacgccctctttctatctccatcctccctgactcccttcccgcccccagaagagcagctggtcctgttgataataacccttcccccatcttactccccagtcaggagttgggcaaagcactaagatggagaatttatagaggaaccctaaagtggggtccattgttccgggggctggagctgtccccggtgctggaagactc

SEQ ID NO: 36245 - DNA, 662 bp, Homo sapiens; identical to SEQ ID NO: 799
  chr1:151693823-151694485
  hyper

SEQ ID NO: 36246 - DNA, 111 bp, Homo sapiens
  chr1:151762600-151762711
  hyper
caaacgctcccgcaccgggtccgttgtggcgtaagcgggtgactggagcatcttcctcagatacagttacgagttcccagtgggtcaagttgcccccgagcggcgtctcac

SEQ ID NO: 36247 - DNA, 180 bp, Homo sapiens
  chr1:151763982-151764162
  hyper
cgagaccagcactgcgccctactcggtccaccctgtccccgctccgcgctaggggctcaccctgggaacaggggtcgggcgatcctggtcattgggggatcttccgcactagcttccatcacaatacctggcaggtgatgagcaataaatatttgctgaaagaacgcaaggttgtatctt

SEQ ID NO: 36248 - DNA, 46 bp, Homo sapiens
  chr1:151966777-151966823
  hyper
agccctaggaggtccgtctgggggtctcggcggcctgcgccagtgg

SEQ ID NO: 36249 - DNA, 84 bp, Homo sapiens
  chr1:152082877-152082961
  hyper
cctgctgcagctgctcttcctcgcggtattgtctctcctgttcttggcgccttctcttctcgcgctcctctctctgtagctcct

SEQ ID NO: 36250 - DNA, 46 bp, Homo sapiens
  chr1:152083261-152083307
  hyper
gaaaccgttgttcccgctgctggcgctcctcggccctcagctgcct

SEQ ID NO: 36251 - DNA, 127 bp, Homo sapiens
  chr1:152487829-152487956
  hyper
tcttccaggtttgtcgtgaggagctccgcgatgtcctctcaacagagcgccgtttccgccaaaggcttttccaaggggtcgtcccagggccccgctccgtgtcccgccccggcgcccaccccggcgc

SEQ ID NO: 36252 - DNA, 165 bp, Homo sapiens
  chr1:152487999-152488164
  hyper
cggcgactcaggctgctgcggctccagctccaccagttgctgctgcttcccaaggagacgccgccgacagcggagtagtggttgctgctgctgcgggggcggcagccagaggtcccagcgctccaacaaccggagctcaggatgctgctccggctgctgagaggc

SEQ ID NO: 36253 - DNA, 30 bp, Homo sapiens
  chr1:153377352-153377382
  hyper
tggtactgcctccggcgacaaccagggcga

SEQ ID NO: 36254 - DNA, 38 bp, Homo sapiens
  chr1:153395126-153395164
  hyper
ccgtggtgctgaattcactgtgacgtcactcctgtctc

SEQ ID NO: 36255 - DNA, 30 bp, Homo sapiens; identical to SEQ ID NO: 804
  chr1:153425048-153425078
  hyper

SEQ ID NO: 36256 - DNA, 95 bp, Homo sapiens
  chr1:153438388-153438483
  hyper
acacggtggcgccaccgagcacccacctcgccagagttgcgaggcggttccacgtggctgggccgtccttgccggttctcgcccttatttaggtt

SEQ ID NO: 36257 - DNA, 177 bp, Homo sapiens
  chr1:153508698-153508875
  hyper
tctcccctcatctgcgcagctcagtttgctcagtttgctcttcgtgacacgtgactcggcaaggggagcaggaggaggactgcggcggtcacccctgcttcctctgccagaccgtgaatgtgaccctcgagccagcgcagcgtcaatgtgggcaaggagggcgcctcacaggatgcc

SEQ ID NO: 36258 - DNA, 30 bp, Homo sapiens
  chr1:153606928-153606958
  hyper
gagcgtggaggccccggggaggaggcggag

SEQ ID NO: 36259 - DNA, 30 bp, Homo sapiens
  chr1:153643029-153643059
  hyper
aatgtcaaggccttcgcactgaggatgaat

SEQ ID NO: 36260 - DNA, 30 bp, Homo sapiens; identical to SEQ ID NO: 806
  chr1:153643807-153643837
  hyper

SEQ ID NO: 36261 - DNA, 1445 bp, Homo sapiens
  chr1:153650994-153652439
  hyper
cgcgggctgggcggcggggaggaaggagttaaagatcctggattggctcttctgtcactgagtctgggaggggaagcggctgggagggagggttcggagcttggctcgggtcctccacggttccctccggatagccggagacttgggccggccggacgccccttctggcacactccctggggcaggcgctcacgcacgctacaaacacacactcctctttcctccctcgcgcgccctctctcatccttcttcacgaagcgctcactcgcaccctttctctctctctctctctctctctaacacgcacgcacactcccagttgttcacactcgggtcctctccagcccgacgttctcctggcacccacctgctccgcggcgccctgcgcgcccccctcggtcgcgccccttgcgctctcggcccagaccgtcgcagctacagggggcctcgagccccggggtgagcgtccccgtcccgctcctgctccttcccatagggacgcgcctgatgcctgggaccggccgctgagcccaaggggaccgaggaggccatggtaggagcgctcgcctgctgcggtgcccgctgaggccatgccggggccccggcgccccgctggctcccgcctgcgcctgctcctgctcctgctgctgccgccgctgctgctgctgctccggggcagccacgcgggcaacctgacggtagccgtggtactgccgctggccaatacctcgtacccctggtcgtgggcgcgcgtgggacccgccgtggagctggccctggcccaggtgaaggcgcgccccgacttgctgccgggctggacggtccgcacggtgctgggcagcagcgaaaacgcgctgggcgtctgctccgacaccgcagcgcccctggccgcggtggacctcaagtgggagcacaaccccgctgtgttcctgggccccggctgcgtgtacgccgccgccccagtggggcgcttcaccgcgcactggcgggtcccgctgctgaccgccggcgccccggcgctgggcttcggtgtcaaggacgagtatgcgctgaccacccgcgcggggcccagctacgccaagctgggggacttcgtggcggcgctgcaccgacggctgggctgggagcgccaagcgctcatgctctacgcctaccggccgggtgacgaagagcactgcttcttcctcgtggaggggctgttcatgcgggtccgcgaccgcctcaatattacggtggaccacctggagttcgccgaggacgacctcagccactacaccaggctgctgcggaccatgccgcgcaaaggccgaggtgagacgctggcacaccccgtcccgccgcttagccgcagggcctcccctctgacctgccggaggcatcgggactttctctctcatctgggggcactcttctttctcctcgccgttcttcattctactttcagc

SEQ ID NO: 36262 - DNA, 30 bp, Homo sapiens
  chr1:153895706-153895736
  hyper
cacatccgggtcttcgacagcccattaagt

SEQ ID NO: 36263 - DNA, 30 bp, Homo sapiens
  chr1:153918694-153918724
  hyper
gccatcccccaccccgcctgccgcccgcgc

SEQ ID NO: 36264 - DNA, 30 bp, Homo sapiens
  chr1:153919359-153919389
  hyper
aagcatgatgtgggcgcaggtgaagtcccg

SEQ ID NO: 36265 - DNA, 30 bp, Homo sapiens
  chr1:153931159-153931189
  hyper
cacatccccagtcacgcagcactaggagga

SEQ ID NO: 36266 - DNA, 177 bp, Homo sapiens; identical to SEQ ID NO: 808
  chr1:153936614-153936791
  hyper

SEQ ID NO: 36267 - DNA, 157 bp, Homo sapiens; identical to SEQ ID NO: 809
  chr1:153940531-153940688
  hyper

SEQ ID NO: 36268 - DNA, 30 bp, Homo sapiens
  chr1:153949877-153949907
  hyper
aggatctatcaggacgtccccgttgccaca

SEQ ID NO: 36269 - DNA, 331 bp, Homo sapiens; identical to SEQ ID NO: 810
  chr1:153958646-153958977
  hyper

SEQ ID NO: 36270 - DNA, 27 bp, Homo sapiens
  chr1:153963224-153963251
  hyper
ttccgctttcgctcctttccggcggtg

SEQ ID NO: 36271 - DNA, 73 bp, Homo sapiens
  chr1:153963535-153963608
  hyper
gaccatcccattttcgctgttggtttctaaatctctgcatttctgtccctcttagctcgcaaaggatctcctt

SEQ ID NO: 36272 - DNA, 30 bp, Homo sapiens
  chr1:154192829-154192859
  hyper
ggccatcaccagcacgacattcaccccgga

SEQ ID NO: 36273 - DNA, 30 bp, Homo sapiens; identical to SEQ ID NO: 812
  chr1:154193254-154193284
  hyper

SEQ ID NO: 36274 - DNA, 30 bp, Homo sapiens
  chr1:154194034-154194064
  hyper
ctcagtttggtgtgcgaaggattaatttgt

SEQ ID NO: 36275 - DNA, 30 bp, Homo sapiens
  chr1:154244744-154244774
  hyper
aggctggccagccccgcgggtggggtggtt

SEQ ID NO: 36276 - DNA, 30 bp, Homo sapiens
  chr1:154297256-154297286
  hyper
gatggggacggctgcgggcatctgcagggt

SEQ ID NO: 36277 - DNA, 361 bp, Homo sapiens
  chr1:154297628-154297989
  hyper
gcggctccgaggagcgagagtcgggctgagggcaacctggcgccagggaaaattctggttattcaccacttctacagctctcctgccgctccctgcagaggatgctcgttttgcagagaaggcagtgttcctctattcccttcttccgaattaaaaataccccctcagagcgatctagcctcccgaattgttttttcttttaagatgcggatggacgtacgtgtgggggcatcccagcccagccacgccgaggctcggaagggctaagaccctcccactgccccgcacaaagatggctgctccctcctccccgctccttctcccctccccaaaaccccctcccgccccccggcccccgccg

SEQ ID NO: 36278 - DNA, 114 bp, Homo sapiens
  chr1:154298038-154298152
  hyper
cgggccgaggccccgggggagcggggccgcagctgggggggcgggagcccgtggggagccgagccgagcgccccccgccccagcccccggcatgggcagtacggggccgccggg

SEQ ID NO: 36279 - DNA, 221 bp, Homo sapiens
  chr1:154298253-154298474
  hyper
cgcggggctggaggggccggggagcgggtgtagactggggagcaccgggggccaagatttgggagctgcggccagacggggcggggatggcggccgactggagacgaggggctgtcgggttcccggggacggggcagagcgggggtctgcgtacaggatgggaggatggggtgccgaaggggcgcgtggagagcaggagagcggcgcgagtgccaaggaga

SEQ ID NO: 36280 - DNA, 30 bp, Homo sapiens
  chr1:154377606-154377636
  hyper
actggtggctgatacgcccttttctcatca

SEQ ID NO: 36281 - DNA, 284 bp, Homo sapiens
  chr1:154474300-154474584
  hyper
tcttgcgcaatttgccgccgccgcccccgggcttggcccgctccgacacggtcttcaggttcagggggaactccttgaaccacttggccgccatgagggggccccggccggctcggcccaggagcgtcggggccgtggagcaggcgagcgaggaagcccagcccagacacgcagaggcgccaggggtcggggaccactgcattccccgtgactggggcgctggaggccgcggcgaggccccgcgacggctgctccgtgcgcccccggccggccgtcgcccacgc

SEQ ID NO: 36282 - DNA, 34 bp, Homo sapiens; identical to SEQ ID NO: 815
  chr1:154474743-154474777
  hyper

SEQ ID NO: 36283 - DNA, 80 bp, Homo sapiens; identical to SEQ ID NO: 816
  chr1:154474987-154475067
  hyper

SEQ ID NO: 36284 - DNA, 67 bp, Homo sapiens; identical to SEQ ID NO: 817
  chr1:154475371-154475438
  hyper

SEQ ID NO: 36285 - DNA, 30 bp, Homo sapiens
  chr1:154531403-154531433
  hyper
gagtttgcgtatgtcgtgcgtgcttgcgcg

SEQ ID NO: 36286 - DNA, 227 bp, Homo sapiens
  chr1:154540059-154540286
  hyper
tcttgccccttctccgaccatgctgcaggtcctgccccaactttaggacttcagaactcctccaccgtgccgtggaggaacagcccttcttccacctcacgcacaccctaccacggcagaaccaatcgaagactatcccagccggggaccccccttttttttcctgggacccagcgtttccgcctccggggcgcagactcctccccctcaccgtcccaattgtattc

SEQ ID NO: 36287 - DNA, 30 bp, Homo sapiens
  chr1:154600441-154600471
  hyper
atcaatggtctggtcgcagattggtgacat

SEQ ID NO: 36288 - DNA, 31 bp, Homo sapiens; identical to SEQ ID NO: 818
  chr1:154816590-154816621
  hyper

SEQ ID NO: 36289 - DNA, 80 bp, Homo sapiens
  chr1:154842702-154842782
  hyper
tggtcctctaggagcgtgtgaggccaggctcagcttcactcctcgctggctcaatagcttcgctcgcctcctcctgccac

SEQ ID NO: 36290 - DNA, 243 bp, Homo sapiens
  chr1:154909301-154909544
  hyper
gggctgaccgcccgcgaccgtgccctcagctcatgtccaaacagatatggggagaaaagggtgagacacgcggagagaaaggcggttccttcacagagcagcctcccctcgtgaagctcccccacccgaactcacttagaacagtccagccccgcccagaaccttcgctcacagcctggcctgcttaactgacacccggggaggaaccggacgcgactaccttcctccgaggggggtgacgtc

SEQ ID NO: 36291 - DNA, 30 bp, Homo sapiens
  chr1:154948290-154948320
  hyper
accaccattgaaaacgaaaccagtagtaaa

SEQ ID NO: 36292 - DNA, 71 bp, Homo sapiens; identical to SEQ ID NO: 821
  chr1:154955696-154955767
  hyper

SEQ ID NO: 36293 - DNA, 677 bp, Homo sapiens
  chr1:154971706-154972383
  hyper
cgaccgtaacctcctagctggctgggttcgagaagccggggacctgcgcctcctggtggctgatcggaaggaggctgagtgcagaggggttgtcttgccttctctgggacgtggagttttggaaactgttcccctgagcttcctgaagctaaatttgcctcccccggccttggggggcgcagagatcccggcggcgattagcgctgcgcggcagccggctccaacccagaggcccggaataggcgcggagttataaatagtgccacccgcaggtgttggggggagtcggcgggaggggggtacccctggcggccacggccccttcaggtgggttgggcggtcgcggtgggagcgctggggggcggggggcgtggggggtctgcggtctgagcgcccccagcggtttcctgggcggcgggtttttcgagggaagcggaggcagcggaggatgggggggagcagcggagaagaggtgggcgcctggcgcatgctgacgctccgcttgcagctcagccccccacattccgaaacaggcccccagacccactcacgcaggaccccgcccaggcaaagcctcgcctttcttaacacctgaaggcctcattcccccaggttctgcaagcatctaacttctatgcttctacccttcggcgcacgtggcccggccagtccgcgca

SEQ ID NO: 36294 - DNA, 30 bp, Homo sapiens
  chr1:154973930-154973960
  hyper
aaacatccttcacccgctacctttctcagt

SEQ ID NO: 36295 - DNA, 813 bp, Homo sapiens
  chr1:155036004-155036817
  hyper
ctgctgttggaatacgtccttccttcccgccccctcgcagtgcggtgcagcctcagtggaagctttggcgaacctggcgcgcgctgcggtgcacagagggttaactggagttggcgctgggtggagaggaggagacgcgctcccattggcggaaagttattcaggggcggggtcagtgaatctccgtaccccactcccctttccgcaacttccctcttcactttgtacctttctctcctcgactgtgaagcgggccgggacctgccaggccagaccaaaccggacctcgggggcgatgcggctgctgcccctgctgcggactgtcctctgggccgcgttcctcggctcccctctgcgcgggggctccagcctccgccacgtagtctactggaactccagtaaccccaggtagccgggccgaaccgggcgagcgcacagccaagtctgcgcgctcccgggctttgcgcgcgcccgccacccgctctttgcgcggcgccgcctgagcctggccgcgcgccggggctcctttgtttgagccggcgggggaggggggaggggcgaggggcgaggcgcgccctgggtctccccacagcccgcatgtgttggggggcaggcagaagaccccagccccaagggttgtctagggggtcttggagcatggagctgggggggcctttgcccgcactccgggctccgcccccctcgctgctctcctggcgatccccagcctcccgcaggctggagctgtggctgacgaacttgagagcgagggagggggctttactcttatgaaagagcgtgggttactctcct

SEQ ID NO: 36296 - DNA, 546 bp, Homo sapiens
  chr1:155043325-155043871
  hyper
cctcccaagtgaagccataggcggagtagactgggagcgactagttagcagccctttccctggattgagaactgtgggggtctcacccggctcccagcggccccaggccagcctccttttcgcagaaccaggcgggcgcgctcgctcccgcggctggggctggcgcgcggacgcgccgctgataacgcatgtgcgaaagagacgcggggcccagtcagctttctccgcactcagacgcacgccctaactgtcgggcgctcccacttgacacggacacacgcccctgccggccgcccagccccttgcaggtgcaagggcggatgcctcagcgaccacgggagccgggctggggaggttggtggggggcggggggagtcttaaacttaggcccgcccagccacaggcgctcaggcccagccggccttccctatacaactttcctcatagcatgcgcgggcggctgattcagtcccggggcgcgtccccatggaaagccagggctgagtccactcatggggccgagacgggctgcaggcgctgggaggt

SEQ ID NO: 36297 - DNA, 30 bp, Homo sapiens
  chr1:155052931-155052961
  hyper
gactccaagaactccggggggcgctggggg

SEQ ID NO: 36298 - DNA, 30 bp, Homo sapiens
  chr1:155053836-155053866
  hyper
ggggttgggacggccgatggccaaatatat

SEQ ID NO: 36299 - DNA, 94 bp, Homo sapiens
  chr1:155055087-155055181
  hyper
ggtgtgtcggcattcgcctttctgcaagagaggcgagaggctataggggatgaagtggagcaagaagagagaacagtacgaaggggcagggcac

SEQ ID NO: 36300 - DNA, 415 bp, Homo sapiens
  chr1:155099555-155099970
  hyper
tattcaagagcctgttcgcacggtgtacgcgtgtgttgttacatatactcaggttattagcgctctttgacttatctaaaataagaacggccccctctcgagcccagggtcccgcgtgtcgctcctgcgggcaggcactgatgtgatggacagaggcgtccttagccccggccgcacacgttacacactcgatcacacaaagcgttgcactttattcccggcatctaggcgatgacacaatctccagaacaaagacaacattgacaaacccaacaaaaacaaacagccgcgtgtgtgtggggaggggcagtcaagcgcagagtccgggaaggggatgggggaggaggagagtgtgggaacgcgggcgcccgagcctgggcatgcgaggctcagaaaggtgcggggcatgtcaaca

SEQ ID NO: 36301 - DNA, 226 bp, Homo sapiens
  chr1:155100351-155100577
  hyper
agatctgtgagcccagcgctgactgcgccgcggagaaagccagtgggaacccagacccataggagacccgcgtccccgctcggcctggccaggccccgcgctatggagttcctctgggcccctctcttgggtctgtgctgcagtctggccgctgctgatcgccacaccgtcttctggaacagttcaaatcccaagtaagcctcgagactcccgctggcagcctggg

SEQ ID NO: 36302 - DNA, 5 bp, Homo sapiens
  chr1:155145936-155145941
  hyper
cgtct

SEQ ID NO: 36303 - DNA, 30 bp, Homo sapiens
  chr1:155146925-155146955
  hyper
aagaccccaccccacgcacccccactcagg

SEQ ID NO: 36304 - DNA, 78 bp, Homo sapiens
  chr1:155147183-155147261
  hyper
tccggtggggagggggcgagtaggcggggctcttgattcccccgctagttcggagaagggggtgccgctgaccgggtt

SEQ ID NO: 36305 - DNA, 114 bp, Homo sapiens
  chr1:155147320-155147434
  hyper
cgatggggaagtgaaggatggggaatggaggctggagtggccgcaggccggagctgcggcaggaggacgtatggagcgagcaggatggagtgccaacctcgcctggctatcggg

SEQ ID NO: 36306 - DNA, 444 bp, Homo sapiens
  chr1:155152068-155152512
  hyper
ggccaggccctgactgacacccgctgtctcttccaacagtgcctgaggcccccgtcattgacacccagcgcacctttgcctatgatcagatcttcctgtgctggcggctgcccccccattcaccacctgcctggcactataccgttgagttccggcgcacggatgtgcctgctcagccaggccccacccgctggcagcggcgggaggaggtgaggggcaccagtgccctgcttgagaaccccgacacgggctctgtgtatgtgctgcgtgtccgcggctgcaacaaggccggctacggcgaatacagtgaagatgtgcacctgcacacgcccccggcacctggtgagtgggcaggcacaggtggtcgtgcaaagggcatggggtatgccagggcctaggccctgacggttggttccggtggccgctagagaggccatataacat

SEQ ID NO: 36307 - DNA, 796 bp, Homo sapiens
  chr1:155164178-155164974
  hyper
ggtattggggacaggtaggcacgtagcggggggcaaaagcacacgtgaggtgcgtaatgcgcgacagccaagaggtgtgtgcggcagcagtgcacgaggggaggaagctatcccaggccgcggcagcacgtggaacttgggtcccgcagtcgcaggctgcgctctaggccgacggaagcagttccgcctgtattcagaaaacagttctcagccccaaagacacaggttggaaagaacactttaaaaacacttcggcgaggcacgggattggagcgcatcagatcagcaggcgagagaccaccgctctcgcccgcgcgccgcgcggcgcccgaggcgcagctttgtgtgcggcgagaccctggggcaggcgctgggcggggtggggacatctgacgtcagcgcgcccgggagcgcgggccggggaggcggggagccccccaactcgcaggccggagaaaacacgagtagctaggtgggcggccccaaacctcaactcccggcattgccaagcaacagccattcagttcggttgctgggacacgcgtcaccatggcgacggctccgcgccgcgcagtctgagtacttaaagagcaagcgcgcgcaacgcccgggcgtcggaaagcggccttctgggactccgcaaactcccgttctccctcccccctcccccttgccattccctttgccttccgggcgccaagtctctctggcctccaaggtgaacccaactccccagcgcgccccgggttcccgggtcgggccggcttcaggcggtggggagcgggatcccgggccc

SEQ ID NO: 36308 - DNA, 30 bp, Homo sapiens; identical to SEQ ID NO: 830
  chr1:155178540-155178570
  hyper

SEQ ID NO: 36309 - DNA, 30 bp, Homo sapiens; identical to SEQ ID NO: 831
  chr1:155827029-155827059
  hyper

SEQ ID NO: 36310 - DNA, 30 bp, Homo sapiens; identical to SEQ ID NO: 832
  chr1:155829534-155829564
  hyper

SEQ ID NO: 36311 - DNA, 451 bp, Homo sapiens
  chr1:155830058-155830509
  hyper
gtggctggcagccaggggaggcggcggcctctggggaaagaggggtgcggggtggggagcaaaaaggaagccactccttaagccggtcagctggatgctggggctaggaggaaacgtgagccctgcaagctccattccgcatcgtaatggtggggtccctccgatgctaccaaatggcgcttggcgctgctgggctgggggatgacgtgatgtctatttctgggcctcctggcagcgccgacgctctccttccggggcctttgttccctgtttccctgggccgccttttcaaaaagggggactgaccagcgttgatgctggcgggggcgcgatccaggccggagggggaggggcgaaagaggcccagcccgggggaggccgctttgtgtaccgcagaaagcattacgtcatttcagagcggctggtccccgacccagccctgtgggctcca

SEQ ID NO: 36312 - DNA, 30 bp, Homo sapiens; identical to SEQ ID NO: 834
  chr1:155880492-155880522
  hyper

SEQ ID NO: 36313 - DNA, 30 bp, Homo sapiens
  chr1:155881275-155881305
  hyper
gttccgggacccaccgctgaaggtcctctg

SEQ ID NO: 36314 - DNA, 30 bp, Homo sapiens
  chr1:155904291-155904321
  hyper
tccgattggactctcgatgatttaaaggca

SEQ ID NO: 36315 - DNA, 30 bp, Homo sapiens; identical to SEQ ID NO: 835
  chr1:155946130-155946160
  hyper

SEQ ID NO: 36316 - DNA, 222 bp, Homo sapiens
  chr1:155946471-155946693
  hyper
ggaaccaaatttctgcggtttcaaaaaacctcccccgccccccttggctctactccagggtctcagctcaaacggttgaaaaaataaacagacttttggagctggggcctgggctggcgcaggctgtgaagagcctgtctgccaccccactgttccaccacacttcagccacctcaccccggccctctgtttgtcttaggccctactcgaatccccagttgc

SEQ ID NO: 36317 - DNA, 30 bp, Homo sapiens
  chr1:156022821-156022851
  hyper
cacaggcaacagtccgtcattcaacaagat

SEQ ID NO: 36318 - DNA, 30 bp, Homo sapiens
  chr1:156024328-156024358
  hyper
ctgccaagcggacacgttgattcctttctc

SEQ ID NO: 36319 - DNA, 30 bp, Homo sapiens
  chr1:156024987-156025017
  hyper
gatggaaacccagacgttttactccccgct

SEQ ID NO: 36320 - DNA, 66 bp, Homo sapiens
  chr1:156036260-156036326
  hyper
ggagctaggatgggggcgagctgcacggatcgagagcgccccctcacttccgcacaatgctctgca

SEQ ID NO: 36321 - DNA, 30 bp, Homo sapiens; identical to SEQ ID NO: 838
  chr1:156084256-156084286
  hyper

SEQ ID NO: 36322 - DNA, 31 bp, Homo sapiens
  chr1:156084628-156084659
  hyper
agcagtctctgtccttcgacccgagccccgc

SEQ ID NO: 36323 - DNA, 30 bp, Homo sapiens
  chr1:156163750-156163780
  hyper
aggccgtcagttctcggaagtgcggcacat

SEQ ID NO: 36324 - DNA, 30 bp, Homo sapiens
  chr1:156163996-156164026
  hyper
gagttcgcctcagacgcggtggagccgccg

SEQ ID NO: 36325 - DNA, 30 bp, Homo sapiens
  chr1:156183081-156183111
  hyper
gcagtcggacgaggcgacccagtcaaatcc

SEQ ID NO: 36326 - DNA, 707 bp, Homo sapiens; identical to SEQ ID NO: 839
  chr1:156215212-156215919
  hyper

SEQ ID NO: 36327 - DNA, 672 bp, Homo sapiens
  chr1:156357855-156358527
  hyper
tgagggaaggttctccggaagcagccgctgttctggcttggcgcaagtgcgtgtggacgacagcaggatttcctgcccagggacatctggataagaggcccaaggtccccaggagcccccaggtgcttctgccctgtgtggccagagccccctcggccaggagttagaagctgctcctctgacctctggaggacccggcactccgaaccccgcgcagcctgggaaaggcctgagattccccgctattgggattcacatcacgacgcggcggccccaactcggggaggaattagacacggcgtgagtgtcccaagtgcggggcggtggccgtcccggggcagacgagcgcggctgccgcgtccccccacctcaccccgatattccgctcccaccgtcgggaactcccccaccgccgcctccggccctgcgcgccccttctcctttgtctggcccgcccactcccagccggtccgccgcgccgccccgcgcgccccggcccgtgcgcccgccgccgccgcccaggaacaatgcgggccaatgtctccgggcgggcgagccggctatgcaaatgcccaacggcctgtgagaatccccttcgccgccgcctgggcttccacggcctgaaaagggctggcggccgggcctgggtgggggaggcggccactgcatagg

SEQ ID NO: 36328 - DNA, 1174 bp, Homo sapiens
  chr1:156390041-156391215
  hyper
gctggtcagtcctcgcggctctagcccctcgctcaagcctctccctcccgcccgtgaggccggctttccccgggcccctctgcgcagtgtatggggttatttttactttcggttatctagctttatgaagactccacaccactcatacagctagataaccaaagataacaaccaaccccgcctcctggctgctgtcgccgcctcttccacgcagcctcccggccgccgccgccgccagcacctccgcagcttcccggtcgcccgtcagcgggagtaggagggaagggacacgagtggagttgagggggagggtgaagagagaaatgaagtccgagacaaaacaacaacaaaaacctcagacacggagatacagacacgacagagaccgaaaaaggcgtggaaaggacgcgatgacccgtggcgtcgaagtcggggagttgaccccgatccagacccaaaaagtttctggtgccccatttcccgctctcccattcgggccaggagcaggagttccgctggtcccaggtggaagggacgcgcgggcttttcgtgccacccgggaagaccgcagcgacccaggcagaggcctccccagcctcgccgggtctccactgcccttctctggaagatcgagggcgcatccgacagccagagccctgccttcggcggagcccgagcctggcgcgggatggaaatggggagccgcggtgccggcccggccacgtcgccaactcagaaaggcgttggaagcgaagcggagcccttgtgggggaaagagccggattcaagaggccgactaaaaggggaaatgggcagccaaaccccggaggtaaaaaccccagagatgtcctaataggaagcagggaaatcccggcgacccaaagagagaggaaaggctgtggggggcgggtgggggcgacccagagactcccaagcgagtctctcaaggagagaaggaaacagcagagaccccacccgggaagagatccgggagagtacccatgagaggggcggaggggaggaaagcagagggcgacagggcaggtgaccagagtcccaggccctgcagagccccggataaacggctttgttcaaagaggaccagagatcacccagggttgtgaaaatggccgggggttcgaggcgagcggtgctctaggggtgggaaaggggt

SEQ ID NO: 36329 - DNA, 359 bp, Homo sapiens; identical to SEQ ID NO: 843
  chr1:156391242-156391601
  hyper

SEQ ID NO: 36330 - DNA, 436 bp, Homo sapiens
  chr1:156405634-156406070
  hyper
cgcgggctccggagctgaggtgagaagtgagcagaaagtgaaaagagaatccatcggaaacagataaaaaaggaaaaacaaaacccactcgaaaagaaagaaaacgttacaacaaaaaggataaagtaacgctaaatgaaataaaaaggagacatactaaaaacgttaaagttgttaaactaagtgatagaaaaggcgaagaaacaacagggctaggaaagggctccgaggcgcccgcagggaagggggccctagacggggcgatgaggcttttgggagcctccggccgcgggcgcggcggggtccggcgggtgcgcagcggccggggctcctccgcgcgctgcccgccgccggcacccggctcgggcgaagagccggctggacggtcagccagccccacccacagagagtcgcgggagcccgagggccgggagct

SEQ ID NO: 36331 - DNA, 604 bp, Homo sapiens
  chr1:156406104-156406708
  hyper
cgaacccgaccccgggaaatcctcctagccgccgcctcccagcgccgggtctccccgagcgtgtgctctcggctgcgaggccctgcatgcgcagtgtctgggttcgcggcgtcaagcggagcctcggtccagcctgggcagccgagagcgcggggactgctgaacgcggtccgctccccgccagccgttcgggaccccagcctgggggaaagccgacagcgtccctctccgcgcaaactccacgcggcagcctggactgggatgtggggccagggggctgaataattaacaaccaggagaagccggggagagcgggaagcctggcaagccagggaaagggaagatgagacagagagacatagagagacagggacagagggagacagagagggggctaagagcgacgcgggcgagagaggaagaaaggctggggagaaggaaaaatgagataaataaaggaaaaaagagaagcgaagggcggtgggagaggcagccgggcctctctgggagcttagccagaggcgcccgtacccccctcccctgcgcgtttgctgggagccgctccctttcccttttctttccaagctgccgaattctgtcccta

SEQ ID NO: 36332 - DNA, 30 bp, Homo sapiens; identical to SEQ ID NO: 845
  chr1:156468707-156468737
  hyper

SEQ ID NO: 36333 - DNA, 30 bp, Homo sapiens; identical to SEQ ID NO: 846
  chr1:156474709-156474739
  hyper

SEQ ID NO: 36334 - DNA, 33 bp, Homo sapiens
  chr1:156542085-156542118
  hyper
gtcaggggacaatgcgccgctcacagttccact

SEQ ID NO: 36335 - DNA, 30 bp, Homo sapiens
  chr1:156571299-156571329
  hyper
accatagagacgtccgcgggaaccaaaatc

SEQ ID NO: 36336 - DNA, 30 bp, Homo sapiens; identical to SEQ ID NO: 847
  chr1:156589288-156589318
  hyper

SEQ ID NO: 36337 - DNA, 1435 bp, Homo sapiens; identical to SEQ ID NO: 848
  chr1:156593617-156595052
  hyper

SEQ ID NO: 36338 - DNA, 103 bp, Homo sapiens; identical to SEQ ID NO: 849
  chr1:156595080-156595183
  hyper

SEQ ID NO: 36339 - DNA, 82 bp, Homo sapiens
  chr1:156595221-156595303
  hyper
cgtggcgggggtctctcgccacccctttccggagagcctcccctccctccagacccggagcggcctctccagacctgccttc

SEQ ID NO: 36340 - DNA, 13 bp, Homo sapiens
  chr1:156611559-156611572
  hyper
tcttctttgaaca

SEQ ID NO: 36341 - DNA, 300 bp, Homo sapiens
  chr1:156611643-156611943
  hyper
cgctgggcgaacgctccctccccgcccctcctgcccctcctccctactccaagccctcggcttctcatccgctgaacgatgtcctacttcgctcgtccttgctctcgccgctgctgccggagccgaagcagagaaggcagcgggtcccgtgaccgtcccgagagccccgcgctcccgaccagggggcgggggcggccccggggagggcggggcaggggcggggggaagaaagggggttttgtgctgcgccgggagggccggcgccctcttccgaatgtcctgcggccccagcctctcctc

SEQ ID NO: 36342 - DNA, 264 bp, Homo sapiens
  chr1:156611993-156612257
  hyper
cgtgcacccggaggagacccccggaggaggcgacaaacttcgcagtgccgcgacccaaccccagccctgggtaggtgagtgcctccgcagccccgccgcccgccgtggggtcggggacagggagaagggagtgcctgcctggtctgcgccccccgcctgtcagcccttgcctcgaggctctggggcacccaactcgtcgactcctgacaccgcagcggggtaggctgctggacagccccgagcgcctgcagctgctgctgccat

SEQ ID NO: 36343 - DNA, 544 bp, Homo sapiens
  chr1:156626474-156627018
  hyper
ggatggagacccaggccggaactccatccctcaccctggttcctgtctcttagaaaaggcaccagcgcccctgcccaagagcccctccaggctcctgctaccccctcattctctactagctcttttgcaccgccctcctgtcccccttagtcccgcccctctcggcctgcggtagtggaaggagaccagccccttccaggggacctggccctctgggttttggggccctaagatgcccgcccttatgtgccgcaggcctccgcttctgcaaccccggctgggacgccttccagggcgcctgctacaagcacttttccacacgaaggagctgggaggaggcagagacccagtgccggatgtacggcgcgcatctggccagcatcagcacacccgaggaacaggacttcatcaacagtgggctgggagacagggcgggaggggcccctgccatatgctctcactctctctcactcgcctaaccgccttcctcattaacccatgcacttattccttggttttctcaagcgtgcattccctcactcat

SEQ ID NO: 36344 - DNA, 65 bp, Homo sapiens
  chr1:156627083-156627148
  hyper
cggagagtggaggttcgcgcagtagagtgcgcctgtgtgggccgggccgccgtgcagggggccgc

SEQ ID NO: 36345 - DNA, 30 bp, Homo sapiens; identical to SEQ ID NO: 852
  chr1:156627557-156627587
  hyper

SEQ ID NO: 36346 - DNA, 150 bp, Homo sapiens
  chr1:156646446-156646596
  hyper
gcgacgtctccatgtgtgccacgcgctcctggtagccgcgcactgccccgcgccacgcctcgcccagtcgccttgccagctcctctacctccggggccggcgcgggaggcccgcggggcggcgcggggcagcggggggcacaggcagcct

SEQ ID NO: 36347 - DNA, 646 bp, Homo sapiens
  chr1:156646634-156647280
  hyper
cgtagagcctctagctcgcgctccagctctgccacctggctactcagccaggcccgggcgcatttctctgcctcgacggcgcgccggttgcgggctacctcctccgtcgtccgctcccgggccagccgcagctgctggcatcggcctgccacgccctccagctcttcagccaggttgtcgcgcgccacctcggccgcgtgcttctcccgccagcgttggtcaacgagggcccgcagggccgccagctcgtcgtcggcatgcgcccgccaggaggtgtccgcggattgtgcccggagccccccgagctccgcgctgagcagctcattctgctcctccagcgccttgacccgggccaggtaggcctccaggcgccgattgagctcccacatctgaaacgactcctcccccatgcagccctccatcctgctcgtctgacccactgaggatggacagacgcggggcaccgggagaagggagcggctcgcagagcttttaggacggaagagaaaagagaccgacggggacaatgacggggcggggcggggtgggagtagcctgagcgactgagagtcgggagtgggagcgaggctattcatactcccgccaggcgggcgggaagaggggcgggacccaggccttaacccct

SEQ ID NO: 36348 - DNA, 30 bp, Homo sapiens; identical to SEQ ID NO: 853
  chr1:156647989-156648019
  hyper

SEQ ID NO: 36349 - DNA, 146 bp, Homo sapiens
  chr1:156662233-156662379
  hyper
gagtggaaatggggacgggcaaggcactctagagggccaagtgtcacggaaagagaaggaagttagacaggagaggagggggagggggctcctaggtcccatccttccataaagagccgtgggtctgaccccgatgcaggggaaac

SEQ ID NO: 36350 - DNA, 127 bp, Homo sapiens
  chr1:156675373-156675500
  hyper
ctggcctgggctcccgcgcggacagcttttataccctgtacggaaccgcccctgcccaggattgaagtggccccgcctcccgctccgcccccccccacctggggggccctgcgcccccgccaccaac

SEQ ID NO: 36351 - DNA, 844 bp, Homo sapiens
  chr1:156675830-156676674
  hyper
ctggatccagtgggaccactccgtactcagagaggggcttgggagctgcggggttccgggggttagggatctaagtgaggcaacggcgccccctgctggaacaactcggagaggctgggcgggggcggcacggtccccccacccctccaccctgcttcgggctcacgtaatgcctggggactctggaagtagtcgccaggcgactcgctccccttaatgcgctgggcggacattgaagggttaagcaggagcccagggcgcgaggctgggagggcagaggtcacagccaatcacttgacgcaaggtctttattaaaacgctttctctgtcgcttcactcccgagaccccgagggggtctcagtagggggaagggagggaggcggggacagaggcgcggagccctggcgagctgcgccaccacctagataggcgggaggatgggtgccgggggagaaggcggagcagggtctcaggtgtcaccatcctgagctgtaaaacgggcggaaggagcgacctcccctcccttggagagcggctttgaaacgggagatcaaagagggtgggaggagggcacggcttcctgcagagacccgagtgggagtgggcgagaccccagtggagatggcagggagacggagaaacagaaacggaggtcaggcggggagcctcggggacaggcctgggacccgaggccggaaaccgcagaggagcgaagcctggcgggatgcagtgattggagccaaaggaaccgtcccggcctgtccaacgcgggggggccttcggcccggtggccctgagcgaaccgatgcacgtggccccgccgcatcccatcccccaccctcc

SEQ ID NO: 36352 - DNA, 166 bp, Homo sapiens; identical to SEQ ID NO: 857
  chr1:156716424-156716590
  hyper

SEQ ID NO: 36353 - DNA, 48 bp, Homo sapiens
  chr1:156721108-156721156
  hyper
agggggcggcgggccgcgctgctcacccgggccggccagtgtgggtag

SEQ ID NO: 36354 - DNA, 30 bp, Homo sapiens
  chr1:156783618-156783648
  hyper
gtcagggtctggggcgcgtacctgtcgggc

SEQ ID NO: 36355 - DNA, 67 bp, Homo sapiens; identical to SEQ ID NO: 858
  chr1:156814885-156814952
  hyper

SEQ ID NO: 36356 - DNA, 485 bp, Homo sapiens
  chr1:156818570-156819055
  hyper
cctaccacggagtacaacttgcgggtcctggcttcctgggtcttcatagcctcgctgagctccgccctcacctgcctgtggtcccgaagaaattggcctcgtccggtcccgcccccgctccggccccgcccccggcactcacgactccttgtagtacacgatgaagctgagcaggtcgcgggcctccagtggctcatagcgctcccagcgtagcaggatgcggtctgcctccgtcacgttggacacgaagcgcagggtgcgagtctggcctgggtggggcgaggggcctgctcgcaaccgcgcctgccagctgcttgagcgcccaccctgaccccgcggcatcccattcccagtgagacctctgaggagaacttctcagagtgtccccctcgagctttctccctcccccgggtgtgcgtgtctagtgtgtggccgcgtgtccaccggcactggggttggggtctcacaggcggcgcggtctccgt

SEQ ID NO: 36357 - DNA, 140 bp, Homo sapiens
  chr1:156863345-156863485
  hyper
ttttccctcccgggcgcctggatctcccctcccccggctcctgtttccttgtcaaaacttcctgccttggcgagggcccgagttcccacccccttcctgccccccgcccctcggcgcccctcccggccctgcgatcagca

SEQ ID NO: 36358 - DNA, 18 bp, Homo sapiens
  chr1:156863640-156863658
  hyper
cgcgccccctggcagggg

SEQ ID NO: 36359 - DNA, 222 bp, Homo sapiens
  chr1:156890274-156890496
  hyper
cgccgggcctggcccgcccctcgggttctggctccgccacccgccctcgtgggctctcccctcgccttgctctgccctgcggcgccccctgtcggccccgcgtgctctctgcggttgcccctttccctcgggcccgcccgcctcgcgcggttgtcttggagagggacgcgtaggctacgccaccgcggacgggtcggatccggtccctggacgcggaacaga

SEQ ID NO: 36360 - DNA, 30 bp, Homo sapiens; identical to SEQ ID NO: 861
  chr1:156893334-156893364
  hyper

SEQ ID NO: 36361 - DNA, 16 bp, Homo sapiens
  chr1:156893791-156893807
  hyper
cgcggtggggctacac

SEQ ID NO: 36362 - DNA, 30 bp, Homo sapiens
  chr1:156894216-156894246
  hyper
cgatccgcggctgtcggggtcctgcagcct

SEQ ID NO: 36363 - DNA, 338 bp, Homo sapiens
  chr1:156897315-156897653
  hyper
aacatcgacgaccgcggggcgcaactcctgggccaggcgctgtccacgctgcacagctgcaaccggaccctcgtctcgctcaacctgggtttcaaccacatcggtgacgagggcgcaggctacatcgcggacgtgagtgcacggcggggagggacctgctgggagcaggggcggcttgggcggctcacgcgtccctgcccgcctcttagggcctccggctgaaccgttccctgctctggctgtccctggcccacaaccgcatccaggacaagggcgccctgaagctggctgaggtgggtgtgccgatcaggtggggcaggggcgtgggcgggccgagg

SEQ ID NO: 36364 - DNA, 30 bp, Homo sapiens
  chr1:157016120-157016150
  hyper
tcctaccccctgcccgcccagccaccgtgc

SEQ ID NO: 36365 - DNA, 70 bp, Homo sapiens
  chr1:157108748-157108818
  hyper
ccgcagacttcagacgcaatttccctaccctttaagaaagggccctttcatatacgtatgaaagaaaccg

SEQ ID NO: 36366 - DNA, 30 bp, Homo sapiens; identical to SEQ ID NO: 864
  chr1:157963008-157963038
  hyper

SEQ ID NO: 36367 - DNA, 20 bp, Homo sapiens
  chr1:157963443-157963463
  hyper
cgggcgcacggcgggcggac

SEQ ID NO: 36368 - DNA, 146 bp, Homo sapiens
  chr1:157963680-157963826
  hyper
ggggcgcggagtaacgaggggctggggagaatgagtttgccgttgatttgcccaagttgtttcctctggctgcgcgggagaaccgagcaatggggccgcgagggctggaggtccgagtaaaacggggaaccgaacgctttctcttg

SEQ ID NO: 36369 - DNA, 593 bp, Homo sapiens
  chr1:158083064-158083657
  hyper
tgaagaaaggcatcccgggcaaaggcaccgagctcttggtgtggttctcctgggataagcccacagtcacaaacttgtgcaggaatgggggtaccgggaagcagcccggtgttccaagccttttgagattctccggacctgcgcgccgcccgctcggcagggggctcggcaggcgcgggcggcgggtgggggcgggaggctctgcccgctcggtggctgccgcggcctcctccgcgctgctctccacgcctggcttattatgcacgaggcaggcaatttgccttcctccccggggacccatctcggagacaagaaggtagtttgttctctgtaatggcttctgctggagtgcggcggggcccaggcgcgagcgggggcacgggcggggagttggcagcgaaggatgcgcccggcgccccccggcggccgcccggagcccgaggtcggcgcgggaggagcgctgactccgcgggccgagccctcccctgccctcctctgctcctccgtaactcctgagctgtggcctgcctttctgctgcctccacgtccctactcttcctttctgccaccccgtttgcttcttaaaggttgtc

SEQ ID NO: 36370 - DNA, 506 bp, Homo sapiens; identical to SEQ ID NO: 867
  chr1:158150550-158151056
  hyper

SEQ ID NO: 36371 - DNA, 22 bp, Homo sapiens
  chr1:158151116-158151138
  hyper
cggcacagagttcgctggcatc

SEQ ID NO: 36372 - DNA, 60 bp, Homo sapiens; identical to SEQ ID NO: 868
  chr1:159141702-159141762
  hyper

SEQ ID NO: 36373 - DNA, 69 bp, Homo sapiens
  chr1:159158299-159158368
  hyper
tctccccagctggctctgagtcgcgctgggacgactggcgaagttcacccgggactccaaagcccggac

SEQ ID NO: 36374 - DNA, 47 bp, Homo sapiens
  chr1:159158471-159158518
  hyper
cgcaaggccggtttctttgtccctccgcctcttcaggttgggctagg

SEQ ID NO: 36375 - DNA, 35 bp, Homo sapiens
  chr1:159750816-159750851
  hyper
aggggacgcgtgggcggagcggggctggccagcct

SEQ ID NO: 36376 - DNA, 438 bp, Homo sapiens
  chr1:159824586-159825024
  hyper
agtcagccggctccgcgctcttgaccttgacgtagaccggggaggggcccgcttcgcaggcggcggcggcggtgcagggcgccagggccacgtcctcggggccgccgcaggggggaggcgcgtacttgcggcgcagggagcggctgacgttctgcgtcgggtaccccaggaggtgggtgacgcggctgccgcgcccgctggccttgcacccgggcgccacggcgtcctctctgtggaaaacaacaggcgggcgggtgagcgggctgctccgcagcggggcgtgggcacggcctgggcagagccgggggctcttggcaacctcttgtctcccgcgcctccctccacctgccctcgtctctctccctcggcctcgacctactgtcctttgtgacccttcctgggtcggcgaccctgcagcggtcccggagccagcatccc

SEQ ID NO: 36377 - DNA, 30 bp, Homo sapiens; identical to SEQ ID NO: 870
  chr1:159894046-159894076
  hyper

SEQ ID NO: 36378 - DNA, 495 bp, Homo sapiens; identical to SEQ ID NO: 871
  chr1:159894399-159894894
  hyper

SEQ ID NO: 36379 - DNA, 133 bp, Homo sapiens; identical to SEQ ID NO: 872
  chr1:159895196-159895329
  hyper

SEQ ID NO: 36380 - DNA, 490 bp, Homo sapiens
  chr1:159915359-159915849
  hyper
cacctgctccgcaccgctcggctccactctcgccgctacacaatagggggcggacccgcctccccgcctcggatgccccgagcgcctcccgtcgccctggagaccgccaatccccctcccgcggcggccaattggagccgccagaggcacggcgaggcgggcgggacccctgagcggcctgggagttgtagtttcaggagggaagagctcggctgcacgtgggctcaggtcgccccctcgtggacctctgcacagccaagcgtggaaaggccggtgggccgcttcccgccgccagcaagaggggcagcagggtccggctcgcgctccagggctgcgggagctggccccttgccaggctactggtacgccgtccttctttcggaacctacgggcgaccctctccgctccccgaacgggcgcgccacagaggcggcagcgagggttgaaatctgagcctgggggtaggagaaccaggcggggagcatgactc

SEQ ID NO: 36381 - DNA, 30 bp, Homo sapiens
  chr1:160001618-160001648
  hyper
ccgcatctcccacccgccaggctgccaacc

SEQ ID NO: 36382 - DNA, 30 bp, Homo sapiens
  chr1:160001964-160001994
  hyper
cgagcagcgagctgcgggctgcgcgctaca

SEQ ID NO: 36383 - DNA, 145 bp, Homo sapiens; identical to SEQ ID NO: 874
  chr1:160039832-160039977
  hyper

SEQ ID NO: 36384 - DNA, 508 bp, Homo sapiens
  chr1:160040180-160040688
  hyper
gcggggcaaggaagcggagacccagacagctgcaggcgcagagagaaatatccaaagacagagacccagacagacccggggagaaagagagatgaagagacgatatgcgaaacgataggagctgagctggcagggtgacaggggaagggagaaggaagaaaagggaggcggtcctgtcagcgatgggttacgagagctggagccggggggcgggactgggaccgagttaacgaagtggaaatgaattcaggaccggcccagtggccctgcaggcagcgccgaaggcggcgcctggaagtgagattggggcggagtaggcctgggctccctgagccacaggactgtatctttgggcacaattcccgtgttgttcaccgtctcctaagtccccggtgcggtgctgggtgagagacgcgcagcacacggtgcccacctgcagcggctttctctgtaaggaaagataaggccggaaccctcagcgaagtgcgggaggtactgaaggctgtaa

SEQ ID NO: 36385 - DNA, 93 bp, Homo sapiens
  chr1:160055538-160055631
  hyper
tagatgaggatgaggaaactgcgggtggaggaccaaaggcccactagggggcgccgcagtccctcctctgacgccagagctgctgatgctccc

SEQ ID NO: 36386 - DNA, 30 bp, Homo sapiens
  chr1:160071022-160071052
  hyper
acaaaccccaggcacgaggcacgtcacaca

SEQ ID NO: 36387 - DNA, 30 bp, Homo sapiens; identical to SEQ ID NO: 877
  chr1:160093911-160093941
  hyper

SEQ ID NO: 36388 - DNA, 31 bp, Homo sapiens; identical to SEQ ID NO: 878
  chr1:160175619-160175650
  hyper

SEQ ID NO: 36389 - DNA, 30 bp, Homo sapiens
  chr1:160232435-160232465
  hyper
cgcctgcgcattaccgaagaggcaaagttg

SEQ ID NO: 36390 - DNA, 192 bp, Homo sapiens
  chr1:160370193-160370385
  hyper
gggagcggcgactccgggaagagcggggccgcagacaatggacgcggcggtaggaggggcggcggctgtgggaacagccgggaggcggcacccgggagctcgcgctcccccgccccctgcaccccccaccctcatcccctccccctccgccccctcccccctgcgccgccggctcccgatctgattcctgat

SEQ ID NO: 36391 - DNA, 30 bp, Homo sapiens; identical to SEQ ID NO: 880
  chr1:160370828-160370858
  hyper

SEQ ID NO: 36392 - DNA, 189 bp, Homo sapiens; identical to SEQ ID NO: 881
  chr1:160526914-160527103
  hyper

SEQ ID NO: 36393 - DNA, 30 bp, Homo sapiens; identical to SEQ ID NO: 882
  chr1:160948028-160948058
  hyper

SEQ ID NO: 36394 - DNA, 425 bp, Homo sapiens; identical to SEQ ID NO: 883
  chr1:160983484-160983909
  hyper

SEQ ID NO: 36395 - DNA, 937 bp, Homo sapiens; identical to SEQ ID NO: 884
  chr1:160990380-160991317
  hyper

SEQ ID NO: 36396 - DNA, 183 bp, Homo sapiens
  chr1:161067871-161068054
  hyper
caaatgatccctcccggccctagtggagcagcacctgcacctcaaatgtcaaaatcgcaaatcagttcacagcggagatcacaggggtttattctaaggacccgactgtcctccgactttctgaggttaacaatcttgcaggatttttattgacctgatacagctcccgtagccttggtggca

SEQ ID NO: 36397 - DNA, 30 bp, Homo sapiens; identical to SEQ ID NO: 885
  chr1:161087307-161087337
  hyper

SEQ ID NO: 36398 - DNA, 42 bp, Homo sapiens
  chr1:161087908-161087950
  hyper
ttctggctccagaccgccctccggatcggaccctgcgaatgg

SEQ ID NO: 36399 - DNA, 30 bp, Homo sapiens
  chr1:161124141-161124171
  hyper
ttattttagggatacgcttccccagaaggt

SEQ ID NO: 36400 - DNA, 30 bp, Homo sapiens; identical to SEQ ID NO: 886
  chr1:161129600-161129630
  hyper

SEQ ID NO: 36401 - DNA, 100 bp, Homo sapiens; identical to SEQ ID NO: 887
  chr1:161171824-161171924
  hyper

SEQ ID NO: 36402 - DNA, 30 bp, Homo sapiens
  chr1:161172240-161172270
  hyper
tggagtccgattgccgattcagcccagcag

SEQ ID NO: 36403 - DNA, 386 bp, Homo sapiens
  chr1:161195512-161195898
  hyper
tctagtgtcttgtacgctcacaagtttttttccgaccttggagaggcctagtgatctaaagccttccacttaagtctaaggggccaccaatcaagtcctgcccgcctctgcagctccagggttgaagctcttgggccgtcagacctgccactcattttcttcctcccttcccattggcccatggtaaatagcgaggcttttttttttttttttttttttcattgattgggcggggcccaatcagggttgggttgggtctttgacagctttctttgccagattcaaagatggcgcttacggccacgctaagaatgcagcgtgaagctgcagttctgccatcactcaagatggctgcccccatcaagatgaccggggtgtgccggggg

SEQ ID NO: 36404 - DNA, 30 bp, Homo sapiens
  chr1:161196135-161196165
  hyper
ctgttccaggtgtagcgtcggaccatgtgg

SEQ ID NO: 36405 - DNA, 30 bp, Homo sapiens
  chr1:161228862-161228892
  hyper
gcagaccggagccgcgaagaaccctccagg

SEQ ID NO: 36406 - DNA, 129 bp, Homo sapiens
  chr1:161275449-161275578
  hyper
gggcctggggtgggggggtggcgatcacttgtccgagttcaggcccatcatgttcttgagggcgtttttgaggctggttctgctgggggacttgacagcaggccggagctccgggctctgctcatcctt

SEQ ID NO: 36407 - DNA, 546 bp, Homo sapiens; identical to SEQ ID NO: 889
  chr1:161275639-161276185
  hyper

SEQ ID NO: 36408 - DNA, 578 bp, Homo sapiens; identical to SEQ ID NO: 890
  chr1:161368923-161369501
  hyper

SEQ ID NO: 36409 - DNA, 698 bp, Homo sapiens; identical to SEQ ID NO: 891
  chr1:161369560-161370258
  hyper

SEQ ID NO: 36410 - DNA, 48 bp, Homo sapiens
  chr1:161410359-161410407
  hyper
cgcagaaagcctcttccgacaaccactttgagccggcagctcgttggg

SEQ ID NO: 36411 - DNA, 40 bp, Homo sapiens; identical to SEQ ID NO: 892
  chr1:161410664-161410704
  hyper

SEQ ID NO: 36412 - DNA, 127 bp, Homo sapiens; identical to SEQ ID NO: 893
  chr1:161494852-161494979
  hyper

SEQ ID NO: 36413 - DNA, 92 bp, Homo sapiens
  chr1:161509953-161510045
  hyper
tcaatttttttggagacgtgagtgctgagcattttttcttcagtgaagtgacttggcagccaaaatcgccaacgcccgtctctgtggcgcaa

SEQ ID NO: 36414 - DNA, 82 bp, Homo sapiens
  chr1:161510104-161510186
  hyper
gaagtcgcattttgtgaaccctgggtttttgaaactttgactgaaaaaactgcgtgcgatgctatccgctgggagcgctggg

SEQ ID NO: 36415 - DNA, 459 bp, Homo sapiens
  chr1:161582199-161582658
  hyper
gggacatgaggagtgcgggggggaagagaagacggcggaggaaaatcccccggcggtgctcaactgcggctttctctctcggctgtgagccggctccgccctccggcttccagagcaagtggcttctgcgttcaccgccccccgccgtttgtggggcggggccgattcataagaatcggttctcaccaatggagggcttagcatgtttaacctcaggatcataaacaaaagacactgctagaacggtcgggaaagtcatacgctttgcttatcttatatatagatttctaaaattccaaaccggggacgcgttggtggtgtagtggtgagcacagctgcctttcaagcagttaacgcgggttcgattcccgggtaacgaaacgtttttgtctttccttctacgaaaaacttttctgagccggagcctccagcgcgctgtgtattcgttttacgcctcaa

SEQ ID NO: 36416 - DNA, 453 bp, Homo sapiens
  chr1:161591322-161591775
  hyper
cagggctgtgagccgcgccctgaagcacggaaagctaattgtgtcactggtttcaaatcaacttcaaattttttggagacgtaagagtgctgagcattttttcttcagtgaagtgacttggcagcccaggtcgccaacgcccgtttctgtagcgcgatcggttagcgccttcggctgttaaacgaaaggttggtggttcgttcccaccccgggacagaagtcccacttttgtgaaccttgagtttttgaaactttcactgaaaaaaaccgcgtgcgatgctatccgccgggagcgctggagccttggctctcaaaaccagccgcggtgctaaccgccgggatccctggcagctgacctccgcgttgtgtggttcccaatgtcctcttctgccttagtgctgtacgggtaattttgaggtatttggtttttccgactagggttgtagtgataac

SEQ ID NO: 36417 - DNA, 30 bp, Homo sapiens; identical to SEQ ID NO: 895
  chr1:161601157-161601187
  hyper

SEQ ID NO: 36418 - DNA, 49 bp, Homo sapiens
  chr1:161695644-161695693
  hyper
gttcgagggtgagccgctagtcctgcgctgccgcggctggtacgacaag

SEQ ID NO: 36419 - DNA, 70 bp, Homo sapiens
  chr1:161697226-161697296
  hyper
cgcctgcgctccgccgacgcccttggaacaatcggctggagccctgaaacccgacgtggaccttctgctc

SEQ ID NO: 36420 - DNA, 30 bp, Homo sapiens; identical to SEQ ID NO: 896
  chr1:161736089-161736119
  hyper

SEQ ID NO: 36421 - DNA, 30 bp, Homo sapiens; identical to SEQ ID NO: 897
  chr1:161993349-161993379
  hyper

SEQ ID NO: 36422 - DNA, 30 bp, Homo sapiens
  chr1:161993901-161993931
  hyper
gttactccgagcggcgtccctgaagttttg

SEQ ID NO: 36423 - DNA, 30 bp, Homo sapiens
  chr1:161994348-161994378
  hyper
ttgggacaaatctccgggtctctgttacca

SEQ ID NO: 36424 - DNA, 782 bp, Homo sapiens; identical to SEQ ID NO: 898
  chr1:162039283-162040065
  hyper

SEQ ID NO: 36425 - DNA, 30 bp, Homo sapiens
  chr1:162058274-162058304
  hyper
ggttgttcagattatcgagcctgatttatg

SEQ ID NO: 36426 - DNA, 30 bp, Homo sapiens
  chr1:162393905-162393935
  hyper
gttaaactactcaatcgtaagaaacaaata

SEQ ID NO: 36427 - DNA, 30 bp, Homo sapiens; identical to SEQ ID NO: 899
  chr1:162467740-162467770
  hyper

SEQ ID NO: 36428 - DNA, 187 bp, Homo sapiens
  chr1:162530851-162531038
  hyper
gagagcgcgccaggcccgccctgaaagtttctccgcaggaaaatccaccgccctttcccaaccacccgcgtgggtggctcggaaatccgccaccctggggacacagctccctgcccatctctgtggcccgcttgtgccccgtgccgctgggccgactaagagcctcgggctcgcacctcccagtaca

SEQ ID NO: 36429 - DNA, 30 bp, Homo sapiens
  chr1:162531504-162531534
  hyper
cgccgatgagtggccgcgcggaaggagctg

SEQ ID NO: 36430 - DNA, 30 bp, Homo sapiens
  chr1:162660818-162660848
  hyper
tatagtcgtgagtcacgagctctctcacca

SEQ ID NO: 36431 - DNA, 432 bp, Homo sapiens; identical to SEQ ID NO: 901
  chr1:162792155-162792587
  hyper

SEQ ID NO: 36432 - DNA, 30 bp, Homo sapiens
  chr1:163291478-163291508
  hyper
tcggaccccgaaaacgctctaaacgctggc

SEQ ID NO: 36433 - DNA, 31 bp, Homo sapiens; identical to SEQ ID NO: 902
  chr1:163378140-163378171
  hyper

SEQ ID NO: 36434 - DNA, 90 bp, Homo sapiens; identical to SEQ ID NO: 903
  chr1:163378350-163378440
  hyper

SEQ ID NO: 36435 - DNA, 177 bp, Homo sapiens
  chr1:164290494-164290671
  hyper
aattgtatgcaaaaaaaactgcgccgtgttcccctctgttgtgtgcgccgcgtccggggagcctgggccgtgcctccctggcgtatgcaggtcgccggcgcagccgccagctccgggggccgcgcttccagccacccgcagccggcggggcccgccgggcagcacgggaatcgcgga

SEQ ID NO: 36436 - DNA, 131 bp, Homo sapiens
  chr1:164290723-164290854
  hyper
cgcctgggctgctccacctgagagctgcgcagggcggtctggcggtggctgctgcccacataatccgacccaaaggcccttggcttcaatgcaaatcccggagctgaatcgccaacaacccagggcccact

SEQ ID NO: 36437 - DNA, 30 bp, Homo sapiens; identical to SEQ ID NO: 904
  chr1:164528670-164528700
  hyper

SEQ ID NO: 36438 - DNA, 30 bp, Homo sapiens; identical to SEQ ID NO: 905
  chr1:164529155-164529185
  hyper

SEQ ID NO: 36439 - DNA, 360 bp, Homo sapiens
  chr1:165086748-165087108
  hyper
tgcttccccgccggccgttctctccgcaggtgcccggcccctgcctccgagtgcgcctcgcggagcgcaaagcgctgtcacgactcggtggccgaggtgattaattagcggcgtggccgtgcgggggacgcgtgctggcctccacatctgccccgtgccagcaggggtcaatatgcggtgtcactgctttccctctcactccctccaaagcctaattggctgtgacacgcgggccagctgttgtgagaggtggagcgcggcgggcgttttccaggacggaggctgagggcaggttgacgggcctgtggagaatgtgtgctgcttcctgcaggcgaccacgtctttgttccaaggctaggg

SEQ ID NO: 36440 - DNA, 174 bp, Homo sapiens
  chr1:165204522-165204696
  hyper
tcactagtgcatgtgcgaggagggctggaggcatgagcgaaagagggaaggcaatctcggtctccaaaaaatccaggggactctccctttcagcacaagcgctcacacgtgcgctcgcgcggacacacacacacacactcacactcacacacaaataaatccccagcacctgcc

SEQ ID NO: 36441 - DNA, 736 bp, Homo sapiens
  chr1:165204732-165205468
  hyper
cggctccgccagcggagagcctttggatttaccgtggcattacttttaattaactctgcggcgcggcgcggggagcgcagggtgggccctaatcccgggcccgcctgacgtcacctgggaacgcgcggcggcgcggggcggcgcggacccgggacgacctcgccgcgacctggcctcgcctccgcccgcgcggggctttgctccgcgggaattaaaggaaggagaaatgttagtacacttttaattggaaaccgagttcttctttcagagcggcttgtttactcaggattgggcattagaactcaggggaggctctaattgaagtgacggctttggagattatggggaacatatggccctaccgccgggctctttatctgcattttctcataaaactgccgtccgtgtgtgtttctgcgcctggcctcttgcatttctaaggggcctttgaagacagggccgaatgcgcgcgggggcttcaggcactttgcgctccacggcgggtcccgcagcccggcccgagccggccctggaagcttcgccctggactagactggcaccgacgccgcccccagcctgagcgctgagagggaaaacgagagctagaaaggaaagaaatcggactggtgactgcctggcaggggtgtaattcaaactgttgtgagcagacggcaggagggagttgccaaggtaacgggtgattcccacccgccgccctttcgctaaggctggggag

SEQ ID NO: 36442 - DNA, 295 bp, Homo sapiens
  chr1:165321202-165321497
  hyper
atgcagaattctgcgcgtgcacgcgcgcgtccacacagtcaacctacaccagtcctaatgcacaaaaacagagacctctggatcagccacttttcttcaatcatctccaaagccctgcaaagccaatacacttattaattaaacatttcgcaaggaaaaaaccgttccctctccttacacctcctaagctcctcccggcacgcccggagagaataaggaagttcttctacctcccactttctggcttcatccaggctttagtgttataaaaatccagtttcgaaatatccacttt

SEQ ID NO: 36443 - DNA, 30 bp, Homo sapiens; identical to SEQ ID NO: 908
  chr1:165322591-165322621
  hyper

SEQ ID NO: 36444 - DNA, 30 bp, Homo sapiens; identical to SEQ ID NO: 909
  chr1:165323217-165323247
  hyper

SEQ ID NO: 36445 - DNA, 127 bp, Homo sapiens; identical to SEQ ID NO: 910
  chr1:165323697-165323824
  hyper

SEQ ID NO: 36446 - DNA, 988 bp, Homo sapiens
  chr1:165324196-165325184
  hyper
agcctagggcccagccgcgcggtctaatccccgcgctgcgttgcctactggcccagaaaagtctctctcggccttgcccatggctgaaattggggctggagttggtgggggagagaagcctcctcgaacttgggcgctccaggcctcgggtctcggatgctattgcctctaggccgcgagaagagggcggcatttatgagacgtcgatcagctccgagattaaaaatccagccctgggtatttttaatcacttgccactcagacgcctacgaacaagctcgcccgcccctcgcggctttggggaattcggtgcccagtgcgtgaggcctggggcggcttgttggatttatttgggtagggacgacccacaagcactgacggacagatagtgatggggctcaatttagtgtatgaagaggggcgctagcttccctatcgcggaccaggtcccagagagcggggctccagagctcagcgccaagcggaaagagagtgcgcccaggacgcacggcctgaacactcacccagcagcgaggagaaggaggccgaggtgtcgatcgcgctttggaagttctcctccatctttaggccgtccagcatgttcgggccgggccgggaggacctgtagaggagaagaaacgatgcgtctgacgtccgtgcccgctgggactcggcgccagcagccaccgcactcctgggaaagaactgagggagtgtccagggcgaccagaatcagccaggaggatagggtccagccaagagaatgtagggtgggaggagagatcagtcacagcgaactgctctggctgatctgatttcacttgaagtcaacacgttatgtacttaggcctccgccccccaactgcgtttctccttctcctgcccccctcacccccacctacatcccttgccccaggttttccatcccgaatccgactccgccccaacctatacgaaggtgggccctcgggacgtctctgcaggaacg

SEQ ID NO: 36447 - DNA, 310 bp, Homo sapiens
  chr1:165325538-165325848
  hyper
ttcagaaacacgcccgcccgagccacagcctaggcacgggcagccttacttacctggtaggcgagctctctcccagtgactggagcagagagaagttgcggagcgctgctggaagcttctgcccgggaaggcgtcgcccccgagactgcagccggaggagccgccctcggcttcggagcgccggggagggagccggagcgaacgccggccgctggctctgctcctcggcgcgcccaggctgggccgggacgtggtcgcgagctgccggccttcccgggacgtcctaccagcccgcgtcgctcctcagcgg

SEQ ID NO: 36448 - DNA, 71 bp, Homo sapiens
  chr1:165326133-165326204
  hyper
gtttcctcccctccacgtgtaactgttacctcggggcgctctggcccggtcgccccccagtgcccctcacc

SEQ ID NO: 36449 - DNA, 151 bp, Homo sapiens
  chr1:165345283-165345434
  hyper
ctgctctgcccgaaccgcaggctgcctgggccggggacgcgcggaggggccccccgcagagggcgggctcagccgggcagagctctcgggggcgccccgcgcccagccccgccggctcctgctctccccgagcacgcggcgttagctaatc

SEQ ID NO: 36450 - DNA, 30 bp, Homo sapiens
  chr1:165345642-165345672
  hyper
gtgaggacgccgagcgtgtgatgagcgcct

SEQ ID NO: 36451 - DNA, 391 bp, Homo sapiens
  chr1:165414191-165414582
  hyper
ctcccaggcacagcccggctttcttcaacttgggctaacaagagtggtcatcgcttcctagcagcccggggagcacaggctgggccagccctctgggattagtcaggaatctgcctctagatcggagagtccacatagtgcgtttgagacggctgtggcggcagcagctggtgcctgtcagtaatcacgcataatgctgccgccgccgccgccgccgccgtcaccgctactcttgccaccgccgtcgctgctgcttgagatcctgttgctagtttgattaactcagggttgggctgctgcgtgcgactcttccagctcccggcgcgtccccagaggtccctaccgggtggcacgatctattatctaggaagccaatcgatgtatgaccgcc

SEQ ID NO: 36452 - DNA, 30 bp, Homo sapiens
  chr1:165567477-165567507
  hyper
gcacttcccaagcgcggagagtctgcccaa

SEQ ID NO: 36453 - DNA, 30 bp, Homo sapiens; identical to SEQ ID NO: 915
  chr1:165599886-165599916
  hyper

SEQ ID NO: 36454 - DNA, 30 bp, Homo sapiens
  chr1:165600992-165601022
  hyper
gtgagcaatgcacccgctgcggtggggatg

SEQ ID NO: 36455 - DNA, 827 bp, Homo sapiens
  chr1:165737817-165738644
  hyper
caagcaagtaaggctcgcgatctttcccctggtggcacaggggaccccggggcccttcctcccggggactgatcaaacgtctgagaaatacccgctctcaccctctgcgagcagagccgtgcacacagagataaaaacgatgaggagagtgtccgcgaacatagtgctcatctcgcaccttcgtctctgcactctcacccgccagggggaaagcgctctacagccaggaaaagtgaagcgaaaacggcttccgtagactccgccaccaccgagtaacagaccaactctgacagcccgaagatcgcacttccgcttccggggcatagcaccggaaaggctcgtatcggagaacggtgtggccacgagagtctagaggaaaccaacccgcaactcactggagctgaagggctggtagtcaggccgaatctcgcgagaattggaactatttcagagccagaggaggatagtggcggcggcgaactttgcccggtagattttactgactggggtgctggcgcgcgcctttttctcggccagaatccagttattgggatagtcttgacttctacctcagcccaacttctgtggtcgtaatattagtttagcttgggtttgccgtgaagtaagaagactgacttccgcaaaggtactgaacgactgggtgtaggtgccagggcatggacgtgaagctggaaccgcgaaatgagttagttgtgggccgctggcctcaaggagcgaacgtcagcgcgaagaggagaagcttgtgcatacgctctgataagggttttaatagaggtattaccacagtgctgcgtgacacggttgag

SEQ ID NO: 36456 - DNA, 30 bp, Homo sapiens; identical to SEQ ID NO: 917
  chr1:165796842-165796872
  hyper

SEQ ID NO: 36457 - DNA, 730 bp, Homo sapiens; identical to SEQ ID NO: 918
  chr1:166134160-166134890
  hyper

SEQ ID NO: 36458 - DNA, 772 bp, Homo sapiens
  chr1:166134933-166135705
  hyper
cgcctctcgaaccctccttgtcgcgttcttcccgccccgcacctttctcctcgcgtttctgggaagtcagaagcaaaccacgagaaaatgccttcgcaaggagcctccctacacccgccctgtcactgaaacaaaagcgtagggaggagggaggtgggagaggaggcgggaggaaggtttagaaagacgatggggacagcagtaggaaggagctggggaggggggtcaaggtggcaagcagagctgggggcccagagtccgctcccgtgccgcgcggcgagtcgcttacatgcccaggtcgctgtaggtgttgaagaactccatctgattgcacgcctgaatccagcccaccacccaggtctcgtggcgggggatggggggcatgaccacgcgggcggaggctttgaagtagggggtcttgtagcgcaggacgatgggcgaggtctcctcgatgcgcgtggggcactggtcgatggtggcgcacacatcgtacaccacgatgttctcgcgccggatccgcgccttgcaggtgatgctttggatacagcccatcctgcagcccggtgccggcacggcgcggcgtggggcagcgcgggggcccgcgcgggcagccgggggcgcccgtcacgccggcatggcgacgcgccgctcgctcccggtcagactcagctcgcacctaggagcggggagccgccgggcatccttggggaagccccctcctcttgcagccgcgcggggtccccgctgccccgacgtccgcccacgcccgccc

SEQ ID NO: 36459 - DNA, 30 bp, Homo sapiens
  chr1:166136044-166136074
  hyper
aggcggaggcagcagcggcggcggcggcga

SEQ ID NO: 36460 - DNA, 30 bp, Homo sapiens
  chr1:166136432-166136462
  hyper
cgagcagggcgcggcgctgtccagagtcca

SEQ ID NO: 36461 - DNA, 30 bp, Homo sapiens
  chr1:166808402-166808432
  hyper
cacatggaactgtgcgcccacgctacgctc

SEQ ID NO: 36462 - DNA, 30 bp, Homo sapiens
  chr1:166809392-166809422
  hyper
cctcaagatgcatccgcactccacacctag

SEQ ID NO: 36463 - DNA, 30 bp, Homo sapiens
  chr1:166845740-166845770
  hyper
cgcctcggctgcaacgttgctgacaggctg

SEQ ID NO: 36464 - DNA, 30 bp, Homo sapiens; identical to SEQ ID NO: 920
  chr1:166846167-166846197
  hyper

SEQ ID NO: 36465 - DNA, 174 bp, Homo sapiens
  chr1:166916746-166916920
  hyper
gaacgcaagcctgcacgcctgaatagcggcagctggctttggagaaaaatgggacaactgtctcctgcccggctttcaagagctgccattctttctttccaggggctgagccaatttctcggtgccacccactctcgcgcctgcccccagcccccgtttcctcccccgctcggg

SEQ ID NO: 36466 - DNA, 13 bp, Homo sapiens
  chr1:166916936-166916949
  hyper
cgactacaatgca

SEQ ID NO: 36467 - DNA, 14 bp, Homo sapiens
  chr1:166917124-166917138
  hyper
ggggtggctggggg

SEQ ID NO: 36468 - DNA, 30 bp, Homo sapiens
  chr1:166944378-166944408
  hyper
gggggggcggggggcgcggtgagaacagaa

SEQ ID NO: 36469 - DNA, 209 bp, Homo sapiens
  chr1:166944963-166945172
  hyper
gaggcgcgggggaggccgccccgcgggccgcgccgagcggggagcgaccatcgcggcttctcccagggacgcccgcgctcgggaacccgggcgagaacgctggctggggactcgagcaggggagcctgtgtctgcgggcagccacagccaacctgaacggggagagagtgacagcggcgagggtgggggacggcggggacttggcgtaa

SEQ ID NO: 36470 - DNA, 42 bp, Homo sapiens; identical to SEQ ID NO: 924
  chr1:167028535-167028577
  hyper

SEQ ID NO: 36471 - DNA, 239 bp, Homo sapiens
  chr1:167090626-167090865
  hyper
gagtgtgtcccacctcgctcgcaggtcctggagcgcaccggcagacctcgaggcggagcgggtacgctcgcaatagctccaggcgtgtggacacggccacgagccggcggtcccccgcagcatcccagggcggatgaggcagatcccagaatgtggaacgcatcccagaagcgatagccagccttggagggtggagggaggaagaacgagcccaaacgcggaggcggagtcggtgccag

SEQ ID NO: 36472 - DNA, 30 bp, Homo sapiens
  chr1:167189772-167189802
  hyper
tgagctagagggagcgcatgcgccggcgac

SEQ ID NO: 36473 - DNA, 238 bp, Homo sapiens; identical to SEQ ID NO: 925
  chr1:167190163-167190401
  hyper

SEQ ID NO: 36474 - DNA, 30 bp, Homo sapiens
  chr1:167191345-167191375
  hyper
gcccagaggcctcccgagaacttggatgta

SEQ ID NO: 36475 - DNA, 47 bp, Homo sapiens; identical to SEQ ID NO: 926
  chr1:167423948-167423995
  hyper

SEQ ID NO: 36476 - DNA, 30 bp, Homo sapiens
  chr1:167424649-167424679
  hyper
tgaaggacgccctccgcaagacagagagga

SEQ ID NO: 36477 - DNA, 30 bp, Homo sapiens; identical to SEQ ID NO: 927
  chr1:167503207-167503237
  hyper

SEQ ID NO: 36478 - DNA, 78 bp, Homo sapiens
  chr1:167522407-167522485
  hyper
gcgtggcccagtggcggaggcttgtgggaaattcctggtacccagctgcccaacatctgggacgctgcaacgcccacc

SEQ ID NO: 36479 - DNA, 30 bp, Homo sapiens
  chr1:167523049-167523079
  hyper
ccccgccccctccgcgaggcgccaatcaga

SEQ ID NO: 36480 - DNA, 777 bp, Homo sapiens
  chr1:167599107-167599884
  hyper
cacaaaagaaggaaatcgaaaagagaggaaacaaaaagaattaaaggaccactctaattcttgaagggacaggaaaaagaaagaaggcgcattaagggagggagacgttgagaaggactgagaccgtggcaaagcccagggtcctgagaaacttcgcgagacagaggggcccggtggctgcccatccccatgtttgggcacatggagtcgtggctcccgctcttgagtcctgccctgggagggacagtatctgtttagatttgcgtctaaatttaaaccctgatcgtcggcctccctccccgctccccaccctcccctcccctccccttcctccctccctccctcctcctccttcctcgttctctcgcgcagggcccccgcggccggggcagtcccgcagccgagcgcagccgggcgcgcgccaccgcccactcgccctgtgcccgccgcagcccgaaactggccacggccgggagcggaggggacagcggggatcgtgagctccggcccgggcgagcgggtgcgtctgccgcagagtcggcacctgaaggacatggaggtaaaggaccccggagggagacgcggggctgagcggtgagcggtgtatcgggcgccccttccccgggcggctgcccctgccctgagcatggagcacgcggctcatcgctgctgccaactagaagggcaaatgcctgctgttccgacgcctccttgaccaactccgaaggatcgtccctggtcccacctaggacacccgggttgggaggctggggttgg

SEQ ID NO: 36481 - DNA, 30 bp, Homo sapiens
  chr1:167691275-167691305
  hyper
cccggcgcgggtggcggagagatcagaagc

SEQ ID NO: 36482 - DNA, 30 bp, Homo sapiens
  chr1:167772887-167772917
  hyper
acttgcccaaggtcacgtaactggtttgtg

SEQ ID NO: 36483 - DNA, 30 bp, Homo sapiens
  chr1:167904975-167905005
  hyper
ggatggttgtacaacggcctcaatttctcg

SEQ ID NO: 36484 - DNA, 30 bp, Homo sapiens
  chr1:167906387-167906417
  hyper
gccgaattccgtgccggtgcctcccccagt

SEQ ID NO: 36485 - DNA, 30 bp, Homo sapiens
  chr1:168105302-168105332
  hyper
cttggcccagaaggcgccgagggctggtcg

SEQ ID NO: 36486 - DNA, 30 bp, Homo sapiens
  chr1:168148081-168148111
  hyper
taagacgtgggtcacgcaacaagagcaact

SEQ ID NO: 36487 - DNA, 30 bp, Homo sapiens; identical to SEQ ID NO: 930
  chr1:168148606-168148636
  hyper

SEQ ID NO: 36488 - DNA, 30 bp, Homo sapiens; identical to SEQ ID NO: 931
  chr1:168194874-168194904
  hyper

SEQ ID NO: 36489 - DNA, 30 bp, Homo sapiens
  chr1:168195543-168195573
  hyper
cacggggcagtggccgcggcgtccttttct

SEQ ID NO: 36490 - DNA, 283 bp, Homo sapiens; identical to SEQ ID NO: 932
  chr1:168311896-168312179
  hyper

SEQ ID NO: 36491 - DNA, 335 bp, Homo sapiens
  chr1:169074761-169075096
  hyper
atacccgccgccgaccgggcaccaagaaagtcctcggtggctgggtcacgtgcagatattgttgcctggggtctagactggcctgagtctcaattggtttctacgggacaactcactgcgggctaccgccctgggtgggtttggcaattgtcctgctcgaggtggttcaggccgcccacaaggggcacagccgggcagtcaggaaccggggctgccggctgggctggcctgcaaagaagagggaagggccggaactgcaaccgcagtggcggggagtgcgagggggcggcaggtgcaggagcgggaggcggggcggagctgggcagagtcctcgc

SEQ ID NO: 36492 - DNA, 30 bp, Homo sapiens
  chr1:169075385-169075415
  hyper
cccagcgatccaagcggcccctctagcccc

SEQ ID NO: 36493 - DNA, 284 bp, Homo sapiens
  chr1:169076041-169076325
  hyper
gcggcagctgctgacccgccatcgccatggcccgcgggaaagccaaggaggagggcagctggaagaaattcatctggaactcagagaagaaggagtttctgggcaggaccggtggcagttggtgtaagtacggggtccgcagctcccggccgccgcgtctgatctttcccgggcggcgcatcccctgcgcagggtccgcggccggttccgcacccaccgcgctggccggggtggcgggggcgagggtggtggacgctgctgggtcgcgccggcctgggcttgca

SEQ ID NO: 36494 - DNA, 30 bp, Homo sapiens
  chr1:169337190-169337220
  hyper
ggcagttttacttccgtttgtttaacagct

SEQ ID NO: 36495 - DNA, 257 bp, Homo sapiens; identical to SEQ ID NO: 935
  chr1:169396431-169396688
  hyper

SEQ ID NO: 36496 - DNA, 200 bp, Homo sapiens; identical to SEQ ID NO: 936
  chr1:169396730-169396930
  hyper

SEQ ID NO: 36497 - DNA, 151 bp, Homo sapiens
  chr1:169454464-169454615
  hyper
caaaatattgccccctcgcccccagcaggaactgctggaccagtctgggcagtcacgctaagccacattacaacacgatcagcatactgcctgacgcacaaggcacggggcctctggacgcgtgttctgagcccttcgcaggagactcgtc

SEQ ID NO: 36498 - DNA, 30 bp, Homo sapiens
  chr1:169455040-169455070
  hyper
tccttctcctcctccgccaactggagtgag

SEQ ID NO: 36499 - DNA, 31 bp, Homo sapiens
  chr1:169455341-169455372
  hyper
cacgccaggcctctgacgtcccagggctcaa

SEQ ID NO: 36500 - DNA, 30 bp, Homo sapiens
  chr1:169763975-169764005
  hyper
acgtgtcctgggatcgcgcttctgaaaaag

SEQ ID NO: 36501 - DNA, 30 bp, Homo sapiens
  chr1:169764304-169764334
  hyper
cagaggagctatgccgccgggaactgccgt

SEQ ID NO: 36502 - DNA, 30 bp, Homo sapiens; identical to SEQ ID NO: 938
  chr1:169862706-169862736
  hyper

SEQ ID NO: 36503 - DNA, 37 bp, Homo sapiens; identical to SEQ ID NO: 939
  chr1:170043653-170043690
  hyper

SEQ ID NO: 36504 - DNA, 30 bp, Homo sapiens
  chr1:170043981-170044011
  hyper
ggctccgtagtcaccgcccccttgaggatg

SEQ ID NO: 36505 - DNA, 367 bp, Homo sapiens
  chr1:170630382-170630749
  hyper
aaaggagggagaggcgaggagctgctctatttctagggaggttttggggagactgatcagctccaaggacagaccgctgggaagggaaaaacggcccacatcgaactggatgccggatggaaacctctctgcgctattagactgcgtccagtacagcagatggcacgagcacgtgcggcgctcagcttaggctctcggaggcagctgagttggaaatcccgacggaaagcacccacaagctcccactctgcgctggcccacccgcgtgcacgcccaccccccacgcgcgtccctggctcagaagcgcacagatgtttactgcttagagccggtaccgctggggagatcgagcgacttgcgcggcgca

SEQ ID NO: 36506 - DNA, 31 bp, Homo sapiens
  chr1:170631415-170631446
  hyper
ggacgcagaaccgcacggaagcctccccaac

SEQ ID NO: 36507 - DNA, 938 bp, Homo sapiens
  chr1:170633352-170634290
  hyper
ggagaccatgacctccagctacgggcacgttctggagcggcaaccggcgctgggcggccgcttggacagcccgggcaacctcgacaccctgcaggcgaaaaagaacttctccgtcagtcacctgctagacctggaggaagccggggacatggtggcggcacaggcggatgagaacgtgggcgaggctggccggagcctgctggagtcgccgggactcaccagcggcagcgacaccccgcagcaggacagtgagtgaggggcgcatgcccacgggggtgtgtgcccgggacagagggcggggacccgtgtagggcagctagagcccgtccgcggccagaaagacaaggtcctgggaccaggagaggtgatggcagacttcaaaggaagggccagtcacaggggaaaccagatgagaaaagcgggtctcggccgagggcatagccaaggaggacgctggagagaggctccaaggtccggggacactccgaggccctgcggtctcaggcagggactctgtccgcggcggactctctttacttcggctaggcaccggctcggttcatcccgcacgcggggcggcggggctgggctgggaaaaggtcttagcggggtgcaaactcagagagccagcgctgtttgggaaagcagcaggttaaagatgctgagtcgggttggaagggcttctctcgggcagcgtatgacggcttgagggagggcaccaggcacagggagcaggacttggcgctgctcaggctgcactctccacgcgggcaccgtaaggccgggcgcgaccgggaggccccgagagaacgcccggccccagacgctggagctgctctctgccccctgctgttgcctctaccgcaaatgggtttgagactggcagagtcaaaagcccggctggcttgggaaaactcgggccaagcaaagggaatgtc

SEQ ID NO: 36508 - DNA, 310 bp, Homo sapiens
  chr1:170637548-170637858
  hyper
atgtagtcataaaaaggtagacggaaagtcaattagacacgcgcgcacacacgcacacattcacaagccggtgctaagtgtgcacccggcgcagctggctcccgggccgcggcgggatgcaaatacaaaacagcgacgcgggaaatcgatttgtcacaaagggagaggtgtaaacgcagcgcaaaggaattgcttgcccaatctaccagccacactctctcgggaccttgccccgccaacttctcttcgccagagaaacgcccaggagagcgggaacattttctagggcgctcccaagttggaattctca

SEQ ID NO: 36509 - DNA, 308 bp, Homo sapiens; identical to SEQ ID NO: 944
  chr1:170640316-170640624
  hyper

SEQ ID NO: 36510 - DNA, 50 bp, Homo sapiens; identical to SEQ ID NO: 945
  chr1:170640664-170640714
  hyper

SEQ ID NO: 36511 - DNA, 399 bp, Homo sapiens; identical to SEQ ID NO: 946
  chr1:171220521-171220920
  hyper

SEQ ID NO: 36512 - DNA, 98 bp, Homo sapiens; identical to SEQ ID NO: 947
  chr1:171220979-171221077
  hyper

SEQ ID NO: 36513 - DNA, 30 bp, Homo sapiens
  chr1:171454814-171454844
  hyper
tttcgatcagagatcggcggagaccctcga

SEQ ID NO: 36514 - DNA, 30 bp, Homo sapiens; identical to SEQ ID NO: 948
  chr1:171455048-171455078
  hyper

SEQ ID NO: 36515 - DNA, 30 bp, Homo sapiens
  chr1:171711246-171711276
  hyper
gcgggtccagggcacggagataatcgagga

SEQ ID NO: 36516 - DNA, 30 bp, Homo sapiens
  chr1:171711488-171711518
  hyper
ctggggtgatgaggcgttagaaagaaggtg

SEQ ID NO: 36517 - DNA, 394 bp, Homo sapiens
  chr1:171750911-171751305
  hyper
gtggtccatgcgtgcgtttgtcgtgtaagggtcattcctggggtttggagtgggggaacaaatcaatgtggctgtttttccgtggaaagaattcccactgcagtgtcccggagcctgcgtgtggtgggcaagctcctcaaatggtatctcacagggaataggggagtcttgaaaacgcagcttcggcagtaggaacatgaacctcttacctaaaagttccagggagtttggctccgttgactattgggagaagttcttccagcagcgaggaaagaaagctttcgagtggtatggaacctacctggaactgtgcggggtgctacataaatatatcaagcccagggaaaaggtgaggagcgcgggttggtagcccttcgtacgtgctccggaaggt

SEQ ID NO: 36518 - DNA, 202 bp, Homo sapiens; identical to SEQ ID NO: 950
  chr1:171810194-171810396
  hyper

SEQ ID NO: 36519 - DNA, 773 bp, Homo sapiens; identical to SEQ ID NO: 951
  chr1:171810513-171811286
  hyper

SEQ ID NO: 36520 - DNA, 330 bp, Homo sapiens
  chr1:171811320-171811650
  hyper
cgccgaaagcttcccagtgcccctctcctgttttcccagctcaacacccccctccttttcctgtcgccctccgtgaggctccctgtgaggctgtggggctttatcccccgagccccctcccttaggtggagatgctttccttctcgccagggttctcgttcctctcagctgtctactgttgcctgcctctagctggggaggcggggtgcgaggagaaagacgtcgtttgttgtggtgaagctttatccagagacgcttccccaccattctcctcccggagagtcgaagaataaaaggtggtgtgtttgcgtgtgcacctattcacagctt

SEQ ID NO: 36521 - DNA, 30 bp, Homo sapiens
  chr1:172502125-172502155
  hyper
ggtgggggtgcgggcgccgcgggacttggg

SEQ ID NO: 36522 - DNA, 273 bp, Homo sapiens
  chr1:173638753-173639026
  hyper
ttctgcgatcccttgcggctgccggcggggtaggagaccggtgcgcaaagctctggacagaagcagtgtgaggacgctgagattgaagcccactcccctccagccctgcccgagcagcctggagggaagatgtccgtctaccccatcgcactcctccccaagtgcccaccccggcccacagcgccaggacccctagactcaccacacccgggccccggcctcctcggttaccatagcaacggcgcaacacgcgaggcagcgcctcctcctgcg

SEQ ID NO: 36523 - DNA, 30 bp, Homo sapiens
  chr1:173684030-173684060
  hyper
ggttcctgcgggaacgatttaagaatagga

SEQ ID NO: 36524 - DNA, 30 bp, Homo sapiens; identical to SEQ ID NO: 954
  chr1:173793302-173793332
  hyper

SEQ ID NO: 36525 - DNA, 35 bp, Homo sapiens
  chr1:173793640-173793675
  hyper
cacttaaccactatcgtcaacctttccaatcgtgc

SEQ ID NO: 36526 - DNA, 208 bp, Homo sapiens
  chr1:173793729-173793937
  hyper
cgtagtaggcatggcggcggcacctcaccactgattcgttgaattccttcccggtaatcttgggcactagcgggcggagttgaagggcgcttggaccccagcggcgatctgtgtttgggttcgcgctctgggagaattttggctttgctcgccttcctctttcagaagactcgaaatcggccagcaggtctgcgagatttgaaacgcg

SEQ ID NO: 36527 - DNA, 31 bp, Homo sapiens; identical to SEQ ID NO: 956
  chr1:173836777-173836808
  hyper

SEQ ID NO: 36528 - DNA, 38 bp, Homo sapiens
  chr1:173837158-173837196
  hyper
agttcttttgatgacgtcacgacgcacgctcccggcag

SEQ ID NO: 36529 - DNA, 31 bp, Homo sapiens; identical to SEQ ID NO: 957
  chr1:173991621-173991652
  hyper

SEQ ID NO: 36530 - DNA, 30 bp, Homo sapiens; identical to SEQ ID NO: 958
  chr1:174128282-174128312
  hyper

SEQ ID NO: 36531 - DNA, 72 bp, Homo sapiens
  chr1:174968319-174968391
  hyper
aggctcacttataccgaatccaaacccaggcgagaactacggactcttgaaatggtcggtgaaaggggcgaa

SEQ ID NO: 36532 - DNA, 375 bp, Homo sapiens
  chr1:175048455-175048830
  hyper
ctctccctcccagatctaagccgccactgcagcggccacgggaccttctccctggagacctgcagctgccactgcgaagagggcagggagggccccgcctgcgagcggctggcctgccccggggcgtgcagcggccacgggcgttgcgtggacgggcgctgcctgtgccatgagccctacgtgggtgccgactgcggctacccggcctgccctgagaactgcagcggacacggcgagtgcgtgcgcggcgtgtgccagtgccacgaagacttcatgtcggaggactgcagcgagaagcgctgtcccggcgactgcagcggccacggcttctgtgacacgggcgagtgctactgcgaggagggcttcacaggcctg

SEQ ID NO: 36533 - DNA, 30 bp, Homo sapiens; identical to SEQ ID NO: 959
  chr1:175091630-175091660
  hyper

SEQ ID NO: 36534 - DNA, 30 bp, Homo sapiens
  chr1:175161546-175161576
  hyper
ggactcagcccaggcgcagagaggaagact

SEQ ID NO: 36535 - DNA, 30 bp, Homo sapiens
  chr1:175712856-175712886
  hyper
tttttttaagcctccgttttttccatcccc

SEQ ID NO: 36536 - DNA, 30 bp, Homo sapiens
  chr1:176176504-176176534
  hyper
tcggggctccctggcgaagggagtctgtct

SEQ ID NO: 36537 - DNA, 16 bp, Homo sapiens
  chr1:176867110-176867126
  hyper
cgctgcgaccacaaac

SEQ ID NO: 36538 - DNA, 278 bp, Homo sapiens
  chr1:177133308-177133586
  hyper
gaggaggctcagcatccaggtcggatttggggagaagtcaggtgcacagaggcgctagtatgcaagtgggtgtggagaatggtccgggagtggggcggatccgggaggtaggagtgggggaggggaggtcgtcggcgagtgggtgtgtagagcgagctggagtggggggtgggggcgccggtccagcgcctccggccgcctcgacctcccccgggactcacccagcacgaagtagggcagctccgtgttctccaggtcgtccaccacgaccatttctc

SEQ ID NO: 36539 - DNA, 345 bp, Homo sapiens; identical to SEQ ID NO: 961
  chr1:177133689-177134034
  hyper

SEQ ID NO: 36540 - DNA, 30 bp, Homo sapiens
  chr1:177134251-177134281
  hyper
aaaatcttccctctcgcatcatcatccaga

SEQ ID NO: 36541 - DNA, 30 bp, Homo sapiens
  chr1:177139861-177139891
  hyper
agtccccactgcaacgctgggagggttaac

SEQ ID NO: 36542 - DNA, 74 bp, Homo sapiens; identical to SEQ ID NO: 962
  chr1:177140099-177140173
  hyper

SEQ ID NO: 36543 - DNA, 523 bp, Homo sapiens; identical to SEQ ID NO: 963
  chr1:177140304-177140827
  hyper

SEQ ID NO: 36544 - DNA, 296 bp, Homo sapiens; identical to SEQ ID NO: 964
  chr1:177150841-177151137
  hyper

SEQ ID NO: 36545 - DNA, 1355 bp, Homo sapiens
  chr1:178062488-178063843
  hyper
gggaaggaagaaggcgctcccccttgggtgactgtaagataaagcagcttcttcgatctctttgtccaataagaaagaaacgttggcccataaagaaagaaagaaacaaataaataggaaaggtgtgagaaggaagggaagctcctttcttttctgtttaaatttcccgcacccttttacctccccgccttctcaaacggtctttactttgagcagcagagacccggaccgctcaatacccggctatccctgggagggtacttggaaagtaggcgggacaggccggatgaataattcggtgtccgacttttcctgcctgcggcgcagtccctccccggcttcgttactcgagtgcacacgcggccgggctctcggccctcgattgcttcagcctatcaccctgggatgccgcctgccgctgccgccgccgccgccgccgccaccgccaccgccaccgccaccgccaccgccgtggctgccgggtttgtgggatccgccgcggagcaggagccagagctgtggccggagctgtggcctgagagtcagggggcgggcaggctcattccagaagtgggggccgaggacaggcgggctagaacccggggccaccgccccctacccctcctcaggctgagggaacgggcactcggagcttctgaggcggcggcggcgggagccggtcagagggggcggcccctggcggcgacgcccccaagcccagccctgcccggccccgctccatccccagccagagcctggtctgaccgcgagagacgccggcggggctgaagaaggcggctccgaggaggtgggagggcgagcctcccctcccgggttcttctgcgtcctctcccgggagggacccacacacacctgagcccggacccacccttggtcggggccacgctggatcctcctcccggcctgggtcccgcccgccgactgcaggtgggctgcatcgcccgagcctcgggcagtgggcgacggggaaggaggtgagaggtgtccgcgccggctgccgctcgggtccctgccctcgctgcgcgctctcctcctccccttaccgcaggcagggcgcggagccgcgcgccagcccgccccgaagccgccgcctcgtccccctcccgcctcggggcaccatggagctctctccgtcgtccggaggagccgcggaggcgctgtcctggccggagatgttcccggcgctggagtccgactcgccgctgcccccggaggacctggacgcggttgtcccagtcagtggagccgtcgccggtggcatgttggatcggatccttctggagtccgtgtgccagcaacagagctgggtccgggtgtacggtaaggaccacagg

SEQ ID NO: 36546 - DNA, 30 bp, Homo sapiens
  chr1:178501573-178501603
  hyper
tgtatgtataagctcgggcaggcaaaagtc

SEQ ID NO: 36547 - DNA, 30 bp, Homo sapiens
  chr1:178511770-178511800
  hyper
gcgcaggaagggagcgcaattcccaccgcg

SEQ ID NO: 36548 - DNA, 31 bp, Homo sapiens; identical to SEQ ID NO: 966
  chr1:178694819-178694850
  hyper

SEQ ID NO: 36549 - DNA, 31 bp, Homo sapiens; identical to SEQ ID NO: 967
  chr1:178995254-178995285
  hyper

SEQ ID NO: 36550 - DNA, 48 bp, Homo sapiens
  chr1:179050658-179050706
  hyper
ctggtgttttgctgcggtttcatttccctctgcggaggagccagggca

SEQ ID NO: 36551 - DNA, 30 bp, Homo sapiens
  chr1:179262757-179262787
  hyper
ccagggccagcctgcgagcactggcgccgg

SEQ ID NO: 36552 - DNA, 601 bp, Homo sapiens
  chr1:179544699-179545300
  hyper
agcagatagtggtgctgaatccgtaccttcctcgggccgctcgctctccaacagcgccaccacctcggtgccctcctcgccggagcctcggacctcatccacgtccaccaccgtggcggcgggcgctcggggctcccccggggtccccgcccgtccggagcccgacggctcgggcccagcctcctggcgcccgcggcctccgccgctcctctcggcctttgccctcttgttctccttgtgcggagtcctgccgcctcgcccgcgggactccctggaggagctccgcgccctcctctccatcctcagagctgccgggcggctggagcagcagcgcgggagcgctaggggcacgggagcgcagtccctgtggagtcgctgcgggtccgcgtggcgtgcccgggggaccctaaagaccgtcgggtgggggctgagggcgaggggcgggacaccggggccgcgggcggggcgcacccggaaccccgacagctgtgtcttggtggagctgtggactgcgcccgccgactcccacggccggggcggcgctgaagcagagagaggcctgggtgggagagccggccccgggcagggtgcgggcgttgaa

SEQ ID NO: 36553 - DNA, 449 bp, Homo sapiens; identical to SEQ ID NO: 969
  chr1:179711889-179712338
  hyper

SEQ ID NO: 36554 - DNA, 143 bp, Homo sapiens; identical to SEQ ID NO: 970
  chr1:179712410-179712553
  hyper

SEQ ID NO: 36555 - DNA, 166 bp, Homo sapiens; identical to SEQ ID NO: 971
  chr1:179712567-179712733
  hyper

SEQ ID NO: 36556 - DNA, 78 bp, Homo sapiens
  chr1:179712830-179712908
  hyper
cgactcgggggcatctccggcctcgtggccagaccgcgggtggcggtgctcgcgcctcggggccggacttgccgggtc

SEQ ID NO: 36557 - DNA, 13 bp, Homo sapiens
  chr1:179713161-179713174
  hyper
ttgagaccggggc

SEQ ID NO: 36558 - DNA, 30 bp, Homo sapiens
  chr1:179846914-179846944
  hyper
cccagcggccgccgcggcccgaatgtcgtc

SEQ ID NO: 36559 - DNA, 181 bp, Homo sapiens
  chr1:179851219-179851400
  hyper
gggagtctcctacacgcagtcaacacttgccacgagcggctagacttaggacaggcaagttgccctgccatccttctatcgcccccacccctcctttacttaagggcgatggcagagacgtcctcctcccccttctcctcctctttggtgcctccagccaggaggcgggagcgatccacag

SEQ ID NO: 36560 - DNA, 214 bp, Homo sapiens
  chr1:180123472-180123686
  hyper
catcagcaggggtgggtgcatcgatcctgtggggtcttggtggtcgcagaccaagcgtccctcttctcacatctaattcacaacgtctcatcgctccgcgggagcccaggaactgccctacaacagccgaaatccgggtcgtctattccaacggactcctcttccgttggatacgggggccgtgagaggccaaacaacctccgcgaggctaccc

SEQ ID NO: 36561 - DNA, 890 bp, Homo sapiens; identical to SEQ ID NO: 975
  chr1:180123700-180124590
  hyper

SEQ ID NO: 36562 - DNA, 600 bp, Homo sapiens
  chr1:180197992-180198592
  hyper
agggcacacagtcccccttcccgcctaagctgaaccccactaggctggaaggacacgtatgtctgcatttctggaaggaaatgccgtgggggctgggggcaggagagcggctgggtcttggggcagacggggtgggcttcccgcgcctgcagcccggaggcgtcgagcgcctgatggagcgtcagaggagacctcgtcccagcgttgggccttctgttgtatttctgccagaaactcgcgttgaggagaatttgttttaagcgtttctctacctgtccatgcatctcgtaaatacagtaagcatggcaagccctttcgctggttaaccccggcgtccgtgtgctcactgccgccctgcacgcacgaggtcgcggatggttcaaagcacccgcggtggcagccggagaggcagagcgggctctagggacctaagacagggccgagctggacgactggtggcagggcggccggggaggccccgccgcggggaggtttgggccccctaccctgcggaactggaggcaagtgcggactccggctgcaggccgcggtctgcggggacgcgcgcggggggcctgcgtcccgccacctccgcgcaca

SEQ ID NO: 36563 - DNA, 30 bp, Homo sapiens
  chr1:180198986-180199016
  hyper
acccagggcgccgccgtctccgaccacctg

SEQ ID NO: 36564 - DNA, 1425 bp, Homo sapiens
  chr1:180199545-180200970
  hyper
caccgtgactccagcggcctgcttggggttttaattattattttgaaatttctgaatcgagctagagcgagagagcgagagatctccgtagactgcgactcgctggctttcgctccgagatgatgcagagtgcgactgtccccgcggaaggggctgtcaaggggctcccggagatgctaggtgtgccgatgcaacgtaagacacccccctttctcgctgatttaattctaacaagacagctagcagcctcagccgctgcggggcgggccggacgccgctcaggggccgggaggggctggcggccggggcgcagaggcggtcacagggcaggggcaccagccagagtgcgtttgagggggccaggctcttggctgtttggggccgaatgtgaacgcctcctggatcatgcttgaggcgagccgagtaccgaaccccgcatctccagcccaaggcttttcttggaacgctggggagagtgctgtttggggacacccaggggtacgagctgtaggccaggcctgagggcgagggtggtccccacaaatcttctttcgccggcgtgacggtcagcgcttgcaggaccgctagtgcaacttcaccccagctggcgggaagttggagagcgcgtctctcgcccctggggctggcggcggagaagccccggccacactcttagtccctgcggcccgcgccccgggcgtgcgtgccgggtgagtccccagccgctactgcccgcggcgcccgccgcgtgcgccgcgggaaactgactgctccttgtgagggaatctgctcgcgcattccagctagcctaggaatgcaggggagggagaagcgaccgcaagttgtgaattccgggttcagcctttgcgcacgcgagggcaggtgctcagggtggctcgggtttggaggggtagagacgggggtgtgtgggagctttgctagcctgcccgcccgctttcttcccgcgcccgaaattagcgagacagccggagctcgcggcgtgtttatccccaagtctctctctgtgtgtatgggtgtgcgcgcgcagagattttcccgaagggaatccgtctctgtgcttcactcctgagcgagagtccccgagagggaatctgtgcagaggccagaacaggtgcccagtcgtcgcgcgcgcgcgcgcgcgcgcgcgacaagcgccgggagagtcctgcccctgtggcttgcacgctcagcagggcgccccgggcaccctggagagaccaaggagttcctcgctccgcttgccaaggggttgtacttccgcctgcgacttctttagtggtgcggtagctacatcttcggggtttactttaagtaagggccggctcatccagggatggtgactacctacaaactagggcgcacgagcgcgccctcctgcgcctcgggtttccatggcagggtttc

SEQ ID NO: 36565 - DNA, 223 bp, Homo sapiens
  chr1:180202648-180202871
  hyper
cgagccgcctccaaaactctccccgcggacctcagcagtccctccacgcgtcggggccctgctggccggccatgccctctgaggagacgcggaaaagagcgaggcatataggaaggtggggcgttttatccgcctcggttttgacccatctgccatgtagtctccccaggcaccgagggaaaggacgacggaagcccgccgcccggatcgctggcgggagaga

SEQ ID NO: 36566 - DNA, 68 bp, Homo sapiens
  chr1:180203081-180203149
  hyper
ggctcctccggggtgcgtggggtaatgtcccagcgcaggtcgagttgcagatccgagtccccggggtt

SEQ ID NO: 36567 - DNA, 77 bp, Homo sapiens
  chr1:180203530-180203607
  hyper
taactgctaggatcccgttccagcccctggccagagctgtgtaccacaaagaagggagtttggagaaacccgggtaa

SEQ ID NO: 36568 - DNA, 986 bp, Homo sapiens
  chr1:180203633-180204619
  hyper
cggatggctgaggactcccaaggggcgagagggctccggcctcctcctttccagggccttgttatctgagagggccgttagcacggagggaagcttggaaagccgctgtcccagtgcgctccgcatgcggaattaactgttaaagccggacacggagcacgcaggtgcagcaggtgaggggcaaaggtctgcattgagcagtccgcagtgtcccgggaagtcgtaaagtcgggactgagaagaagcaggacctaactcaagtttatttcctctcttggccgaggtccgggctcgtggaaaaccagagctaggcggggctacgcagggctgagcaggagtggcgtcctagggtctgggagcgcgacccacatgacctcgctacgaccggggcagggctcctccgccccgcgggcagatgccggcctgggtggcccggggaacagacgatgaattctttaaatgagcgtttgctgcgcacccatgggcggctcacgatcctgggcactcgcccgggaatcccgggcgtgctctgggttttgggggactcgccggtggaggtagatgtggacagggcggccggcccttcgcgggtagccggctttgcgcttactgcgtcccgcagcggtgggtaaaggtcgtagcccagaaggggacaagggagggaccgcctctctctccccggtgcgctgcaatagaggttcctgcgccttggcccttgcagtccatccgcccagaggttcgcgcccgttttcggagcttattatctcaggtagcccagaggtccgactgagctggaattagccaggcctgggacccctttgctgccctttagagtggtggcagggacttttccagcaaggataggcgcggcaggcgcgagtgcggacggcgcgcccattaggaggaggccgggtgaaaacctctcttcctctccagacccatttcgttccaagcatttggaatgacaaaattaaaccccaaccctg

SEQ ID NO: 36569 - DNA, 275 bp, Homo sapiens
  chr1:180204897-180205172
  hyper
cgccggggaaggcgaggtggcgcgggccaccgggtgcactcaccgcacgagaggccgcggctggactgggaccgagcgcatccctgtgtctcagggggtttgctttgtgcaggatgggaccttattatttttagacagtggggcaaacgtgtcttttaaagagatccgaagggtgaaactaatgaaaaaggaaatgaattactagaaaagccgtgaagggataaaaccgggagcagcaggaagttgaaggaaggacgaccgaagctaggtgtatc

SEQ ID NO: 36570 - DNA, 92 bp, Homo sapiens
  chr1:180472130-180472222
  hyper
ataatgaaaaactgcgagatggggctgtcccgtcttactgtgtgactgatgagtggaatcactgctctgcgtgtttcgctctccacaccttc

SEQ ID NO: 36571 - DNA, 20 bp, Homo sapiens
  chr1:180601720-180601740
  hyper
tgcgagggcagccccgggtc

SEQ ID NO: 36572 - DNA, 31 bp, Homo sapiens; identical to SEQ ID NO: 979
  chr1:180606644-180606675
  hyper

SEQ ID NO: 36573 - DNA, 537 bp, Homo sapiens
  chr1:180881295-180881832
  hyper
gtggaaggagaaagcaagctccgtcggtttgggccgcggctgcagggaatgcccctggttgcgacccccgtcccgcgctggggaaagtgatctgctcgagagcccccaggaccctgagaaccggtccccacccaaggcggcggcgggcaattccggcaccgcggcagacgggatgcgcggagcgcgttccctccgggtttccctcacgcctctggagagcgggaaccaacgaccttgacctcggaggaaacggctctacggagcgatggacggccccacagagagggcggccggctcctctggaaaacttgtccacacaaaaggcattcctcagcttccaccccgaaaggcgagccctgggtgtagggttaccagcggcgcgcggagcccgccgagaacgtggtgcgcccccagctcctgcccgcgctccccggcctccgtgcgccccgcgcgcctccgctcttgcgcccgctttcccgcggggaaggggccaccgccctgcgaggctggcggccgccccgtcgtccccaagctcgg

SEQ ID NO: 36574 - DNA, 30 bp, Homo sapiens; identical to SEQ ID NO: 981
  chr1:180882272-180882302
  hyper

SEQ ID NO: 36575 - DNA, 521 bp, Homo sapiens; identical to SEQ ID NO: 982
  chr1:181058993-181059514
  hyper

SEQ ID NO: 36576 - DNA, 30 bp, Homo sapiens
  chr1:181073994-181074024
  hyper
ttcacgggatgcctcgctagcaagccggcg

SEQ ID NO: 36577 - DNA, 30 bp, Homo sapiens
  chr1:181286832-181286862
  hyper
ccgcctcgcgcgtgccgcccgtgtctggac

SEQ ID NO: 36578 - DNA, 20 bp, Homo sapiens
  chr1:181287179-181287199
  hyper
taaaataattcagtgatgtc

SEQ ID NO: 36579 - DNA, 1056 bp, Homo sapiens
  chr1:181287267-181288323
  hyper
cgggtttttactgccagagatgtgtctgtcttgcgccccgcatgcactgcctgcggggctgcgctgcactccccggcggcgccacgggtctggcccccgcgcttctacgtgttggggggatgcatggaccttggagatccgtagttggccctaaccttctcggaatctcctctgcacgcgctgcctgttcctcctctgcacgctctgtccgttcctttgcaacttctgtgggaattgtcctggcgtgggaaacgcccccgcgctctttggcacttagggtgtgagtgttgcgccccttgccgcagcgctcagggcagcatcccgctcgaggatgcagggttctcaccaagcagtgagggggactcacgcgccgccggggagcggagccaggctccgagaagggagcaggctcgagccgctgggttttcgcaagccttggggcctctggccgcccttccatgcctccgggcgcgggcggctcagcaggtccccggcttcgggaagttttgtgcgcggatcgctggtggggagggcgcgcgggccagtggctgagcttgcagcgaagtttccgtgaaggaaactgcatgtgcctttggaggcgactcgggactgctgtagggtggactgggtgtctatggagttgcgggtcagagcgagtagggtgggtcctttcctgggacaggactgggaattggggctcgaagtaggggaggaaagagcacagaggaagccaggctgcatagggtgacttgctttttgatccggcttgagtctccttgtgcgagagtggttgtgcgtcctttcccagggatggaacatccagttttctgtgcttttttgctttgtgcccatgtcttggagagaataatgggagacactaacccaccgacgtctcccttgagatcgcggcttcctccttgcgcagaggactgaggtcacttgctgcagtcgtgtctgtgagtctggctgctcagagcagatgattcaggctgtgggtgcgtgcagagatctgggggcttgtcgtaatggttcaccgtgttggaacattgatgcata

SEQ ID NO: 36580 - DNA, 598 bp, Homo sapiens
  chr1:181451658-181452256
  hyper
ttccaggaacctccagccttccggctgcgtccccgcccctcccgcctggccagctcctcccccgcttctcccagcgctcttgcgcgcctcgctgcgcctctgcgcgccgctcgctgtcctctgcctcgcctccccattctccttccgcatcttctccagtgctccgccgagggcgctgcctgcggggaagagggagactgagccgttagtgaggaagttcggtctgtggacaagtgtggtgccaggccgccgcgaggctcggctgcaacctgttcctcgcccgccggtgctcgccgcccgcccgctcgcactcccgccctctcggcggcgcagccgcggatcgctgttgcatgctgatccggggaggcggcggtggcgagcgctccgggcggatgctggcactcaggcttcgctgctctctggatgctgctcaacttctagcccaagcgcaggagctttgaagtcatttgtcccttttcgcttggatcgacttcttattttgagattttgggcattgcggtttacgcaggaacctcaatatcgctctccccacctccctccctctttctccaacctttggatgcgtctctgctggcag

SEQ ID NO: 36581 - DNA, 552 bp, Homo sapiens
  chr1:181454729-181455281
  hyper
tagggtggaggtttcgggcgggggaggggtcgggtccctgcagtcacgcctgccggtgcgctgcacaaagcggacagatctcattgtgttgtgtgctgcggctgcaaatattcctctaggcagtctacggatttcccagctgggccctcctttctcactcggcttctacggttctctaaatcttcccatccaccaggtgctgccttgctgtgcccctctcttaggggcgtgtttattcagacaggcgccctcccgtttctttgcggtagacaaagccgcccaaccgccccgcgggtggcaaagtgtgccagcagccatcgttggcacctcggacagcgccgctgaaactcccggcggcccggggctccccagttacccgggttcagcacctcgggtacttctggccgggcccagccttggagctgagaaaccaggcacgtttcctacaccacgtggtcaccttttttcacgttttctcttccgctgcaaagacaccgcctttccaccaggcgttgcgagcgcgcaaggtgcggctgtgagtcttactcctcc

SEQ ID NO: 36582 - DNA, 58 bp, Homo sapiens; identical to SEQ ID NO: 986
  chr1:182360259-182360317
  hyper

SEQ ID NO: 36583 - DNA, 72 bp, Homo sapiens
  chr1:182360887-182360959
  hyper
ctgctcacacgctccgctcttctcccactctcgactctgcagagccgccagcagccccgcaccctttatccg

SEQ ID NO: 36584 - DNA, 436 bp, Homo sapiens
  chr1:182557966-182558402
  hyper
ggaagccctgagtgacgcatcagagtagagaagagacgagcctgcggaagtactccaacagacaatcctgctttcaatttcactttctctgtgcgacctgagtaagtcgcaaagagatgcctgagaaactgaggacatggataaatgacgtgtggactctgacagaactctggaagggcactggaggaagatccttccgggcagccaagggctgggagctcccctcccacttcccaagtcctccagcccctggcctctccagtctccaaagcccaagaattcttcaggatcgacttatcgaggttttctagctttcctccttctgcctgccttacctgctcaactcagacgtctcaattattcctttggcagccgcaaagcctggaagactgcttgcagcccgagcagtttcctcctgctgcgtcactgagtcagc

SEQ ID NO: 36585 - DNA, 30 bp, Homo sapiens
  chr1:182573438-182573468
  hyper
gctccaggaggctccgcgtgcgccaggaag

SEQ ID NO: 36586 - DNA, 557 bp, Homo sapiens; identical to SEQ ID NO: 988
  chr1:182583782-182584339
  hyper

SEQ ID NO: 36587 - DNA, 217 bp, Homo sapiens; identical to SEQ ID NO: 989
  chr1:182584403-182584620
  hyper

SEQ ID NO: 36588 - DNA, 135 bp, Homo sapiens
  chr1:182911448-182911583
  hyper
gcaggaggcttagctgacaaccgccccgatctcctgttgggctcttccttggcggccccttcggcggagctgaccttcctcttgggtatcctggcggcaggcagggcgcgtgccgggtgcctgcgggccgtggcg

SEQ ID NO: 36589 - DNA, 438 bp, Homo sapiens
  chr1:182992749-182993187
  hyper
ccccaggctcaagcagcgaagcggcctccgggggacgccgctaggcgagaggaacgcgccggtgcccttgccttcgccgtgacccagcgtgcgggcggcgggatgagagggagccatcgggccgcgccggccctgcggccccgggggcggctctggcccgtgctggccgtgctggcggcggccgccgcggcgggctgtgcccaggcagccatggacgagtgcacggacgagggcgggcggccgcagcgctgcatgcccgagttcgtcaacgccgccttcaacgtgactgtggtggccaccaacacgtgtgggactccgcccgaggaatactgtgtgcagaccggggtgaccggggtcaccaagtcctgtcacctgtgcgacgccgggcagccccacctgcagcacggggcagccttcctgaccgactacaacaaccag

SEQ ID NO: 36590 - DNA, 393 bp, Homo sapiens
  chr1:183385925-183386318
  hyper
tatttttagcctaagccacctcgccctgtctttaccgctgtggtgtggttttcactaaacctccctaggagggctcgcgcagtcctcaggctccggataaacacgtgtgcccgcatccagctccggcgcgccctgcatttcagcaccgccgcctctggagagcgccttgctggcgggccaggtcagggcctcccacacgctctctcatccatcccagcccactcgcttttccctactcctcgcttctctcagtttcaagaaaaagcacccccaacttctaacttctcaattcctgcttctaaagtgacctccgcgtccctctttccgtgtctaaacgctcatgccccacgcctttgagtcctacgagcagctgcgaagccgcgtggcttccca

SEQ ID NO: 36591 - DNA, 228 bp, Homo sapiens; identical to SEQ ID NO: 992
  chr1:183386598-183386826
  hyper

SEQ ID NO: 36592 - DNA, 633 bp, Homo sapiens; identical to SEQ ID NO: 993
  chr1:183386946-183387579
  hyper

SEQ ID NO: 36593 - DNA, 30 bp, Homo sapiens
  chr1:183439350-183439380
  hyper
gcagaaccccaccgcggaaatgagaataat

SEQ ID NO: 36594 - DNA, 30 bp, Homo sapiens; identical to SEQ ID NO: 994
  chr1:183440894-183440924
  hyper

SEQ ID NO: 36595 - DNA, 30 bp, Homo sapiens
  chr1:183441850-183441880
  hyper
caccgaggtaagtccggggtggcgggggag

SEQ ID NO: 36596 - DNA, 30 bp, Homo sapiens
  chr1:183604659-183604689
  hyper
gcaggagtccacctcgccctcgtcgggccc

SEQ ID NO: 36597 - DNA, 30 bp, Homo sapiens
  chr1:183605281-183605311
  hyper
gcttttgctgcagccgtcaacgacctatca

SEQ ID NO: 36598 - DNA, 554 bp, Homo sapiens; identical to SEQ ID NO: 995
  chr1:183774207-183774761
  hyper

SEQ ID NO: 36599 - DNA, 1111 bp, Homo sapiens
  chr1:184005519-184006630
  hyper
tcccagggcatcttcgtctctccccgggacgtggaaccccgatgcaccggcagggacagcccggagcgctcgcaggagaccaggcccacggtggtgccatggttgggcacactccgcgggctccgcccaatctccacccctaggtccaggtccccctaggagagctaggagcacatttccagcctggagcaggagcccggcaccggaaagtcagagcagcgcactgcggcgccccagccactgcggagcccctggccaaccgcagttacgttccatctgtcgtatctacatgggaatacggcgacaggcaccctatcccctcacgtcagggctagcagtatgaggtggggaaagaggaaacctcgagagttaaaagcgagggaactgaaagtccccttgaggggtgtcccccatgccccttgtgggacaaagccccaattcgcaggctaccctccagagctccagcggtccggttctccccatcagcaccctctgcgcacactgacccgcgcgtccctccgcagcctgaccgcccgatccgccagccaccggcgcgggcagcgagggggtgtgtgcgccagattttccgcgtgcccccccgcccctccagcggctccctcgccctgcagctgctgctccgggcgctgtccgcgctgggcaggccgcccccgcgtcccgccgcggcggcccggggcccgtgcgcgctcaccagatggccatcctgctcttggggtagtccagccgctccaggcagccgaggaagtgcggcagcgtgtgcgccgcgttgcgggcgaggaccgccacgagcaccgtggggctctgcaggggcgactccgggaaaaccaccggctcctctccgtcgtcctccgagtcccgctcggcgacgaagcgcgctcggcagccttcgcggagcagggctgaggagaggagcagtagcgaccaggcgagggtggcagcagggcgcgcagccatgttccgggccgaggcgggcggcggggaagtcctggcgcgagcgcccggctgggctgcctgagggcggcggcggctgccggggagcaaggggctgcgaggggcggccgggggatgcggcttgccgcggccggccggctca

SEQ ID NO: 36600 - DNA, 30 bp, Homo sapiens
  chr1:184021019-184021049
  hyper
ctaaggtcaggaggcgcgagaggagcaggg

SEQ ID NO: 36601 - DNA, 508 bp, Homo sapiens; identical to SEQ ID NO: 997
  chr1:184355380-184355888
  hyper

SEQ ID NO: 36602 - DNA, 279 bp, Homo sapiens; identical to SEQ ID NO: 998
  chr1:184355935-184356214
  hyper

SEQ ID NO: 36603 - DNA, 97 bp, Homo sapiens; identical to SEQ ID NO: 999
  chr1:184356590-184356687
  hyper

SEQ ID NO: 36604 - DNA, 30 bp, Homo sapiens; identical to SEQ ID NO: 1000
  chr1:184464148-184464178
  hyper

SEQ ID NO: 36605 - DNA, 245 bp, Homo sapiens; identical to SEQ ID NO: 1001
  chr1:184722804-184723049
  hyper

SEQ ID NO: 36606 - DNA, 171 bp, Homo sapiens; identical to SEQ ID NO: 1002
  chr1:184724679-184724850
  hyper

SEQ ID NO: 36607 - DNA, 30 bp, Homo sapiens
  chr1:184943053-184943083
  hyper
acgcgggatatccccgctgctctcttggcg

SEQ ID NO: 36608 - DNA, 398 bp, Homo sapiens
  chr1:184943399-184943797
  hyper
ggtgctccccaggcccccgggcgggcgggcgtacctcggatgtaagcgcacttgccctcgtccagctggctggaggctgagccgcccatgaccgcgagctgcctgtgctgagcgcggaaactgcccggtccgcgcccgctgctagctcctggaggttgatccgacggcgaacccggctctgaaattaagagcaaacttccttcgagaggcgagagacaggaggcaagaggcgtcgccttctggggcgcctcctccaggtccgcgccttctgatgatccgtgggccggcccgggggctgtcttcccgccctcgcctagctggtgagctccgacgggctggcaaccgaggaggtcggccagctcctcctcctcgcccacggtcacttcttgttttcatcc

SEQ ID NO: 36609 - DNA, 30 bp, Homo sapiens
  chr1:185014249-185014279
  hyper
caggtttaagaggacgaactcatgagaaag

SEQ ID NO: 36610 - DNA, 255 bp, Homo sapiens
  chr1:185125951-185126206
  hyper
gcaagtggggagggcgggatgcgtgcaacagacaaaagatgaagaaccagtgaccaaatcctgttagtagaaaacagaaagccagaggcagcgattccagatgcccgtccgcttccctttccccgaggcgttacgacgccaccacaaactgcgcagaagcgtactggggacggcgtccaattgggtaagagggttcggtttctacggtgcgtctccggcccaccggccaaccaccaaaccgaacaaagactacag

SEQ ID NO: 36611 - DNA, 30 bp, Homo sapiens
  chr1:185286620-185286650
  hyper
gaggagataggcggcgctcggggggcgccc

SEQ ID NO: 36612 - DNA, 31 bp, Homo sapiens; identical to SEQ ID NO: 1004
  chr1:185287293-185287324
  hyper

SEQ ID NO: 36613 - DNA, 30 bp, Homo sapiens; identical to SEQ ID NO: 1005
  chr1:185510393-185510423
  hyper

SEQ ID NO: 36614 - DNA, 517 bp, Homo sapiens
  chr1:185703186-185703703
  hyper
ggtgtctaaagccgcgttgtacacaatagaaaaacaaaattccctttgtgctagtgtggtgtccctcggtttgggtctttgccacacattcttgaaagccattgtttacactagcgttttgcaggttaggaacggtgccggtgggaaccgagctgacaccgtaagcgcttccctgggactgaattgaccctacaatcagtggagggaaaagtcaccctccgggggggcctccagagcaaaggagggaggacggcaactggccaatcaggaggcgaggccgagccaggcttcccctcgtcgctcgtgagctgcaaacagtggaaagttgggaacctcagtcgctggcccaggcggagagcagcggcggcggcgagggcagcgggattcgggccgcggcgccgcaggctcagagctgcccccggggcatggacccgacgcgccgcccgcactccgccacaggctgtccagggcccgcgggcagatagcagtccaggaggaagccgcatccagacaaaag

SEQ ID NO: 36615 - DNA, 30 bp, Homo sapiens
  chr1:186343740-186343770
  hyper
tcccgtctgccggacgaaggaaaataagcg

SEQ ID NO: 36616 - DNA, 30 bp, Homo sapiens
  chr1:186344947-186344977
  hyper
tgtgggaagtaggtcgctttctgatgaatt

SEQ ID NO: 36617 - DNA, 893 bp, Homo sapiens
  chr1:186649186-186650079
  hyper
gtgggaaagctggaatatccacggagttctttcgaactctagcggtccaagctctttcccaagtcacgtagcttctctattcggagagaagtcggagtactgggatagacccaggaggtcagagcggaaactctgcccgggtgcgtggaaccggagtccccggtgcgcggcgccaggtactcacctgtatggctgagcgccaggaccgcgcacagcagcagggcgcgggcgagcatcgcagcggcgggcagggcgcggcgcgggggtaggctttgctgtctgagggcgtctggctgtggagctgaaggaggcgctgctgaggagttcctggacgtgctcctgacgctcactgcaagtcgtatgacaattggtcgctaaccgagagaaccttcctttttataagactgaaaaccaagcccatgtgacgaaatgactgtttctttccgccttttcgtaccccccacaaatttttccctcctctccccttaaaaaaattgcgtaagcccggtgggggcagggttttttacccacggaaatgagaaaatcggaaacccaggaagctgccccaatttgggagcagagggggtagtccccactctcctgtctgatccctccctctcctccccgagttccaccgccccaggcgcacaggtttccgccagatgtcttttcttcttcgcagtctttgcccgagcgcttccgagagccagttctggactgatcgccttggatgggataccgggggagggcagaaggacacttggcttcctctccaggaatctgagcggccctgaggtccgggggcgcagggaatcccctctcccgccgccgccgccgtgtctggtctgtacgtctttagagggtcgaggaagtcacgtcgggacagactgggg

SEQ ID NO: 36618 - DNA, 494 bp, Homo sapiens
  chr1:186798091-186798585
  hyper
gactttctctaagtccggagctgaaaaaggatcctgactgaaagctagaggcattgaggagcctgaagattctcaggtaactctgggaactgtaagcaatatatttattcttcctctgctccacttctctctcccaccctccttagcttttacttggtagtttacttggaaggaagaaaggacggaggggaaacctcgctgctttaaaaagtcagcatgtcctctgccttttgaagtgaaacacagattagggacctcaattttcttcaaacccacgcagatttgccttcctggatctaaatgcactgtggagtcaaagattaaggtgtttctttgggttggaatcccagaaagttagcattcaaaacggcggtgaggtggcgcttattagcgttccacgtgatgacacccaatggttactgatccccaaacttgagcagcagcatgctgtgctgtttgacagccctagcgatctttagcgagagactttgttg

SEQ ID NO: 36619 - DNA, 30 bp, Homo sapiens; identical to SEQ ID NO: 1009
  chr1:189649417-189649447
  hyper

SEQ ID NO: 36620 - DNA, 30 bp, Homo sapiens
  chr1:190444372-190444402
  hyper
ttctgaggaatcgtcgtttactaacgttaa

SEQ ID NO: 36621 - DNA, 94 bp, Homo sapiens
  chr1:190444746-190444840
  hyper
tcaggtggcataggcgttgccgtgagctgcggagaaatctccacgcagagtcgcctgttgataaccctccagttaaaacgttcttggcagcggg

SEQ ID NO: 36622 - DNA, 30 bp, Homo sapiens
  chr1:190445182-190445212
  hyper
acagtctcaacccccgttccctctcggtgg

SEQ ID NO: 36623 - DNA, 35 bp, Homo sapiens
  chr1:190447264-190447299
  hyper
cactccccaaataaaccactacgaccggtcacatt

SEQ ID NO: 36624 - DNA, 393 bp, Homo sapiens
  chr1:190447388-190447781
  hyper
cgagtcgctaggcgctttcgggggcgctgtgccggtgaggcttaggcaaggggacggggaaccgtggttagatgcagcagcggcggcagcagccctcccaggtcccacttctttggcgttcctgctgcctgtgactcaagacaattgacttccacctgaaccctcagctccgaacgccttgcattagaagctagagctttggaggttctgaggacggtccctggggagcaagtggtaggtttcgaggcgcccgcttcccctctgattcctgcagtaactgagagagagtgtgccagaaatggctttgctgccgaatgcattatcttgccattttcgtgtcccaatactgaacaaacgatcgcctgatcgatcggtaagattagctttattcct

SEQ ID NO: 36625 - DNA, 30 bp, Homo sapiens
  chr1:190448066-190448096
  hyper
gatctgtataaagagcgctgtgggagtctt

SEQ ID NO: 36626 - DNA, 140 bp, Homo sapiens
  chr1:193028794-193028934
  hyper
gttgctgtggctgtcgctgcccgtcaggctgccttcttttgtcgtttcccagcgctgcgcaggacttctcctggcggcgctgcggatccagggggtcggctgccaggtacaggtgaggacattgcgggaggccggctggg

SEQ ID NO: 36627 - DNA, 43 bp, Homo sapiens
  chr1:193074684-193074727
  hyper
gcgctggattccagcgagtgccacccacgtgtaaacatccttt

SEQ ID NO: 36628 - DNA, 1270 bp, Homo sapiens
  chr1:196577278-196578548
  hyper
cggccctcccatttccgtctctttttcagcaatatttacagaacaatcctccaccacaccactcacctgtcgtcgttttgccatccttggtcccctagcagcaaatctcgaaacctgtacctgggaggcagagggggcacttcgctctccaaatcaaccatccttcctcaaagagtgggaaacatcaaacaacaaatggaggagaggagggagaaagaaagaaaatattgcggagtacagggagaggactaacaagacgctgtggccgagagagggatgggagaaggggaaggggacagggagggggagggggtccgcttggagccggaagctaaggcttgaaagggggctggctcctctttcccgagggtgtaatggggatgatgcaaacccaacccaggagcaaaagtctggctctgacaagaatcaacgctgccaaggaaccgcccccaggctcggcaccgcctctggtccccaggactagggggaggcgggtataaaaagttacttcgccgaaaaagacgcgcggtgcctagaaagaggggagaggggtgggagtgagcgccgcttgatggtgaagcactttccttaaaggcagttgccagatcctcccagagggcagcctcccggctactgttccctcgggcgggcttgcatccggcacagccctgagctggcgggaatcgggggcggtgggtttcggccccagacgcggccaacccggctctccccgcaatctccctgtggagatggagctggaggcccagccaatgagactccccctcattagcatagcacagtgacggcacgggggtgccttggggacaaccaatgggggcgagctaattagcggattgcggggctccagacccttctctgggaggaggggggccagggtgcttggagtgttccactatgccacgagctccctcgctttgattgccttcagtccaggtgggcgggatgaaaaaattgcacgtttctggaaagggaatccccactctcagccccaggaaaatcccatttttttctcacattctgaaagaagggaggtgtttccctgaactcggggaaaaagaagggccaccttaggccgctgaagagaagcatttagatgacagggaaagcacatggaaacgcactgaggattttacagtggtgagttgctgttactgctgtcgctgctactagcagcgttgtgggcttccaggtggcctggcctcagccttcggtcccctcctattagtggttcacacggaggaagaagtga

SEQ ID NO: 36629 - DNA, 30 bp, Homo sapiens
  chr1:197744237-197744267
  hyper
gcccccgacgcgcccgggcccccccactca

SEQ ID NO: 36630 - DNA, 60 bp, Homo sapiens; identical to SEQ ID NO: 1014
  chr1:197744742-197744802
  hyper

SEQ ID NO: 36631 - DNA, 22 bp, Homo sapiens
  chr1:197879529-197879551
  hyper
tctaaagtgtgagctttggtgc

SEQ ID NO: 36632 - DNA, 50 bp, Homo sapiens
  chr1:197879610-197879660
  hyper
atgtcgttaccaaatacctagaacggtattggaccgcaaagaggttaaac

SEQ ID NO: 36633 - DNA, 1115 bp, Homo sapiens
  chr1:197879716-197880831
  hyper
cgccgtccatccattcgatggcctcgctgatgagcatagaagatgaacccgggaggactgtcccttcctggctgcgaaacctgaccgatataggggagattctagaagaaagagctaaggaggccagggcggaaagaggaaagtcaggtgtaggggagattaaaaggtaaactggtgggactgaccgggctggtgggactagttagcgaagccaagtgtttgggtagaaacagagatcttgtaggaggtgctccgagctacatttcgggatttgggatgaaaagagaaagccagggggttcgccgctcctggtttgttccttaccgaccctaaactgtatggcggagcttgtgggtcaggcgtggaggcggcatccactcccacgtgccccacatgcagcagcaatcccacgcggttttcgcaagcggctgggaggcaagcgggcgtccccccacaccccccccccactgcgccctggacccacgccacgcaccgccaaggagtagctatggtggcacgtggaggaggggcgggtaggcagggcggcaccatcaccgggaccagcatcttggaacggtcaatctcactgctcatactctcctccctaccggcgcgggagccttgctgtaatcccctgccaccccatctccgactgtgaggggcgcaccgggtgggggaatgggtaaataactggcccaaggcccagcttccaggtcctccctccactttcccgcggcctgactgcgccccgggcaacacagccccttgggaacctgcgaccaggtaatgtggcctccgccccgtcccgggtctggctgcatcccctctaacccctgcctgcccgggtccaagtgagggttttctcccggaaggttaatcaccacccccatcccctagccgggtcccgggaggaagagatgccccggctctctcgttgacccggcctcgaacgccgacctcgagcgcagaatactcccgagtgctgggttcctgatacccagcccgggagcgaggggagtgaaggagggaccgggacaggaaggcggggacgcggtgggtgaacaatcaatggcttagcctagtttccccgcaggagctaccgcccattcaccgtc

SEQ ID NO: 36634 - DNA, 311 bp, Homo sapiens
  chr1:197881380-197881691
  hyper
ccctgatggagatattttagtcggagcagttttctgccctcggagtgcgcccggacgcccgggagtttcagggacttcttgggagcctaccggaggaaggcccggctttgctccaagccgcgtccctacctgaggtctccacgggaggagcggtttggacgcgccccaccggatgggaggaggtgcttggggaagccgggccgtaccgccggtctgactcccggcttttctctgccagtgcaaccaccattacggcgtgatccactccttttcctctaagaatgctgaacggtaccactctagaggcaggt

SEQ ID NO: 36635 - DNA, 466 bp, Homo sapiens
  chr1:197882074-197882540
  hyper
acactgtttctcacacgtgtaggggttaactggaaactggcttcacccacatttttttgttgttgttcagtcctaacccagcgcagccgtttctgcgcctgatctcagcggacgcagtgcgggacttctccctttatttctgcagagctgagggcaggcggcgcaacaaatctcaggtaaaagagcatcagatttcagaagagctgtattctagacttggcgcaggcccctttggggagaagagcccaggggctatagagaacagaggtttgaaggaagcaaaagctggcgagaggttttttttttgtcgcgaagggtgagggtaggcagagaacgcgcgaaagggcagggccttggccgggaagtaccgcccagcgaaaggctggcaagggtgcgcagctggagcgtggcctcgggtacccctttccaggcagccgaactccccgtatcccagctctgcttggct

SEQ ID NO: 36636 - DNA, 30 bp, Homo sapiens
  chr1:197882741-197882771
  hyper
cagggccaggtggcgcggcactgaacgcat

SEQ ID NO: 36637 - DNA, 165 bp, Homo sapiens; identical to SEQ ID NO: 1017
  chr1:197886901-197887066
  hyper

SEQ ID NO: 36638 - DNA, 310 bp, Homo sapiens
  chr1:197887146-197887456
  hyper
cggcggtagccgggcacccctgcgccctctgttaaaccaagccgactccctggccggtggagaaccggagcggcgggtcgtagagacgtccgcttgagggtggcgggtgagttttctcccgtccacctatgcctacagggctaagaaacggtcgtttttctgaatcgaaatgtctgcagctggctatcctccgtcgcagctgattccgaaagagcagggagaggaactgggaggaggtgggatggggggtggtggcattctcttctacagacctcaaggttcccttgattccggggcaggcgtctccccg

SEQ ID NO: 36639 - DNA, 415 bp, Homo sapiens
  chr1:197887706-197888121
  hyper
cgtttagcgccaggacccggcgggtgtcatgtgtagggggaaatcaaataaaacatacggaggagcgcggcacccagtcgaaacgcatgaactttataaccaacccttaaacaagctaatcaaccaccactgtttctactatccataataataaagtcatgtcctcttaataaagaaaactaattacttatctaagcgcttccctttccagattactaacggggggggggggggactacagaagtctccggaaattatttcggccaaacatagctgtgtagatcctttggtaccacagtaggacttgtagcccaaactaatcaggagactgctctagcccttatcagctgggttttgggtccggccaagtagcccaactggtgaacgtgtctatatttgtaacactcattcagtg

SEQ ID NO: 36640 - DNA, 304 bp, Homo sapiens
  chr1:197888180-197888484
  hyper
cgtggggaagatcaacccatttctgctagtcgtgagggaaatgtccggaggttaactccttttccctttttctggtcatcacttttaaaaacaaatagtagcaacccaaacccaaattttgcagcggggctgggctcctcaaggtggggccactggggcatcccgagtcgggtcagtgggacccagagggaagcataacttgggcactaaacagattttcaagacaaaggtctcagtacgcctgttgatgctagggaaagaggggactgtatacagcgggctggacagcggaccctctttggga

SEQ ID NO: 36641 - DNA, 1009 bp, Homo sapiens; identical to SEQ ID NO: 1020
  chr1:197888734-197889743
  hyper

SEQ ID NO: 36642 - DNA, 527 bp, Homo sapiens
  chr1:199998193-199998720
  hyper
gagagcagcacacaaccatttcgcatctttttcgtcgggcagaaccgccgcggtgcgcaggcaaggagtccttcccggcagctccgcgcagctccggttccgcgtccggggccgcagctagagcgcgctcgggccggagacgcggactgcgcgcgcacgggggacgcgcgctcgggggctcgcgcccgcgcgggcggtcttgggctcctgctgcgcgcagccccagctggccgctgccaaaatagagttgagctgggtcgggagaccacgcacgccgatccctcacagtctcccccacaccccatgggtgaattaaagagggtaaggtaggggaaagagacgctgttgcacttttctctgcaaccctggaagaactgtgtttccagctaccgcacgcgcaactcacatcgcaagggaccgaggcggtacactctgagcgtaaacagagaacacctgcagctctggaatcggtcccaccgcagagggctgggaaccggaggactgtcggtccagcccataaggggctg

SEQ ID NO: 36643 - DNA, 30 bp, Homo sapiens
  chr1:200007416-200007446
  hyper
ggtcactaaaactggaaagtctgtcgctta

SEQ ID NO: 36644 - DNA, 790 bp, Homo sapiens
  chr1:200008277-200009067
  hyper
gagagagatagggggaaggggcggagaggaggggagagagaagggaggcgagagaaagaggagagagacccctgccgatcctgagccagagggcggtggagggaggggaaggagtcgcccgagccgtccgggagcagtggcagcggcacagccggggcggcaatagcagccccgcggtcgcctccgctgcccgccgggagctcggcggttcacggctccgcgccccgggcagctgcgtcctcgccaccgccgccgcctgcgcccttgcggagccgaaccagagggccgggacgctgtcttcctcgcctccttttttaaccctgacctcctcctcgcagcttgggggcggctccggagctgcgagaccggacagggctcagaggtcctgcccggcagccccgaggaggcggaggcacgctccggcgaggcgagagggttgggttagcaggcatcccggtcgccccttccttcttttcgccggagttgaatctgtgctgcccgtgtccaggtgctgggcttccggaccgacacggatcccccatccccgcccgcggtcgccttgtcatgctgcccaaagtggagacggaagccctgggactggctcgatcgcatggggaacagggccagatgccggaaaacatgcaaggtaaggaggcgccgcgcggcgctccggctcccgctgcttccccacccccgggctcgccctgcaggcttcagcctcccgccccgcgcgggcgcgggagtagccccgctgggcgctcgcagccgcgggagtcaagccccctcccca

SEQ ID NO: 36645 - DNA, 30 bp, Homo sapiens; identical to SEQ ID NO: 1022
  chr1:200009358-200009388
  hyper

SEQ ID NO: 36646 - DNA, 408 bp, Homo sapiens; identical to SEQ ID NO: 1023
  chr1:200009744-200010152
  hyper

SEQ ID NO: 36647 - DNA, 855 bp, Homo sapiens
  chr1:200011379-200012234
  hyper
ccatcctagggctctgtggcccgggaagagacgcgtcaactccgcgggtctgcgcgcagtccttagccgcaaagtgctgcaagtgacccccctgacggccctttccgaccgaagagctcgggaaccaaagagaaaaaaaataactttattttcaaaagaacaagtcatcactgcggcgatactgtggcggaggactttggcgatggggtgggggctatttctctttcctttttggtaaacaaatcagaggaaacttctgcccggccgtggctttccatcccccacctgccccaccccctgcaaacgccactgattaacttaaaacaaactcggctgcgtgtttgtgcgccgttgggtagcaggaggtagagcctaggcgagagcctggtgcgcccacgggtttcgccgaagagtgcccgggggagtgcgggcagggtcccggctgcgcagacctgcgggtgcccgcccacccgcgccccgcgctcccatacttgacctgtgtggatgtggagtctccgggaaataccggatcaggcacttcctggggtctcctggtcactgcccttcctgtgcatagtttgtcatctttttagctgcgaagacgccttcgtgggtctgcgtccggagcaaggcggttacccgatcccggcagtgagccgcgccgcgcgtcgtggcggcctgatttctgtttaactttaatagggcgatctcgaggtgtttatattttgctatgatgatcggaaacatgtgaggttcattacagggcttcaatactttgaaaccaaaacccttctgtgtgtcttttactcttctggtatttttccccgtacgggcgtcctctattttctttttcct

SEQ ID NO: 36648 - DNA, 30 bp, Homo sapiens
  chr1:200271192-200271222
  hyper
taaaaaaaaaaacgcgtaccaaacaacgaa

SEQ ID NO: 36649 - DNA, 327 bp, Homo sapiens
  chr1:200271586-200271913
  hyper
ccgaaaatgagcgttcgctctcctgacagtcttgcctaaaagaacctcgtctatactgcaaaatcccattaggtacacaagtccggtcggcattgtcacttttagcgtgacttcaatttacacattcaaagaatacctgtccggagcatgggacctggtagaaaggttaggctctctccgaaggaagttcaactcaggatttccctcccccggtgctgcacacaccatcaacggcaaaacctcccctcccagttgcagatctagacttgctgagaaaggtgctggagatgtttccaaggtcatccccagcaccgcgagtccagcctt

SEQ ID NO: 36650 - DNA, 30 bp, Homo sapiens; identical to SEQ ID NO: 1025
  chr1:200379220-200379250
  hyper

SEQ ID NO: 36651 - DNA, 30 bp, Homo sapiens; identical to SEQ ID NO: 1026
  chr1:200379460-200379490
  hyper

SEQ ID NO: 36652 - DNA, 284 bp, Homo sapiens; identical to SEQ ID NO: 1027
  chr1:200379702-200379986
  hyper

SEQ ID NO: 36653 - DNA, 30 bp, Homo sapiens
  chr1:200589984-200590014
  hyper
ctgaatgctggactcgccccaccctcatct

SEQ ID NO: 36654 - DNA, 236 bp, Homo sapiens
  chr1:200708631-200708867
  hyper
gcggcctcgctcacacgcgggctcgcggggcgggtggctcggaggggcgcgggcacggggcggacctcgcgcggacggacggacggagacggcgccgccacattcctatgcccgggagcggcggcggcggcggcggcggctcccgcgggaggcggcaggcgcgcggcgcggacagctgagcttctcctccgtcggcgcccgggcggacatcgcccgggccccgatggtttgagctt

SEQ ID NO: 36655 - DNA, 31 bp, Homo sapiens; identical to SEQ ID NO: 1029
  chr1:201050380-201050411
  hyper

SEQ ID NO: 36656 - DNA, 407 bp, Homo sapiens
  chr1:201083265-201083672
  hyper
ccaggaagccagagaacgccaccggggcacacaggtcgcctctgctgagtctgtaggttcggtctgggctgagcgccagcagcaatctggcctcccatcccttcctctgggttcctttctcgaggagtaagcgtgctcccaaagaagtcgctagtatctgaggccatctggtggagagcagtggcatggtaaccgagggctcaaagtcgggctcgcatcccggggactcgcagagactggactgcgcctgcggcaaggaaggacggagcagagccacctgaggccgagcgggagccagacccagggatgaccgtcctggggagcccctctgcaccccggaggggacgcaggacgcccggagcagtcccaggccctgcccctcgcttcacccacggagctcctaggtc

SEQ ID NO: 36657 - DNA, 31 bp, Homo sapiens; identical to SEQ ID NO: 1031
  chr1:201122936-201122967
  hyper

SEQ ID NO: 36658 - DNA, 270 bp, Homo sapiens
  chr1:201252438-201252708
  hyper
gagaaaaaaaagagcgagcaggaaggcgcccagcgtcccacacaggggactcgcagccctgcccccaagagcgctggctccgcagcagcagtgccctgcagctccgcgtctgagcagcagcagcgcgcggcccggtggagtgggtggtgcagggcaggggtggtatatcctgtctgacggagggcgggcctcgccagtgccagagagggacgaaccagggtggaagcgccaggagcagctgcagggagccctcacgcggaccacgcactc

SEQ ID NO: 36659 - DNA, 483 bp, Homo sapiens; identical to SEQ ID NO: 1032
  chr1:201368375-201368858
  hyper

SEQ ID NO: 36660 - DNA, 234 bp, Homo sapiens; identical to SEQ ID NO: 1033
  chr1:201437932-201438166
  hyper

SEQ ID NO: 36661 - DNA, 30 bp, Homo sapiens
  chr1:201438632-201438662
  hyper
ttgcttggcgaacgcgcagtggcaccagtt

SEQ ID NO: 36662 - DNA, 30 bp, Homo sapiens; identical to SEQ ID NO: 1034
  chr1:201449031-201449061
  hyper

SEQ ID NO: 36663 - DNA, 30 bp, Homo sapiens
  chr1:201475790-201475820
  hyper
tgtttgccccaccccgcccgcgggcatttt

SEQ ID NO: 36664 - DNA, 85 bp, Homo sapiens
  chr1:201476487-201476572
  hyper
gccaccgcggaaaacgtcttgcacgtgcgaggggcatttcaggagtttcctgtctgtcaggtgagaaggcggagatatgacctta

SEQ ID NO: 36665 - DNA, 30 bp, Homo sapiens
  chr1:201507559-201507589
  hyper
aggaggaggggcatcggctgtctggaaggt

SEQ ID NO: 36666 - DNA, 31 bp, Homo sapiens; identical to SEQ ID NO: 1036
  chr1:201507612-201507643
  hyper

SEQ ID NO: 36667 - DNA, 30 bp, Homo sapiens
  chr1:201673445-201673475
  hyper
tgtccacctcgctgcgctgcagtcgcagca

SEQ ID NO: 36668 - DNA, 454 bp, Homo sapiens
  chr1:201857900-201858354
  hyper
agaggctaggtgggcgtcgctggtgggtggactcctgggcgctgcgcggagccgcgccggctgggttagcgcgggcggggcgcttagtcccacccccagaggaggcggaagaggagcccgagcctggccgcgggctgggccccgccgcagctccagctggccggcttggtcctgcggtcccttctctgggaggcccgaccccggccgcgcccagcccccaccatgccacccgcggggctccgccgggccgcgccgctcaccgcaatcgctctgttggtgctgggggctcccctgggtaaggggatggggagagatgcggcaggagtgggatgggggcggaggaaggggagggaccgatccgaggggcttgggctcggggcttctccgagaccctccggctgccacgggagccttgggtgttgctgggtcctcaagaagcgggaagagggagctc

SEQ ID NO: 36669 - DNA, 307 bp, Homo sapiens
  chr1:201915742-201916049
  hyper
ccccaagctgggggcgggcctacctcgctgtcagagctgtttgaaacttgaggacattccagggaatcttggagcgctgcgtgaccaaatttagtacagagcagtttagccttttaaagacaaggggccacgcaatgagaaaaagatacaaaaatgcgtaggctggcagaagcagatcacagccacggagagccagacaagcagggacgaggccatgagggccggtgaactcgccagcccggggcacgttcaagagcgtattttactactccatcaccgggtggacgtatcactgtggtcaatgtgt

SEQ ID NO: 36670 - DNA, 95 bp, Homo sapiens
  chr1:201924322-201924417
  hyper
gggaaagaaagaagcgtatttaggcagtatcgcgttgatttcagtccacggaacctctggtgaccgggtagtgtgactccgtcattggtagcccc

SEQ ID NO: 36671 - DNA, 106 bp, Homo sapiens
  chr1:201977861-201977967
  hyper
ttttttttttttgagacgcagtgattacaggtgtgagccaccggatcctacatttcaaatgcataaaaatctagatatgggctgggcgcagtagctcatgcctgta

SEQ ID NO: 36672 - DNA, 189 bp, Homo sapiens; identical to SEQ ID NO: 1040
  chr1:202112265-202112454
  hyper

SEQ ID NO: 36673 - DNA, 301 bp, Homo sapiens
  chr1:202183372-202183673
  hyper
tgggggaagggtgccgagctccggaaagttccacaggtcctccgcagccctggggagcaggacccagaaaccgacgcgacgggtggggcgctacccgggccggccctaatccccttccattgttctgggagccgaggccgcctccccacttccggaccctttcagccatggagcgggcggcgcgggcaggggcgggcaggggcacggccaggcgggctggggtgggcaggggcgcgcgcgcgaggctggtccccgcccccggggccgccgcttagctcccgggtacgtgcgtgcagctagg

SEQ ID NO: 36674 - DNA, 30 bp, Homo sapiens
  chr1:202187160-202187190
  hyper
ttcaagtcatctctggtaagaaggtgccat

SEQ ID NO: 36675 - DNA, 30 bp, Homo sapiens
  chr1:202317712-202317742
  hyper
ttgtagttcccttacggccaccaagtgcac

SEQ ID NO: 36676 - DNA, 898 bp, Homo sapiens
  chr1:202611677-202612575
  hyper
gcttcctccaatgcacagagccgtggcgcgtgtcaaagtgtgggaaagttcccgggagaggaaggggtggaaaatgcagccgctcatctcaaccctggacggctgcggcaaggcgggggcgctcagaaaggcagccagtcctgcaaaccgcccgtgcctccggcacacccccctctgcgccaggggctccccagtgtcgcgcgagcatggtcttccagctcctcctcagcgaggcaggcgctgcagggtcccatgcgccccgcacccacttctctccgcacgcccacttcatgcacctccccgcgcccttcccacggcttctctgcggcgagtcgccttcgcttcaccgcaggtccctggtcccagcgctaaggcaccgcggcttctctcgccttctctccgctttggacccgggctctccgcggggagagataggttgggggctaggggttcccgaaataattcaggacacctcccccgggtctagccaggtaattccgacgcccatggatttccggattacagttcccaccgcgggctcagtcctacctactcttagtttaccccgcagtgagcaccaagtcccaaaagtcggagtgtcaccgtttggcgaccccgcgtccgcccacgcctcaggccctagaggtggccactgtcggtcgaggcacggcttcgctcgggactactggctgccctcgtggggtgccccgcctggggttccctcttaccctgggacgttccgggcgcgttcagcctgagctggtggagagggcgggggcgggggcgggggcggggacagctggggtcccgaagtccaggtccctcttcccacttccccgccggccctgccgctgcggccctcgctcccgcgctcgctcgctctcgagtctctccctct

SEQ ID NO: 36677 - DNA, 158 bp, Homo sapiens
  chr1:202612864-202613022
  hyper
aggggtttaaactggcgcggtcctacagaagtttgaggagggcggggccggctccgagcccccggagccctacgggactcccccgattctgccgaggagtccccgccagctccgtgcactcctgcaacactccccaccccacccgccagctccgagtt

SEQ ID NO: 36678 - DNA, 582 bp, Homo sapiens
  chr1:202679188-202679770
  hyper
gacgaaccttccatccggacgcttccaaactcccccaaaggacggggcagactcccggcccccttggcctcaaacttccccaaccctactcacctctcgggacccagaccaccccgtggcccctcgactcagtagcaggaaaggagaaactttggagagggaggtccgtgcccccaccggcgggggtatggacttaccggagagcgacccgaaggaggcgggagagatccggggtctccaatgtgagggggcgtcggacggcaaggacgcgtggctggcgacggtttcgcaggggcgcccgttcccctgggggcgcgaagtccccgctccaccgctgccccaactcggctccgaagtgcctttgccgcaagacttgctgagcttagcagtctgcgccgaggcggcagagggagggggcctgatcgatgggcgcgcgcggcgagcgctgcagtgaggggaggagaccaagcggcgtgggagggcggggaccgaggcggaggaggcccggaggaggcggagggcgggcctgccccccgggacgggttctttctgcgcagccccccaggcgctcggcgcccccgc

SEQ ID NO: 36679 - DNA, 30 bp, Homo sapiens; identical to SEQ ID NO: 1042
  chr1:202777280-202777310
  hyper

SEQ ID NO: 36680 - DNA, 30 bp, Homo sapiens; identical to SEQ ID NO: 1043
  chr1:202780665-202780695
  hyper

SEQ ID NO: 36681 - DNA, 52 bp, Homo sapiens; identical to SEQ ID NO: 1044
  chr1:202830112-202830164
  hyper

SEQ ID NO: 36682 - DNA, 178 bp, Homo sapiens
  chr1:202830593-202830771
  hyper
tgaagttggagggtcgctgactgcagacaccatacgggtctccagcaacaccacgaatcccaacgcgcggttgctggcgggaccttataaatccccggagagccgccggttgtgtctcctggcggggactcccattgggtcgcagctggacagagatcggatcgtcccccgcgcgact

SEQ ID NO: 36683 - DNA, 59 bp, Homo sapiens
  chr1:202858343-202858402
  hyper
tgtctctgcgcaggcgcccgcttccccgctctggactctactgcgcaagcgccttcatt

SEQ ID NO: 36684 - DNA, 30 bp, Homo sapiens
  chr1:202896478-202896508
  hyper
gcggggcttctgtacgctgctaggaagccg

SEQ ID NO: 36685 - DNA, 31 bp, Homo sapiens; identical to SEQ ID NO: 1046
  chr1:202935961-202935992
  hyper

SEQ ID NO: 36686 - DNA, 30 bp, Homo sapiens
  chr1:202936075-202936105
  hyper
gcttgggtggtgaccgtcccaggggtggcg

SEQ ID NO: 36687 - DNA, 30 bp, Homo sapiens; identical to SEQ ID NO: 1047
  chr1:202937099-202937129
  hyper

SEQ ID NO: 36688 - DNA, 30 bp, Homo sapiens
  chr1:202976329-202976359
  hyper
gaggtacggcgatacgcgacaccacccagt

SEQ ID NO: 36689 - DNA, 30 bp, Homo sapiens
  chr1:202996160-202996190
  hyper
tgggctgaggtcttcgctcttcgcgggggt

SEQ ID NO: 36690 - DNA, 223 bp, Homo sapiens; identical to SEQ ID NO: 1048
  chr1:203086993-203087216
  hyper

SEQ ID NO: 36691 - DNA, 30 bp, Homo sapiens
  chr1:203096555-203096585
  hyper
aagagatgctgtgccgtgaggggtgagggg

SEQ ID NO: 36692 - DNA, 30 bp, Homo sapiens
  chr1:203097219-203097249
  hyper
ctcaagtgggtgggcgcagggcaggtgcgg

SEQ ID NO: 36693 - DNA, 31 bp, Homo sapiens
  chr1:203143408-203143439
  hyper
ggcaagatggtgatagcgtgtggcttgtgca

SEQ ID NO: 36694 - DNA, 88 bp, Homo sapiens; identical to SEQ ID NO: 1049
  chr1:203242475-203242563
  hyper

SEQ ID NO: 36695 - DNA, 30 bp, Homo sapiens
  chr1:203274645-203274675
  hyper
cagagcccgagcagcggccagggtaacgct

SEQ ID NO: 36696 - DNA, 30 bp, Homo sapiens
  chr1:203296455-203296485
  hyper
tccctcaatccccacgagcagctgactggg

SEQ ID NO: 36697 - DNA, 31 bp, Homo sapiens; identical to SEQ ID NO: 1050
  chr1:203561334-203561365
  hyper

SEQ ID NO: 36698 - DNA, 47 bp, Homo sapiens; identical to SEQ ID NO: 1051
  chr1:203595792-203595839
  hyper

SEQ ID NO: 36699 - DNA, 162 bp, Homo sapiens
  chr1:203596043-203596205
  hyper
gggggcacgaacttcgtggggcaccatccctccgaagagagcaagatcagagacacccgcccagctctcctgcaccctttttctttcaggaacctgagaggtccttcccattggaggggcagggggaggagacccagcccactccccggccttagccagaaa

SEQ ID NO: 36700 - DNA, 175 bp, Homo sapiens; identical to SEQ ID NO: 1053
  chr1:203596925-203597100
  hyper

SEQ ID NO: 36701 - DNA, 30 bp, Homo sapiens
  chr1:203830860-203830890
  hyper
aggactaggaggttcgggtcagaatacggg

SEQ ID NO: 36702 - DNA, 824 bp, Homo sapiens; identical to SEQ ID NO: 1054
  chr1:204042250-204043074
  hyper

SEQ ID NO: 36703 - DNA, 1004 bp, Homo sapiens; identical to SEQ ID NO: 1055
  chr1:204043133-204044137
  hyper

SEQ ID NO: 36704 - DNA, 30 bp, Homo sapiens
  chr1:204120810-204120840
  hyper
gaaatgccgaagtacgcgacggcggcggcc

SEQ ID NO: 36705 - DNA, 30 bp, Homo sapiens
  chr1:204121424-204121454
  hyper
gcctggggtggaggcgggggagggctcgtc

SEQ ID NO: 36706 - DNA, 30 bp, Homo sapiens
  chr1:204159817-204159847
  hyper
gcgaggtcccccgacggctcagcctggcag

SEQ ID NO: 36707 - DNA, 189 bp, Homo sapiens
  chr1:204332590-204332779
  hyper
cccagcttgggaaccgggttatcaggggtgtggctctgcagaaagcgtcctgccacgtctccctccctgtcaaccttggggaaggagagaggcacccttggggacagaactggccagtttcaccggcggcggcttccgcaggaacgcggaggagggagacaagggggcgggggaacacttcctgttggg

SEQ ID NO: 36708 - DNA, 293 bp, Homo sapiens
  chr1:204347105-204347398
  hyper
tgacgggcaattagcgcggtgagtaattacgatgcctctcctgccgggactgttaacgggcagcgctgggtctccgttcctcctggctctgctgccctccagcctggcggagcccggagagcagaagctggagcggggaggatccctccccgaagggagcaggttgcagtgcgagcaggggtgttgcctctccgctcccagctccgatcttgcacttgaaccaccggcggggccgggggcggagccgcgccgccgcctcggaaggtaattcacagccccgagaactcgccggc

SEQ ID NO: 36709 - DNA, 206 bp, Homo sapiens
  chr1:204379619-204379825
  hyper
gcctgttgaaggaattccagccgtttcatgcgaagatggtgaatttctggtaggccttccgtagaaagaggtggacatccctgccacgaggccggaatgagttctgcactcagcggctggggatgacaatggtcctctctcaggcagctgctctctggggttagtgtctggaagccgactacctcgctatttccatcactgttctg

SEQ ID NO: 36710 - DNA, 30 bp, Homo sapiens; identical to SEQ ID NO: 1058
  chr1:204380997-204381027
  hyper

SEQ ID NO: 36711 - DNA, 30 bp, Homo sapiens
  chr1:204464064-204464094
  hyper
ggggaagagaaacgcgctggcgtcaagttg

SEQ ID NO: 36712 - DNA, 30 bp, Homo sapiens
  chr1:204485767-204485797
  hyper
aaggccgcgccaggcggaagaagggctcgg

SEQ ID NO: 36713 - DNA, 106 bp, Homo sapiens
  chr1:204487762-204487868
  hyper
tggtcagcctactccacgtgttttctttccaccccaacctttcactcagatggctttagcatcccctacccctgccactggagtgaagtggtatgatcttggctca

SEQ ID NO: 36714 - DNA, 201 bp, Homo sapiens
  chr1:204518655-204518856
  hyper
gtgagaaaagaccacgagacgggaacattattcatggaaggacgggccatcttgtcacttgttttcactgtgccagaagactaaagaaggctggggcttcatgccctatttgcaagaaagagattcagctggttattaaggtttttatagcataatggtagtacgaacataaaaatgcatttattccgttcacttaccaca

SEQ ID NO: 36715 - DNA, 219 bp, Homo sapiens; identical to SEQ ID NO: 1060
  chr1:204653941-204654160
  hyper

SEQ ID NO: 36716 - DNA, 242 bp, Homo sapiens
  chr1:204654395-204654637
  hyper
ttccccggcggcggcggcgctgcccaggtcagccccgaagctgcacactcaccccgtgggcgccgggcaccgtctgccgtctgctgcccgcgcggccgcgctccgctcgccttccgcccggggccgggctggggacgctggtccgcgccctcccgccgcgcgcgccgtctgcacaggccggggaggctcggcgggcgccctccccaacgtggagttatcctgggagcggctccagggcccag

SEQ ID NO: 36717 - DNA, 30 bp, Homo sapiens
  chr1:204797914-204797944
  hyper
gcgagcgcgaacaccggagagatgggggta

SEQ ID NO: 36718 - DNA, 30 bp, Homo sapiens
  chr1:204806843-204806873
  hyper
tgcactggaaagtaacgccggggaatgctt

SEQ ID NO: 36719 - DNA, 44 bp, Homo sapiens
  chr1:205091383-205091427
  hyper
tgttgtgtgttcagcggcgttgtccgggcgggctacctcagact

SEQ ID NO: 36720 - DNA, 30 bp, Homo sapiens
  chr1:205196741-205196771
  hyper
cttgtgctccttctcgccaaataaagcgaa

SEQ ID NO: 36721 - DNA, 30 bp, Homo sapiens
  chr1:205197445-205197475
  hyper
ctgtgacctgtcttcgctccccaggtcgaa

SEQ ID NO: 36722 - DNA, 30 bp, Homo sapiens
  chr1:205290890-205290920
  hyper
caagttgttataaacgccctgagcccgagg

SEQ ID NO: 36723 - DNA, 30 bp, Homo sapiens; identical to SEQ ID NO: 1061
  chr1:205312680-205312710
  hyper

SEQ ID NO: 36724 - DNA, 447 bp, Homo sapiens
  chr1:205399688-205400135
  hyper
gaaagccgcccatcaccgtggagaaccaggaatggcagaccacgcggacgccaacagtttacgcagctccccagctaggtgcaaagtggccaaaggaagagccggtcttccacacgcacacctccgcgcccacactgccccaggagcttcccactcagccgggggacccccaagcagccggcgaggcgcactgcgcacgcgcactcaggccgcggctccagccgccctccctccgcagtggggcgccccgcccccgcgccgctcagttttaaactcgcagcagacggaactcgacttaaaaataactattttgacagttcagatgtaaatatgtgagtgacgcgtggggctgtttttccttcacacttcccctcacccctcgctccctaccccagctcaattcggctgaggctgagatgatgggagagcgccgtctgcaggatgctc

SEQ ID NO: 36725 - DNA, 233 bp, Homo sapiens
  chr1:205424753-205424986
  hyper
ccccaatcccaccagcggcaaaatcctttaaaaggaacaaaggcaatgggggcggggagggggcttcctctttggtcgacctagggcggcggctgacgcagcccgccgccggtcagctttcaggtgagtgcctgaacccgcatcccgcccatgccttagggacccctcttcgcccagccaagcccggggcggggaggaaagtccccctcagccgcactcgggcccccaacccg

SEQ ID NO: 36726 - DNA, 1209 bp, Homo sapiens
  chr1:205425208-205426417
  hyper
gcgcacgcacacacgcgcgcgcacacacaccccgccgaggtacccaatcaatgcacaaatcttcggggtccctttaacctctgcggatgactccgggagttaattatgaagcctatttcggcgcggcataaatatgcattaaggtaggaaataatcgatacgctgaacttctgggaactggcatttagacggactccgtctcgccgccccccactccctccatggccccacgagccacctccacagcctcgcgccttcccggggtcgcaacgcctatcacaagcttctacccgggtttcagggggcccctgtagtggcgtgggcgccgcgccggtgccgggagaccccctcgtgcgccctctgcggtcggggcagaccctcagccggagcttcttcctcccccacccctgcaggccgggcccaagctgcgacacccccagcacgggctcagcctgtgaacaaactccgagctcagtactcggaggaactggcgagagcgggacggctacctgcccgcacgcccgatttccgggcacagctagaaagaccgggacgcgattcaactcccaatccggtgaatccgcctagcgccttcgggtcctgccgcccccggccagtcccgacccgcacacatatgcaggcatttgcacacacgcgcgcacacacatgcacgcacatgcacacacacatatgcacaccctcgcgcacacagacactcccgcgcgcgctcacgcccgcacacactcagggttataacaaaggaagaggggccagcgctgccttacttttgtctctcttctctcttttgcagccccccagccccggggccggcgtgcccggcccaccccgccctccgcgccccccgacggccgcggtcagccggcattccggagcagcgcgtcggagctgcaacttcgcgcctaagcgcccgcacctcgcagcccggcgggcgggagacaaaagctgcggcgccgccgccggaggccgcgcggccaaggtgtgttcgctaattgtcaggaaatgtgtgtgtgtgcggccgggagcccgcaggggcgggggaggggacggaggaagaggagacccacccctcctacccccgccactcgccagcgccgggtacccgaaccgggattagagaataaattatctgctctcttctcattgggctgtggctgaggacgccgtcggcggcgccgggctgggagctct

SEQ ID NO: 36727 - DNA, 289 bp, Homo sapiens
  chr1:205538139-205538428
  hyper
gcggcactcgggcaccgggctcgccgggaccagatccgcgagcccgtcagcctgcgccatgggctgcgacggccgcgtgtcggggctgctccgccgcaacctgcagcccacgctcacctactggagcgtcttcttcagcttcggcctgtgcatcgccttcctggggcccacgctgctggacctgcgctgtcagacgcacagctcgctgccccagatctcctgggtcttcttctcgcagcagctctgcctcctgctgggcagcgccctcgggggcgtcttcaaaaggacg

SEQ ID NO: 36728 - DNA, 35 bp, Homo sapiens
  chr1:205560982-205561017
  hyper
tccccaaatgcttacgcagcgtgtaccgtagctgt

SEQ ID NO: 36729 - DNA, 116 bp, Homo sapiens; identical to SEQ ID NO: 1064
  chr1:205561300-205561416
  hyper

SEQ ID NO: 36730 - DNA, 30 bp, Homo sapiens
  chr1:205718885-205718915
  hyper
ggcgcgcgcacgggcgcgcagccaccaccc

SEQ ID NO: 36731 - DNA, 30 bp, Homo sapiens
  chr1:205719205-205719235
  hyper
ctgctgccgaaccccgagctgctggcttct

SEQ ID NO: 36732 - DNA, 140 bp, Homo sapiens; identical to SEQ ID NO: 1065
  chr1:205721777-205721917
  hyper

SEQ ID NO: 36733 - DNA, 30 bp, Homo sapiens
  chr1:205744398-205744428
  hyper
accgggacttcccccgagcggctccaagtc

SEQ ID NO: 36734 - DNA, 30 bp, Homo sapiens
  chr1:205827849-205827879
  hyper
tatattttagtagcccgttggttccacctg

SEQ ID NO: 36735 - DNA, 30 bp, Homo sapiens; identical to SEQ ID NO: 1066
  chr1:206955685-206955715
  hyper

SEQ ID NO: 36736 - DNA, 30 bp, Homo sapiens; identical to SEQ ID NO: 1067
  chr1:207038445-207038475
  hyper

SEQ ID NO: 36737 - DNA, 89 bp, Homo sapiens
  chr1:207223722-207223811
  hyper
cctactttatatttttgtggacgccgagggaaaacaaaatgggatagtttcaaagccgaccagaaagcggaatggggaagggggtcttc

SEQ ID NO: 36738 - DNA, 30 bp, Homo sapiens
  chr1:207226809-207226839
  hyper
ggcatggcaggcagcgcggacgttctggga

SEQ ID NO: 36739 - DNA, 774 bp, Homo sapiens; identical to SEQ ID NO: 1068
  chr1:207627526-207628300
  hyper

SEQ ID NO: 36740 - DNA, 466 bp, Homo sapiens
  chr1:207669321-207669787
  hyper
cgcgggatccatcggaagcccgagcattgtcaagctctgctgctgcacctgggtcagcaaggtgggctctgccagcgaaactcgttagaaacaatgcaaatggggagtaaacatgacctcgcccatgaaggggaagctgtggtcaaaagcattttgtcccggaaccccgcagccctccccacactctgggcgcggagcacaatgattggtcactcctattttcgctgagcttttcctcttatttcagttttcttcgagatcaaatctggtttgtagatgtgcttggggagaatgggggcctcttctccaagaagcccggagcctgtcgggccgccggcgcccggtctccccttctgctgcggaggatccctgctggcggttgtggtgctgcttgcgctgccggtggcctggggtgagaggcgggcgggcgtggggaggcgcccgggcggacgaggaacccggggcc

SEQ ID NO: 36741 - DNA, 295 bp, Homo sapiens
  chr1:207669828-207670123
  hyper
cgcgcccgggtccgaaggcagcgcgatgggtgggctgagcgcgcgacccggcagggcggcgggtgtaggatccttctgcgcactggagaccctcgctgcttctgggtaagcgtggagttcccaggtgcaggggcttaagtcgtgacgagcgcagtggaaggcgcagatgctgagcgggtgccgcacgaaattccttgcctttgtgtattcacagcctcggctggctatagccaagacgtggcgttgatcctagtgaaagggaacttggggatccgacaaacctgagttctggtcc

SEQ ID NO: 36742 - DNA, 30 bp, Homo sapiens
  chr1:207925328-207925358
  hyper
gaggctccgccccgcggcccgccgattggc

SEQ ID NO: 36743 - DNA, 31 bp, Homo sapiens; identical to SEQ ID NO: 1071
  chr1:207995366-207995397
  hyper

SEQ ID NO: 36744 - DNA, 30 bp, Homo sapiens
  chr1:208042665-208042695
  hyper
ggcttgcggcggggcgggagacctgtcagg

SEQ ID NO: 36745 - DNA, 627 bp, Homo sapiens
  chr1:208084083-208084710
  hyper
tccattggaaccagtcgtgctgaccgattcacacctcggctaacgcacactcgcgggggtgatggccttcccttcccctcccacccccgtcagctcccaggtgaggcgctggccccggggggaagcagctgtgggcggcagtgcgtgggttgggcaggggtcccttccctccgtgagactctgctctgctgttcagcctcccagaaagcctccaccctccccgcggcgaagccaagcggccgcggcgcgcgggcggtactcacgcagcaaactcagcaagcaaagcgcggtccagccccgcggcatcctgggccctgcgcgcgcgcccctgcggaccagcatccttcccgcgcggctcctagagagacgcaccgagtggaagacactactcggcttggccaggacgcgctcttcccgccccctccgcccgggagaggggtgggggattcttgcttttttcctctcttctcccctccctttttagtcttggcaaggcagcgcctctccttggctgctactaacttgagctcccctggttggtcccaaaggcggagggcgttaggagggaggctgggttgccgccgtcgaggccaaaaaaggtggaggtttgttcgggctccagatgcc

SEQ ID NO: 36746 - DNA, 531 bp, Homo sapiens
  chr1:208416771-208417302
  hyper
ggctccagtgagcctgcgatcgcgcgcacgccgcgctccagcccgcgaaagtggccgagcccacgcggggactcgcccgccgcggccaagccgggtcttctggggccgggaccccaaagaggcgggcgcgggagaagccgccacgggtgtgcgcgcctgtggggagagggcggagggcgctgccgactccgagcgcccggcccagccgccgcttacccagctcggcgacgtcggtctgtccttccgtccccgctcggtctacctcggccgccgccggctgctgagggcggcgcgaggcccctctccctgcccgcagctcggaatcagggagacgaccaaatccacatggagtccaaattcattaaaatccacgtcaagccaccagacacttatctgtattcctgaagtcgctcctcggtctccgctccgcgcgcccctcagtcctccgtcgccccgcagcagcccggctgggcgctgtcgccggctctcagggggcacccggaggcgccgagggggcgtgtgggggcggcc

SEQ ID NO: 36747 - DNA, 31 bp, Homo sapiens; identical to SEQ ID NO: 1075
  chr1:208418635-208418666
  hyper

SEQ ID NO: 36748 - DNA, 31 bp, Homo sapiens; identical to SEQ ID NO: 1076
  chr1:208418805-208418836
  hyper

SEQ ID NO: 36749 - DNA, 219 bp, Homo sapiens
  chr1:209364147-209364366
  hyper
gcacggcgcctgctgcgccctctagtgtcatcaacggtcttgtgcagttctttgtgggaaagggaacaaggcttagagttattcaaagcctaacctccagcgattttcctttctggactccttggttcatagagagcgccctcaggggtcatggcagaggggagccctgggtatcctgtgtatccgtgtgtatacccaggaattcgggtcacttaaaat

SEQ ID NO: 36750 - DNA, 506 bp, Homo sapiens; identical to SEQ ID NO: 1078
  chr1:209957700-209958206
  hyper

SEQ ID NO: 36751 - DNA, 54 bp, Homo sapiens
  chr1:209979557-209979611
  hyper
gcgttcgggattggcgagttgcaagaaatatgacactccgcgtttctgggctgc

SEQ ID NO: 36752 - DNA, 30 bp, Homo sapiens
  chr1:210001264-210001294
  hyper
agcgcgacgtaaagcggatctgctttatgg

SEQ ID NO: 36753 - DNA, 227 bp, Homo sapiens; identical to SEQ ID NO: 1079
  chr1:210110983-210111210
  hyper

SEQ ID NO: 36754 - DNA, 138 bp, Homo sapiens; identical to SEQ ID NO: 1080
  chr1:210111283-210111421
  hyper

SEQ ID NO: 36755 - DNA, 126 bp, Homo sapiens; identical to SEQ ID NO: 1081
  chr1:210111796-210111922
  hyper

SEQ ID NO: 36756 - DNA, 38 bp, Homo sapiens; identical to SEQ ID NO: 1082
  chr1:210112036-210112074
  hyper

SEQ ID NO: 36757 - DNA, 30 bp, Homo sapiens
  chr1:210405551-210405581
  hyper
cgggcgggggcgggcggcgagggagaataa

SEQ ID NO: 36758 - DNA, 37 bp, Homo sapiens
  chr1:210405962-210405999
  hyper
gcagcctgaggagcggcggcggcggcctgagcagagg

SEQ ID NO: 36759 - DNA, 30 bp, Homo sapiens
  chr1:210406723-210406753
  hyper
tggtcctccgtggccgcttagtccctcatc

SEQ ID NO: 36760 - DNA, 31 bp, Homo sapiens
  chr1:210407058-210407089
  hyper
ggccctagcaactttccgagtgcccagctgt

SEQ ID NO: 36761 - DNA, 145 bp, Homo sapiens
  chr1:210407458-210407603
  hyper
tttactttctcctgcggccagcggccgaccgggcgctgctggctacccggggaggggctgagggctgcggcaccgacaccccgggggtgtgtctgtgcgggagccaggatgtggttggtggctgccgcccgccttcaagaggtcg

SEQ ID NO: 36762 - DNA, 398 bp, Homo sapiens
  chr1:210424943-210425341
  hyper
ggaattagcataacaaagagccggagcgagcgcggcgcggcccggcgggggctctgccgagcgccccgggctcggaggagccgcgctgtcagcggctgtggcgcgctcgggcctcctggcctgagaccctcggagcagcggggcccggcccccagcgggcgcgctctgtctgggttccggccgcaggactcgcccggagaatgcagtgggtgtgggtgtgtccgggacagcgtgaatgggcgtgggtgtgtgtgttcgggtgagtgtgggtgcccgtgtgtccaagcgtgcgtgtaaccgtgtccctgggcgtgggaatgcgggtgtgaaggggtcacctgcacacgggtggggacccgccagccctcttcccttccgccccaggaaggcctctttgt

SEQ ID NO: 36763 - DNA, 308 bp, Homo sapiens; identical to SEQ ID NO: 1084
  chr1:210465688-210465996
  hyper

SEQ ID NO: 36764 - DNA, 31 bp, Homo sapiens; identical to SEQ ID NO: 1085
  chr1:210502487-210502518
  hyper

SEQ ID NO: 36765 - DNA, 452 bp, Homo sapiens
  chr1:211306971-211307423
  hyper
aaaggcccaaaaggcgtccccagaagagctctcctgttaggatggggacccatcagaccccgccccgccctgcccacctttctctgcctcggggaggctgccctgggtgcccgcgccgcggctccttagcagagctcgcgggttctgctgcatctgctggctccgagcggcgagaggttctgcaataaaggcacggataaaacgcccgggtaatcgaaatccgaatgcacctcttaccattggaccgccgaacaatattctccagaaacgtgttttgaggggccactagtcccctcctgcccccagccatggtcatcctcccagcagctcggggtccggcgggcgtcctggcgcggcttcttacgacagcaggaaactggcctcggggcccgcacgcagtcccggctcgaagcgccccatgcgcccggcggggatccgcaggcagggctggc

SEQ ID NO: 36766 - DNA, 136 bp, Homo sapiens
  chr1:211496968-211497104
  hyper
tattccagtaggcggcgtcctcacctctccatcagcaccatctttacattggcagccagggctgcagtctctcaccctaatttatacagcaaattaaacagctgaaatccatgtcttcgggcgtctggggcaatct

SEQ ID NO: 36767 - DNA, 30 bp, Homo sapiens
  chr1:211500019-211500049
  hyper
gttagctttccaaccgcctggatgacggtc

SEQ ID NO: 36768 - DNA, 30 bp, Homo sapiens
  chr1:211688763-211688793
  hyper
cccagcggggcgcccgcttcagctctcccg

SEQ ID NO: 36769 - DNA, 30 bp, Homo sapiens
  chr1:211751107-211751137
  hyper
acaaatatgccagacgcgtcgccggctcct

SEQ ID NO: 36770 - DNA, 30 bp, Homo sapiens
  chr1:211848745-211848775
  hyper
ggatcttctggcagcggccgtaggagcctg

SEQ ID NO: 36771 - DNA, 150 bp, Homo sapiens
  chr1:211872027-211872177
  hyper
agctgaagggacagcgccgccgctcacctacctggacccgcacgctcttttttgcagagggagggaggtgtggtttatgagtctggactccggagaactcaaaccctcgggaggcctagagactgcgcagtgtccggatatagaaatatt

SEQ ID NO: 36772 - DNA, 768 bp, Homo sapiens
  chr1:212003415-212004183
  hyper
aggggcagagaagaggcgaccgcagcgcggggagccggtggagcctgcagcggtttccgcggatgtggaagggtcgtggcggcgggcgcggcccgcgcgccgggctcacctcggcgggcgcggacggcgggcggctgcggagagcgggggcgggtgtcccccgccgaggggtcgcggtcatggacgcggtggcggcccaagcggcccgaggcgctgcgcgagcgggcgcgctggcgccctactcccctcgcggctgcctgcggacagagggacggcggggactcagaggccggacctgtcacccgggcgggtcccggggaggcgggcggatgccccgcgcccccgcctcctccccggggcctaccgcgccctcgtccctcaggccgctgccgcctccccgggccacgcgacgacgacacccccttccccgcccccagcgcctcccctggcccggctccgctgccgctctggggcctgcgaccgcggagccggaggttacctcgggctggccgggccccagccggggctttgggagtcagaggagccggaagaatgcatggccggcggcggggccggcggaagaaggcggtggcggggccctgccccgctccggctgtggcgcggcccgcgcccgttccccggcggcgccgagactcggtccccaagggcccggccgcgttcgcccggactggcggggaggggcggcgggaggaagcggcgggagtcgggactgcggcggagccgctcccacagcgccctctaatgaaa

SEQ ID NO: 36773 - DNA, 30 bp, Homo sapiens
  chr1:212209084-212209114
  hyper
ggcgcggagtttggcggccggggcttacag

SEQ ID NO: 36774 - DNA, 30 bp, Homo sapiens; identical to SEQ ID NO: 1088
  chr1:212395928-212395958
  hyper

SEQ ID NO: 36775 - DNA, 30 bp, Homo sapiens
  chr1:212588335-212588365
  hyper
tctcacccctgtggcggaggcctgcatgtg

SEQ ID NO: 36776 - DNA, 30 bp, Homo sapiens
  chr1:212606091-212606121
  hyper
ccaggttccagctgcgtggcccgagtagcc

SEQ ID NO: 36777 - DNA, 30 bp, Homo sapiens
  chr1:212732441-212732471
  hyper
cgccacggggaggccgaggcagctgataga

SEQ ID NO: 36778 - DNA, 30 bp, Homo sapiens
  chr1:212838750-212838780
  hyper
acgagatggcgctgcgatccaggcgactcc

SEQ ID NO: 36779 - DNA, 268 bp, Homo sapiens
  chr1:212873455-212873723
  hyper
gctctgaaaccccggagggaacgcgaagcccacccacgcgaggcgacgcccgggggggtggggaccaggggggcgccatgcagcctttggggtccttcggcggctgccggggaactcaggttgagaaacacagtgggtgttttggggtcggtgttttttcccggtcccatcgcggcatcttcctgcgcctcagccacgccctgcgtccgccccccggcgcgggggtcacagtcccgggggactttctccgcggcgatcagtcatccgg

SEQ ID NO: 36780 - DNA, 793 bp, Homo sapiens
  chr1:212873750-212874543
  hyper
cgaagccgcggctctggggtgaagacgccggcttcaccgagtcccaccgcgcaccccgagccacgggcgccccagggactctgcagggagtgcctgcccttcccgtctcgggtccgccgggctgtgggagggaacgaggcggggcggccccgagggtgaattcccggagcggagggtgggcatggggaggatgtcccggacaaaaacggtgacgggcttccctgagagcgaatctgccacgtgggacgtcactagtgacaggtttggggatctggacccgccatgccacggttaaacggcccagatcatttttctttttcaagatttatctgctcgtgccaagctggggaccgggttgaggtagggcaagtccctgtccacctgcctgccagtcaaaagatgcgaagccaagacaattacccgtggtcctagcgaaggaaacactagcggccacaggctgtggtctgcatgctgtgagcaccgggaaagataaccgcgattcgggatgggcgggtgggaaccagaccagaagggcagaagtgcctaccaagtgtggtcgcttgggtcttcaggtttgtgggcagcagtgggcatggggacagtcatttccgattcctttttaagtcttaaatgagtgcacgtgccccccgccaggatttaagacccactcttgcaaaagctttgagagagcttgagtgaacttggctgcctggaggccagcgggaaagcgagcggagattcttgtctgtgtgatcagaagcttcggccaactgagaggcggggaggaagacgg

SEQ ID NO: 36781 - DNA, 30 bp, Homo sapiens
  chr1:212964870-212964900
  hyper
cccactgcgcatctcgcagagcgggctccc

SEQ ID NO: 36782 - DNA, 1033 bp, Homo sapiens; identical to SEQ ID NO: 1091
  chr1:213123589-213124622
  hyper

SEQ ID NO: 36783 - DNA, 297 bp, Homo sapiens; identical to SEQ ID NO: 1092
  chr1:213124668-213124965
  hyper

SEQ ID NO: 36784 - DNA, 30 bp, Homo sapiens; identical to SEQ ID NO: 1093
  chr1:213189227-213189257
  hyper

SEQ ID NO: 36785 - DNA, 31 bp, Homo sapiens
  chr1:213266553-213266584
  hyper
ttttttttttttttaatgaggcggagtctcg

SEQ ID NO: 36786 - DNA, 30 bp, Homo sapiens; identical to SEQ ID NO: 1094
  chr1:213529200-213529230
  hyper

SEQ ID NO: 36787 - DNA, 103 bp, Homo sapiens
  chr1:214155979-214156082
  hyper
ggagatttccatcccttcaaacgtgcacgcccctcccgcggtcccgggagggagtcccccctcccaggtcgagcgcgtccaccggctgtccccacagcaacag

SEQ ID NO: 36788 - DNA, 144 bp, Homo sapiens; identical to SEQ ID NO: 1096
  chr1:214156134-214156278
  hyper

SEQ ID NO: 36789 - DNA, 646 bp, Homo sapiens; identical to SEQ ID NO: 1097
  chr1:214156394-214157040
  hyper

SEQ ID NO: 36790 - DNA, 108 bp, Homo sapiens
  chr1:214158802-214158910
  hyper
atctcgctcgcctagcgtggcgcgcgctcctatttcaagtcgccgctcctgcgccctaatgcgggctgcgaaccgccgcggcagagcgtcgcgagccgggagcctctg

SEQ ID NO: 36791 - DNA, 182 bp, Homo sapiens; identical to SEQ ID NO: 1099
  chr1:214159036-214159218
  hyper

SEQ ID NO: 36792 - DNA, 345 bp, Homo sapiens
  chr1:214159482-214159827
  hyper
ccagcctcaactgtcacatcccggttagaacacctgatacaacagtcaatagttggaggtgtgagtggtgcgtgtgcgctcctctgtgttgcttccgtgatagacgcgtggggggagtgtgtgggggcggcaaaaggggaaagaagaaggctggggatgctcccgcaatctcttttcttatcgccgacacctaacctgaccgacctaattttttttctccttttcactgtttgaaattcgtgccaaaagtttcctgccgggatagactcggacatactaacatcgctattcttattcaaagggagggcttaatatcctctttacggtttggtgaatttgaggctg

SEQ ID NO: 36793 - DNA, 158 bp, Homo sapiens
  chr1:214160033-214160191
  hyper
tatgtatgaatgtttctgcttcgcagctcttgcaagtcccagcttttataggatctttaggtcataaacgcggctgctttattaaaagccgtttactgtgcccggtgaaagggacgttctagctgcggctgaggctcgcttgcatttgtaacttgcaa

SEQ ID NO: 36794 - DNA, 42 bp, Homo sapiens
  chr1:214160833-214160875
  hyper
gaggagcgctcactcgctcggccactcggcgaactcgatcag

SEQ ID NO: 36795 - DNA, 150 bp, Homo sapiens
  chr1:214161236-214161386
  hyper
cagatagactgtgacgtgcagtcttcctgtttccttcagctgtgtcttaaagtaaatcttgttgtggagcggagccctcagctgagggagcgctctgaaataatacaccattgcagccggggaaagcagagcggcgcaaaagagctctcg

SEQ ID NO: 36796 - DNA, 30 bp, Homo sapiens; identical to SEQ ID NO: 1103
  chr1:214161705-214161735
  hyper

SEQ ID NO: 36797 - DNA, 30 bp, Homo sapiens; identical to SEQ ID NO: 1104
  chr1:214162024-214162054
  hyper

SEQ ID NO: 36798 - DNA, 582 bp, Homo sapiens
  chr1:214162293-214162875
  hyper
agatccccgctttccgccaaaccccatccttccgatctccccaggctaaaactccggggccggtccccttgtcctttctctttgtcttgtttattatagctgcctttcttcccggctcttccaatttgcttgtcatttgcatacctttcacttctccttttttaaccccagcagaggaccgggaactgggaggaggagagagggaggtgggggggcgctctgttactttcgtctcaaaacgctgtcgaagccgaattgtggaaatccggcttggaggggagcggtgatgggtcccgggaaacgcgcgcggcgcccctcttccgagctcctggacccagggctgggtcaagttgagtagggtaaggcggcaccgggaggctcggggggtcgcgtggcggtgggattgggacaccagcacgaggaggaccggaggatcgcgggccgggtaagagtagggggttcttgggcagcagaaatgggaggcgatgaatctcccagccatcgctggcagactatggtgttgggcagcttcggtctggtctcgtctgggtggtacctaccgttttgccccagttaggagga

SEQ ID NO: 36799 - DNA, 254 bp, Homo sapiens
  chr1:214360604-214360858
  hyper
cagcgagatccccgcgcaccgctcgctcgggctgcgggcaggcagcaatcagctaattgcctaatcggagtggggagctggtgcccgctcgccgcggtcgcctcgcgggtcacagacaagagagcggcttgttttctctctgtcacatcgtcgtcttgaaccgtgtggtctgttgcaggggaaggggccgagctggaggagcgagcgggcgggcggcgcttggcacatcccgaagaacgctgcctcggttgcct

SEQ ID NO: 36800 - DNA, 17 bp, Homo sapiens
  chr1:214360926-214360943
  hyper
cgcgctctgctcagctc

SEQ ID NO: 36801 - DNA, 152 bp, Homo sapiens
  chr1:214387716-214387868
  hyper
gaactgccccagtggcgtctgcgaggcgtttcctctataaagctgtcgtccctagctctggtcagtgctgaccaagtcaccctggcctcctccccggcccctttttctactgcaggaaaggctggagcttcggaagagataacatcagggaa

SEQ ID NO: 36802 - DNA, 30 bp, Homo sapiens; identical to SEQ ID NO: 1108
  chr1:214435167-214435197
  hyper

SEQ ID NO: 36803 - DNA, 1543 bp, Homo sapiens
  chr1:214724272-214725815
  hyper
aaactccccagactgcgctcaccttccagctcgctcccgggaccagctttgcgcctcaccgcgggcagctcccaccgcgagataacacccctgcggcccggccaccccgcgccccaggctgccctgccaggcgtcccggggcgccaatcgcaagttggcgttgccagcgtctgcccaagtcatctgcagggcgcccggagcgccaaggcggcctccaacctcgggcccaactcccggcttggacggggcttacctgcttacatggcccccgtggcgccccggagtcccgcgcggaaaggctgtccttcgcggcggcggagccgattccccacggaattgattccagtgactggcggaggaggggcgaagggaaggagccgcaggaggcgaaaggggagggaggtttccgccgcgatcccggcgcgagagtccgagcagaggcgcaccgggggagaaaaggagaaaaacctaagcacggggctgtcccgcccgaggaggccggggaggatggctcagctgggaggggaaggagcgccagtggccacttgatgtctgtctagggctccccgaggacctgagccaggagagcaggcggctgagcccggagaagcacagcaacctgcccccgagtctgcgcccgctgcgctcactccgccgagaaaaagttggaaagaactttgaggggccgggagagccagagcggcaggaaatgcgagcggccgggagaggagggaggaaggggccgtgcgagtgggaggggacggagcaggcgccggcggccacggctcccccaccccagagccgggctccgcggccctgggggccgggaggcggagggagcgctgggcgcgcggccgggggcggggaggaatgcggcccgggagggcgcgcgccgggggcgccgcgggcgcgcgctgaaacgtggagccccagctcccgagctcccgagctggaggcgcgccgtccttggggacgtcacagcgctggaatccgaggaatgccgggctgcaggagctccttctgcaggcccggagaagtcgcacacttttaatggggtagttttggaaaatgttttaaaaggtgggggccgaggacggaggaccggatgaaactccctggagtaagagacgtggaagtggagagagcaaggcgaccgcagccaccccaaccctgggctgctcccgccgttggggagaaagaggcaaggcaaggaagagcccacctagacttccgaggaccgcagagacggggcggcggcaggaacttgctcaccccgacctacattcagaatagtccaccttatattggggaaccctccaagcaggacgtttcatgcagccaccccacaggggaaaacagaccaggagaaagtaaggtggcctcaccaagtaggcaatctcagagatctctccctagaatctctgggtactggacccggtgtcttagccttctctccctgccccctcccgccccgtaggaatgataaaaagcagcctgtgtgctgagagttggaaaatgtcgttttcccggtttgttccatgcc

SEQ ID NO: 36804 - DNA, 30 bp, Homo sapiens
  chr1:214776289-214776319
  hyper
ttccctgacttttgcggaaatagcggtcca

SEQ ID NO: 36805 - DNA, 1072 bp, Homo sapiens
  chr1:215255054-215256126
  hyper
tggaggtcatcaggggattcccgctgagaaagtgggaaggaagagagtttagaaacggattgaagttccactacatcacgtgtgttgttagagaattcgcctattacgacgacagcaacgtctgatctcctggctttcttcccctccttggtgggttccgttccgtccccctgtcgctgcgagtttggctgtccctacgccggggtcttggagtttgggcggggtctggtacctgccaaatacggatcctgatggggaggaggtcggggagcgctaagttcaggctggagtctgagttctcccaccctgctgctcccacccaccgcgcttagaaacctatgtttccagcaaaggggtcttgctctgagagaacctaaccgggttttcttccattccctttgcatctctagatgtcttcgccctggctccaggtgcgttccccatccttttcggtcccggacgttctgcagattatagcgcccagctcatgtccagcaccgccggaggtgaagtggggcgagctggtgactccttaacccttcccgaaggtgtagactggaagaagccagggtcttcattacctcccctactccagggctctcaaggcgccaacggggacacttccctgtacaggtctggggggccacgagggcgaggaggacgccctagtgcaggggtccaaggactcgcgtcccagagcttggtcccacacccggtcccacaccccgaacgctggtcgggaaggagataggatgcagcgcagtgtgatgtggatgccagacagcgagagtgaggattttgcggggtggggatgggggttagtggaaggggctgagaggggaggaggcagcaggtgagccaaggggttgtgcccccaggaagagggaagagaggatctttagaagggagcatcttgcaggggcgacgcaggcaagggtagggctaggaggaggtgcggggaagcaagccctggcggtgagacaggagggggaggaggcgaagaggagggagttccgaaaggagggaaacgagccggcaaggggcgacaggagcgagccgggaagggagagca

SEQ ID NO: 36806 - DNA, 677 bp, Homo sapiens; identical to SEQ ID NO: 1112
  chr1:215256195-215256872
  hyper

SEQ ID NO: 36807 - DNA, 40 bp, Homo sapiens; identical to SEQ ID NO: 1113
  chr1:215256953-215256993
  hyper

SEQ ID NO: 36808 - DNA, 149 bp, Homo sapiens; identical to SEQ ID NO: 1114
  chr1:215740889-215741038
  hyper

SEQ ID NO: 36809 - DNA, 32 bp, Homo sapiens
  chr1:215744969-215745001
  hyper
aactttttttttttttttttccgagacggagt

SEQ ID NO: 36810 - DNA, 620 bp, Homo sapiens
  chr1:216774193-216774813
  hyper
tcacaggacacaaccgccgcgctctggttggacgcaggctgcatcctgtttcccggacacatttattcagcccaatctttcctgtctgaacacagactgttgatgataaaatagcatctcaaattatgagggagaaagagctgcttcggcgttcctccccggttctctgcctggattgggctcccgtgggttgctgaggccctcgcggaggcctaggaagcccggcagcgcgggcggcagcagcgggttggggagcaaggccggcttggaacgcgggctcctgcccactgccacccgcaggctgccccgggctcccgggcgggcgctcggccaggggctctgctcgctccatggacagctgggtggaaaggacgccccgtgaaggacacccggccgtcggaccgcgcccacccctgggcctcccaggggctccctccgcagactcccagggacttcctgggagccaccgcggagggcgctgcgcgcgtccggagccgacgccgggcttcaaacagaaaccaaagcccgctccaacgccgcgaaggaggggggctccaagcatcctagaaaagaaagctggagggagcgcatcagagacacaagtgcggataagacttaac

SEQ ID NO: 36811 - DNA, 41 bp, Homo sapiens; identical to SEQ ID NO: 1117
  chr1:216896837-216896878
  hyper

SEQ ID NO: 36812 - DNA, 30 bp, Homo sapiens
  chr1:216897278-216897308
  hyper
tacaccgggggccgcggcttatttggtgct

SEQ ID NO: 36813 - DNA, 351 bp, Homo sapiens
  chr1:217262877-217263228
  hyper
atcaggtgagtcgtcggggattttaaagaagccgaagccggtttctttggctatgaaagtctacaaaacccccatgcaggaacattgcacatcttacacacgcctcctttaactgggctcccgcgacctcggcaggcgagggggtgctggccggccctccggtggcaagggcacggccccccgctctgcccccgcgggcgcggggccggcctggcacccggggtccgcgtcccgagcggctgtgcactcaccgagccgggctgcgaggggcagaggggcgcccacggctagccggagcgccaaggcgcctcccttttctcttggtagcgtcggtccgcactccctgtgacc

SEQ ID NO: 36814 - DNA, 30 bp, Homo sapiens
  chr1:217263492-217263522
  hyper
cctgctgctcctgccgccgccgcagccgct

SEQ ID NO: 36815 - DNA, 1298 bp, Homo sapiens
  chr1:217307895-217309193
  hyper
ctttctccacaccccgtacccccaaaagtgtacctcagctcaggcgggaaagggcactttgacccgccgtgcgcgagtttccagccagccgctgcgcgcctgagagaaagagcgcctggctgcggctccgagcgcacagctcttccccgcgtgtttggcgcggctacgtttctcttgctccgggctgaggctcgaggaacctcgccagcctgctgtggtcccgtccccttgacgtttgatttctaaaaccgcatagtctgcggctctggcatttagaaaaagaggacaaggtcaaggcctgtggaccgaccgccgcgatccgcttgcacctttgctctcacagcaagcgagtcctggccgcagccgctggaaaaaggtgccgcagcgcccagtttacctggaattcagggacctgaccctgactctatttccggctagtcccagcctctccttcctctcctttccccgctttccgcccagggcggttctgagattttgattaagagagatctgtccccgcaccgcagagggatggtgccaaatggccaggcttcctgggcactgcgtcctcattcccaggtcagagctactgcgaaaggaaaggtctccatctggacgcacctcgtcccctcccccagcgcgcggggcagccctctagggccagctcgggcacgcgcttttccccctcctcaccccctgctccgcccagccccgtacagttttattctttatgaaacacacacgcccaccccgcctcccacgtaaaggccagtcttgactcattttgcgcccagatgcaaactcagctggaagttgagggtagggccaaagaggtgaggggagggtaagagatacagcgaaatagagaatgagaagggagaaatcaaagggggaggagggacaagagaaagcgtgtggagctggaggttgaaggggcagaggcggaggccaaggactgagcaaggggcgcgcgcgcggcggcggcggcggcggtgttggcggcggcggcggcagggcggctgcacctcctcccagccttttcgcccgcgcgcgcgaagcggggtcaggcgcggacccacattcaccgactgcagaactgttttctttgccactaccagagggtgtttcggggctccccacggtcttctccctggctgcttgccgcgtgagagcagaaataaaacaaaacaaatcacgggacacgacggagtcgggccgctgggcgcctccgggatcgctctcactttgcactcggaagcgggcgcggggattcgggctgccgcgtgtagcctataaat

SEQ ID NO: 36816 - DNA, 128 bp, Homo sapiens
  chr1:217311037-217311165
  hyper
cccgtttagggagcccggcctggagcccgccgcctccagaggagcccgccctcgccctcccccgcgcgcctccgctctctgggacgcctggccaaatgcggggcggtctctcgcgggccattggcttg

SEQ ID NO: 36817 - DNA, 244 bp, Homo sapiens
  chr1:217311382-217311626
  hyper
gggtgggtgggtactcgcggcatttctcaaggttctgggtgttcgtaactaggggaacaggccctatgggggcagaaatgacagacgcacgaacagcgtctctgtggctgtctgcagcgcgaggttcacgtctattgttttatgcctccgggagagctaccccgcgtgatagatcttttcagatccatcactggaagaaaaaccctggtgataacgattatctcccgctcgcgctatctcgcca

SEQ ID NO: 36818 - DNA, 17 bp, Homo sapiens
  chr1:217313025-217313042
  hyper
cccctctgcaattgccg

SEQ ID NO: 36819 - DNA, 508 bp, Homo sapiens; identical to SEQ ID NO: 1123
  chr1:217313068-217313576
  hyper

SEQ ID NO: 36820 - DNA, 30 bp, Homo sapiens
  chr1:217804414-217804444
  hyper
gagcttccggaagccgacaggcggcggaaa

SEQ ID NO: 36821 - DNA, 30 bp, Homo sapiens
  chr1:218337470-218337500
  hyper
tgtcctaggacaatcggatttcaccgggta

SEQ ID NO: 36822 - DNA, 921 bp, Homo sapiens
  chr1:218338189-218339110
  hyper
ggaggctcgctcctccgcggccggggcctgggggtgccagtgcgcccccgagtgagcgggtagggaagccgaagagccgccgacccgctgcgcgccctccagtcccgggcggcgccgggacccagagcggccccagcccgcgccccagcggggacgcgaacggcgtctcgggacggcacctcgccggggccttgccctgtcccgccgcgtcgcggcctctccgcaccccacgtcccgggagccgaccgggagactctcacggcggagttccacagacctcgttaggttaaaggaacctcgccttgccccccactaatcggctagagagggaggccggcgaaacaaaagccgtagaggaaaattaagcgacttccccctcggcggggaacttggaggtgggggagcggggagcggcgcggggcgcaaggagaaggaagtgctgagctgggttgccgacgaaccccgggcagggggaggtggggggctgcggcagaagaaagacaaacatctggggatcggaccatatgccggagctttgtcttgtccttcaaagttcggctgcccttgaagtgatttgtcaggcggcccacgggtgacagggaggatgtgcagcggggagcgggggcgggacatgccggggggagcggagagggctagaagagaggggaggaaggggggacgccaacaagagggggagcaaagtgaccccgccgcccgaggaacggtagaaaccgggatcgcggaggtgcgagcccgagcccgggagcggagcgcttcccggggagacgccaagacggcgagaaaggaggagcgggaacgcagaggttaagcggagggaaggccgaggagaaacagccagaggacgggaaggaggaaatagacggggagaagaaactgaagattagtcgttgaggtgtatta

SEQ ID NO: 36823 - DNA, 30 bp, Homo sapiens
  chr1:218458481-218458511
  hyper
tcgcgtaaacacaccgagccattcagagct

SEQ ID NO: 36824 - DNA, 30 bp, Homo sapiens
  chr1:218458854-218458884
  hyper
tcaagcagcgcttgcgacttcatttgctgc

SEQ ID NO: 36825 - DNA, 153 bp, Homo sapiens
  chr1:218520138-218520291
  hyper
catgcgcaagaggatcgaggcgatccgcgggcagatcctgagcaagctgaagctcaccagtcccccagaagactatcctgagcccgaggaagtccccccggaggtgatttccatctacaacagcaccagggacttgctccaggagaaggcgag

SEQ ID NO: 36826 - DNA, 174 bp, Homo sapiens
  chr1:218520309-218520483
  hyper
cgagcgcgagaggagcgacgaagagtactacgccaaggaggtttacaaaatagacatgccgcccttcttcccctccgaaagtaagtacttattttgacttccatcccctgaggtttagctctgcccggagctctcaaaaccgcagcagctcccgggatcgcccttccctctcgc

SEQ ID NO: 36827 - DNA, 33 bp, Homo sapiens; identical to SEQ ID NO: 1125
  chr1:218520774-218520807
  hyper

SEQ ID NO: 36828 - DNA, 600 bp, Homo sapiens; identical to SEQ ID NO: 1126
  chr1:219346992-219347592
  hyper

SEQ ID NO: 36829 - DNA, 167 bp, Homo sapiens; identical to SEQ ID NO: 1127
  chr1:220101043-220101210
  hyper

SEQ ID NO: 36830 - DNA, 242 bp, Homo sapiens; identical to SEQ ID NO: 1128
  chr1:220101370-220101612
  hyper

SEQ ID NO: 36831 - DNA, 129 bp, Homo sapiens; identical to SEQ ID NO: 1129
  chr1:220101674-220101803
  hyper

SEQ ID NO: 36832 - DNA, 303 bp, Homo sapiens
  chr1:220101864-220102167
  hyper
cggatccgtgaggcccggtacccgcctcccagattgtctcgccggccctgccccaccgctttttataacgcgaggccgagcgccaccagtccccgcacgtccagagtctaaaggagtggcgggggcagtatctgaacagcccgtgcaccgcctcccgcggcccttttcccctccctcgcggcctgggcctgacttggcaggtggccacgagccgatgtctctctttgtgggacaggactgtgcagagaggggcgctgcggaggagagggggcgtgtctggacgtcaatcttcacagactccct

SEQ ID NO: 36833 - DNA, 173 bp, Homo sapiens
  chr1:220267775-220267948
  hyper
tgaagctgctgggccgccagcagccggacacggagctggagatccagcaggtacgggccccgcctcggcgcggggcctccagagaggcccgatccggccgcgggcaccgggcgctcgcaggcgccacacctctaggctccacgccggtgcgggtgggcgggggtgtgaccaga

SEQ ID NO: 36834 - DNA, 354 bp, Homo sapiens
  chr1:220700604-220700958
  hyper
aatgcactacagacgcgggtgcctacaggatgtcttgaggcaggtgggtggaagtgtgaggaagccacctggaagagggaggacagggcccaaatcagacacagctctccatcctccctaaacaggctcgcctaagtgacacttccttgtgtcccaggaagtgacgatcagccagtgtagatgttgtgactcgcgggtctcacccactccgagggtgctgcagggcgcccagagcgagacgtcttccgccggccccattcccgaagaggccgcgccgtcgggggctgagacccacttgtactgagtctccagccgcctccctaggctgctggcgcttctaggggcttctgtgct

SEQ ID NO: 36835 - DNA, 892 bp, Homo sapiens
  chr1:220701600-220702492
  hyper
accgagccgagacattcgcgccgggggatcgggcgccgccgccgctgggccccgggcgcgtggatgcggctgggtcgggcggcgccgtacacctgaggcggagaacggggcgcggcgcgggtgacgctgtcagggccgcggttcctgacgcccaggcgctcgccaggacgagccaggcagtgatttgaggcaccggcttcaccttcacccatggtccggagagcctagcggggctcgccaccgcctcccggctccccttccacgcctcatcctgccagcctcgccgccccgccagcgccgggcaaccgcctcgcccgaagccctccctcgttactgtccgcataccccggcggcgccgccgcgggaagcggctccccctcctcttcctccgcgtcctcttccctctttcccccgccggggccgcttgttgcaccgccccgcggcctgcgggagccgctcgccccggccttgtgctcgcgtccgcacccctttcctgtcgccccccggggcccgcaccacagcccggccggcgagaccccggccagaccccgctgcccgcacaaaatgtcggcccggacgccattgccgacggtgaacgagcgggacacggaaaatgtgagtaaccggagcctccctcgggagcagtgggggcgagaccctcctctgatccccacttcacccgcgcttgggccgtcccccgtgcctcggcgcggccacccgcggcagggtctccacctggagcccggcgtgaccctcacccactgctcagccctattcttcattccaaccccatttcgcttgtttcccctcaagggtgagggtagggaaccgtaagtggcgccctctcgctcggaggtggtcctccaggggcggatggggtgatggagggcag

SEQ ID NO: 36836 - DNA, 680 bp, Homo sapiens
  chr1:220863498-220864178
  hyper
tgtgcagtgcgcgccgtagtctgcacagtttggccggcaggtgggatgaagggcggggctggcggagcgcgcccgccgcctggtaggccagttcggagcggagccaacgctatcccgggccccacggccagggggcgctgcggcccccccaatcccccgccccgtccgggctggggcggaggagcgggcggggaccaaaggttggtgtctttgcgctcggaccttcgccagaggggccgggacatcatgacggtgggagccaggctccgaagcaaggcggagagcagcctcctgcgccgcgggccccgagggcgagggcgaaccgagggggacgaggaggcggccgccatcctggagcacctggagtacgcggacgaggcggaggcggcggccgagagcgggacgagcgcggcggacgagcggggcccggggacccggggcgcgcggagggtgcacttcgccctcctgcccgagcgctacgagccactggaggagccggcgccgagcgagcagcccaggaagaggtaccggaggaagctgaagaagtacggcaaggtaggggccctgcgccaccactgcccggggggcgcgggtgtggtgtcccgcgggggagcgggagccgggtccttaccatcgactcacccagtttctccgggctgcacctgcgacccctccgcccc

SEQ ID NO: 36837 - DNA, 777 bp, Homo sapiens
  chr1:220921396-220922173
  hyper
tgtttgtaaatcctccgttgggcaacccgccttcacgttctgcggtgatcttgtcgagcgactaagcgtgcagtattagcagagaagggggtggcagagtgctggcgctgaaggtcatgttgcatgggtaactgtcgtgttgtaggggcggggaagagggaggagacactgaccaccccagaggccgccccattagctcgcttgctttgggcggcgtcgctcccacggcgcccagggtacccccgccgctgtctgcctgtcttcctccattaccgcgcaggcttggtcaccgcattaaggcattcccgctctccgcggaactgctctgccgtctcggcggtgaaagtgtgagagggtccgtagttgggtcaactttgactcctctcgcctgcccggatccttaagggcctcctcgtcctcccggtctccggtcgctgccgggtctgtgcgccggtccgcgcccgccctcgctctgccatgggcgcttccagctcctccgcgctggcccgcctcggcctcccagcccggccctggcccaggtggctcggggtcgccgcgctaggactggccgccgtggccctggggactgtcgcctggcgccgcgcatggcccaggcggcgccggcggctgcagcaggtgggcaccgtggcgaagctctggatctacccggtgaaatcctgcaaaggggtgccggtgagcgaggctgagtgcacggccatggggctgcgcagcggcaacctgcgggacaggtacagcacagcgcgggcgcggggcagc

SEQ ID NO: 36838 - DNA, 567 bp, Homo sapiens
  chr1:220959916-220960483
  hyper
taatttcaaaatcacgctttgtcctgcaaatgttgtatattgtttattttaggtcaaataaccccataaatacgtaagtaaataaattggtcacttgcagcgatcgtggggtgggggagggcacagcgccctgcagcgcaggcgacggaaggttgcagaggcagtggggcgccgaccaagtggaagctgagccaccacctcccactccccgcgccgccccccagaaggacgcactgctctgattggcccggaagggttcaggagctgcccagcctttgggctcggggccaaaggccgcaccttcccccagcggccccgggcgaccagcgcgctccggccttgccgccgccacctcgcggagaagccagccatgggcgccgccggctcctccgcgctggcgcgctttgtcctcctcgcgcaatcccggcccgggtggctcggggttgccgcgctgggcctgaccgcggtggcgctgggggctgtcgcctggcgccgcgcatggcccacgcggcgccggcggctgctgcagcaggtgggcacagtggcgcagctctggatctaccctgt

SEQ ID NO: 36839 - DNA, 1318 bp, Homo sapiens
  chr1:221051891-221053209
  hyper
gaaccccacgtgatccggagatgtggtggaggggtgaggctaacatttcctacaacctcctgcaaaggatggaagcgcgtgccgctctcccgggtttcgggaggcagcctgttttgtagcctctgaggctccggggaaaggtttggctgcgtctaagagagacgtttggagccatccgtcttattttgtttgaaaagtcactcgttcaatttgtcactgtgtgacagctcagaataaaaccaatttgcggccgcccctcctcctcgcttcccggaggatctcctgggaggcacgaggcggacgcggtgctgagttgggccgggactcagggcggcaacatttgggcaagggcccaggaaagatgaggggctttgccgaggacacggactcctggaataaaagcagaatgaggtcaagagaagggaagcaaaggggccaaagcgcgctccgctctccaccgggaggcgggctttgcagagccctaaagagtgagattaccgtcccttccccacgcccccaactcgccccgggtgacaagcgcttcaggaaagctcctgtgatcaaccctccttgccccgtggcggttcggagctgcagaagttagaagagagtcagagccctccggagcggctgcctggcccctacgcagagtagcaagaagcactgcgatgtgcgctactaagcccacgcggccgcagcaaaaactttggcgtggccggggcgtggctagggtccggccaggcccccttgttcctaattcccctccactccccgctcccattggtcacgaggatgaccaatgagcgctcggatcgaggtcctaccccgggcctgactcgaaagctcctgccaaaactttgggagtttttagagacgagtttttttttttttctattacttttccccccccctaactaacggactattattgttgttgttttaaatttagctcttagggcttagctatttgggttttcttgcggtgtccggctcccgtctccctggctcccccgcccgccctgcggccccagcgcccctcgctctcatccagcccgcgaggagtgcgggcgccgcgccgcctttaaagcgaggccagggagcgaggcggtgaccggccgagatccggccctcgcctcctccctcggtggcgctagggctcccggcctctcttcctcagtgcgggcggagaagcgaaagcggatcgtcctcggctgccgccgccttctccgggactcgcgcgcccctccccgcgcgcccacccacccagtccggctggactgcggcagccgcgcggctcaccccggcaggatgttcgcag

SEQ ID NO: 36840 - DNA, 496 bp, Homo sapiens
  chr1:221053255-221053751
  hyper
cgcttactgctcctcggccggcccaggcggctgctccttccccttggaccccgccgccgtcaaaaagccctccttctgcatcgcagacattctgcacgccggcgtgggggatctgggggcggccccggagggcctggcaggggcctcggccgccgccctcaccgcgcacttgggctcggttcacccgcacgcctctttccaagcggcggccagatccccgcttcgacccaccccagtggtggcgccctccgaagtcccggctggcttcccgcagcggctgtctccgctctcagccgcctaccaccaccatcacccgcaacaacaacagcagcagcaacagccgcagcagcaacagcctccgcctccgccccgggctggcgccctgcagcccccggcctcggggacgcgagtggttccgaacccccaccacagtggctctgccccggccccctccagcaaagacctcaaatttggaattgaccgcattttatctgca

SEQ ID NO: 36841 - DNA, 31 bp, Homo sapiens; identical to SEQ ID NO: 1138
  chr1:221064929-221064960
  hyper

SEQ ID NO: 36842 - DNA, 30 bp, Homo sapiens; identical to SEQ ID NO: 1139
  chr1:221118798-221118828
  hyper

SEQ ID NO: 36843 - DNA, 145 bp, Homo sapiens
  chr1:221914334-221914479
  hyper
aatgccatctatcatccgtctacacacgaccgtcaccattctcatccgtctacacacgaccgtcaccattctctgacacagaaccaaagtgtcacaggcggaatccacactcacgcgcgcacacggggcacgcacccatcacgtc

SEQ ID NO: 36844 - DNA, 30 bp, Homo sapiens; identical to SEQ ID NO: 1140
  chr1:221915460-221915490
  hyper

SEQ ID NO: 36845 - DNA, 30 bp, Homo sapiens
  chr1:222045430-222045460
  hyper
gctagtaaagatcctggcagttctttgcct

SEQ ID NO: 36846 - DNA, 30 bp, Homo sapiens
  chr1:222164932-222164962
  hyper
gctatctgatcatataaatatggaatctag

SEQ ID NO: 36847 - DNA, 30 bp, Homo sapiens
  chr1:222639009-222639039
  hyper
tgtcctgccccttccgaggctactccccaa

SEQ ID NO: 36848 - DNA, 30 bp, Homo sapiens
  chr1:222817453-222817483
  hyper
ggggctctttaagtcgccggttcctggcga

SEQ ID NO: 36849 - DNA, 30 bp, Homo sapiens; identical to SEQ ID NO: 1141
  chr1:222886475-222886505
  hyper

SEQ ID NO: 36850 - DNA, 30 bp, Homo sapiens; identical to SEQ ID NO: 1142
  chr1:223254691-223254721
  hyper

SEQ ID NO: 36851 - DNA, 81 bp, Homo sapiens
  chr1:223302781-223302862
  hyper
ggccctgctcccgaccgacccggagcgcgctgctgccctctaccggtcatccgtgcggccggacaccgtgtcaggcccgcg

SEQ ID NO: 36852 - DNA, 93 bp, Homo sapiens; identical to SEQ ID NO: 1143
  chr1:223307233-223307326
  hyper

SEQ ID NO: 36853 - DNA, 1380 bp, Homo sapiens
  chr1:223537347-223538727
  hyper
ctgcgcgcgcctcctcggaatggaagacccttccgggactgtcggtcttacctgtgggtctcatgcatgcagcttccttccctcctccgcctcctccccccgccagtctaacccgcatctgtgcgcgacctctgctgccgccgctgcgcgagcgagcgagacggaagcttcggcggcggcgctcggctccagctcccccgcccgcgcgctccctccccaggcgcccccgagcgggcgggtgttgggggaggacgggagcccggccgcgcgcccccgcggaggcgcccgcgcgcccgctacctgaactcgcgagcgcgcggcggcggcggcgcggagagagggagtgggtggggacggggtgagtgggggggcggggacggggcgaggggtgcgcgggcgcgcgagcacgcgcctctgccaacccagccggcgccgcggcgtggccggagactggcgagggcggggacggggaaaggggcccgccgccgcgaccaatgggaagcccgcgcgcctgcacctgtcggggcgcgaggcgccggcggccggtcttgcacacgcacgcagctcggtcgccccttccccggcgctggactgcagcccctgccccggctgcgcgccagctcaggtgcccgccccggcctccgcgcggcctctggtgcccccagcccgcggcgcggcgcgggagagcgctccgccctagaactaccgccgcggcggtggctgcagacccggggcgagtgcgcggccggcagctcccaaccccagaactctcgccacagacccggttaacttgagcaccgccaattgcccgagtctcttaatttcccgcgttaacccctccccgctcccatctccgccgaagctctgcgcgtccccagggagcccgaaggaccatctgaggcggctgagagacactctccccctcccccacacccttggtattttccctctgccagccgcaggtgttgcgagtgaggacccctgtccggtcttggagatgcgcggggccctcggagccttggcctgggaggcgctcccgggggcggggaggcgggggtagcgggtgattggtgacacgcagaaggttgggtacctggaggaggggaggcttccggggtcgtagatgggaagccaagggggtcggtggtaattgccctcccagccccaagtggagagagttggcctggtcggtcccctgtctctgcgccgattctggtgtcggagctcagcccgcagtggttgcagctctcactcgccgccggctctgatcgcccgcggtcggtttcaagatagggaagcccacattccagccacagtgattaagaggtgtcagctaatgaggtggcgtccaccggcagcgctttagagccagtgacactc

SEQ ID NO: 36854 - DNA, 38 bp, Homo sapiens; identical to SEQ ID NO: 1145
  chr1:223674887-223674925
  hyper

SEQ ID NO: 36855 - DNA, 776 bp, Homo sapiens
  chr1:223899910-223900686
  hyper
ccctctgctaactccccgggtgttttccggacggccacaactatcctagccttcttccctatgggctgcaaaggtggcctcgggttccggtgggagccccaactctggaccgcgattcgcgagcctccccggcgccgggccgcgccatcccgggagctgtccgcagatggcagcaccggccccgggtcgcggcgttcccggcgctcggcaggccgcaggatggcctggtcccgggccgggagcccagcaggccgggagcggctgaggccacaccccgcgggccgggccgcttccctccggtgaatcatcgctcgcagcggcggcgcccgcagtggccgcagcagcgcgccgggccctggccgcgccccagccgagcgcagcgcggagtcgccccgacctttctctgcgcagtacggccgccgggaccgcagcatggcgggcatcgcggccaagctggcgaaggaccgggaggcggccgaggggctgggctcccacgacagggccatcaagtacctcaaccaggactacgaggcgctgcggaacgagtgcctggaggccgggacgctcttccaggacccgtccttcccggccatcccctcggccctgggcttcaaggagttggggccctactccagcaaaacccggggcatcgagtggaagcgccccacggtaggaagcgcgcggcaggacgcgggcagggcggggtgccgggcagggcggggtgcaggccggcccgcggcgcgctggggcggggggcagcccgggtgctgcagtgg

SEQ ID NO: 36856 - DNA, 173 bp, Homo sapiens
  chr1:223936579-223936752
  hyper
tccaagtgcaagaaagcgcagccctgagcctcccaccccaggcctcggccgctgcgctagtgcgtccggcggtcccgcccggcagtaggacagagggagcgagggagtccgggaggaagggagagcgggtgcggccagtctgacggttgctgtgtttgcagatcaccagcgcc

SEQ ID NO: 36857 - DNA, 69 bp, Homo sapiens; identical to SEQ ID NO: 1148
  chr1:223936995-223937064
  hyper

SEQ ID NO: 36858 - DNA, 30 bp, Homo sapiens; identical to SEQ ID NO: 1149
  chr1:224302345-224302375
  hyper

SEQ ID NO: 36859 - DNA, 31 bp, Homo sapiens
  chr1:224481115-224481146
  hyper
cttcctgagatagtctcgcttatgaagttat

SEQ ID NO: 36860 - DNA, 30 bp, Homo sapiens
  chr1:224518264-224518294
  hyper
cgcaaaaccagccacggtagatacttggag

SEQ ID NO: 36861 - DNA, 205 bp, Homo sapiens
  chr1:224622415-224622620
  hyper
gcggaggcagctgccgcctctgtcctcggatccgctccgctctgctccctggtgtgttgattcttcccccagctgctgcctaatggagtccaggcgctcgcgtcacaggaaatgcctatactgccctcctcactcacttccggtggcaggtatggaacctatagggggcctgtcacccagcacgtgcatcgggggctgtcccggg

SEQ ID NO: 36862 - DNA, 35 bp, Homo sapiens; identical to SEQ ID NO: 1151
  chr1:224622765-224622800
  hyper

SEQ ID NO: 36863 - DNA, 30 bp, Homo sapiens
  chr1:224622840-224622870
  hyper
gcatgtaaggtgcgcggagggactgcacct

SEQ ID NO: 36864 - DNA, 251 bp, Homo sapiens; identical to SEQ ID NO: 1152
  chr1:224691179-224691430
  hyper

SEQ ID NO: 36865 - DNA, 706 bp, Homo sapiens
  chr1:224803589-224804295
  hyper
tccccaaccaacactaggcaacgccccaagtccccacacttcccactccgataggcgaaactgcaagaaccgggaggggcggctgcggcgtttaggcgcgaggcacacaccatacccttccgcagcttcccacctcctccagacgcacgtgtttaaagagtccctgctccaaccggtcccgccccacctccgctcggcctccagccctgcttgtactgctggcttcaagtttcctccgagaggcgggcgtgcacagctgcagtggcggcggcagcggccaccaagcgcccggcggcgcttcgccacccacctttcctcagcccccggcgctgcagtctccgcccgccggggagggcgcgctcagcggaacaggagtcgagggtggggcgccgagaggagggaatcccgggtcgcaccgctacagttctcgcagtggcaaaggcggcggcggcggcggcggcagcggcagcagcaggtggagcgagctacagcgtttggcctgaaacccactgctgcagccacccgggctggagttggcccgttgggtggagccagtgctcgccccggtccgacccccggtttccgggacacttgggttgcggaggccggctggccggagtcacggttggggacgggcgcgcctcggagcgcacggctgcgctggaagccgcgtctggggcgcaggaccaacgggacctacctcctc

SEQ ID NO: 36866 - DNA, 291 bp, Homo sapiens; identical to SEQ ID NO: 1154
  chr1:224804395-224804686
  hyper

SEQ ID NO: 36867 - DNA, 269 bp, Homo sapiens; identical to SEQ ID NO: 1155
  chr1:224804846-224805115
  hyper

SEQ ID NO: 36868 - DNA, 137 bp, Homo sapiens; identical to SEQ ID NO: 1156
  chr1:224805197-224805334
  hyper

SEQ ID NO: 36869 - DNA, 135 bp, Homo sapiens
  chr1:224805616-224805751
  hyper
atctgccctcttggcgtctgaagtccgactcctgaagaccccctgcaggtggcgaacctccgctaggcccccagcgtccccagcccacacaagcttcctgtcacccttcccggggctacgccaggtggagggcag

SEQ ID NO: 36870 - DNA, 639 bp, Homo sapiens
  chr1:225117199-225117838
  hyper
caccccccttacccccagcaccgtcggtgtcacatcgggggccgccgcgtacccgcggtggaatctcgcaagagccagggcccctcctcacctgcccggcacccaggatcccttgcgccgcgttcgggaccccacccccattgtggcctcttcgccagggcgcaggcgtggctcttggtcaggcggttacggccaggaggcgtcggagcctggcgtggtagggctgtgctgcgcggtccttcccattcaccctagtctggcgctcgccggcgtgggcgggccggaccttcgccgcttccaggaagggccacaacggccgtcggaccacggcgcggcgggtaaggtcgtcagcgtcttcctgtcagcggtcggcagagcctcggcgggcgggcggcgcgtggggcagccggtgtcgcactgggagggctgcgtgggcgcggagggcctgggcgctccccacccagctgctgtgggagcgcctccgagtccccgcgcggaaccctcaccaggcagatgctggcgcatccaccaggcgccggcgccgccacgccggtagccccgaccgcaggagctctcaacgcgaggttcttcttagttgctctccctcaggcaggccgcgttcccttctagtcctatatt

SEQ ID NO: 36871 - DNA, 21 bp, Homo sapiens
  chr1:225118300-225118321
  hyper
accatacttttttttttgaga

SEQ ID NO: 36872 - DNA, 605 bp, Homo sapiens; identical to SEQ ID NO: 1160
  chr1:225614687-225615292
  hyper

SEQ ID NO: 36873 - DNA, 31 bp, Homo sapiens; identical to SEQ ID NO: 1161
  chr1:225841440-225841471
  hyper

SEQ ID NO: 36874 - DNA, 30 bp, Homo sapiens
  chr1:225965661-225965691
  hyper
gggaggagttcagccgcgctgccgagaagc

SEQ ID NO: 36875 - DNA, 3 bp, Homo sapiens
  chr1:225997661-225997664
  hyper
cgc

SEQ ID NO: 36876 - DNA, 51 bp, Homo sapiens
  chr1:225998106-225998157
  hyper
ctcgcagggaattccgcgtcccagactgtgggcggacgccgcagggaggga

SEQ ID NO: 36877 - DNA, 30 bp, Homo sapiens; identical to SEQ ID NO: 1162
  chr1:226069174-226069204
  hyper

SEQ ID NO: 36878 - DNA, 144 bp, Homo sapiens; identical to SEQ ID NO: 1163
  chr1:226070448-226070592
  hyper

SEQ ID NO: 36879 - DNA, 31 bp, Homo sapiens; identical to SEQ ID NO: 1164
  chr1:226127349-226127380
  hyper

SEQ ID NO: 36880 - DNA, 30 bp, Homo sapiens
  chr1:226187463-226187493
  hyper
agaagctgcagtcccggaagcggttttagg

SEQ ID NO: 36881 - DNA, 36 bp, Homo sapiens
  chr1:226250416-226250452
  hyper
ctttcaattgtgttcgcagccgccgccgcgccgccg

SEQ ID NO: 36882 - DNA, 30 bp, Homo sapiens
  chr1:226252126-226252156
  hyper
cgctcgcaagagtgcgccctctactggagg

SEQ ID NO: 36883 - DNA, 172 bp, Homo sapiens
  chr1:226297379-226297551
  hyper
caagatgggagcaggcgctgaatccgtggcgcatggggaaagcggcggtcggagtggggcttcctggcctgtcacctcctcctgagctgctgcgaggagaggcgcgttggcctcctgggccacagctgcctccctgcccagggaatcccgggagatgcgaatatcgaagaac

SEQ ID NO: 36884 - DNA, 30 bp, Homo sapiens
  chr1:226309521-226309551
  hyper
cctggcctctgaatcgggcgagcagcgccc

SEQ ID NO: 36885 - DNA, 30 bp, Homo sapiens
  chr1:226374738-226374768
  hyper
gtagggaggattgacgaggtcggccagcac

SEQ ID NO: 36886 - DNA, 120 bp, Homo sapiens; identical to SEQ ID NO: 1166
  chr1:226411103-226411223
  hyper

SEQ ID NO: 36887 - DNA, 765 bp, Homo sapiens
  chr1:226411246-226412011
  hyper
cgggctcgcacccggaggagacacgggtctccccgagcccacctttgatcgcaccgccccgccttcccagcccctggcccgggagggtataagtgcggcccgcgcccctccgagcggcgcgctgggttccggagcgatggccacagccgagtcccgtgcgctccagtttgccgagggcgccgcgtttccagcgtaccgggccccccacgccggcggggcgctcctgccgcccccgagccctgcggcagccctgctccctgcgccgcccgcgggccccggcccagcgacctttgcgggcttcctcggccgggaccccgggccggccccgccgccccccgccagcctgggctcgcctgcgccccccaaaggcgcggccgccccgtcggcgtcgcagcgccgcaagcgcacgtctttcagcgccgaacagctgcagctgctggagctcgtcttccgccggacccggtaccccgacatccacttgcgcgagcgcctggccgcgctcaccctgctccccgagtccaggatccaggtgagggcccgctgcgttcgcaagtgcgcgctggagcggaggcgctgcggactctaggtctggactgcgggctcctgaggccacacccgggacgttgcaggcacggtgcttcccctgaggctctgcgtactagactgaaatagggggtgatatcggcacctgctgcatagggtggttgcgaggcctgtgtgaaataatttaggcctgcactgaacgatttctctcattattaaata

SEQ ID NO: 36888 - DNA, 30 bp, Homo sapiens
  chr1:226497344-226497374
  hyper
tgcttgggcgcctccgtcccctcacttttc

SEQ ID NO: 36889 - DNA, 30 bp, Homo sapiens
  chr1:226595561-226595591
  hyper
tttcttgcaagaggcgcgcccgctcttggc

SEQ ID NO: 36890 - DNA, 817 bp, Homo sapiens
  chr1:226736710-226737527
  hyper
cgcgagaagaagggccccctgcgcgccgccatcccctacatgcccttccccgtggccgtcatctgcctcttcctcaacactttcgtgccgggactgggtaagacacggctgccgcgacccttgcgacccccaccccgccgcgggagggcgtggggggagagaagggcgcggccggagacctcctggcggggccgcgcgctccaagtgctgcgaccacgcgccaccgcccgctcctggcgtccccgggcaggtggcagaagcgcgtggagtgtgcaccccagaggggagaggctgcgctggggtctccgacccgcaggcggggccccaaagagccggaaactttgcggccaatgttggagcccgcagcggcggccggaatggctctgccggcttcggagtagggctcccgtcccggcgccccgatttctgctccttctctccgtcgtgtgcatccgtccgcgagcccacttccccgagaggaatggggtcggatcagaatgagctctagggcctcggcggcgaggatcaaactcccgggcgtcgaagtcagctgagccggggaaagaggacgagccgggctagatatacctgcagccccctttggttcgcggagtgcggaccgcgtggggacgagaactctagccagagtctcctccgcctcattcaggggtacctgcacttccgccagcaccccgcagggcgccagggggatgggggatgattttattagtttggatgcatgtggccagagatgaacccatagctccctcggatcccttctgttcctgagaagtagagagtgcgccgatgtaattct

SEQ ID NO: 36891 - DNA, 29 bp, Homo sapiens
  chr1:226737804-226737833
  hyper
cgtgcccctgtcggcgagcctgttgccaa

SEQ ID NO: 36892 - DNA, 153 bp, Homo sapiens
  chr1:226814280-226814433
  hyper
gctgagctcctgacccgtcttccttttcttcgggcaccttgtaatgcacccgaccgtccagaagggggcagcctctgcaggcggcgccaggctatttcagacgcctctgtaggcggccctcttgatctcactccagcacgtgttctcagaaag

SEQ ID NO: 36893 - DNA, 30 bp, Homo sapiens
  chr1:226890913-226890943
  hyper
aatcctatcccctacgcaggagaaagaccg

SEQ ID NO: 36894 - DNA, 94 bp, Homo sapiens
  chr1:226924735-226924829
  hyper
gcacgttctgcaactcgcgctgcaagatccgcagcttcctcttggcctcctccggccctggcggggagagggtaccggctgccaccacctgctg

SEQ ID NO: 36895 - DNA, 2121 bp, Homo sapiens
  chr1:226924900-226927021
  hyper
cgctgctactattcagcctgcgccggccgctccgccagcccccggggctccggggctcctcgggggacagcgactcggctggggggaagaggaaagaggcgcctctcccggggctgaaaacgctgccggggctcagcactgccctcctcgggggcgggggcgtctcgctgccactgggccccgggccgccgccgctcttcatctcgttggcgctattcatgatcaccaggctattgagcgcatagcagtacacagccatagtactgggtcccgcgctgcccgccgccgcggctcccgctcctgctccgccgccggcgcctcctcctcccggcgctcccggctcagccccggaggcccggcagccgcggctccgcgcgcagatggggcggcatggcctgggcagcgggctgggggcacgaccgcgggctcagcccccgcccaaagctccataaacaaccgtgcggctgtggagatacaaggagaaaagtcaggaccctggagggcgcgcggggggagttgggggtcgcctgcagaacccagagagagccccgggaacacaatctatccgggacccagcgccaccggacatctcacctatggggacggcgaggctcggcgagggcatgccccggctgcctcggtcgccagcgcggtttcgggtgtgcttccccgccccccacctcgccccaggctgcgatgcgctttatgaggtcccttcaaatcccaatcctaatactcgtctcgcggaccggcgagaagcgaggtccaagtccttggctcctaagtatgctgtgtgcggggcgcggctgactcagctctcccgggctgaggacaccccagccaccgtctccgggtctccccagcctgagcaaacattggctatccagggcaacccggcagccctcgccctgggcttcagggtctccctgctccaccctctcggggcatcagagaccgaccggctcggagggaacctaagcgggacctgccttgcccgagccgctgccagcgcccggatctgggagggcgcccgcgtgcccgccgtttaccttcctgaccctagccttggggctgtgtctctcggcctacgaaggcctgggcgggcagcggggccgcagccgaagcatttttcagggctagccttgtcgcctatccctagacaagtgttttgtgagtgtgggcgcaccgaggttctacacgttctctttaccggaaccagtacttgctgcccccctgccgtcgtcccctatgggggggtgtctgtgagtgtgtgtgtatacacgcgtgtgtgtatacgccgcacgcgcgcggagcgagtccgctctcagcgcgccctgttgccgaggacgcgactgcccctgcgggctcccggacccgcgcccactcggaggaacttaggggcgtgcatggctgcagccgggcagcagccctaggtgcacagagcctctagctctgcaaacctcccaggagccggcgctctaacaccccagggcagcgccgcggagcgcagggcttctccgcatcccgggcagcctcgcccggcgccagcagagccgccccgagaccccagcctggggactcctggagcgcgctgagggaggcggcgcggagtgagcggcccggaaggcgggtaggagaaatgcggagacctcgtctctccctattttctccccaccgccactccatgtcaccctccaaaatcaaacccccttccctgcctccccagcccacccctttgccctgtttcggaaccaggaacgccgagattcgctccagagcagaaagtgagggaaaagagggttgttcagaggcgagagccattaaaaggccgccaaacttacctgcagtttctcagattctcaggtcctgtgtagactacatgcccagaggcgcaaacctcgtagggacgagatggctttaaaagtaaaaatgctcagaaattattttctcacaagctatggaagacaaaaaagaggagtgcgaaagaggggggaaagctcttcggttcaggggcccggcgatcccggcagtggcgacgccaagccggccctgcacgcccttttcgaccgtggagatactgcccctgtcagtgtctgctccgggctacttcagtgtttgttc

SEQ ID NO: 36896 - DNA, 30 bp, Homo sapiens; identical to SEQ ID NO: 1171
  chr1:227016009-227016039
  hyper

SEQ ID NO: 36897 - DNA, 34 bp, Homo sapiens; identical to SEQ ID NO: 1172
  chr1:227058122-227058156
  hyper

SEQ ID NO: 36898 - DNA, 30 bp, Homo sapiens
  chr1:227058890-227058920
  hyper
gtgaggggcagggccgcaggctcaagccta

SEQ ID NO: 36899 - DNA, 495 bp, Homo sapiens
  chr1:227505516-227506011
  hyper
agtcttgcccggaggcggcttttcgtttctcctcccgaggtccttctttctttaaggctttgcagtcagtcctattttcaacggattccggtgaaaactcttcattttcctcccggcttcaccctagggcctgaccggcggcgcggccgggggtggaaggcgggctgcgggcggcactggcaccgggctccggagaagcggctacttggccgcccgagcccactccatgtcggtggtcgctcgtgggccgagccgcgccgcgccgcgccgggcagagagcccggtctccccgacacccgcaccgggccgccgcgccggaggctcccgacgccccaggcgggggggtgcttctctgaattcaaaggacacaagcagcagcagctgcggcggcggcgcgggcggctctggcagctacttctcccccttcttcacacccctgggctaagggcatctttccacagcgaggagggaggcggcccggcgcaggaggagggg

SEQ ID NO: 36900 - DNA, 716 bp, Homo sapiens
  chr1:227506042-227506758
  hyper
cggcagcccggctcccaaccactcccttcctctcccttccagccctcccccgccttccctctcctctcgcgctcgcgccctgggctcagcgaggctcctccagtcccgccgcacagaggcggaggcttgcggacgagtctggatccaatatggcggcctggccccccggccccggcacacgcgcgcgcacacgccctccactccccgcccccgccctgcccgagcctcagccccagccggcggccaagccgggcggggtccggccggcgcgcccagcggaggcccccaagggggcgcgggctcggggcccgagtggctgcgccagcccgaggggaggggtgtggactgcctaggcggcgaggctgcggctgccgcagcgtggaatgcggagctgcgggagggctgagggaggcccgggcggcggtggcggagcatatggaggcgggatgaccgggccgcgccgggagctgcggcgggactgggcgcaggctgggaactgcgccaccgccgcgccgtggccccggctccccgaggcttctggtgcagatcgcgaaggggggctcctgctcgtcctcggagacatcacctgtctggcgcgtttgttaagggcgcccagaagcagagggctttaggcttccgacagagctggaggagacggtgcctttcagccccttacctgctccccaccggccccccagattcggttcgcgcacact

SEQ ID NO: 36901 - DNA, 206 bp, Homo sapiens; identical to SEQ ID NO: 1175
  chr1:227652538-227652744
  hyper

SEQ ID NO: 36902 - DNA, 253 bp, Homo sapiens
  chr1:227729829-227730082
  hyper
cggggccgggccggcgagagaagggtccggggcacccagtgggctcggatctcgagcggtccccgtgacggccccgcgactgcgcgacttcccgctctagagagtttatggaccctgtcccaggagggctccgcagccgccagggaggtaccggagggaccgcggcgctgggagagggtggcgccaggcggccctggagccctgggcgacgcggccgggccggccagagggcggagaagtccaaagcagcagc

SEQ ID NO: 36903 - DNA, 30 bp, Homo sapiens
  chr1:227916358-227916388
  hyper
tgagggcaaggctccggttcctgccctcac

SEQ ID NO: 36904 - DNA, 478 bp, Homo sapiens
  chr1:227975251-227975729
  hyper
atgagtgggaaggaatcagagcgcaggagggaggaggggggccccgcagagccgggccgggacaggcagggcgagcccagcagaagcgcggtcctgaggccgccggattccgatccaaggcccagagtgtccgcgacagagccgggcttcaccgaaagcacacgctcagcggccttcccggcgagcgcgcagccccagtgaacctatggctcagcattttcagaagaaagcctgtcggcatagactttccgtgatttcaaaggagacgcttccaaaaccaaggtcttgacctagatttggaagcgatccctccagagcttacatttggagaccggtagagaccgggcctgttgggacaacagctccgagggctacgctgcgtggactaggttccagacgcgctctgaggaggcgcctcccggctagttcctgagcgcgctcgagaggagcgtgccccgcaggtgcaggcgccgggact

SEQ ID NO: 36905 - DNA, 166 bp, Homo sapiens
  chr1:227976389-227976555
  hyper
gaggaaagaccaagggacccacgtccttcgcccccgccgcggagtcccgggccggcgagacttccgcagcctgcccagcgccggggacctagggctttgcaggagtccgcccgggagctctatcagagcgggcgtcctccccgccgctccaaaggtggcttggggc

SEQ ID NO: 36906 - DNA, 111 bp, Homo sapiens
  chr1:228074791-228074902
  hyper
aacattttttccgacgcagcccgcagcgattgtctccctcagaagcagcgctggggacgccctcctgggccgggcagggggcgggggactggggccggggctgcagccagc

SEQ ID NO: 36907 - DNA, 630 bp, Homo sapiens; identical to SEQ ID NO: 1176
  chr1:228134673-228135303
  hyper

SEQ ID NO: 36908 - DNA, 388 bp, Homo sapiens; identical to SEQ ID NO: 1177
  chr1:228135362-228135750
  hyper

SEQ ID NO: 36909 - DNA, 372 bp, Homo sapiens
  chr1:228135899-228136271
  hyper
ggggcgaccacggcgggacggcattggggggccggaggcgggcatcgggaagcgggtagagcgttgggggcgctgcagtgggagcttggggcggcccccggggcgggattgagggggaggggaggggaggcgttggccgccgggctagccgccggcggggctccaggccgggacggtcggggatggttccacagaggacccagccgtctgccccgagctgggcgctgcgcggctgctccgggggaagcttggtgaggaggagtcgggccagccggtgatgcctgcgcctcttgcgcatgctgaccccctcaaggagcggggccagagaatcgctcctttctggcagggactgtggccgctttcggcctggga

SEQ ID NO: 36910 - DNA, 32 bp, Homo sapiens
  chr1:228193570-228193602
  hyper
gcaggaggaccagccgcgatgggagagtgcct

SEQ ID NO: 36911 - DNA, 1707 bp, Homo sapiens
  chr1:228194869-228196576
  hyper
agcaggctctgggcagctacccgatctggtggtgagtgagcctcctcgcgttcgcccctgcccctgtgcgccgcgcccgcagcagacggtcccctcgggcagggaccccgcggtggcccgagcccgcgcccttctgctccagccccgcgtgcgggccgcgggcggttggttttccttgacggccactttggacctgttcaggccgctgggacgcgtgggtggcggagtttccggagacattgattcccgagcgggggagtaggggaggttgcggaggtcctagctgcccctggcgtcggacagggcgagcagtgggctggggagaggctgaaagaaggtcggcacgcacggtcaccgaggggacaggcagctcgaggccaggggacaggcgagggaagagggccagcgagagagaattcgccggagactttcctcaaaaaccgtatcttacacacaaacacacacacacgttttaaaacaaagtcgatgagacaagactgaacagctcggagcagcgtggttacgtaaagaaagctgggacccggcggggagtggcgcagagccggcggcggggcgcactgggggccggccctgggccccgcgcgcctccccgccgcagtccgggcacgggggtttccaggggccctctctgcgagccctccgcatgggtccacctggcaatgaggggctgctgtagagagagttaagggtgagttaagcacggggtgtgaggggctccaggaccctcaatcagaaagcgctgtgctgcgccctccacaccagaaaaggcgcgttccgtgagaccctccccagcctggcgatggaagtgcagataaaccaaaggaagggtcccgaaaggtctctctcaggcctcccacctccactgcacatatcctgtgggagggggaacggtggccacactttcgccagggcttgtgatccctcagagccctcaccaagcaaggatcaccccagttccgaattaagggcgctctgagatgcccaagattgaggaacacaagtgggaggaatgtgggcgcgcagggccgggcgcagcgctggtaggacccacagttggagagaagcctccccacaagcatgcacactcccccccatccttctccgacggcagcctggaattataataattacgccgaggggaaggggggagacccagcgagccgaggtacatctaatccgataataatttttctcttcgagatggttcaggagcgggggctcccgcggtaggggcgccgggccaggagcagcggggaggggaaggggcagccctaggcagctgaagggcctggaagaggccacgaggccgcggggacgcgcttcggggacccccgcgcgcccctatttccgcgtgccccatttcccgtgcggcacctgctgcgcccagtggcccacctgagggtcaggctcggggctcgccttggggtgcggggatactgacgcgcgtccagacggccgcagggagccaggggcagcgcgtccgtccgagagagccccgagggctgccggcttacgcaccaggcttctaattagaacccgccgccgcgttcctgagcgcaaaaggaagctccttcgccccgcgcccttcccataaatgtcgccagcctcctggcaaccccgcgccctaggatctttgtcttgtcggccctgagggttcctagcctcggtccccatccacctcatatg

SEQ ID NO: 36912 - DNA, 581 bp, Homo sapiens; identical to SEQ ID NO: 1181
  chr1:228225421-228226002
  hyper

SEQ ID NO: 36913 - DNA, 30 bp, Homo sapiens
  chr1:228238538-228238568
  hyper
tctcgggagttcgccgacgcccgggagaac

SEQ ID NO: 36914 - DNA, 30 bp, Homo sapiens
  chr1:228270749-228270779
  hyper
ccccgcccgtcgcccggaagtccgcttgga

SEQ ID NO: 36915 - DNA, 30 bp, Homo sapiens
  chr1:228290318-228290348
  hyper
cgcgccccccaccccggggagttacctcct

SEQ ID NO: 36916 - DNA, 31 bp, Homo sapiens; identical to SEQ ID NO: 1182
  chr1:228444739-228444770
  hyper

SEQ ID NO: 36917 - DNA, 584 bp, Homo sapiens; identical to SEQ ID NO: 1183
  chr1:228463164-228463748
  hyper

SEQ ID NO: 36918 - DNA, 266 bp, Homo sapiens
  chr1:228566259-228566525
  hyper
ttgccttccccacacccctcccgccgctgggccacgtgctgagcctatgtccgtcccaggggccggccctgcgcgtccagctgcctgcagtgcccgtggctaacagaggagggcccggcctgttcgcggcccgcgcccgtgaccttccctaccgcgcggctgcgcgtcttcgtgcgcaatcgcgagaagagacgcgcgctgctgtacaagaggcacaacctggcccaggtgcgctgagggtcgccccggccacacccttggtctcc

SEQ ID NO: 36919 - DNA, 471 bp, Homo sapiens
  chr1:228566547-228567018
  hyper
cgccaataaaaacgcacagccgggcgagaagtcttccgtctcgttgcattattttcttttggggaggagagggagtgagggctctgtccccgcctttctggctggggcgccgatcaggctgccccgctgtgtttgggcctgtgagccccttagaaggcgtccttaggggtcgctccctcactccgatgctccgcgcgttcagcccctcggggcgtctccgtcctcacacccatgcgcgtttattccacccgccgtgcgccttcctctcttccatcacgctgacctgcagccccgcagcccgctttctccgccgtcgggccagccgcttgtttccacaacttctctgccccgggaagagttcttgggcaaagcgtgcaagcgagggcgagaagccgcgggccacgatccgctggaggagaggaggcttcagagtcgctggcgcgtggcctcggtgaaaagcaacccagtgtt

SEQ ID NO: 36920 - DNA, 30 bp, Homo sapiens
  chr1:228593607-228593637
  hyper
cagggtctcattggcggccatggtcccagc

SEQ ID NO: 36921 - DNA, 374 bp, Homo sapiens; identical to SEQ ID NO: 1184
  chr1:228633575-228633949
  hyper

SEQ ID NO: 36922 - DNA, 164 bp, Homo sapiens; identical to SEQ ID NO: 1185
  chr1:228633983-228634147
  hyper

SEQ ID NO: 36923 - DNA, 387 bp, Homo sapiens; identical to SEQ ID NO: 1186
  chr1:228644856-228645243
  hyper

SEQ ID NO: 36924 - DNA, 601 bp, Homo sapiens; identical to SEQ ID NO: 1187
  chr1:228645305-228645906
  hyper

SEQ ID NO: 36925 - DNA, 121 bp, Homo sapiens; identical to SEQ ID NO: 1188
  chr1:228646025-228646146
  hyper

SEQ ID NO: 36926 - DNA, 361 bp, Homo sapiens; identical to SEQ ID NO: 1189
  chr1:228646205-228646566
  hyper

SEQ ID NO: 36927 - DNA, 459 bp, Homo sapiens
  chr1:228646865-228647324
  hyper
atgtcttttataagcaagtggtgcattcctggatgttgagcgcttgcgcccggttcaggaccgggtccaaatgaggttggcgtgcgccgtgcaggtgaggagtgcgggtcacctccccccaaaagaccctgtgccaacctccccaaccctacccgccccccatgggcgaggccagacgtggcgcaagaccacgggctctgaggccatgggtgttgtcactttcccctggcggtggtgcctggctctgcatttgcttaagacttttccatccctgcctggaccagacagacatgtttagatttaagcaatgaacattccgggaggatattttcctggcaggataccgcgatggcaggatgtttgataccgaatcgaagcacggcgtcaaagcagcgtcctgcgcgggggagccggatgtaataagcgaccccagctgccggtaactttaacccttatggg

SEQ ID NO: 36928 - DNA, 563 bp, Homo sapiens
  chr1:228651338-228651901
  hyper
ttcaagcaggaaggcgtggcataaagagctgcttaggcgcaacgctgctgaaatggttttggctagaagctcacagtgtctagttgtggctaaggagggaggaaaggggcgggagaagaacggacccaagcgcctccgcccagacggcgcgataaccccctcacctccaaccccggacctcagtgagcacgtcctccagtctcagccgccaggaggcactgggggcggggacgtggcacaagatcttcccggaggtgacccacgctcctcgcgcgcagggcgtaagccacacacagatctttggatgggatccatggcgcaatcgcctgtactgccccctctctgactttgcctgtggccaacacaagacgaacgcagcctttctaagggaaatatgccgttacaaacaagaagcctaattttgtctctaagacttgcgcccccacggctcagtctactttccctcattactccaattgaatcacaggtcacaaccagaccaggtggcacgctccttttggagcttggaggtggctctgaaaagagcctttgggttcggggcg

SEQ ID NO: 36929 - DNA, 241 bp, Homo sapiens; identical to SEQ ID NO: 1192
  chr1:228652211-228652452
  hyper

SEQ ID NO: 36930 - DNA, 88 bp, Homo sapiens
  chr1:228652508-228652596
  hyper
cgcgccggagctgaggttgcgcatctttgttcaaagcctttgttttaaacctggagatttttgtgtctgcagcggatctggaggtagc

SEQ ID NO: 36931 - DNA, 30 bp, Homo sapiens
  chr1:228674951-228674981
  hyper
tctgtggagcgcagcgcggccaggacctcc

SEQ ID NO: 36932 - DNA, 516 bp, Homo sapiens; identical to SEQ ID NO: 1193
  chr1:228783523-228784039
  hyper

SEQ ID NO: 36933 - DNA, 1406 bp, Homo sapiens
  chr1:228870692-228872098
  hyper
atgagaaaaaatcacacgatcagctgcagttagacttaaggaaaaaagctgtctgttaattcaatctcattcgcaggacaggcctccaggacacttcatttttccccctgggtggagccgtggccagccgggggctccacggagtgaataggaggcggctcaggcttcctggctcgcgtgggcgccagaaagcggaacctcccgggccagtcgcgcggtggtcaccctcttgggagctggggaggaggctgcggaggctggcccggctccttcgggcgtcgcttcccggaccgggtgcgcggggtcccccggaacgtgtgttccaggtcctcccgcgccagtgttcgcagtccccgcctggtcgcggcggcgcctcgggcgcgggtgcaggcgcgcggcgcgcaggcggggggcgctgtggtcttggcgcggggaccgagccgctcggccagacccgcctcttttccctccccgccagcccgcccgcctgcccgccccccacgcgtcgtgtcgccgggaagccgggcggagacagagcgcttgggatccacggcgctcggaccgctgtcctccaacagcgcagggcagagcggctggcgccgccggagcgcggagccacgaccctccctggccgcctttgtctactggccgtgcggcccggaaccgccactctccagggccggggacgcgcccgcagctgtcggtgacagctcctccctaccgcaaccctccggggcggaggggcggtcgggccgggccctgctagcccgcgaccgcaagcccgcgctcgcggatcgatgcccccgcagcagggggaccccgcgttccccgaccgctgcgaggcgcctccggtgccgccgcgtcgggagcgcggtggacgcgggggacgcgggcctggggagccggggggccgggggcgtgcggggggtgccgaggggcgcggcgtcaagtgcgtgctggtcggcgacggcgcggtgggcaagacgagcctggtggtgagctacaccaccaacggctaccccaccgagtacatccctactgccttcgacaacttctccggtgagctggccggggggccggggccgggggcgcgtggccgcggtccacccaggggaaggaaggtggcgcgagggtcgcgaggttcccaagggggctgcagggccccgggcgcggctccagctgggaagccggacaaatgaggagtgcaggacgtttcctgagtctcagggaccgggcaagcgcggagctaacacgaaaggaccacggcggagtgggcttggagagaggagggcggagcggcagtcagagccttgccaaaaaaaaaaaaaaaaaaaatctcacaatttaagcaacagataagtaggagtgaaacaggttgagttcagggtgcccggtcagtttgttgc

SEQ ID NO: 36934 - DNA, 30 bp, Homo sapiens
  chr1:229406919-229406949
  hyper
gagtccggctgggccgcagccgctgggaga

SEQ ID NO: 36935 - DNA, 30 bp, Homo sapiens
  chr1:229478602-229478632
  hyper
ggggtctccggaggcgtcccctgagctagg

SEQ ID NO: 36936 - DNA, 100 bp, Homo sapiens; identical to SEQ ID NO: 1195
  chr1:229542852-229542952
  hyper

SEQ ID NO: 36937 - DNA, 350 bp, Homo sapiens
  chr1:229543220-229543570
  hyper
cgagagggagctctggtccccgaggggctgtcccgggagggagcgaggtggggagggggagcaggccctgccccgagcaccccgcggactgagcgtctggcgtgcacggcggaggggttaccgcggggaggtgacaccccagggtggtgagggcacgcagatgaggctggcctgaggggtgcctgctttggggaaagcagtctgtggagggagggaaggagggcgatcgcggccccacgcgggttgtgctgctgaggctccgcgccgcaggaaaggcaccctagccggattcgccctcggacgccccagctgggcacactcacgcggctctcccgcggcttctcgggaat

SEQ ID NO: 36938 - DNA, 30 bp, Homo sapiens
  chr1:229566754-229566784
  hyper
gaagaaagctgcctcgccacaccccagagg

SEQ ID NO: 36939 - DNA, 30 bp, Homo sapiens
  chr1:229567124-229567154
  hyper
tacgatggcagcaacggaagttgttacaaa

SEQ ID NO: 36940 - DNA, 216 bp, Homo sapiens
  chr1:229567776-229567992
  hyper
ggaagcgctcgttgccgatggtgatgacctgcccgtctggcagctcgtagctcttttccagggaggaggaggaggcggccgtcgccatctcgttctcgaagtccagggccacgtagcacagcttctccttgatgtcgcgcacgatctcgcgctcagctgcggagggcagaagcaggagaggagccctcactcaggggccgccgccggccctcccgc

SEQ ID NO: 36941 - DNA, 569 bp, Homo sapiens
  chr1:229569734-229570303
  hyper
ccaactcctgccctacctgggcgggtagctacaactgctactctcggctcgggccctggtcgccgcggaggggaagcgaggcttcacttggcgctgtccgctgcggtggccgcttgtccctctgctcaggttttatatagcccgcgggcattccctccgcgccaccccgcaggaatgtcgctgcccttctcgagccatatttgggtgttgggcactagagccccctccctcggccggttcgcggcctgggcccccgcccgggtcccctgcgttgaccaaagaaggagcgggttggcccggtcccaggtaacgcgggccgggccgtatatggagtgtctccctagcgggtttgcccctcctgacccgacccagttgcccgccggaggggatggggtggggcgagggtcaccgcgttcgccggtgggtgcatgtgtgcgcctgcgctccgggaaccgcacctgtcccaaaggcctccccaaccatgtccactctgagcgccctgggcgctcgggaaggtgcctgactgctgacttccaatatttcaactcctcttcgggttctttgctcag

SEQ ID NO: 36942 - DNA, 30 bp, Homo sapiens; identical to SEQ ID NO: 1199
  chr1:229643802-229643832
  hyper

SEQ ID NO: 36943 - DNA, 30 bp, Homo sapiens
  chr1:229694769-229694799
  hyper
gcctgcgtactgggcgcagggaactttttc

SEQ ID NO: 36944 - DNA, 30 bp, Homo sapiens
  chr1:229762133-229762163
  hyper
gggcagccaggtcccgaggtgagtcccccc

SEQ ID NO: 36945 - DNA, 220 bp, Homo sapiens; identical to SEQ ID NO: 1200
  chr1:230223229-230223449
  hyper

SEQ ID NO: 36946 - DNA, 30 bp, Homo sapiens
  chr1:230240616-230240646
  hyper
aatgccacacaggacgcttgcagtcccccc

SEQ ID NO: 36947 - DNA, 31 bp, Homo sapiens; identical to SEQ ID NO: 1201
  chr1:230468967-230468998
  hyper

SEQ ID NO: 36948 - DNA, 1398 bp, Homo sapiens
  chr1:230561208-230562606
  hyper
agcctcatttgtttccggagagacacccacaagccagcccacggagagtctggactcgcccgccccagcacccacgcctcccccgcgcccggttccagcgccgcccccgacatccacccgcgggcagccccttaccgccggtatcctcgaagcgcgggggcgggcggtcccgcagcgctgcgctccagcccgcgccggcctcgtcctcctccggctcctgtgcgtccggggcgcggggcggtggcggggcggcccctgggggtcccgggggctcgcgctcgtcgtccgaggaggcggccgaggaggagcgcgaggcggccgaggtgctgtagaaggggttcccgccgctgtccgggccggactcgccgaacacgtcgtccgagatgtgcaggctctcgtagcgcgcgcgggcagcctcgagcagcgccggcgccctcctccgcgcgcccccgccgccctcggccatggccccggccgccgcccgcgcgcccgcccccacagtgcctcccagccgcacacgccgggccctgggcccgcgccgcggcccgccgccccccaccagcgcagcccgcagcacagcgcccgccgccccgtgcccggccggcccgccgtcttggccgcctcgggcccagcgcccggggaagcgccctcggagctcgggcgccgcaggctgcgggccgcggcgggaggcgagccgcgcgcggggctggcaggggcgacccagagcgggcgggacgcagaggctgcggccgagaccaggcgccgccgccgccaccgccgccaccaccgccaccaccgccgccgctgcgtctcctcggcgcccgccgcctccctgcccgccctctccacggcctccggcgctcggctgccgaccttcccgggcgcgagccgccagaggcgggccctgccgcccctcacctcccgcccgccggccaatggggagcccggcccggacagccgcgggggagctgggcgggcccggcgcggggaacgcccccaccctcctccgcggggcggggcggggcgcgcggccggggctggcggttagggggagggccgccggcggcagtgccggtctcctcctacagggacgcgcagcccgggaccgccacgcgcagcgcgggagggggagggcgggaccggggaacaggaggggagggggacccgggtgcttccagcggtccgggcccgcggacggagtgcgggccgatcccgctcactgtccccttccgcagtccgcgtgcagctccagggagctgtccgccccggtggttctgaaccaggcgccgccgaaacgctccaggtaggcggcgggcccgaggtcaccacacccgcggcggcggctgctgccgaggtttcctgggggtcactgccagctgcgccgcatgctcccataaa

SEQ ID NO: 36949 - DNA, 30 bp, Homo sapiens
  chr1:231004164-231004194
  hyper
aagtgaagcgctttcgctcccggtcgtcca

SEQ ID NO: 36950 - DNA, 30 bp, Homo sapiens
  chr1:231004626-231004656
  hyper
ttcccggtagtgaccgccatagcgccacgt

SEQ ID NO: 36951 - DNA, 31 bp, Homo sapiens; identical to SEQ ID NO: 1205
  chr1:231053307-231053338
  hyper

SEQ ID NO: 36952 - DNA, 30 bp, Homo sapiens
  chr1:231114788-231114818
  hyper
ggtctggcgtctgacgtcttaccctccaca

SEQ ID NO: 36953 - DNA, 584 bp, Homo sapiens
  chr1:231175064-231175648
  hyper
cggggctgagggacccggccgcctccctcgcccggggtgcgcgtctgctttcgcagccatctgtgcgccggggccatcccgcggtaatcggatcacggacgcgcggcctggggcgccggaaagggggccgggctgttccaatctgctgtctacactggcggcggacaaaagttgtcctcttcgtggtaggaaaacgcaatcgcgttaatccgttgggccgctgtgaaagcctttcccccaccgggaaggtctgtttcactcggggagaggtgacaaggccgcccccgcccccaggccaggcacgaaccccgcacagcgcttccgggcgcccaggtttccgagccagcggggccggactgagggcgccgggcataagaaagccgccctctgcgcgcggggctctcccgcgggggttccaatcgtgggcacggagcacgcgagaaaaatgggggtcgttgggaggacggcgccggcgcctggggcggaggagcccgaaagggcgggtgggcgcggggacttccggacagagcgcggtccccgcgaactttcccgggacggcgagcccggccgggaagagccccagc

SEQ ID NO: 36954 - DNA, 707 bp, Homo sapiens
  chr1:231175692-231176399
  hyper
cggcgtccaggttgggaggcttggcgggcagcgctgccgcccgggccccgccgccgcccgggcccccgcggctcagctcgtcctggatgcgcgacttctgcgcgtacagccgctccaggtgccgccagcccccagacgcgccgccgcccgacgccgagtgcagcagcccgctcaagctctttggcagcgggggcagcccgtccacccgcagcccccggaccgcgccgttgcccgcggccccgggcgccgcccgggccccactcatcgcgccgcggcccggccacgcgcctgccccgctgcagcgaaccaaggctttcccccggcccgcccccttcccggcggtgccccgcccacttcccctcccgcgccacgcccccccggccccgccccctctcctcgaggcccctgcgcgggccccgggtccgggtggcgtccgcgtccagcagccgggctcgcctccacccgggtctcctcctccctcgcgcccctccagcgccctaattcatctccaactccgcgtgactaccctctaaccccccgactcacctccagccccgtcacgaacccttctgtgccactccctagctccgaacctactaagccccccgcgacccgcagcttcccggttcacccccatctctgtccccacctcctctgaaccacctcccagcttcccggctcacccctagctccgaaccctctcaccc

SEQ ID NO: 36955 - DNA, 1824 bp, Homo sapiens
  chr1:231296883-231298707
  hyper
cttcaatattcatatcgttgttaaataaacgatttcctaatttgtatctgtttcatgccagcgtgaaacttctgtaggcagagccggctgcgctgccagcactttcttctgctcgtccccacccacctctgcctcccccacccagccttccctcggcagcagcggggaagaacagccgagcagaccaaacagccggggccgcgggtgggaggctgttcccgcagctcgtggctggcgttggagaatgtggagattttcccattcataaaaggaacgtctccgcttgccgccttcccgtccgccgcacaccgccacatccgcagcggggtagggctgggtctgggggcgctgggttcccaggggtctacccgggcgcgctctcgcctttctcaggaaaccccattttgtgagcggcaccgcgtgtcctctctcagtccgtgcacacagttgacctggagcgcggatgagcacccttggttgaaaggaagagacaaaatggcttgtggttcaattcataaataaaacctcacccttggacttcaggctgcccgacattttgggacttggatttttttgctttatcgtagttttaggaagcgactgtcaggccatgttgcctatccatttctaaacgactggctttttaggatcccgttttcacccttctatggcggtgggttgggggtggggtgtggaactggagtggcccagggagacgatggcaggggcggggcggggcaggtcgttgtactgattcaagatacaatctccatccaaataatggattgttattaacaatgatcctccctgcaaaacccttaaaattgccccttgattccctagcagcaagaggcgagcccttattcgctgagctgaagcctcctcccccctcctccccattactctctgctctggaaattacaactcctcggcgcgccgcgcggggaggcagcggcagcggcgggagggaggcggggaggggattcccgagccagccggacgctcgccctccgcccgccggctgcagcgtcgcgcggcccaaggtcagaggcgccgcaggagcagcagctgggaaccagggaagcgggtcaatcccggccgcagggagaaagccccagggcgcagtcagccggcgtccacagccgcccaggagtagggtgagcggctgtctccgggccggtcgggtcccgccgaggtggccgcggccccagcgacccggcgggtggcggcccaggggtcggcgagcaggcagctggagccccaccttcggctcccgggcgctgtccgccgcctcgtggtgctgatcccagccccacggctgagcggccttcgcacctgcctgtctcacctcgctatcaccccgataaggagttgggccggggcagaaggggggcctcggggtagccgcccaccggagccaggggctgaagcagcgagcgcacagcagcccggccgctggtcctggggtggagaggaggcgcgcgctgcagccggcggcggcgctggtgctgattcatcacctaaagctcctcgcaggccaccgcgagggcagccgaccggctccggaatctggccgcaggttgaagccgctggtgcgggaccctcgggcaggaggtgaggaccccctcccttctctcgcccctcaatcatcttagggcggtggctacaggacagagagaggggcgtgcccctcggctgtgaagtgggcatgcccgtgtgatgcccccgcccgtcgtctcaccggggcgcaccgcgctggtcctcctccgccagtctcccgagctccggccattcatccccagcgcagagcagcgctggcagccg

SEQ ID NO: 36956 - DNA, 210 bp, Homo sapiens
  chr1:231298924-231299134
  hyper
cgctgcggctggcccggcctgcggcggtgcaggcgggagtgcagctggcggcctcggcggcggtgcgggaggtggcggagaccacgcggacaagctcagcttgtacagcgagacagacagcggctacgggtcctacaccccgagcctcaagtcccccaacggggttcgcgtgctgcccatggtgcccgcaccacccggctcctcggctgc

SEQ ID NO: 36957 - DNA, 30 bp, Homo sapiens
  chr1:231376706-231376736
  hyper
acacaggagacccacgttcctcaaatctgt

SEQ ID NO: 36958 - DNA, 30 bp, Homo sapiens
  chr1:231377088-231377118
  hyper
agaatcccagaccccgcccgggaaggcagc

SEQ ID NO: 36959 - DNA, 30 bp, Homo sapiens
  chr1:231473776-231473806
  hyper
tgaaccgagcgtgacgttgaggtttgaaat

SEQ ID NO: 36960 - DNA, 30 bp, Homo sapiens; identical to SEQ ID NO: 1208
  chr1:231557900-231557930
  hyper

SEQ ID NO: 36961 - DNA, 30 bp, Homo sapiens
  chr1:231663871-231663901
  hyper
tccactgattgactcgcatatttccatcac

SEQ ID NO: 36962 - DNA, 76 bp, Homo sapiens; identical to SEQ ID NO: 1209
  chr1:231664199-231664275
  hyper

SEQ ID NO: 36963 - DNA, 30 bp, Homo sapiens
  chr1:231664576-231664606
  hyper
cgtccttaacaacacggggcgttatttatc

SEQ ID NO: 36964 - DNA, 109 bp, Homo sapiens
  chr1:231763011-231763120
  hyper
ttggggtttggatccgtccccgtcctgggacacctgcgccgcctgcactctcgttgcggtgcgccccagcctgcgccccctcgggacaggggacgtcccgcccgcctta

SEQ ID NO: 36965 - DNA, 511 bp, Homo sapiens
  chr1:232765025-232765536
  hyper
ctaccctcactgacacgggaagacccggagaggcccaggagctggcaaagtgggaagaaaggtcgcggtgagtgagaagagcgctcgccggaggctcccggtcttacaaagagggatccgtcccggtgagggcgcgcgctccgggcgcaccccctctagaaggggaattagccccgcagcaagttcggcgtcagctggccaggcgcgccggggaagctgcgtcgggcaaccgcgagcccttccagagagcgttagtcagagcgaagttctgggcacctggagaagaccctcctcagtgcctgtgtcgccgagacgggaataacctttcagccgatcgataacttggagagaacaggcggcggcggctcctcttccagccggggatcgggagcgcgggcgcatctgcgtctacaagccggaccctgcgccgcgaccctcgcacccccgcgcccctcgcacccctcgccgccgtcagccccccaaagcgccccgaagggcatccccttcccct

SEQ ID NO: 36966 - DNA, 441 bp, Homo sapiens
  chr1:232765595-232766036
  hyper
cggattccccgacacgaaccttcgcaacgccgtccgccggaacctgctacagcctgtgcgcgccgggcggcgcgtacccgggctgccgcctcgccgcccgccgctgcccggggctgcccatcggcccggactctccccgcgccgggctccggcggaggcggcccggacccgctggctgcggctggagctctcggcctgcgctcgggcggccggcgggggcgcggtgctcctcctccgtcctcctcctcctctcgctccgccagctcctcccgggctcccagtctgccgcgccggctcccgatgccaccgcccgcccgcccagcggcaccgccccccgcccgctctgcgggctcccattggtcgctgcctgcaggccccctcggccccgccccacgattgggcgcggacgccgtcagtctcaccgtccgcccggctccgggc

SEQ ID NO: 36967 - DNA, 107 bp, Homo sapiens
  chr1:232766239-232766346
  hyper
aataagttaaaaaccgcgagtctggttctgagccgccccctggcgcaggcgcgaccccacccggccctcccgtctcccaacttgggacagacgcggcggccgggcgg

SEQ ID NO: 36968 - DNA, 565 bp, Homo sapiens
  chr1:232941033-232941598
  hyper
caaaacccccaaagcagacaccgcccgagacccgctggagcgcttccgcaaatctcgcgagatagcaggcagcgatgccttttgctccggtttctcgtgagaccccggggcttcagcttctcgtttgcggagcccgcggcggcgtttcctggggcaacagcaatggcggcctcgctgtccgagcggctcttctcgctggagctgctggtggactgggtgcgtttggaagcccggctgctgccgtcccccgctgccgcagtggagcaggaggaggaagaggaggaaaaggagcagggggaggcctcgtcgccgcgcggtctgtgccccgccgtggccttccgcctgctggacttccccacgctgttggtttaccctcctgacggccccggcgctcccgccgccgaaccgtggcccggtgtcatccgcttcggtcgcggcaagtcctgcctcttccgcctgcagcctgctaccctgcactgccggctcctgcggaccccgcttgccaccttgctgctgcagctgccccctgggcgcccgacgcccaccccacagctcctgggggcct

SEQ ID NO: 36969 - DNA, 30 bp, Homo sapiens
  chr1:233086109-233086139
  hyper
agtttaataactgacgttctcacgcactta

SEQ ID NO: 36970 - DNA, 30 bp, Homo sapiens; identical to SEQ ID NO: 1213
  chr1:233143151-233143181
  hyper

SEQ ID NO: 36971 - DNA, 30 bp, Homo sapiens; identical to SEQ ID NO: 1214
  chr1:233463477-233463507
  hyper

SEQ ID NO: 36972 - DNA, 30 bp, Homo sapiens
  chr1:233464495-233464525
  hyper
ccgtgcagatagcgcggggcatgctctacc

SEQ ID NO: 36973 - DNA, 232 bp, Homo sapiens
  chr1:233749498-233749730
  hyper
ggagctggtggctgtcgggtcggggtctgggcgccaccgagcgcccgccccacctctggagtgcgcagaaggcggtgcgtcccgggccccggcagcccagcccaggcgctctggccaagtttgcgcgcggtctccgctgactctcgggttacctgagccggcaaccacgtcagcgccacatcatctgggctttttatattgcaaggaaacaggaaaagaaggaagaaaaaca

SEQ ID NO: 36974 - DNA, 791 bp, Homo sapiens
  chr1:233749768-233750559
  hyper
cggaggagcggggcgggcgggcgcgcgggggagcgggcggcgggcgggagccaggcccgggcgggggcgggggcggcggggccagaagaggcggcgggccgcgctccggccggtctgcggcgttggccttggcggcggcggtggagaagatgctgcagtccctggccggcagctcgtgcgtgcgcctggtggagcggcaccgctcggcctggtgcttcggcttcctggtgctgggctacttgctctacctggtcttcggcgcagtggtcttctcctcggtggagctgccctatgaggacctgctgcgccaggagctgcgcaagctgaagcgacgcttcttggaggagcacgagtgcctgtctgagcagcagctggagcagttcctgggccgggtgctggaggccagcaactacggcgtgtcggtgctcagcaacgcctcgggcaactggaactgggacttcacctccgcgctcttcttcgccagcaccgtgctctccaccacaggtagggtatcctgcgcgccccctggccgccccggccacctcgcccacaacccacacaccccggccccggcgccccgggcccctctaaccctcccaccccaccccccacctttcgccatcccggctcctccagcccgcctcccctcactgtcctcccgaccctccgaccttccccttactggcgtccccggcctctgcctgggtgactcgggagggcaagccctgcggagccggaagccagagaggtgactccagacgtgacttggttgttgccgtccgtaactctgg

SEQ ID NO: 36975 - DNA, 223 bp, Homo sapiens
  chr1:234040257-234040480
  hyper
gggagcggcagggtttgagtcaaaagagaagggtggaggagcgcgtccggtgccccaaggcttccaggcggagcgcgggcgcgaggtgcgggctccggggcggagcgcacgcccgggaggcgggaagtgggcagcagcgcccccgcctggcccctgtgcgccccgacccgacgcctccccgcccgaccaggtgcctcgagagcgcacagctgggagggctctc

SEQ ID NO: 36976 - DNA, 212 bp, Homo sapiens; identical to SEQ ID NO: 1219
  chr1:234041148-234041360
  hyper

SEQ ID NO: 36977 - DNA, 15 bp, Homo sapiens
  chr1:234041415-234041430
  hyper
cgggccggtggggct

SEQ ID NO: 36978 - DNA, 30 bp, Homo sapiens
  chr1:234261159-234261189
  hyper
gtccaaagcaaatcacgtggctgctcttga

SEQ ID NO: 36979 - DNA, 593 bp, Homo sapiens
  chr1:234349863-234350456
  hyper
ggaagacagggatgagggctgcggggctgggcgtcccggggaggagggcggagcaggtgagctgcggggtgggagcagggagtgcacttgtacgtgacgttggagtttgcagcaacctccaagtaggaggctgtgcgcgcgtgtgtgtggagtggctgcgcggccggggaggatgtgcgctgcagggcggccgccgcagtgagcaacgcggcaaccggagcccggcgggcagccggggaggccgggactgagaggggcgagccgctggtgctccccggcggcagagggccgcgtcggccacgggcccgggagagacgcgctccagccggccccaggatgtaggcgatcggcggcagcgctcctgcaggcggccggctcatcatgaagaagcactcggcccgggtggccccgctcagcgcctgcaacagtccggtcctgacccttaccaaagtggaaggtaatgcgcggccgcctcgccccgggggtccctgcaccctagccggggaatgctgccaccctgaggggggctgtctggctgcggggcgccggggctgggggtactgctcccccaggacgcggctccgcagtgcaga

SEQ ID NO: 36980 - DNA, 22 bp, Homo sapiens
  chr1:234350469-234350491
  hyper
cgtggggggatctggcagcttc

SEQ ID NO: 36981 - DNA, 30 bp, Homo sapiens; identical to SEQ ID NO: 1221
  chr1:234508998-234509028
  hyper

SEQ ID NO: 36982 - DNA, 30 bp, Homo sapiens
  chr1:234509292-234509322
  hyper
agagcttgagccagcggggcgaccctgcag

SEQ ID NO: 36983 - DNA, 30 bp, Homo sapiens
  chr1:234613475-234613505
  hyper
gatggcctctatgacgcttaattctaacac

SEQ ID NO: 36984 - DNA, 30 bp, Homo sapiens
  chr1:234614952-234614982
  hyper
cggagccgggcgcgcggccgcagagagggg

SEQ ID NO: 36985 - DNA, 80 bp, Homo sapiens
  chr1:234736358-234736438
  hyper
gataatggggtccggcggcccccttgatgcatgaattgcacgctgggcataatgaacttattgtgcgaaagcactttgga

SEQ ID NO: 36986 - DNA, 139 bp, Homo sapiens
  chr1:234743047-234743186
  hyper
gcaagggaagcagaacttgtgcgaagggacggacgggcactgcacaaaatgggtgtcctccagccgctcgtggcagagggtgcagcacagcggggcactggttgccagagaggagtccgggaggctggcagggtgcact

SEQ ID NO: 36987 - DNA, 30 bp, Homo sapiens
  chr1:234744131-234744161
  hyper
cttcctctgctctccgtccccttttctccc

SEQ ID NO: 36988 - DNA, 30 bp, Homo sapiens; identical to SEQ ID NO: 1222
  chr1:234745188-234745218
  hyper

SEQ ID NO: 36989 - DNA, 191 bp, Homo sapiens
  chr1:234812046-234812237
  hyper
ggctggaaattgcttcggggagagggtagagtggtgactggtgggaataaaggattctggatgggaagccccggaggaagccactgaccgcagtgcatgctgggggttgtagttctcgtgtactccacgggtaaacaagtcagagaagcaggcagaggaaccaactcagtaaaacccgagctatgtgagat

SEQ ID NO: 36990 - DNA, 142 bp, Homo sapiens; identical to SEQ ID NO: 1223
  chr1:234828213-234828355
  hyper

SEQ ID NO: 36991 - DNA, 30 bp, Homo sapiens
  chr1:235491348-235491378
  hyper
ccagaggacggcggcgatggaccctctgca

SEQ ID NO: 36992 - DNA, 30 bp, Homo sapiens
  chr1:235491612-235491642
  hyper
agttctttagaacccgcctatacactgttc

SEQ ID NO: 36993 - DNA, 69 bp, Homo sapiens
  chr1:235530665-235530734
  hyper
gtcgctgacattctcgtctatgctccagcagccgtacctcactccggtggaggcgggacttcctacagc

SEQ ID NO: 36994 - DNA, 30 bp, Homo sapiens; identical to SEQ ID NO: 1224
  chr1:235667931-235667961
  hyper

SEQ ID NO: 36995 - DNA, 1402 bp, Homo sapiens
  chr1:235811919-235813321
  hyper
gtccactgtgggaagcggcacacctcactcatgagcagacgacaggactggcacgttttaatggagcacacgggcgcagcctaggcggccttttgctccggctgagaggcacgggcccggtgccagcatttgacagtcctgggaggcgacgggtagaggagagacgcggcagccgcggggccggggagacggtgggaggcccggcgtccatcatccactttattacttgatcaaactttaacattttcgggtttcctaacaccttagccccaaatactcgaaatgaagcaaatcttaaattaaggagtctttccccaccacgctctgtcctcctccccacttcaccctcccgccgtttcgcgttatttccaaggcaatttaaaaaatcaagccaaacaaagctccccggttgctgccgggcgcgcgcggcgaacgaagcacatttcagttcagcaccagcctcggggacagacgccatcaaggaggtgaggaaaaccaccctcagctgcggtggctccagcgtcaccccgagtgctcccgaggcggcgtctgggctgctggggagccaggagggcttcctcaggcactcgccagaaacatttccccaaagaaaacgcccaaccagccacgccatctcctgccactgaggtccttttccacgggggacgtccccgctgggaaaacagcaaacgctctgtgacctacaaatggaagaggggacccccgagcccccgcctgcctcatgccggagggaccgggcgcccccagccccggaagcccctggacgcgctccgagggggctgtccacacccgcgcgcgggcttccccggggcccggcgggaggtcccgggagaggaggccgagggaaccacaggtctttgtgtcgcgtgcagcagcagctggcggcgtgaggaccacaccggcgccagagccgtctccctaggtccggagactttcaccccgagtttcccttccgcgtctggctgcaccgggctgggctctccccgcggacacccggggctccggccgggcgcccacttacccggagcgggatcacgcgcgggcttcgtctgcagcgcggtgctcgcggggggcggccaggccgagcggcatcgctccgcatcggggcgcgggccgggctcgggtgcaaacgcgcgcctcgtgcccctcccgccgcccgcggggtctccgcgtcccgtcaccggccccgccccgcgccgcgcctcccgccctgcagggcccgaccacgcgggcctgggggcgcaggcggaccctcccccggccctggacgctgggggcttctgctcggccccctgtgccgtgggggcccagactggggaagggagagccggcgactctgcgaccctcgcccccgttccacgctggccgcgcccactccgcc

SEQ ID NO: 36996 - DNA, 45 bp, Homo sapiens
  chr1:235814009-235814054
  hyper
ggttctaggagcgactgctctccaggcctcgtccctgtggcaccg

SEQ ID NO: 36997 - DNA, 146 bp, Homo sapiens
  chr1:236227597-236227743
  hyper
ctctggactctgaaacgagcccaactggaaagcagcatcactgccaagacacatccggagtccacacacaaatacaggaggctgccggcgaaactctcccgcagccacaagagtcccggggcccgcgcgcagactgcgatccagct

SEQ ID NO: 36998 - DNA, 151 bp, Homo sapiens; identical to SEQ ID NO: 1228
  chr1:236227769-236227920
  hyper

SEQ ID NO: 36999 - DNA, 602 bp, Homo sapiens; identical to SEQ ID NO: 1229
  chr1:236228021-236228623
  hyper

SEQ ID NO: 37000 - DNA, 40 bp, Homo sapiens
  chr1:236228705-236228745
  hyper
cgtggtcctctgattagggttgggtcgtggagagccggcg

SEQ ID NO: 37001 - DNA, 46 bp, Homo sapiens; identical to SEQ ID NO: 1230
  chr1:236305442-236305488
  hyper

SEQ ID NO: 37002 - DNA, 30 bp, Homo sapiens
  chr1:236305860-236305890
  hyper
ggctgcaggctgagcgcgatgcgcggagac

SEQ ID NO: 37003 - DNA, 710 bp, Homo sapiens
  chr1:236444197-236444907
  hyper
cacctctctgaaggcgaaaggatctggtcagctaagcctcagatttctagcacactgagaacacttgtaatcatcgcttcacatcaacaaccagccagcacctcacgactgccagagccagagcctccatccacgagccacaacgccccactcagacccccccagtctcgtattgggacttacctggcgatgccacttggcagacacagctcagctgggtaaaaataaagcaatcttgagcaagggaaggtgctcgaggaagagtaaaagcccagaaagctctagtccgacagttcgagtgaagtcttgccccctcccaatcccctgcgcctggcggggcctcgggggtctgcggagtgcccccaactctcagtctccctccctcactaactcctgaagggaaggacgtcaccgtttctctgggcgctcgctcccttcgcaagacagccgaggtggttcatgcccgtcccatctcccgccacactcccagccgcttaacacatccgagaggaaaaaacgaaaacagctcagggggaccgtcaccatcttcctcttttgactgccattacccggagtgtcgccgtccccccaccctgcgggcggttcgcagatgtttcccgcactggacggtcaggtctctgctccccgggttttctgctcgccagaaatcacctcttttctggcccggccctgcccggccctccccgcgt

SEQ ID NO: 37004 - DNA, 451 bp, Homo sapiens; identical to SEQ ID NO: 1233
  chr1:236445120-236445571
  hyper

SEQ ID NO: 37005 - DNA, 30 bp, Homo sapiens; identical to SEQ ID NO: 1234
  chr1:236445955-236445985
  hyper

SEQ ID NO: 37006 - DNA, 553 bp, Homo sapiens; identical to SEQ ID NO: 1235
  chr1:236558653-236559206
  hyper

SEQ ID NO: 37007 - DNA, 119 bp, Homo sapiens; identical to SEQ ID NO: 1236
  chr1:236559256-236559375
  hyper

SEQ ID NO: 37008 - DNA, 30 bp, Homo sapiens
  chr1:236687968-236687998
  hyper
tacttcgggggttgcgtgatttaatgcaag

SEQ ID NO: 37009 - DNA, 30 bp, Homo sapiens; identical to SEQ ID NO: 1237
  chr1:237093369-237093399
  hyper

SEQ ID NO: 37010 - DNA, 82 bp, Homo sapiens
  chr1:237205141-237205223
  hyper
aagatatcattcttccgtgcgatccgaagtgccgtggaagttagtgccctagcccagtccaggaggaaggggcgtcgtgccg

SEQ ID NO: 37011 - DNA, 164 bp, Homo sapiens; identical to SEQ ID NO: 1239
  chr1:237206101-237206265
  hyper

SEQ ID NO: 37012 - DNA, 153 bp, Homo sapiens; identical to SEQ ID NO: 1240
  chr1:237206511-237206664
  hyper

SEQ ID NO: 37013 - DNA, 1855 bp, Homo sapiens
  chr1:239549562-239551417
  hyper
aaccaatttaaaagcgaacacaacaaaactaacagaccggcaaaatctatctttgaagcgccgcgggaggcacaatttgggaacaggtgaggccatgctgggtgggtgaggcccccctctctcctgcttggtgttccgctttcagccaacccaccccaggagtaccctgggatctcctcgccccctgccaggcggagaacgcggagcccagcgggcacgcgggaatggagctaggcgccggcagggcaactgggcatgctcagaagccgggcaggttttggtctcaagcacgcagcctgtgcattacaccagctctctcagtccggggaggaggaggagcaggaggaacgcgaggaggaaggagaggaggagcggccagcagtagccacgaccgccaccaccaggcagaggaagagttcgtggggaggaaaagacctctcctcccccttggagcgccttctctctgcttttggagaaagggaatacacgataaagaaggagacggaaagaagagaaaaagtgaggcgggagacagagggaaaagggcgtgaacagaaagggccggagcgtgcaggggagcacagggcgcgggggcggcactgccgagccgggagcgctgccgcttgggcaggtgccgcggccgctgcccggaggcggcatgtgacgcgcggccgcagctgcccgcgggcggagcgctctcagaccccggagcgcacaccgcggggccatcggtgccatcgcggatctccaggctcctcatcagtccgccggggccgcagcagcgcttctgggaagacgggcgatgaactgaagggcggctccgggcaggggggcacgatcttaaggacagtcgctccctgaacgcggagccggaggagacgaagggaaggtggagcggacgccacccgcgcaccgggcaggcgcggagaccggcgtgggacagccacctggagcgcagctgccaggtagggacggcgcccgccacccaggcgctgggcagagcgggtggcggtagcggctgacctggtttcttgccttatctcgttgcgaaaggaggaaaaagttttcggcgcgggtaggagaggtcttgtgtttggagtccaaagaaggggctgggtagggacgagagaggctgttgatttggggaagatgggggcacttgaattccgacagcgcgatctggtgcggagttggagttctgggactgagggtggggaacgcccgctggcactcaagtgccccgaaagggacgggaatcatgcgagcggtggccgggagagagtcggggacgtcccaccccgctctccctcgcttcgattctctcttcgccactgccggatctgaggctccaaagtgcccgagcatgaggagctactgggctccgggtgtgtttgtgagcgcactcgtgtgttgagcgtttgtctcccatctccccatttggtttcctgtcatttctaagaaggctaaagctggcacccgccaacctcgcagtggggccgcaagttcggattgcatttcagggggcgagaaggcaaatttggcacttcgagtaacacttgggcgaaggtacctagcctagtgcgcatctttactgacccggggagagtctgcactcgcgaggcagcggccgctggactgcaccggttctcctctttggaacacttcctcagcatagcctcctaatagcgaggttaatttttgcgtgtttttaaacggcgggggcgggcggacagttgactccagcagcagaattcacttgtctacttcgcggtgtgcgtgctggaattgagatcctgttctgcatgcttgtgcgtgtgtccgactctccttgcacgcatttggaagtggtagaggc

SEQ ID NO: 37014 - DNA, 1220 bp, Homo sapiens; identical to SEQ ID NO: 1242
  chr1:240254938-240256158
  hyper

SEQ ID NO: 37015 - DNA, 139 bp, Homo sapiens; identical to SEQ ID NO: 1243
  chr1:240256624-240256763
  hyper

SEQ ID NO: 37016 - DNA, 275 bp, Homo sapiens
  chr1:240775037-240775312
  hyper
ccggggtgaaaccggcgagacgtccactcagggctttcggtcctgaccagccacggaacaaacaacgtcaattcattctaagtgcctggtgaaggtagaaatcagaaaccgtgtctgtgtcacgttagtcgtgacaagctgcgtacctgcaatgacgtgatggaagcctcctcctcgggtcccttctctctctctctctccctctccctctgccttctctgagttctctagtccacagcggggtctaagtttggtctcccgccgccgctttcagt

SEQ ID NO: 37017 - DNA, 111 bp, Homo sapiens; identical to SEQ ID NO: 1245
  chr1:240775378-240775489
  hyper

SEQ ID NO: 37018 - DNA, 1249 bp, Homo sapiens
  chr1:241519637-241520886
  hyper
cctctctattcccccgggtctcccacacagagccggagtatatgcttcgcctactttcacctgcctgcgctgccagccaccggctgctctcctttctccccacttcgcttcggaagtccggaggtaatcctgcctaatttttgcaagaagacaccagaatatgtcccggcaacaagaactagtgggaggtcaagccttcaggccattttacccgggtcaccgtgggtaaaagcctaactgcagaagcctccagagcaaccagccaaagaggagaaaacaggcaagcccctgctccccttgctcgctctcacggcagcagcaaatggcaggcgagcctgtgccccgcgccgcggcggccgccggagccgggcagcagtttcagcaccgtggaccgcggggtgcgcgcggcgcccgtagcccagccccggcgcggggctcccgggggcggccgccctgcgcccgcggacgctcccgctgcgcagagcgagggctgggtgcgggccgggggccgggagggctctgggtggcgctgcctcctccccgcccgccttccctatttacctcctccgccaaggtcacggccccgcggcgtctcccctcccgggcgggctgggtgcaggcggtgtcagctggcggcaagcggagcagcgaggcagggtagcttcatcacactcgcggcggatgcggattccgcgccgccccggctctagctgctcaggcgaccgccaccctcgcctcgccgccgcccgtgcacaggcggctccggcagccgccactcgcgcccgctcccctgggccgcctcgctggctctctccctcctccgcttcttctcccggggactgggaccagccgagcgcgcgcgggagtcgagacgcccggcccgtgcgcgcgactgggaggagggaggaggggacagtcacgtgggacaggggcgtccgaaggtgccggctcggatgggctcggctcggccgccgccacaccgcccgggcctcccgggcctccccggcctcccgccctcgcgcccctcgggaggctgtagtcctgcccccggcgcggccagcccgcgctcccgcacaccccgcccgctcgcccgcgcgtgtgtacgtgcgccggaggcctggagagaccggagtttaacgcccagtgtaagccggaaagggaggaaggctgtgcgatgggtgggtgggtggtaggtgggtgggtggtctagtgaatggatggacagatggacggacggatgcacggatga

SEQ ID NO: 37019 - DNA, 777 bp, Homo sapiens
  chr1:241587077-241587854
  hyper
aatgactgggtcatattgatacggcagcagcaggcagtcctgagcggccgctgccatcgcgccggctgcagcggaaaggtacaagcggtggcggcaggagccgctgtgggagcagcagtggcggcagtgggagccctgtgccacgcgtcccctgtgcgccgtgtccccaaggcagctgactacacctcccccaccctcctgcagcagggtggatcccacctagcgggactccccacccacccctccaggccttctccactccggactctggccacttgccaccgttgtcgcccgccgccgctgcagggagggtgcacggagggagcagaccgtctccggagcccgccgccctgggggctgcagtgatggggccgggctgaggcacctgccggcggggtagcagggcagtcgagcacggagggaggggcgggcctccaggggacttcagcgggagccgggcctggggcggtgccgcacttgcacacggagtgtggggggccaggcctgggaccaggagctggggccgggcttcggcgcagaggcaggaagaggaagcggcacccgcttcggggacccagccggcggccaggccaccgcgcccacccggccgatggcaccgtgttcctgcgcctcgggagggaggaggctctgcgcgggactgcaggttctgccccgcatcggagtgatcgctgagcctgacgctctcgaaggctgggcctggggcccgcaatctactccggaggctttcccactgggcagggtcgctagcagggtgag

SEQ ID NO: 37020 - DNA, 197 bp, Homo sapiens
  chr1:241682979-241683176
  hyper
cgaggggacgcgagcgcgcgaggagccgaagtgctcggtacatggtgctgagggagcttgggtagaatttctgggcggctgtggccacgcctccacgccggttgtcagaaaccgttccgcccaccggcctccgctcttatccaatcaacagcctcacaccgacaggtggggcaggaccaatcgtgaatgaccagtaa

SEQ ID NO: 37021 - DNA, 30 bp, Homo sapiens
  chr1:241695149-241695179
  hyper
ttcaaaatgttgatcgggagaatattaaga

SEQ ID NO: 37022 - DNA, 30 bp, Homo sapiens
  chr1:241803352-241803382
  hyper
cttgtagtagaggacgagcaccagcaggtt

SEQ ID NO: 37023 - DNA, 30 bp, Homo sapiens
  chr1:242034247-242034277
  hyper
ccataactaatatacagtagatatggcttt

SEQ ID NO: 37024 - DNA, 905 bp, Homo sapiens
  chr1:242686694-242687599
  hyper
gccaattcacttcgcgtgaagtcggcactccttgggagtagaggtcccctctcaccggctcccaccctccagaggggaggatttctggggagcccgacgatccgctcgcttttagcctttctccttgcaacgcgcaaatctctccctagttgggctcaagtagagaggatcaccaactgctcatcccagcggacactctgcaaaaaactctaatggcttgtgcgcgggtccacgctggtcgctagcggcgccaactttactcattcgttaatttgctagtttttggactgagtaaaacagcccccaaagacgcgggcaaacgccgctctaaagcccactaccatgcaacgccaggttgctcggagccacgctggtggcacttccccttcgtgctcactctgcacaggcacctccagaaccccgtgcaaatgaaccctaccgggagacgcaggtgggcaggtcgggtcggcagggaccaagagcctgaaagggaacctgccctcccctccccgcagcccggtcattaaggcaagaaactgcaggcagagaagcccccgaatccgacctaggacgtcggcgcctgccaggatcccctcgcctgccccccgcgccccgcgcgcgctcatgccaccaccacggggagggtgcatgcggcaggtgcctggccgaggcccccgggagcgagtcgcccttacgtgctccagcttgtctttcctccgaagccagacgctggcgctgtagtcctgctgcttgacgctgctgtagaagttcgcgcccactcgggtcaggcttggggagggctccttggggcggcttttgagcctcatctgctcgaagccctcatggggggaggccgagagccactcgtgctgccggatctccatcctgacatgaccgggcggccg

SEQ ID NO: 37025 - DNA, 423 bp, Homo sapiens; identical to SEQ ID NO: 1250
  chr1:242687610-242688033
  hyper

SEQ ID NO: 37026 - DNA, 163 bp, Homo sapiens; identical to SEQ ID NO: 1251
  chr1:242688080-242688243
  hyper

SEQ ID NO: 37027 - DNA, 447 bp, Homo sapiens
  chr1:242688277-242688724
  hyper
cgcggggatggctccggagggagacactcaggaaaccacctccgcccttcccccatctctatccagcggcgccccctcaccctgcccccggctcgcttgggctgcgccttcccccattctgaaagttcactaacttcccaccccaagggacttagagcagagggtgcccagcattcccccctgaaaatagccgagagacatgtgttttctggagccgtacacgctactttcatccgatggtgtggcgatgcaaatacgcccgggggcagtagcccctcgggcaggcacgcgggaccggttgctccccagccctcggtgtccacctagaaccgggctccccgggccgcacccattccgatcctgggagggtgatccagggctcctctgcaacgctccgcttgtgcggtgactgttccttaggtggacgtggcccaactgctgtgcatt

SEQ ID NO: 37028 - DNA, 31 bp, Homo sapiens; identical to SEQ ID NO: 1253
  chr1:243418478-243418509
  hyper

SEQ ID NO: 37029 - DNA, 493 bp, Homo sapiens
  chr1:243646270-243646763
  hyper
tgcctaaacagactccgcgggccccatgatggcaaaccccctcgccccgttcatgacttaatgcctcctagaagaaaaggctaaaaacaagacacacagaacaagaaattgcactctctcaaaacgacagtcgccctgaaacggacgctggaagaggtttccaggcccgtggcgacggtgaggggggtgaaggtcgcaggtggagggcacggggcggcggctgcggagcccggggaggaggcggcgggcgcccgggtcttcctcggagcgcgccccctgggctgggcggcgtgtccctgcctcccgccggcgccctcgtccccgcagcagcgtccccgccgccaccccgctgcctcgtcgcctttctcgcaaacagcggtgccctctacgtgggggatcctggaggctgctgagcacgagcgccctccgcgacccgcccctgctcccgcctccactcttgcctcggggggagggtctcagtcttctgcctaag

SEQ ID NO: 37030 - DNA, 1 bp, Homo sapiens
  chr1:243646877-243646878
  hyper
c

SEQ ID NO: 37031 - DNA, 857 bp, Homo sapiens
  chr1:244012278-244013135
  hyper
cagaacataaacagtaaataccggtattggaaaaacctggccccaacgagattctttatctctaggctaactgtagattcccgggaaatcccaaacaagggatggtgaccccgcctcggcgtcagggtcaacacagcaaccagctaggcttcaactttgggctctgaagggccccaccggcatcatggctgatgcggaccgatgcgccggaggaggtggacaaggaagaggctggtctgtttacttgcagccagagctgccgccgccgccagcagcgacagcatcactggatcagccaaacccagcatcttccgcacatttctattcttagcacacaactcccaagcggatcaaaaccccactactattaaaaacacagacaagcacgttacccacctcccacacacacacccccccccccaccccaccagtgccgtcttttcctgcgcgccagtggcggggaagggtgggggaaggaaggagaccccggggacgcctgtgcatcctcgccttcaccccaccccacgcgcagacagcctcagcgccagggcgcgcggcagacggctccctccccccaacccaaacacactgacaccggcgctccacgcgttatataacctcgccgccgcccccggtccaggcgggcgccccctccccacgccgcgcggcccgggcggggaggggcgaggggaaggagcgagagttgcgcagacagcaggcgccgggccggggcagcccagacacagacggtaccgctaggccgggaacacccctcccccggcccgctgcgcaccgccgccccccagctttccccggaaagcggggggtgtcggtgtcaaccgcgctgggcatccccc

SEQ ID NO: 37032 - DNA, 384 bp, Homo sapiens; identical to SEQ ID NO: 1254
  chr1:244013706-244014090
  hyper

SEQ ID NO: 37033 - DNA, 395 bp, Homo sapiens
  chr1:244014311-244014706
  hyper
ggccccttggggagatgggcccggcgcgagggctcgcacctggaagcccacgaagtgggcggtgcccaatgaggtagggaccggagagcgcggagcagtccagaagccgaccccaccccctgcacctcggggaagagggaacccgggtcagcccgtagcaagaatcattcctgactatcccaggagaccacggcagaccaaaaacacctctctgaacagccttccgcaccgctcgctgcaagcattcgtccacacacggtacacagattgcgggcggatcgtaattcactcttgaaatcacaccctttttagggatattcgttttcaatgactttgggaaagccacgaggtactacatttactacgaagagaccgtttctttattttgaagtcag

SEQ ID NO: 37034 - DNA, 542 bp, Homo sapiens
  chr1:244080519-244081061
  hyper
acttttccttctcactctccccgcacgcccacgcccacccgcttctgcaccgagaacctcgaggcgcgcacgcacgtggaggtgacgccaagcccagcggcgaggtcggggctgggggtggggggagccggcgtcccgcgggcccccgaggccggggagctccgccagcgcattgtgcgagcgagctgaatgcagccgaggggcgagcgcgcgggctcgcacggattagccgtgctttcccatgagccacaaaagaatgcccgaatctgggacatctgtcatcaaggggcaggctgctcaggatgcaaggtaaccagagctttcctcggactgcttcagtctttggggacgtggggtcaccctaatccttcctgtttatattgtgaacgcgtaggcagcgagacttaagctctgcgtcggtcaataagcatcacgacgcaggcattcctgagcggctacgtcctccggttgctttctcggttttttggaagaggcagcgttgcctcccatttattcagtcccctcacagcagcgcggctgta

SEQ ID NO: 37035 - DNA, 36 bp, Homo sapiens
  chr1:244081077-244081113
  hyper
cgccccaacgctgccggcccctgttttgtttcttct

SEQ ID NO: 37036 - DNA, 30 bp, Homo sapiens; identical to SEQ ID NO: 1255
  chr1:244816650-244816680
  hyper

SEQ ID NO: 37037 - DNA, 1007 bp, Homo sapiens
  chr1:244893208-244894215
  hyper
agctcagcatcctgctttaaacgatttttttatttttttgacggggcgtggtagctcacgcctgcaatcccaacgcttgggaggcttaggatcgcttgaccccaggagtttgagtccagcccgggcaacatagttggttttttttttttttctcctgtctcaaaaaaaaggcattgcagagattgaaaaccgtttcccaccttctcccctgcagtgtttaggaagagacaatccgcccccgattcagcgcttcccagcccgcagcaactgcgcagcggggggaacccagggctccgcggcacccgcaggctttagttactgctccgaggccctcggaccaaagagaggctgcgaggaggacgcggctcgtttagctcgctgcgaacctcaagataacccttggtttccatgcacatccccccaacattgcatgtgctttcattcctacggtgctggggttactttcatttattgcttttgttgaccaaaaagaaaaaaacaatcctgagcgtgcacagggggcgcaacgggggaccggctcctcgtggctgaccggcggcggggctggcgcgcgggggcggcctgcgcgggccgcccggggacgctgctctggggtccggccgcggcctcgtggccgccctgcgcgcggtccagcaccagcagcgggatctcctccagccggtccggccgctccttgcgccgcaggtagcgccgcctccacgtcgccagcctctgaagcagcctctgcaggctcgaggggccccacaggccgcgctccggggcctccttgcctgcgcgcgcgtgagcttgcctgagcttcttcctgcgcgggccgcggaacagccgccgccagcaccagcacccagagcaggagccgccgtcgccggccaccgcgcgccgcccgaccgcctccggatccccgcgcggaggggggccccgctccaggcgcgccgccttctccagcagctcgtgctgcgcgccgccgcgccgggggccaccaaaccggg

SEQ ID NO: 37038 - DNA, 30 bp, Homo sapiens
  chr1:244998190-244998220
  hyper
gcgcgccctctccgcggacaccaacgtgct

SEQ ID NO: 37039 - DNA, 30 bp, Homo sapiens
  chr1:245027100-245027130
  hyper
tgctgcgtcgccggcggttgaggctgctgc

SEQ ID NO: 37040 - DNA, 30 bp, Homo sapiens
  chr1:245028060-245028090
  hyper
cctttcagttcaaccgactcactgcatgat

SEQ ID NO: 37041 - DNA, 30 bp, Homo sapiens; identical to SEQ ID NO: 1257
  chr1:245133201-245133231
  hyper

SEQ ID NO: 37042 - DNA, 30 bp, Homo sapiens
  chr1:245134577-245134607
  hyper
ttggaaccgctgtgcgccggccgggcctct

SEQ ID NO: 37043 - DNA, 123 bp, Homo sapiens
  chr1:245474019-245474142
  hyper
atgtgcaggcagcagcagcaacgcgggacgatggggagagagcccaggggagggaggatgcctgcagaagcggctgtgatgtgtgggaagccccgctgggccggcactgtggaaaggtgacct

SEQ ID NO: 37044 - DNA, 30 bp, Homo sapiens; identical to SEQ ID NO: 1258
  chr1:246729203-246729233
  hyper

SEQ ID NO: 37045 - DNA, 30 bp, Homo sapiens
  chr1:246730173-246730203
  hyper
ctattgctgcgcgtcgcgccaatttctccc

SEQ ID NO: 37046 - DNA, 738 bp, Homo sapiens
  chr1:246887310-246888048
  hyper
ttgctccacccccacgtgcaacaaggacaaccggctgccgcctccagcttccagcagggctagaagatgcgctgcccggggcggccagagccctgcagaacaaaccgccgcacggaattaggggccgccgtccgcgcctgccaggcttggaagcggactcgcccccagggccaccgccctaggaaacctcccgtcggaagcctcccaagcaagccgctcacccgcggctcccgcgcgaggcggcgtgggcgtgggcgcggccctggcgcggcggcgcgcgcggggtgaagggagcccggcgcgctggctgcggcgacggcggccgttgctgcgccgggtactggggtcgctgcctgaggcgcaggcgccgtggactccacccgccccggggcctgggctcgctgtggactcgtcatggcgaccgagcagaggcctttccacctggtggtgttcggcgcgtctggcttcaccggccagttcgtgaccgaggaggtggcccgggagcaggtggacccggagcggagctcccgcctgccctgggccgtggcgggccgctcccgggagaagctgcagcgggtgctggagaaggcggccctgaagctgggtacagcggcggggcgggacggggctgcgcgggcggctgggccggggaccccgcatcgccccaaacgagcgtttctcccgcagggatgcgccctacgtgtccccgagccctgcgtgaggacaagaagaggagag

SEQ ID NO: 37047 - DNA, 375 bp, Homo sapiens
  chr1:247170805-247171180
  hyper
aaaaaaaaaaaagaggagaaaggaacccacagaccacagctcctcccacccaggaacctttcacgggagtcgggactctcccgacaacccctccgtcatcacagcacaatccagggaagacgcggcgctgcgggcgcggggctgccccgggagggctctgggccgtgccgaagtcaccaggcagagaccggacagtcacccagcggccgggatcccgctgccggcccggcccccacctgcgcgggacgggactgagggccgagctgcgccagcgggactcggccgcacactccggagccgaccgccgggaggcccggggccgccagcgctggttccagccaattccaaccgattccaaccaccccctctcccttc

SEQ ID NO: 37048 - DNA, 253 bp, Homo sapiens
  chr1:247171251-247171504
  hyper
cgcaatacctgcaggccacagggcgatggagcctgcggcagtcacccgggactctccgagaggcagcagacgggaacccagcaccccgccggccgcaaggagacaaaggccccgccagatccccaaggccgccccttcctctctggctgcacgcctgattggacagttctcacgctagcgccgctgactggatggggctccaggccccaccccctcaggtcttgagtgacaggaggtgcgatcagacactggg

SEQ ID NO: 37049 - DNA, 256 bp, Homo sapiens; identical to SEQ ID NO: 1262
  chr1:247241958-247242214
  hyper

SEQ ID NO: 37050 - DNA, 83 bp, Homo sapiens
  chr1:247274376-247274459
  hyper
ctggtcccctggacccgccggttaaactgtgattctctttctaaatcctttgtctgcgccggactcggggtacccgccgggtg

SEQ ID NO: 37051 - DNA, 986 bp, Homo sapiens
  chr1:247274518-247275504
  hyper
tcagtctccccagtggttgggattacaggcgtgagcccccgcgcccggccaaagggccccctaggaccggctgtctcccccgactacgcaccctcggcccccagcctcgcgccagacacggcgccgcagccccagcgcgcgggggtggagagagccgcggggcaggggcgccctgtgggtcccgcggtcacgccggatcgctcggccgcagtagtggggcccgggcgggcgcagggccgggctacggggaccggcaggcgcgcgaagggcccggggcgccgggaggactcgggttcacagtcgctcccgctccggaaagtttgcggcggctgccccgggagggacttcggcggggaggaggcggcggcgccaggtggccgaagtcggaggggtccgtccgctcccgcagcctaggagcgcgccctccccgccggtgccggggcccgtggtgggggtcgcacccaccgccgcttggccgggaccgtcttggctggcgccgccttggagctcgtaggcaccgcgcgcggtgcggggagcggccggggcggagggacccagcgagcccggggagggccggggtcctgcaggcggaggcgccggggagggtgtggggtcagggcccgcgcggcgctgcttctgctcccgaagactgcggtcggagctggcgcagcggagggtgcggctcccggagcgcgaggccgcagcggggagtgaccggaagtggcctctgcagccgcgtccctgggcccatgtcagggacggctctggctgaagcaggaggacggcgtttggagggtggggtgggcgcgtcctctcggcggcccgcgtggactgacagccaccactgcccccacgctgccctcgtgcccgcggttctaagaagtcgaatgccaggcggaggcgacggggcaaatggcccaggcttgggaggccgctggcggtccaggtcccgcaggatgtggaggattttcgaggagggcccaggg

SEQ ID NO: 37052 - DNA, 31 bp, Homo sapiens; identical to SEQ ID NO: 1263
  chr1:247278690-247278721
  hyper

SEQ ID NO: 37053 - DNA, 38 bp, Homo sapiens
  chr1:247494235-247494273
  hyper
acccatatgggggccgtggcggcgtcgggctggacgca

SEQ ID NO: 37054 - DNA, 30 bp, Homo sapiens
  chr1:247494968-247494998
  hyper
ctttctcccccgcccgcaccttcctgagcg

SEQ ID NO: 37055 - DNA, 30 bp, Homo sapiens
  chr1:247495197-247495227
  hyper
gacacttcctgctccgctctaggactgggg

SEQ ID NO: 37056 - DNA, 79 bp, Homo sapiens
  chr1:247495754-247495833
  hyper
agcctcggggcttgcgcagaggggctgcggtgagtcctgaccctgagtgggggtcacggggctcgttgctcgctgaagt

SEQ ID NO: 37057 - DNA, 139 bp, Homo sapiens; identical to SEQ ID NO: 1264
  chr1:248020309-248020448
  hyper

SEQ ID NO: 37058 - DNA, 115 bp, Homo sapiens; identical to SEQ ID NO: 1265
  chr1:248020515-248020630
  hyper

SEQ ID NO: 37059 - DNA, 400 bp, Homo sapiens
  chr1:248020956-248021356
  hyper
ggcagctaccaggtgaggcgccccccggcgggggctgcgggcgctgcggtgaccgggaagcgggcgacagtccggagcggagccgccgaggccacccgtctcctgagcggctcccacggccgctccccccaccgcgcgccgtcccccccgcccacgcggctcactcagtgtgggtctctttgccttggctgtggtaaccccctttgcgacacacacccattattttacaccgtccgcccctcccccaagcactctcctgtcgtcgaactcgcgctgggctggtttctcccgatgcggatagtctggtccctcagctgggctctggtcgggagggctgtgtggtccagttcattcttggtaacaattgtacgtctatatcgtaaacttgccataataattc

SEQ ID NO: 37060 - DNA, 30 bp, Homo sapiens
  chr1:249120091-249120121
  hyper
tccccgcaacaagccgatccaaccaaaaac

SEQ ID NO: 37061 - DNA, 235 bp, Homo sapiens; identical to SEQ ID NO: 1267
  chr1:249167653-249167888
  hyper

SEQ ID NO: 37062 - DNA, 18 bp, Homo sapiens
  chr2:11722-11740
  hyper
gcccgcctcctggcagct

SEQ ID NO: 37063 - DNA, 110 bp, Homo sapiens
  chr2:45821-45931
  hyper
ctctggcccagggggcgcggccgggacactggagggcgccgcggaccgcgcggctggggctggggtctcggggattgcggggtccgccgcggggccaggagtggtcggga

SEQ ID NO: 37064 - DNA, 1196 bp, Homo sapiens
  chr2:45969-47165
  hyper
cggggcaccggcgccttgtccttacccggcccctggaagagcttcttcaccaggcttgccctggggccgtcggcgcccgatcctcgcacgaattcgcatttctgccggtagatgatcagcgagtccggtctcaacggcttccgcgcaatagccctgcgcgccaccggggccggggcgcgggccgggggcccagggtcgttccccgggcacttgatcgcccccgggccgctgccctcggaagcgacgccccggccagtccccggccgaccccgcacatacttggcgcgatccgccgccagcctctccactgcgctcctgcgcgccggccgcgcggcgtcggggtcccgggtagccgcggggtcccggggaaggagccgctcgttcgggggcgcgctcagggccgccagggcgcgcatcttcgcggggaatggaccgaccggggttccgggtccagcggagacgcgctcgagtggtagagccagtcagtcccagggccggttccgaagtccgcgccgggtggggaacggcgccccagtgcccagctgcccaggcccggggttggggagaaccggagtctgcaccgattggcgaaactccccagttcccgcccctcccgacctcatcgcccacaccgactggcaccgcccccgcccccgcccggtgccccggccctggccgcgtccccgcatccccgctcgtccccgcccgtccccgcctcctcactcccgcccgggcccgcctccctggccgctctccgggtgccagcgcccgccctcacctcgcgtccggggtcccggccctcacctcctgcccggtgccgtccccgccccccctcaccttccggcggcgctgccaaccgcctggaggacgctggggcgagcaggctctgaacccccactcgctcagccccagatccccgaggtcactgctggacgcaggcatttccggggagggggagcagaggggacgtccccccacctcccccgggcaggtgcctcacatcctttgaattcttaaagtgacctcatcgtgtttggaaacttgactgtttaattttgtctacctgagctcatattcttattaacagaaaggaataggacataagaggaaagaacacgcagcgcacgccaggatcagcctacgtgttgggtggcaagaacgcagggcctcggattgggtccgactcggtcgctggc

SEQ ID NO: 37065 - DNA, 581 bp, Homo sapiens
  chr2:263890-264471
  hyper
gcatcgccggttttcccgtcctcctcctcccaccaccgcccagctcttgagaggggagggtgctgccggacaggtgggtccccgggtactcactgctgcccgcccggccgcggcgccccgtcccgaggctgcccaggaagaggaaggcgcgctgccccgccccgcggacaaggaggccccagcgagggcgtacctgcggcaggtgacgaaggaggcggcgcaaaacacccgccgtgtacgtttcgcgggacaaaaaccacgcgcccgccgggccgcgctcaggccttcgccctcagggacttcggaaccgccccgtcctcaagatcgaaaagcccagagccccgcggcggctccaagcacggtgttgggggtgggggtctcagggagcgcccaggcccaaggccgccctggtccggcgtggaccccgcggggctcaaggcaggttccccgcgtgacccgcccagcccctctatgcgaactcgaacgacaggcaccacagcccgccacgtgcgcgagactcgcgctgtgccccaacccaggtgggcggcccgcggagccgcgaggcctgagcccgccctgca

SEQ ID NO: 37066 - DNA, 195 bp, Homo sapiens
  chr2:264889-265084
  hyper
agagggtggcagtgcgcctgcgccgcgtcggcgtgcggaacgccgcggtgtctcggcgcctctgcgcgcgggaagatggcggaacaggctaccaagtccgtgctgtttgtgtgtctgggtaagagggcgccgacttactcatgttctgacgtcctctggagagttggatcgggcttgtgcgctgtaggttgtgcc

SEQ ID NO: 37067 - DNA, 959 bp, Homo sapiens
  chr2:287859-288818
  hyper
ggagactccgacacgcgccgagagctgggctcgctgcgagagaaggggcgcggggggccggagagaaagtcagcgggggagggggacggagcgcggggcgggggaggggaggggaggcgggaggagccgctggcgctggacccggcccctcacctccgcggaccccgaggaacaagccggcaggtgagggagccgcggtctcctcgacgatcacgcccgaggtcccgcccacggggagcgaccgccgctggtgcggaaaggagcccccggaacccgcccgcccgccagcccggcccctcctaactttcgcccgaaaggccgcgtccgccgagcgcgctgcgcctggcgcgggcgcaactttctttcccctttggaagccgcgggtgccaggcagctccccggccgcgggcggacctcggaggggccgcgctcccgcgcctaccgctctccaagaaggcggcgccgcgcgccgggcccggcggccgcgctcaagtttccagcgtcgcctttgcgcggtggtcgccggcgagcgccgagtccccgaagcccacggaggaggccgggtgcggaccctcgcgctggccccggccgcgccacgtgctggaagcccctccacctcccggccatggcgccctcccgcacctgcccggcgccacccgggagccacctgcgcgtcgtggccgggccggttacctggagccgccggagtcgtcgccgtctgtgcgcacgtctgtccccgcgccccgagctgcgccactactccatgcccggcgggcggagcgcacgggacgcggggactcggccgctccgagcgctggacccacggccgacctggggtgcgccggctccgagtcccgcctcagacctcggggagcttcttatccccgcgcccgccgacgtcaggcgggtccccaagggctccgagcggggctttaattagaagccgctgaagtgttagt

SEQ ID NO: 37068 - DNA, 31 bp, Homo sapiens; identical to SEQ ID NO: 1273
  chr2:288831-288862
  hyper

SEQ ID NO: 37069 - DNA, 1201 bp, Homo sapiens
  chr2:289131-290332
  hyper
cctttaccaggaactcggttctgtttttgtctaaatgtagatcttgggctattaaaaagggagctgcctgattgcttcgacatttaataagtcaattagagtccatccgttttggagggatccgctctccggacctcgaggggtctgccccgcccgagcccagtccccaggttcgggtccccaagccctggtccccgaggcggggcggccaggaggcaggagatgggcgggtgaggactctccacggcccccgaggtgcgcacagctgaccacccgaggaggggcaggacctgcaccccctccccagaccccctgcgagaggacgagcgaaggtccctccccggcaaggaccgcgccatctgcgcgctcctctgcgctggaccctcggcccgcgggtccctcgcgccccggcagggaacgcccgcaggagggcacttgcctcccggactcgtctttaagaaagtttggctctttggccgaagcccggcacatctgtgaaagttcagcaatttgcctcttttattttattcttgtaaaatgtattatcaatcagttgcgcactttcccattcgattggtgctttctgggcaagagctggacgtcttccaagtccgcgatctgtttgggaaaggtgttctgagtgcaatcagagaggcggagtgggcgagaattaaaggcctgcaccatgatcggggcagtcgcaggaccgcggcgggaaggtgctggcccaggcgcacgtgagcgcgggcggtgcgggcggaaggctccgcgccccgatcccccagctcccggagaggccccgtctgcgcccgtccccgcgtcctttctctcttcctgcacggggtctgtctcctcaggaggagaaagtgtccggcagagctgggcggggaggcagcgtggagagagaagatatgaaatgtgccggttccggaccccgccccacacccttgggatctgcgttctctccgctcccttgaaaaacagatggtttgatttcacagcgaggcttttctttttctttttgcaagctacatgactgaaatgtgaacatttctgctaaaatacactcaggaaaaagtaaaattttatgtcaaacagaccttaggcacataaaaggaggcatttttcgtttctctctttccccttcccatgtccaagaagacacttgagttccacgggcaagagcgacgcctggcgatgg

SEQ ID NO: 37070 - DNA, 118 bp, Homo sapiens; identical to SEQ ID NO: 1275
  chr2:468115-468233
  hyper

SEQ ID NO: 37071 - DNA, 287 bp, Homo sapiens; identical to SEQ ID NO: 1276
  chr2:468423-468710
  hyper

SEQ ID NO: 37072 - DNA, 31 bp, Homo sapiens; identical to SEQ ID NO: 1277
  chr2:637196-637227
  hyper

SEQ ID NO: 37073 - DNA, 240 bp, Homo sapiens; identical to SEQ ID NO: 1278
  chr2:677554-677794
  hyper

SEQ ID NO: 37074 - DNA, 767 bp, Homo sapiens
  chr2:945450-946217
  hyper
ggcctccgcgatgggcgctcgtgcctgggtcgaaggactggggggcggaggatttggaaagggagaaaaatacgggctggcttctttttaaaaaatgtgggtagccttgcctgcccccgccgcactggaatttatcctaaacttactttcatttacattaaaacaagacgatttgagtctaccaaacccaatactgcatctgtgaggctccttttggcacaaacctgaatgaacagcgggaaacgccgtctcccctggcgtctgagatctggggtcccctccccacctggtctcctcgctcccgccccagccccgtgcgccccaggagggcaccgccgagcgccgggtccccgcagggttcgggagactccgcggaccggaggagggataggacccccgagctttgggggcgggaagggagggtggaaggaggaggggagcggggttggggaaagttggagcttcggtatcttttctccgggccaggccgtcctcggggccctgcgctgcgtctccaagtgctgggaagactccgcggggaaaggtctgaggacgcggccggctggcacaggtgtggcggcttcagagggccggggagaacccatggcttcgaggctgtggactagaaatgtccctgattagaagctgagaacctttggccagggaggtggggcggcggggaggggtcgtcaagccggtccagagcgcgcccacctgcgccacaagggagaagaggtgccccccgcccccctccgcccaccgccgcc

SEQ ID NO: 37075 - DNA, 114 bp, Homo sapiens
  chr2:946289-946403
  hyper
ggcccctgccccgccagccccgctatggtcccccatccacccccgcgggagcgcccctgtccccccatcctgcacttcccccagagtcgcgcgccagtttcccgccccgtggaa

SEQ ID NO: 37076 - DNA, 134 bp, Homo sapiens
  chr2:946432-946566
  hyper
cgctcgccgccctccccgcgggtgcgcgcccggcccctccctcgcccggggcgggtctgcgtgggcggtgctccgggtcggcgggcggagctccggttccccagccctgcgccccggtggagcccgagccggag

SEQ ID NO: 37077 - DNA, 30 bp, Homo sapiens
  chr2:946984-947014
  hyper
ctttgctcctccagcgtcttctaaggtttg

SEQ ID NO: 37078 - DNA, 56 bp, Homo sapiens
  chr2:1610485-1610541
  hyper
agcctggggaggggcagagtccggtcgtgtgggacgtggcaggaggtgcagatgct

SEQ ID NO: 37079 - DNA, 471 bp, Homo sapiens
  chr2:1746561-1747032
  hyper
ctgcggaggaggagaggaactcgggcccccgccccgccccagggcctccaggaagcagcctgcaaactcggcgacccctgggagccgtggtctgtcccagcactttgtttcggaggtaggcgcactggccgcccacttcctgaattgttcactcaatttttttacaacttttgcagactctttgctggtgccaaaaagtcctctggctcagctaagaaacgtgaaaactatttttggcatgcagaaaagtcgctacaggactaaattagagtcggcgcctgaaacgcagcccgcgttcacagatcccgaaaatgttgaatccgactcgcttcagaacacaggaggcctgcagcgaactctggcggcatctcggtacctggagccgcggggcggagggatggggattcctgctgtggagaccgtgacgcgggacggcccgcaggacagggtgtcaaccccaacgcaacgcat

SEQ ID NO: 37080 - DNA, 6 bp, Homo sapiens
  chr2:1747305-1747311
  hyper
gggaac

SEQ ID NO: 37081 - DNA, 380 bp, Homo sapiens; identical to SEQ ID NO: 1283
  chr2:1747627-1748007
  hyper

SEQ ID NO: 37082 - DNA, 411 bp, Homo sapiens; identical to SEQ ID NO: 1284
  chr2:1748396-1748807
  hyper

SEQ ID NO: 37083 - DNA, 122 bp, Homo sapiens
  chr2:1754707-1754829
  hyper
ctgtggagctgaatgtgcagccgtgtgttttgttcacggcttcctgcgtctgccctctagaggcccacagaagcctcgcacctccccagcccggcgtctgcgggtgaattgtctgagcagga

SEQ ID NO: 37084 - DNA, 96 bp, Homo sapiens
  chr2:1858659-1858755
  hyper
aacgtcctcactagcgcccagagcagagacatgctggaaacactggctgtgtctccctgagataaccagcccccggttttcgggggtggtaattca

SEQ ID NO: 37085 - DNA, 87 bp, Homo sapiens
  chr2:3307439-3307526
  hyper
gagcagccacaaacccgccagacgccggcaacctgacttctgagtgtttcccggcaccgtgaacacaatagacgacacgtgatacgg

SEQ ID NO: 37086 - DNA, 151 bp, Homo sapiens
  chr2:3381719-3381870
  hyper
atccgggctctcagcgcggggactcctggaggtgagaacccggcccagaggaaataagttggtgggcggagcgggccgcggaggccggctgtgggtggaggccggctccgagcgcaggccgtcgggagcaagcggcgattagccttagcta

SEQ ID NO: 37087 - DNA, 176 bp, Homo sapiens; identical to SEQ ID NO: 1285
  chr2:3465088-3465264
  hyper

SEQ ID NO: 37088 - DNA, 30 bp, Homo sapiens
  chr2:3522491-3522521
  hyper
agtcccccttcctccgatagaagaaacccc

SEQ ID NO: 37089 - DNA, 30 bp, Homo sapiens
  chr2:3775705-3775735
  hyper
tcccctcgcagtcccgagaggcaagggctt

SEQ ID NO: 37090 - DNA, 30 bp, Homo sapiens
  chr2:3828551-3828581
  hyper
agataccgttgcttcgctggcgccacctac

SEQ ID NO: 37091 - DNA, 88 bp, Homo sapiens
  chr2:5506155-5506243
  hyper
gatgggagccgcaccgccctcccctttcggtgaggcagcgccccctggtggactgacacgggcagttttggacgtgagcgttgtgaaa

SEQ ID NO: 37092 - DNA, 30 bp, Homo sapiens
  chr2:5813851-5813881
  hyper
ggtggctgggagcccggtgagccctttcag

SEQ ID NO: 37093 - DNA, 30 bp, Homo sapiens
  chr2:5831132-5831162
  hyper
gcccccagaatatccgtagaggtagtaggg

SEQ ID NO: 37094 - DNA, 21 bp, Homo sapiens
  chr2:5831379-5831400
  hyper
caggacgaggctgccggagaa

SEQ ID NO: 37095 - DNA, 193 bp, Homo sapiens; identical to SEQ ID NO: 1287
  chr2:5831854-5832047
  hyper

SEQ ID NO: 37096 - DNA, 145 bp, Homo sapiens; identical to SEQ ID NO: 1288
  chr2:5832283-5832428
  hyper

SEQ ID NO: 37097 - DNA, 191 bp, Homo sapiens
  chr2:5832655-5832846
  hyper
ggcggccgtcgtcgccgaagccaccacagccgctgtgtgcagcctggaagggggggcgggggggagggggggagccgcgaaagcggggtgccgaggactttgcaacttgcccaggaaggtggaggggtgggagggggagggggacctccgcacgagacccagcggcccgggttggagcgtccagccctgca

SEQ ID NO: 37098 - DNA, 150 bp, Homo sapiens
  chr2:5833282-5833432
  hyper
ggcggcggcggcgggagcgcgggcggaggcgcgggcggtgccaagacctccaagggctccagcaagaaatgcggcaagctcaaggcccccgcggccgcgggcgccaaggcgggcgcgggcaaggcggcccagtccggggactacgggggc

SEQ ID NO: 37099 - DNA, 140 bp, Homo sapiens
  chr2:5833499-5833639
  hyper
cggtcaagtgcgtgtttctggatgaggacgacgacgacgacgacgacgacgacgagctgcagctgcagatcaaacaggagccggacgaggaggacgaggaaccaccgcaccagcagctcctgcagccgccggggcagcag

SEQ ID NO: 37100 - DNA, 494 bp, Homo sapiens
  chr2:5833734-5834228
  hyper
cgacgaggtgcgggccggcgcgacctcgggcgccgggggcggcagccgcctctactacagcttcaagaacatcaccaagcagcacccgccgccgctcgcgcagcccgcgctgtcgcccgcgtcctcgcgctcggtgtccacctcctcgtccagcagcagcggcagcagcagcggcagcagcggcgaggacgccgacgacctgatgttcgacctgagcttgaatttctctcaaagcgcgcacagcgccagcgagcagcagctggggggcggcgcggcggccgggaacctgtccctgtcgctggtggataaggatttggattcgttcagcgagggcagcctgggctcccacttcgagttccccgactactgcacgccggagctgagcgagatgatcgcgggggactggctggaggcgaacttctccgacctggtgttcacatattgaaaggcgcccgctgctcgctctttctctcggagggtgcagagctgggttc

SEQ ID NO: 37101 - DNA, 527 bp, Homo sapiens; identical to SEQ ID NO: 1292
  chr2:5836047-5836574
  hyper

SEQ ID NO: 37102 - DNA, 123 bp, Homo sapiens; identical to SEQ ID NO: 1293
  chr2:5836621-5836744
  hyper

SEQ ID NO: 37103 - DNA, 10 bp, Homo sapiens
  chr2:5836827-5836837
  hyper
cgctggcttc

SEQ ID NO: 37104 - DNA, 139 bp, Homo sapiens; identical to SEQ ID NO: 1295
  chr2:5836852-5836991
  hyper

SEQ ID NO: 37105 - DNA, 115 bp, Homo sapiens; identical to SEQ ID NO: 1296
  chr2:5837352-5837467
  hyper

SEQ ID NO: 37106 - DNA, 203 bp, Homo sapiens
  chr2:5866015-5866218
  hyper
gtaaaacaacaatttaggaggcgaaagggagtatcaagttagcgaaactgcaagggaaactgggggcagcagagcgacgtgccagcgtccgtgttgggcgggtgtcggggggacccggacaccccgccctccttcctgcagagctctgcgggccctgtggcatccatggagaccctggctccggtttcacaggaagggaaggt

SEQ ID NO: 37107 - DNA, 443 bp, Homo sapiens
  chr2:6121679-6122122
  hyper
cggccccagcaagagcctccccagctgccggcagcatcctgtgatccccggagagatttttcatgagggctgtatatttggagagagagaggaaaaggcagctagcccagggaggaagcaaccccacacgaatagcggctgcatcataaatatttctagatagcaaatagcccattaaaagcccacattgtaatgccttggaggggggctgcctttccctgcaataccccgggaccgtcggtaaagcaggctttgtcatcgtctgcgttttcgccgcggcgctgtcctgtctcagctcctcctgactcagctgaagggggctggtgaataatgcatcacctagggagaggcgctggggctgcggggcacagctgagcgtgtgcagagggagcccctcaggctttctctctgtctgcctccatcttaccgtatccagagaccac

SEQ ID NO: 37108 - DNA, 30 bp, Homo sapiens; identical to SEQ ID NO: 1299
  chr2:6913289-6913319
  hyper

SEQ ID NO: 37109 - DNA, 569 bp, Homo sapiens; identical to SEQ ID NO: 1300
  chr2:7005629-7006198
  hyper

SEQ ID NO: 37110 - DNA, 30 bp, Homo sapiens
  chr2:7006612-7006642
  hyper
caactgggaagtgtcgcccagattggcacc

SEQ ID NO: 37111 - DNA, 658 bp, Homo sapiens
  chr2:7057747-7058405
  hyper
gcccaggtagagtgacgcgcgtcccctttgtgtccgcatcgcccgggccggccgcggagcggggagggcgggacgcggcgctgcgcggccggccttggggctcggggcttgcggccgcgcctgccccgctgggtcctgccccggcgcccggtggcagcgggcggggggcagcgtcccgggcggggactcgcgggctccgttcagaggacgcccgccctgccctgcccgtgtccctgacctcgtccctgctctgctcctgccctgccctgcctctcgcaggcggcgcccgcgccccagggcagtgggcgcttagggacctggcgtccccctgcctgccctgcgcggtcgcgggtctgcgctgcggcgcgggacagggcgccccgggccagggtcccgcgggcgagctggcggcgggggctttcaaggttcgcggccccgcccgcagaccctggggctggagcctcggccccaagaggaggtctgggaaaggacgacgcgtccggggcatcgccaccggcggggaaggtcggaactggccaagaggatgccccgcacatcccctgcgcgcggggtccgcggctgctactgcccctggtccccaccgcgagccctttcccggggaatgagccgccgcccgagccccggagttccctgcggg

SEQ ID NO: 37112 - DNA, 319 bp, Homo sapiens
  chr2:7571157-7571476
  hyper
cgctgccctctctccggaactgtttttttctgtcctggtctctgaaagccttattgattgctcaaagtgaacttctcagcccacggtttcctcacccccggggcagcttgcatttcctctgccgcggcctctgtcgcctcccctcccgcgcgcctcggccttttacatttcaaatgctcgacagctgggccaacttctgcttccgcccaaagaagggctctttgccgctcacaatggccggccagtggcgcgggggctcttttctctccagctgtgagagaggctttttcaaaggccggggggaagctgccgtccagct

SEQ ID NO: 37113 - DNA, 86 bp, Homo sapiens; identical to SEQ ID NO: 1302
  chr2:7571576-7571662
  hyper

SEQ ID NO: 37114 - DNA, 42 bp, Homo sapiens
  chr2:8818538-8818580
  hyper
caggatcaaagccattcggcgagaaaccgaaataatccaaag

SEQ ID NO: 37115 - DNA, 471 bp, Homo sapiens; identical to SEQ ID NO: 1303
  chr2:8818828-8819299
  hyper

SEQ ID NO: 37116 - DNA, 170 bp, Homo sapiens
  chr2:8821591-8821761
  hyper
cctcacgctctccctccgatgggttgcagtgaactgtggcttcccccctgcggtgctgaactcgcccgtgtagctgtgattttagagctgccgacagctctaaggtgtgtagggcttggtctgggaacacccccagggcaagggtcccgccgcgcgcttggaattagaat

SEQ ID NO: 37117 - DNA, 696 bp, Homo sapiens; identical to SEQ ID NO: 1305
  chr2:8821975-8822671
  hyper

SEQ ID NO: 37118 - DNA, 30 bp, Homo sapiens; identical to SEQ ID NO: 1306
  chr2:8823729-8823759
  hyper

SEQ ID NO: 37119 - DNA, 209 bp, Homo sapiens
  chr2:8825634-8825843
  hyper
gagggccgtaggggcgtcttccccgtcgcaggctacccgcggacctggcccccaggtccccgccacctgtcgccagccgcggccccggccgacctctgcgcggcggggagggaagcgcgctctggtcccaacccgacccccgcctcgcctccgggagaggcgcagacgccggccgcacgctcgccccccagccacggggacccgcgcgt

SEQ ID NO: 37120 - DNA, 30 bp, Homo sapiens
  chr2:8826160-8826190
  hyper
gtcccgggagaaaacgccagggagtgcggc

SEQ ID NO: 37121 - DNA, 51 bp, Homo sapiens
  chr2:9143127-9143178
  hyper
cgcttaagcctctccgggcccctagcacccatcgacgccgtctctaaggca

SEQ ID NO: 37122 - DNA, 211 bp, Homo sapiens
  chr2:9143657-9143868
  hyper
cctcggggtacctggtcgatgggcagctgcacggcgttgctgaggggctgcagcagggtggagcccgtggtgctggtggtggccatggccgggcctcggcgctccggccgcccgcgccgctcgcccgctcgcgctgtgccgggcgacgacgaggatggggatgcagcggcgcgcccgcccctgggccgcccgcggtcggagctctgcgcgg

SEQ ID NO: 37123 - DNA, 460 bp, Homo sapiens
  chr2:9144089-9144549
  hyper
gctgcgcgacccaatcgcggcgcgacgccctgacgcccgcagccaatcagagagcgccggccgcgccacgcccctcccccgtgccgaggacccgggcgagggcgccgaggcgcggcccgggccgtcgccggagaacggctggccagcgtcgtggggcgcgctcctcgggtgagagcatggaagagcgtctttgcccctcactcctcggtttctcctccctggaatgtcgcggccccccacccctctctgggagagacggcagacaacaaaggggcccggggtggcggccggagggacgatgtgagggacgccgccgagccagcgccaggggaagttggggacgaaggtgggggctgggaggacgacaaaccaaaacagcgacctggctgagaagcccctttgtctgggagagtgccgggtgaaagcccaaagctgagagcagccccggggtctgacgctt

SEQ ID NO: 37124 - DNA, 30 bp, Homo sapiens; identical to SEQ ID NO: 1311
  chr2:9283125-9283155
  hyper

SEQ ID NO: 37125 - DNA, 1591 bp, Homo sapiens
  chr2:9346367-9347958
  hyper
ctgtctcctaggcctgcgacgatgcaatgactgcacgcaaagcgcacattcacggtcaggtcacttctggcgtccggctgtggtccccgcagggtgcccgccggcggagcgcatcctccggcagggggcgagctccgcaccccgctttcctcatgggccggcgcggcccgccgttcaagtggggagcccagaggtgctccgcgccgtgggcggggggcggttggcgcgcacaaggccggactccggcggggcgcacctccacacgcaccctcgcgggcagcgggtcggagtcggggcctcgggccggctgggggcggggcatgggcgcggcgcgcggggcccggaacgccgagacaatgcggcgcgcggcggccaggaacggctcggcgggccggggcgcgcgccgccttccttcctgcgggatccgcttcccggcggcgcggcagcggcgagcgcgccgattggcggcccggtcctcccgccgccccgccccacgcccggccggccgccgcccccggcccggacccgcccctctccgcgggaggcgtcggggcccgcggctgggtggcgggtagttcccgccggctgtgcgcgcccgcctcggggctcgctctgagaggacgcggcggcagcggactcggagccctcggcgcgcaggcgggcggaccggccgagctgcgcggggctgcgcgccgcccctgctccgccgccaggccccgcgcggctcccgcgcccggcgctcccctttgtccgcgggccggagcggcggcggcagcggcggtgtccgagcggcggtcggagcctgctgcggcagttgaggcggcggcgcccctgcggctgtgcgccagcgccctcgcgccgaggcgatgccggaccagatctccgtgtcggaattcgtggccgagacccatgaggactacaaggcgcccacggcctccagcttcaccacccgcacggcgcagtgccggaacactgtggcggccatcgaggaggtgaggcggcctgcgcggcggctccggccgcaggtatcccgcgccccagccccgcccgccgctcccgcatccgcatcccgagaaaactttctttgctccgaagccggacgcggccgggccaaccctgcccgagacagaagccctttgttcccgcctaggtggctcggaggagatgggtgatggccaccttgggcctctttaagacctcccctctctcggcctcgtggccctcgcggggttccgcggcctggtcttttccccgcagcgcggccaactttgtccagagtcggggtccgcggcgagcgggggatcccgctgcccgccgccgcccgccgccgcccggggtctttggtacccggtgcggaccttatcaacttgttcttgaagtggaccggcgggggcagctccgcgctccgagctccccgccgcagcccccgagcgccgcagggcccccaccctcgggtccgcgggtccggggcatcccgggctgcccgggaaggcgtgcccgcctcagccagggcggcctggctgcgctccacccgtgcccggagaaggaactgcgggcaaggtgtgtgagagtcggcgcttctgggtccaag

SEQ ID NO: 37126 - DNA, 30 bp, Homo sapiens
  chr2:9695938-9695968
  hyper
agccagcttccggccgccgctgtcccccgc

SEQ ID NO: 37127 - DNA, 30 bp, Homo sapiens; identical to SEQ ID NO: 1314
  chr2:9770569-9770599
  hyper

SEQ ID NO: 37128 - DNA, 319 bp, Homo sapiens
  chr2:10092150-10092469
  hyper
tgccgtgctctttgttcggtcggagcctcgggaggagagaccctgtcctcggggaaactcgacaccggaggggccaccctcctcccctcctccgcggccaggttgggtcccctcgggcgcgcaccttggggtccgggcccccggcgcggtcgggtgcggcgcgaggtcggggcgcagccaacgcccccgggcctccccgcccccctctcctgcccggtcggcctcgggagcctggtggggctcgcgccgcgtcgggacaggtggacttctccaggtaatctgtggtctcaggctcgtcactcggcgacctgctggaacc

SEQ ID NO: 37129 - DNA, 186 bp, Homo sapiens; identical to SEQ ID NO: 1316
  chr2:10151689-10151875
  hyper

SEQ ID NO: 37130 - DNA, 121 bp, Homo sapiens; identical to SEQ ID NO: 1317
  chr2:10151929-10152050
  hyper

SEQ ID NO: 37131 - DNA, 186 bp, Homo sapiens; identical to SEQ ID NO: 1318
  chr2:10152409-10152595
  hyper

SEQ ID NO: 37132 - DNA, 73 bp, Homo sapiens
  chr2:10183213-10183286
  hyper
cgatggattcagccggtggggctgcaggaggttcctataagcgtggtcccctctccccgcaccgagtccggcc

SEQ ID NO: 37133 - DNA, 199 bp, Homo sapiens; identical to SEQ ID NO: 1320
  chr2:10183603-10183802
  hyper

SEQ ID NO: 37134 - DNA, 453 bp, Homo sapiens
  chr2:10183814-10184267
  hyper
cgctttgttgctcccggccggcctgcacgatgcacacgccggacttcgcaggcccagacgacgcgcgcgcagtgagtggtggggctgccgcggcgggactactcgtctgagcgaggggcgaggcgggggaagtggtgcggcactcgcgcgcctgtaaatgcgggaggtggggcgtgcagggcttcgctgcggccgcgccggtaggggcctgggcgggctccggagccgggcggggcggcggccgcgacgggcgcgcccgggtcggcgggggcgaggagggggcgtgttccccgcgcagctttgtcttgcgcttcctgggcggccccgccccgctggccccgcggctatttccagccatgacgtcaccccggtcctgtgagccggacggccgttgggcgggggagcggctggcgggaacgcggcacgcggccttgggggcggggcaagagctgc

SEQ ID NO: 37135 - DNA, 30 bp, Homo sapiens
  chr2:10219643-10219673
  hyper
tggaccggtgggcgcggcagggcgcttctg

SEQ ID NO: 37136 - DNA, 188 bp, Homo sapiens
  chr2:10220752-10220940
  hyper
attgctgaaccctgcggggggcccggctgagtttgttcatttatggaaacgctccccagacgacgctcgccgggcccgtgggaggccgcgggagcttggggggacttcccaaagcctgagccccctagcgatgcgcggggtgggcgggggaaagaccctgagggctgcgcgcgctgcgttcgcgaggt

SEQ ID NO: 37137 - DNA, 30 bp, Homo sapiens
  chr2:10220958-10220988
  hyper
cgacctttcagtgtccgccaggcctgagac

SEQ ID NO: 37138 - DNA, 203 bp, Homo sapiens
  chr2:10260351-10260554
  hyper
ccttttggaagtcgcgctaaccttggcctgagacctgcaaacttgcccaggctggggcgtgtgaaccggcgagcgcgcagcggaaacggggcggggcacctgaggctgggaatgcagaggagccttccggggggcggggcggggcctcccgtgcagaccaatggtggagtagatgcagatgtcaaaacgcgcgctcaagtggc

SEQ ID NO: 37139 - DNA, 30 bp, Homo sapiens
  chr2:10442802-10442832
  hyper
ggccaggtttgggccgcgagggccgaggag

SEQ ID NO: 37140 - DNA, 30 bp, Homo sapiens; identical to SEQ ID NO: 1323
  chr2:10443617-10443647
  hyper

SEQ ID NO: 37141 - DNA, 661 bp, Homo sapiens; identical to SEQ ID NO: 1324
  chr2:10588855-10589516
  hyper

SEQ ID NO: 37142 - DNA, 30 bp, Homo sapiens
  chr2:10861577-10861607
  hyper
actggagaccctgcgcgtctcctccgcgcc

SEQ ID NO: 37143 - DNA, 456 bp, Homo sapiens
  chr2:10862069-10862525
  hyper
gctgcgttgggtctgcgcggggttaggagagaacaaaatgccctcggattggagcgggaccgggagtccgaaaggaagaggttccaccaggggtctctggctcctcagagcttatcctgctttcccccagccgtccggagacgccgcggggaggcaagcggaaagggggaacctggccgagggggaaaggtgcgggtgtggacacctgtgaaggagcagcacgaatcgaatcggccgtagaggctgcagacgcggccgcgaaaccaccggccacgccgggcaagggacccagcactgctgagcgggcacctcgcctagtggaaaaaagactttagtagttcccctcaccccctactacttttttttttcttatttaaaaaaatcctctgaagtctatttttaaagctaataccaatcacaaggttggccagtttgacctgcggtttgacctggtag

SEQ ID NO: 37144 - DNA, 30 bp, Homo sapiens
  chr2:10953100-10953130
  hyper
gggcctgctgggggcggggctggcagtctc

SEQ ID NO: 37145 - DNA, 30 bp, Homo sapiens
  chr2:10975528-10975558
  hyper
ggccttatccggggcgtattccttccaggt

SEQ ID NO: 37146 - DNA, 905 bp, Homo sapiens
  chr2:11051787-11052692
  hyper
tgcccagcaacaggcggcagcattctctccccactaatcctctccaaacagcagtgagagagaatgcctgccgcttcaagccaggtcgcaacccctcggtgacccgctgcgcccgaggaggggccggcggtgcgcggtggtggcggcgggcgcggcagctgtgcccgtctgcccaagggttaatccgtcccctgcagctgccgcgcgtgccttgcagaatttcaccagaagagggtacagtttgaaaagctcctgacgtcaggctggaattcctattgtgtttagaaaaggctcgggcaaagccagcccaagttcgctctctgcacacctcgagcacctcgcggacggcgtgggtccgccagctccgggacctgccgccgctgcctgcgcgccccggggcggaggacggtgccagccgcccacgaggagaccccgctcccgcaggaggccgagctgaagcggcggagcgcgccgccagccagccggggtgagtgccccgggcgaggccggcggccgccaaagcccccgcgggctcgcccgggcgcccggatgccagccccgagccccgccgccgggtgcatgcctcccccgcggcgcgcccccgcaggctgctgcccgctgtgaccgcccttccccgcaggcgggcgccggccaggctctccccgagatcagcgcacgggtggcacccgccggacccccagcggcagcggcggcggcggctgcagggggcgcggggcggaggctgcgagggcgcgcgcggggaggatggacgggtccggggagcgcagcctcccggagccgggcagccagagctccgctgccagcgacgacatagagatagtcgtcaacgtggggggcgtgcggcaggtgctgtacggggacctcctcagtcagtaccctgagac

SEQ ID NO: 37147 - DNA, 329 bp, Homo sapiens
  chr2:11269991-11270320
  hyper
gacacacatttcccctgccttcgcctcccacggacccgccccttcagctccttccctcgcgctcccaagctccggggcccctgagccctgcgccggcggaacggggcggagctcgcgaccctccctcgtccgccgacccgggaaggggcgggggcctacaggaagtgggcggggctggctcgcagggcggagcctcgcctcgctctgtgcatcgcaggtgtgcttgctcccgggctggtggggccaccctgtggctgcctgggctggaacgttctgcctcgcccagctgaaggccctaaacttgctacgccttttggggtgaggaaaac

SEQ ID NO: 37148 - DNA, 203 bp, Homo sapiens; identical to SEQ ID NO: 1326
  chr2:11621382-11621585
  hyper

SEQ ID NO: 37149 - DNA, 30 bp, Homo sapiens
  chr2:11622889-11622919
  hyper
ggtcgagtcctccgcgctggccgcggttcc

SEQ ID NO: 37150 - DNA, 30 bp, Homo sapiens; identical to SEQ ID NO: 1327
  chr2:11623271-11623301
  hyper

SEQ ID NO: 37151 - DNA, 221 bp, Homo sapiens
  chr2:11828583-11828804
  hyper
gctgggaggatccagtttccacgccctgctgtatttttcaggccccgcctgttcctcatttaccccgtaaaagtgcagcccttcgcagaaacatcttgcggtcgctcgggtcccggtgtcctggcccagaaataccctctagagggcgctgtcacgctgagacccgggacaggacgcaccggcgcgaatcagggcccctcgccacaggggagtgttgacaa

SEQ ID NO: 37152 - DNA, 931 bp, Homo sapiens; identical to SEQ ID NO: 1328
  chr2:12856407-12857338
  hyper

SEQ ID NO: 37153 - DNA, 279 bp, Homo sapiens
  chr2:12858219-12858498
  hyper
gaggacccccgggagccgggctcggagcagacgaggtatccggcggcgcccatttgggggcttctaactctttctccacgcagcccctcttctgtcccctcccctctcgctcccttttaaaatcagtggcaccgaggcgcctgcagccgcactcgccagcgactcatctctccagcgggtttttttttgtttgtcgtgtgcgatcctcacactcatgaacatacacaggtctacccccatcacaatagcgagatatgggagatcgcggaacaaaaccca

SEQ ID NO: 37154 - DNA, 30 bp, Homo sapiens; identical to SEQ ID NO: 1331
  chr2:12897042-12897072
  hyper

SEQ ID NO: 37155 - DNA, 30 bp, Homo sapiens; identical to SEQ ID NO: 1332
  chr2:14772553-14772583
  hyper

SEQ ID NO: 37156 - DNA, 1962 bp, Homo sapiens
  chr2:14773808-14775770
  hyper
gttttcttctgggagttggaccgagttcccggaaggggtcggaggctgtgtggtggcgtctgctctcgcctgacctgtggcggcttctccgcccctcgtacccctggggaggcacggaggactcggctggaaagggtgactccggtgagggcacgtaagctagccggcaggtcccaggggcactgcacgtcttggggagggacaccgaaaggggcagcccggactctgacggtgtctctgcctctctgtgcctccgcagatccccgctcctggccctcgcctcgccacctcattgatgggcaaccaactggaccgcatcacccacctcaactacagcgagttgcccacaggggacccgtcggggattgaaaaggacgaactgcgggtcggggttgcctacttcttctcggatgatgaggaagacctggacgaacgcgggcagcccgacaagtttggcgtgaaggcccccccgggttgcaccccctgcccggagagccccagccgccaccaccaccacctgctgcaccagctggtcctcaacgagactcagttttccgcctttcggggccaggaatgcatcttttccaaagtgagcggtggccctcagggcgccgacctaagcgtctacgcggtcaccgcgctgccagcgctctgcgaacccggcgacctgctggagctgctgtggctgcagcccgcgccggagccgcccgcgcccgccccgcactgggccgtctacgtgggcggcgggcagatcatccacctgcaccaaggcgagatccgccaggacagcctgtatgaggcgggcgcggccaacgtgggccgggtggtgaatagctggtaccgctaccgcccgctggtggccgagctggtggtgcagaacgcctgcggccacctgggcctcaagagcgaggagatctgctggacgaactcggagagcttcgccgcctggtgccgctttggcaagcgggagttcaaggcgggaggggaggtgccggcaggcacgcagcccccgcagcagcagtactatctcaaggtgcacctgggagagaacaaggtccacaccgccaggtttcacagcctggaagacctcatccgcgagaagcgccgtatcgacgccagcggccgcctgcgagtgctccaggagctcgccgacctcgtggacgacaaggagtagccgcctaggggctgccggcccctctgcctcccccgcacctcgctcccttcccttccccgcacccggacttcgcagtcagcggttctcaacctctgccccgccccgccacgcgcgtccgccgccggtggcccgggcccgggctgcacccccgcatccccaagccagcggcaggaagtctcaggaactgccccagggccgaaagggcgccgctgcgagcgcctggctgacagccacagcggtggtgacggtgctgggagaccccgcgtgcgctttccccttgagatgtaaaccgggaacggggaaggggctgaggggagaaaggacatggccttccccgcgagtccatggccagtgactgtggcccgactcgaaaacaaccctcttctcaaaagggaccatcaccgccccgagcgtgcgcacacagaccggtcggaggcgagaactggtctctacagggcacagttcagctcctctgtggatgcgtccccagatcgcaggatttccaagaaatcgagcctgtcccttgtgcacttgggaataattccccaagacagcacttcgggattccgggttatcctgaggctgcccgggacttttccagctctccagccccaggtctcctgacattgtgttccaggctgcgggctaagccagacagtgtttgcctccggttctttccaccgtgggaagcgaacgccacccccacccgcctttgcctgcgagtctccctcgctggcagaagggaagccggcccggtcccgggaggaagatggcgctgcgaattcggt

SEQ ID NO: 37157 - DNA, 30 bp, Homo sapiens
  chr2:15044081-15044111
  hyper
tgcagggggcggcatcgagcgccctccata

SEQ ID NO: 37158 - DNA, 30 bp, Homo sapiens
  chr2:15701351-15701381
  hyper
aagtcatagagaatcgtctcctcctcaccc

SEQ ID NO: 37159 - DNA, 232 bp, Homo sapiens
  chr2:16079904-16080136
  hyper
agacctgcggagtggccgcactccaggtccgcgccaaggccgggcagctccgctttctgctcagtctccgcgaggtgtcgccttcggccgaagaaaccaccgcggcgccaccctcgtagctcgcacttatttatttatttattttcaaacaaggggggcgcccctcttctttcaatttgaaactggaaacatccagaggtcttgttcctaagggggcgcgtcctctccctgc

SEQ ID NO: 37160 - DNA, 38 bp, Homo sapiens; identical to SEQ ID NO: 1335
  chr2:16080353-16080391
  hyper

SEQ ID NO: 37161 - DNA, 169 bp, Homo sapiens
  chr2:16080605-16080774
  hyper
ttctctccccgccccccgggtgtgtcagatttttcagttaataatatcccccgagcttcaaagcgcaggctgtgacagtcatctgtctggacgcgctgggtggatgcggggggctcctgggaactgtgttggagccgagcaagcgctagccaggcgcaagcgcgcacag

SEQ ID NO: 37162 - DNA, 30 bp, Homo sapiens; identical to SEQ ID NO: 1336
  chr2:16081151-16081181
  hyper

SEQ ID NO: 37163 - DNA, 30 bp, Homo sapiens
  chr2:16081452-16081482
  hyper
gagtatccctgcagcgggtgaatgccgagg

SEQ ID NO: 37164 - DNA, 824 bp, Homo sapiens; identical to SEQ ID NO: 1337
  chr2:16081809-16082633
  hyper

SEQ ID NO: 37165 - DNA, 30 bp, Homo sapiens
  chr2:16689806-16689836
  hyper
gtggaggcgacaagcgggtccactcctatc

SEQ ID NO: 37166 - DNA, 158 bp, Homo sapiens; identical to SEQ ID NO: 1338
  chr2:16790283-16790441
  hyper

SEQ ID NO: 37167 - DNA, 172 bp, Homo sapiens
  chr2:17699605-17699777
  hyper
gggtcctcaggaggcgttaaagaggaggtaggctttctgagctcggccatccgcggcgtgggctgagggagagacatgacagcgaatggaaaggatctgtccgagtcccggcggggctccaatcccttaataggcggttccgggccgctctggtcacgcccctgacccgccc

SEQ ID NO: 37168 - DNA, 580 bp, Homo sapiens
  chr2:17719857-17720437
  hyper
tgcaagtaagttatctaaaatcgaacaccgccacgaaagagacctccagggtgcaataaataggtatatctcgttgaagtggagaaatggcatcatgaccctttgggttgatgcagattacagtgcggaggctgttctcgagagagaaactagaactcagcgtaaaatgctgtagtaggggaaatcgaccaaagacgagattttgaaagccttttgaaagtcgtttttctagctaaaaagaaaaagtgacttattcaggactgactccccctgccagtcccaggaaacaggagcagcccggcgcgcccgggagccccgcagcgcagtgcgcactgcggctccagagcgaagggctggcgcccgccagattctaaacgtgctcggctgccgcagcccgccggggccgcgcgccgtggtccgcgcgactccgcgctccgggtttccgcggtcaccagcactggcggaagagccctgccgagaggggacagccgcgggcggtgtcccgggagtcccgagagcgcgctccccctttgcgcaaccttcccgaggcgtcctgcccgggaagccagttcctgggttc

SEQ ID NO: 37169 - DNA, 330 bp, Homo sapiens; identical to SEQ ID NO: 1341
  chr2:17721348-17721678
  hyper

SEQ ID NO: 37170 - DNA, 364 bp, Homo sapiens; identical to SEQ ID NO: 1342
  chr2:17721750-17722114
  hyper

SEQ ID NO: 37171 - DNA, 30 bp, Homo sapiens
  chr2:17934864-17934894
  hyper
aaagcgacagcgcgcgccttcaccctaccg

SEQ ID NO: 37172 - DNA, 30 bp, Homo sapiens
  chr2:17935191-17935221
  hyper
ctggtaggcacgggcggctccgcagtgacc

SEQ ID NO: 37173 - DNA, 343 bp, Homo sapiens
  chr2:18011853-18012196
  hyper
taagtttccccagccaccaggcgttcagtcactggctgcagatcccgcaaccctcgggtgttcaagtgcgcggggtggtgcgggcgctcccgcagtccgcgcttggctcgtgggaggcctcgggcgccccctccaggattccgtgctaactgcaaacgatcgcgctcgcagggaggcccccagtgcttggaaaactccaggaatcccttcagagcactttatttccaggccagcacgcggcgctctgcagacctagtactgggctgtggataaggaagagcagagcggatgggttacgccgaggatgcccaggctgagcctcggagtctggtgctcctggact

SEQ ID NO: 37174 - DNA, 1090 bp, Homo sapiens
  chr2:18059050-18060140
  hyper
cgcgggggtgggtcccgaagcgtcccatttctcctcctggctgttaactgagcgctctcgctcagtgcagcgaggccagcgatgccttctggaccacacgctgtcctcgccgaggtcctggtttgttcctcaacgtcggctgaaggcatcgtcccctgacttcctcttccattcgtccttccgaaaggggacccgactggttcctcttctacatatgaggcgcatctgcttggtgcaaatgtccaagcacctcttctgactcggtgagtggaggaataagacaaagcatcttgttctgcactgtgcctgagtcttcaggcagcgggaccgatggcaaacattggcaggaactggagctatatgtactctccttcgcactttgttttaaaacaagtttgggcctcgcgatttcctgaggaaatccaggcaaattagcaaagtgtcgcttgggccgcgactttagaaaggcggttgccccagccgccggggccgcgggggaggtcatctttttcccgcagggccacggcgcttccggcccaggagggcgcgcaggtgggaggcgcggggcgcgctcctggtcccacccggacagcgcctgccgctccggggtgactctgcacttgggcctgggcgggggcgcgcggccggcagggcagcatctaggtctatgggtctgtccgcctgtctggcggtcggagccccgcagtcctcagccgcccgcgccctcggcccggggcgcccggctgcgggcccgaagcgaggggctggcggagctgcgaccaatggggcggcggccgagcggcgggccccgccccgtcccgtccggccccgccccgcccgcagctcccgggagcctcgctctagcggggcgggaccgacggacagaccggccgacgcgggccaccccgctctcctcgccgccgcggcggcaggcgcggggccgcgccgcgaggcctgatccctgcagcgcgggcaggcggcgtcgcagagcggagctagctggatgcgtccggactcctgcaggtacctggctggcgtccccacctccctgcgcgctccggagacttctccgggcgaccctgcaacttta

SEQ ID NO: 37175 - DNA, 790 bp, Homo sapiens
  chr2:18060198-18060988
  hyper
cgaccccgagggtctacggccgcagagcactttccgtccttctgggcgtctggcccgcggcgcccgcatcctctggtccccagagcccgccgtcgctggagccctaaggctccgcctgttgcgtgaactgcgggctgttgaagcggtggctgggttgatttgaaagcctcggggaaggtatttaggatcagctttcggggagtggggtgggctatggtcagggggaggaccacctggaggcgggagaatcgatgagccgaagaaaggcggcacctcgcgtaggggcatccccggggcgtttccttggccgggaagccgttccttcccttcctcgagaggaggcgctttcctggcgcttgtaaatgcttcccgggccgtctgctccgccttctttgtcattcctcccctcccctttgccctgcagctgtgctaggcgccccgcgacagttgcagggaagagcgaacccagggcccttgctctcgtgcagcgctgcgccctgggtggggacggcgtgaggcttgcagcgcaggtgtggagtcacttgcggactctgcgtttggatcagtggcagtggtggggaagggtcaccccggggtcaggaactcctcttttttttttcgcgcctttctgggtggctgcccgacctcctgaggcaccttggctagcaagcgagccagtcttgccggcaggggccgcggcgagcctggctgggcgcctttcgcattgcagggcttgtcctgcacccccaaccccgctctgtcccttctcgttcatttggagaaaggagca

SEQ ID NO: 37176 - DNA, 30 bp, Homo sapiens; identical to SEQ ID NO: 1343
  chr2:18742028-18742058
  hyper

SEQ ID NO: 37177 - DNA, 109 bp, Homo sapiens
  chr2:19550039-19550148
  hyper
gccagcagggggcagcgtggctctgagcgtggaggccagggctggtccgcgccggcagggccagcctccagtgcccagttgggttcccgggcctcgaagttctagcccg

SEQ ID NO: 37178 - DNA, 138 bp, Homo sapiens; identical to SEQ ID NO: 1345
  chr2:19550407-19550545
  hyper

SEQ ID NO: 37179 - DNA, 15 bp, Homo sapiens
  chr2:19550611-19550626
  hyper
cgggtgcagagcctc

SEQ ID NO: 37180 - DNA, 31 bp, Homo sapiens
  chr2:19551625-19551656
  hyper
ctctccactcactctccgcagtcagagttac

SEQ ID NO: 37181 - DNA, 127 bp, Homo sapiens
  chr2:19556755-19556882
  hyper
acatcgaatctccaacgagtggtgacaggcgtccggacccccgtgaagaggactgaccggcaccggatacttctatagcattctcccaacaaacgagatctaacgaacccattggcaaggcggtcat

SEQ ID NO: 37182 - DNA, 1844 bp, Homo sapiens
  chr2:19556980-19558824
  hyper
cgccgccggtcgctgctagtcccctccagcgcttctcttccctagggggttgtgaacctgggacacctagccttgcacgtggttttgttccgcagagccaatgcgcagctcttagcctgggtgaaatttaccaaattgtggcaacaaagaaacccttgcggctactttacacattgagaacccaacccgctactgcctgagctgctgaaaaaggactaaacgtggtttttcattcttctccgagacatttccgaggagaaattagttcagcaggcagcccttcacccctttcccccttctttctctcctgacggctggattagcggacagtcaggggagtaacagaacttttcctgtccccagcccggagaccctagggctccacagagtttccactagtgctgtgtgtgggtctcgaattggaaagcagtgcttgcgcccactgcattgcctccctgcaccaggacaatcaagggttccgctccaggccttgacgacacagagcaatcatcctatggagaatatccctaagttagagcgcgagtgcaaggcggggttcagactcgcagccctgcgctctcgggtctaggcggcctcatactagagcgcaactcctcaaaagacaaacttgaacgaaagcgctaccgagctggggcatgcacctgtccctggcgcggtcggctgcggctgtggccattcactccctctcccttccttcttcgtcaacctgggcgtcagccagagctaggagcgcgtctcaggaaagtttgtgcccgctgaagttgctctggtttcttaaagggggcccacagattgactttcaaagtccgtgggcacctcgcccgtgattccgcagagccgggcgggctggccgcagtagcggaggcccgccccccttaatccccagcggtcagaggccgaggaccccgcgcaggaagtcctgaggcagcacccccaaccaccctgctctcactttcacaaaagtcctacagcattcgtttggcaagagcttccttcaggggcattgagagagaggaggcacccgccgagcagtgacaaggaacctgggagtcctgcccgcattcgctttgctgagcccaggcgcccaggactgcaattaccttgttccgcagaggtcctggggctgagcacgtctctggggctttagctgaaggggactggggaagccggaggccctggagcccacaggcgcccctggagctctagtgtcccgactcctctcctgccgcggggactccaagcgccggacacgcgggagcgagcgctcagcagccccggatcctgcacgccggggacggtgagcctcgctcgcggctccctcgctgggtctgaaccaggagcagctgagaacgtgccggggagaggccgagctccgactcactcatcccttagcaccgagccgcctacttattttaatccaccaccctccctcctccaccacccccacccccgccccttgcctcaggattcctcccctccctcccctgccccccaaccctgccctgcgcctgcgcaatgaaagacaaagtttttgctgacccgggcagcagactttggcagctgctctcgcttggacccggcctctcccaacctgcgtcccctcctcttcagtcccgcgcgacccctgctgcctttttaggtccagagcggcacgcctggcgcactggaggaaacggtccctagcagatgagagcgggctggcaccgcacgtttcgaggtcctatacttgggctcctaggacacagcccgtgctctttgggaggagggagggaggggcagtagctctgtgcaccgggatccccacaccgcggcttgggtttcaa

SEQ ID NO: 37183 - DNA, 186 bp, Homo sapiens
  chr2:19561286-19561472
  hyper
cagcttctgctagctcggagcctgcggactccagccggcgcgaactccgccgcgactctttctggctctctcgctcactgccttcggggcggaaccgcgggcgccggagtggtcccagactcggctgggaccgggcagcctagaagaagggtcccctcagtagagaccaggcctccagctctccgt

SEQ ID NO: 37184 - DNA, 383 bp, Homo sapiens
  chr2:19561523-19561906
  hyper
cgatccctccgtctgcccgggcttccgggctgtggaccgcactgaacccagtcccgcagcaagccctgctgccgccttttcctgggcacgcctgcggtggtgacggcccgctgctcatgtctccacgccaaaccccagcccctctcccgattcctgctccttggtaaagcgccccagcctgtcttcggagtgaaaattgagcagcttccagaaaattaactagaatgtggtctatattgctttgagttgttttggattcaaaaaaaaatgaaccccacctctccgcaccccatagcctaaaaaaaaaaaaaaaagtcctcattttttcaaatgaagtttgctcagcacttgcgaatttttgcttccaacgcaactacttcctg

SEQ ID NO: 37185 - DNA, 30 bp, Homo sapiens; identical to SEQ ID NO: 1348
  chr2:19563434-19563464
  hyper

SEQ ID NO: 37186 - DNA, 365 bp, Homo sapiens
  chr2:20068517-20068882
  hyper
ccagcccagtagtggagtccccgccgcgggccccttgcttgcagggtaggtgtggcccggtcgtcccactctccgccccctcctgctcctcctcgccgtgcccaacccgcccgcttctcctgcctaggctcttctttctgctcctgtcgccatggccccggcctcggcgctcaagcgaccctctcgctccgcccaggtcagtgaaggatgggatgcaagtgcccgccaagccccccgtttcccacgtggagttcccacagggcagcagggaggggccgcgccttctctaactgacccgaaccgacccgggcttcacaggcttcgtggagagcagctgccccgccggcatcttccggatgaggctc

SEQ ID NO: 37187 - DNA, 30 bp, Homo sapiens
  chr2:20101124-20101154
  hyper
taagtctctgggtgcgaatgaggaacgtgg

SEQ ID NO: 37188 - DNA, 69 bp, Homo sapiens; identical to SEQ ID NO: 1350
  chr2:20101401-20101470
  hyper

SEQ ID NO: 37189 - DNA, 30 bp, Homo sapiens
  chr2:20189472-20189502
  hyper
agggtagcacgtggcgacttatcctcaagc

SEQ ID NO: 37190 - DNA, 43 bp, Homo sapiens
  chr2:20190154-20190197
  hyper
acacctgtgatgatcgctatggagccgcgcctcaggtggcatt

SEQ ID NO: 37191 - DNA, 565 bp, Homo sapiens
  chr2:20212118-20212683
  hyper
gggcttctcctcgttcgatgctcacgcgtccctcccgccgcccgcctgtacctgcaccgcgggcgcggccaggctcgctggtcccggaagcgggcgcgccgtcgggagccgcaggagaggggcggcgtccagggctgcccccgggacctcgggtctccagcctccggaagcccgggcgggccacggggtcgggggcggcggagggcagcagcagcagcggccagagcagcaggaggagtcccgggaggcggcgcgcgggggccgggcgcggcatggtgggctccgtgggcctggtggtgtccgtcgggggccaggagcccacgcgaggctcggatttaaaggtcccgcggcctcgggccccgccccgccccggggcctcgagcgccaggccggcccggcgaaccccgcccaaggccaacaaggagccttgtccgcgcattccagcggcagaaacggaatgtctgggcgaggcggccagcggcgcggtggtcacctcccgcccctgccctaagccccgagccggctgcaactgggtgggctcggctgctgtcgcaacctccgtcct

SEQ ID NO: 37192 - DNA, 30 bp, Homo sapiens
  chr2:20251561-20251591
  hyper
ttagaagtgcaactcgcctcagcgagtctc

SEQ ID NO: 37193 - DNA, 81 bp, Homo sapiens
  chr2:20251797-20251878
  hyper
tcacaggctgataacgtgacctttgcgcgcagctcaattattgcgcgggctgggggcggggcctgcggggaagggacagag

SEQ ID NO: 37194 - DNA, 30 bp, Homo sapiens
  chr2:20252210-20252240
  hyper
ctagaggggctgtccgcttttctttgtggt

SEQ ID NO: 37195 - DNA, 30 bp, Homo sapiens
  chr2:20423099-20423129
  hyper
ttacggagggtcagcgctgctgagacttgt

SEQ ID NO: 37196 - DNA, 41 bp, Homo sapiens; identical to SEQ ID NO: 1353
  chr2:20424155-20424196
  hyper

SEQ ID NO: 37197 - DNA, 485 bp, Homo sapiens
  chr2:20424408-20424893
  hyper
gtctcggggctcaccgtcccgggacccgctgggctagcgcgggaagaagggaagtcttcgctccccctccccctccacgtgcacccgccggcatccgcgggtgaccagtcccggcttcccgccgcctccccgcctggccgccggccgcactcaccggcagggccggctgcaggctcagcgccagcgcgcacagccagagccagagcgccgcgcgcctcatgctgcccggaccggcggcgggagagcggcaggctgcgcgggtcgcggctgcgggccggcttcgcgggttccgctgctcgatgctctcttgggcgcctgcccagcgcgccgctgtcccaggcgagggctgcagggtccgccggctggagtccgctctctactgccggattcctctccgctcggctcggattcggcccgcacctctcccgccgagctccgccttataataaacccacaggcccttccttagccgttgcaaaaactgg

SEQ ID NO: 37198 - DNA, 30 bp, Homo sapiens
  chr2:20425325-20425355
  hyper
atggggccttcaaccgacgggcaaacacac

SEQ ID NO: 37199 - DNA, 30 bp, Homo sapiens; identical to SEQ ID NO: 1355
  chr2:20425665-20425695
  hyper

SEQ ID NO: 37200 - DNA, 30 bp, Homo sapiens
  chr2:20646166-20646196
  hyper
aagggtaggggcggcgggacttggaagagc

SEQ ID NO: 37201 - DNA, 361 bp, Homo sapiens; identical to SEQ ID NO: 1356
  chr2:20646412-20646773
  hyper

SEQ ID NO: 37202 - DNA, 278 bp, Homo sapiens
  chr2:20646843-20647121
  hyper
cgcagtctggttggagctgttgtcttgtatgctcagcgaggcccggagagacccgggagagagctaggccgagtccaccgcccgagtctgctgcccgagcccgcgttacgcacaaagccgccgatccccggcctggggtgagcagagcgaccaccgcccgggagcagcgcggcgagacgcacggtgcgccctatgcccccgcgcccccaccgcccccgccgcggcagccgaagcgcagcgagagaacgcgccaccgcggggcccgggtgcagctagcg

SEQ ID NO: 37203 - DNA, 202 bp, Homo sapiens
  chr2:20647341-20647543
  hyper
tcgagaactatgtggccgacattgaggtggacggcaagcaggtggagctggcgctgtgggacacggcgggccaggaggactacgaccgcctgcggccgctctcctacccggacaccgacgtcattctcatgtgcttctcggtggacagcccggactcgctggagaacatccccgagaagtgggtccccgaggtgaagcactt

SEQ ID NO: 37204 - DNA, 30 bp, Homo sapiens
  chr2:20851137-20851167
  hyper
agccgttagagagacgggactctgctgttt

SEQ ID NO: 37205 - DNA, 30 bp, Homo sapiens
  chr2:20851389-20851419
  hyper
ggcaggcactctcccgacaggggatcttta

SEQ ID NO: 37206 - DNA, 1755 bp, Homo sapiens
  chr2:20865708-20867463
  hyper
caattttaaaggaaaaggacccgcctgcccttcttcggcagttcgtttggcccaggccttcgatcagctgaaagtttccgatctagggggatgtccaggctgccggcggagcagagccgataacccccctctcctgcgcgttcccctgagacttggcctccgcaacctgtcccagccgcggagcaaactgctctgcggcccgcgcgagtgcgccccagggcttcgccgctgccgggcgtcccctccatccacctcgggacccgcgccatcaccgcggcggggtaagaagctcggaggcgccatcccggggctctgcgccgtccgctctcccggctcctggccgctcacgcacacagccggtagctggttttcgttagccgctgccctcgcccagaaggcgggtggaaggtcgccagttggacgcacagccaaactcttagcgcactcccgcgcgagatcccccatcacccggggctgccgtcctcatttcgagctctttctagagcttggctcccgctgaagcgcaacttccgcgcccaaaccttgcttttacgacgggcggtccgcgtccaaaggtctcttacaggcctgccctttcagctcctcgccctcccttcctcccctaccggccccctcccctgctctggccgcccgctgcaatcctttggggtctgtggctgagtggggaaccgccgacccgcgatccggaacgcgactttgaggccgccgggagcatcctgtggcctctctctgcgcggccacccggccgcggcgcgaagcggtctggagggcgagcccttccgcggccccaactctgccgccccgttcccggcattgggaaccagggcagggagggggcgggtgtttctctgcgggggagtggggaggaagctgggcgggtgcgcgcggtgccccgagcctggaaccacggagggcgcgttggtcttgggcggatggagggggtgtcgcactgccgcggggaggcgtgtcgggaggctggggccagtggcagtcgcttggcgagggtgggggcgtagcgctgcggtgggaggaggcggctccggccctggtctccactctaggccggggtggggggcgcatagcggccgccggagctttcagcagggggcgctgctccgggcgttgggcgggggtggggtgggccaggagggggggccgcgggctggccgcgcacacttcccccattattaaacactatgttcaaaaggcgccgggggacttcccggagccacggagcccgcgccgcccgcccgcccggcccacggagcccatggacctgagcgccgccgccgcgctgtgcctttggctgctgagcgcctgccgcccccgcgacgggctggaagcggccgccgtgctgcgagcggcgggggctgggccggtccggagcccagggggcggcggcggcggcggcggcggcgggcggactcttgcccaggctgcgggcgccgcggctgtcccggccgccgcggttccccgggcccgcgccgcgcgccgcgccgcgggctccggcttcaggaacggctcggtggtgccgcaccacttcatgatgtcgctttaccggagcctggccgggagggctccggccggggcagccgctgtctccgcctcgggccatggtcgcgcggacacgatcaccggcttcacagaccaggcgacccaaggtacttacgcctcttctgtgcccgcccatcccgtcaggtcctgggctgagaccagccccggagccgtgccgca

SEQ ID NO: 37207 - DNA, 865 bp, Homo sapiens; identical to SEQ ID NO: 1360
  chr2:21022198-21023063
  hyper

SEQ ID NO: 37208 - DNA, 138 bp, Homo sapiens
  chr2:21540142-21540280
  hyper
cagagagctctgggcagtagacgtggtgattgaggccaactttcgtttaagtctcaatactgccccctcgtggcagtataaactaaggccggagcctatttccgttacctgttagacggaagtgaaaaaattaatggc

SEQ ID NO: 37209 - DNA, 30 bp, Homo sapiens
  chr2:21595656-21595686
  hyper
ccacatgaatattagcgttattgtttctgc

SEQ ID NO: 37210 - DNA, 30 bp, Homo sapiens
  chr2:23608342-23608372
  hyper
gatgagagccgcgccgcaccgctcatagcc

SEQ ID NO: 37211 - DNA, 167 bp, Homo sapiens; identical to SEQ ID NO: 1361
  chr2:23608585-23608752
  hyper

SEQ ID NO: 37212 - DNA, 1328 bp, Homo sapiens; identical to SEQ ID NO: 1362
  chr2:23608960-23610288
  hyper

SEQ ID NO: 37213 - DNA, 30 bp, Homo sapiens
  chr2:23886286-23886316
  hyper
gccccgcggctccgccgtcacgtgtgccgg

SEQ ID NO: 37214 - DNA, 59 bp, Homo sapiens
  chr2:24272436-24272495
  hyper
cagtgggttaatgtcgtcaggcggggccaggctcgctaacagccgggcggggtcccttc

SEQ ID NO: 37215 - DNA, 382 bp, Homo sapiens
  chr2:24272861-24273243
  hyper
gggctggatggggaaggcaggcggagacgccggacgggattcttgggggtctaggagaccatcctccgccatcctcttccgcgctcacctaggggaatgtaggcggcagctcggaggcgggggtctgcggcccggaggcgggggtctgcggcccgccaccgccccgggcttctcctgtcgcggctgcagtcgttcggttatccgctgctgctgataccccagcctgggtttcggcttcgctttccctgccctactcggcgagctctggaaagcaggacctgctctcggatacccgctgctcggggacctcctcctagcgcgtcccccgccgggcctcccctcggtcgcttccctgcgggccgggctgtgagcggctgtgggg

SEQ ID NO: 37216 - DNA, 487 bp, Homo sapiens
  chr2:24299776-24300263
  hyper
gggcccaggtgagtagcgggcgaaggcggggcctgaggaggactgagctggggcgggacccaggtgagtagcggaagggatcggggcctgaggagggtggtggaggtgcggcggggcccagaagtgtagcaggaggtggttggggctgaggaaagtggtggaggtggggcggggctcagatgtgtagcgggaggtggtggggcctgaggagggcggcgagaggtggggtggggcccaggtgagtagcgggcagggctggggcctgctgtggtgcccactggttgcggggcgcgcgggcaggtgccggaggtggtgggcctgggcctctagctgtgcgcaaggcggaatatgtggggttctggcggcttgtgtcacggctgacgctgtaactatacccagaatctccgtccctggaggggccctcaggttgagcgtcagctgatcgggcctcagtaatccccgctgcgacgcccgtccggactcccac

SEQ ID NO: 37217 - DNA, 34 bp, Homo sapiens; identical to SEQ ID NO: 1364
  chr2:24307618-24307652
  hyper

SEQ ID NO: 37218 - DNA, 30 bp, Homo sapiens
  chr2:24715079-24715109
  hyper
acatgttcctgtcgcggcccgggtttggtc

SEQ ID NO: 37219 - DNA, 30 bp, Homo sapiens
  chr2:24739679-24739709
  hyper
ttctatccagctttcttttttttttttttt

SEQ ID NO: 37220 - DNA, 30 bp, Homo sapiens
  chr2:25016063-25016093
  hyper
agtgtgcaaggccgcggtggccgcgtgaca

SEQ ID NO: 37221 - DNA, 204 bp, Homo sapiens; identical to SEQ ID NO: 1365
  chr2:25142479-25142683
  hyper

SEQ ID NO: 37222 - DNA, 80 bp, Homo sapiens
  chr2:25265054-25265134
  hyper
ccgcccgggcccctgtcggccgccgccagtccccgccccgactgtgaatgaaaggcgggcgccgccgagggctggctggg

SEQ ID NO: 37223 - DNA, 729 bp, Homo sapiens
  chr2:25391012-25391741
  hyper
aactccgtctcaaaaaaaaaaaaaaagaccgggttgtcccaagacctcctagcaagctctcggagcctccggaccgccgcgagcccctgggggagaggaggccgccggctccctggagacagcgcctgcagcttcgcggccgtccgcccaggggccggacgtgggccctccagctcagctactggcggcttctcatgccgcagtcggcgcagaaagtttgtcgagaactcgggaccgcggagagccagaggcgcccaggtccgccttcggagccggagccggccgactgcatcgcgaggacggggacaggggatcccggggaaagagcacgggtcccccacgctgcgcccttacctgtctcgggaggctgctctctgagggcggggacgctcggcggcctctctcggtcgcggctcttcttcccctccttcgccgccgcttggtcccgcgctcctctgtccttatatacttgccgagctctcctggtgggcgcgggactttgaccttcccggcagcacaaggagcagctccccgggccaggggaaggggggccgcggggcgtgggaggggggcttccagacgggggacgagcgcggggagacgcgctggaaaggggctggaattagcactgtcctgccgaaggcgcacctggccgctcgccctcaggaagaacttaattatggatggcgttgggtctccgcttagaacgggcgggaggcttagcacccc

SEQ ID NO: 37224 - DNA, 234 bp, Homo sapiens; identical to SEQ ID NO: 1368
  chr2:25439138-25439372
  hyper

SEQ ID NO: 37225 - DNA, 121 bp, Homo sapiens; identical to SEQ ID NO: 1369
  chr2:25440005-25440126
  hyper

SEQ ID NO: 37226 - DNA, 150 bp, Homo sapiens; identical to SEQ ID NO: 1370
  chr2:25457151-25457301
  hyper

SEQ ID NO: 37227 - DNA, 140 bp, Homo sapiens; identical to SEQ ID NO: 1371
  chr2:25458562-25458702
  hyper

SEQ ID NO: 37228 - DNA, 96 bp, Homo sapiens; identical to SEQ ID NO: 1372
  chr2:25459790-25459886
  hyper

SEQ ID NO: 37229 - DNA, 109 bp, Homo sapiens; identical to SEQ ID NO: 1373
  chr2:25461983-25462092
  hyper

SEQ ID NO: 37230 - DNA, 449 bp, Homo sapiens; identical to SEQ ID NO: 1374
  chr2:25463163-25463612
  hyper

SEQ ID NO: 37231 - DNA, 173 bp, Homo sapiens; identical to SEQ ID NO: 1375
  chr2:25464416-25464589
  hyper

SEQ ID NO: 37232 - DNA, 775 bp, Homo sapiens; identical to SEQ ID NO: 1376
  chr2:25466754-25467529
  hyper

SEQ ID NO: 37233 - DNA, 99 bp, Homo sapiens; identical to SEQ ID NO: 1377
  chr2:25468110-25468209
  hyper

SEQ ID NO: 37234 - DNA, 311 bp, Homo sapiens; identical to SEQ ID NO: 1378
  chr2:25468876-25469187
  hyper

SEQ ID NO: 37235 - DNA, 174 bp, Homo sapiens; identical to SEQ ID NO: 1379
  chr2:25469473-25469647
  hyper

SEQ ID NO: 37236 - DNA, 124 bp, Homo sapiens; identical to SEQ ID NO: 1380
  chr2:25469905-25470029
  hyper

SEQ ID NO: 37237 - DNA, 163 bp, Homo sapiens; identical to SEQ ID NO: 1381
  chr2:25470448-25470611
  hyper

SEQ ID NO: 37238 - DNA, 193 bp, Homo sapiens; identical to SEQ ID NO: 1382
  chr2:25470891-25471084
  hyper

SEQ ID NO: 37239 - DNA, 91 bp, Homo sapiens; identical to SEQ ID NO: 1383
  chr2:25497815-25497906
  hyper

SEQ ID NO: 37240 - DNA, 238 bp, Homo sapiens; identical to SEQ ID NO: 1384
  chr2:25505303-25505541
  hyper

SEQ ID NO: 37241 - DNA, 30 bp, Homo sapiens; identical to SEQ ID NO: 1385
  chr2:25522993-25523023
  hyper

SEQ ID NO: 37242 - DNA, 107 bp, Homo sapiens
  chr2:25565422-25565529
  hyper
ccctgcagttctcccgacctccgccagagcccactgcgctctgcctgcctcagcactggggctggggacagcagcgctggcccaaccgcgccgcaacccccagccag

SEQ ID NO: 37243 - DNA, 30 bp, Homo sapiens
  chr2:25600044-25600074
  hyper
tcaggagcaccccacgtgctggccagacgc

SEQ ID NO: 37244 - DNA, 30 bp, Homo sapiens
  chr2:25896714-25896744
  hyper
ggtgcccggcccgacgtgactacccgacaa

SEQ ID NO: 37245 - DNA, 30 bp, Homo sapiens
  chr2:26100796-26100826
  hyper
acactgagaggactcgccgcagacgccgag

SEQ ID NO: 37246 - DNA, 30 bp, Homo sapiens
  chr2:26205080-26205110
  hyper
aggagcagagggagcgctgccgtaaacagc

SEQ ID NO: 37247 - DNA, 161 bp, Homo sapiens
  chr2:26395432-26395593
  hyper
gagcaggacagggcgcgggtgggcgcggcctccgggaggccagcacgagggggagcggcggggcccggacacacccagccagaaggaggaggccgaccccgcgccgactccgcagatgccgctcgggacttcgttgtccctccaggcgcccgccctggggt

SEQ ID NO: 37248 - DNA, 218 bp, Homo sapiens
  chr2:26396087-26396305
  hyper
ccatggagaagctggcggccgggctggccggcctgcgctggagcatgggcgccttcccgctcgacctcatcgtcagccgctgccgcctgcccacgctcgcctgccttgggccaggtaccggggtcgctggagatggggaccggggtccgcggggaaatggtgggctctccagccaggggccagagggatcgtgaggagggtgcggcacccgcaccctc

SEQ ID NO: 37249 - DNA, 347 bp, Homo sapiens
  chr2:26401772-26402119
  hyper
aggcagaggcccctaggagggcgaaggccggcgggttaacgaggaggcgctgagtgcacggctgggctccacgctgatttctcctaatgaattaataatggcgctcgggcgggcgggggtggccggctgcggaccgcggagagagccgaggggaaggccgtggagggaggaggacggcgactcgcgccgggtggggctgaaggcactgcggggtgactcggtctccaggctgcggcgctctgctccgggagtcagggagacctggcctggccccgtactgtcccccgtcccagcccccgcccctggccctgcgggaggggccaggcgtcttccctgagcatggtgcc

SEQ ID NO: 37250 - DNA, 178 bp, Homo sapiens; identical to SEQ ID NO: 1386
  chr2:26407743-26407921
  hyper

SEQ ID NO: 37251 - DNA, 505 bp, Homo sapiens; identical to SEQ ID NO: 1387
  chr2:26521880-26522385
  hyper

SEQ ID NO: 37252 - DNA, 30 bp, Homo sapiens
  chr2:26726676-26726706
  hyper
gccgagcttcatggcggagaacacgctcct

SEQ ID NO: 37253 - DNA, 31 bp, Homo sapiens; identical to SEQ ID NO: 1388
  chr2:26749880-26749911
  hyper

SEQ ID NO: 37254 - DNA, 30 bp, Homo sapiens
  chr2:26915383-26915413
  hyper
ctgcccgggctctctcgcggccgcccctcc

SEQ ID NO: 37255 - DNA, 454 bp, Homo sapiens
  chr2:26915612-26916066
  hyper
agcgggtgcccggcgcggagagcggcgagcgcagccatgccccaggccgcctccggggcagcagcagcggcggccggggccgaggcgcgggccgggggcgccggggggccggcggcggcccgggcgggacgatgaagcggcagaacgtgcgcacgctggcgctcatcgtgtgcaccttcacctacctgctggtgggcgccgcggtcttcgacgcgctggagtcggagcccgagctgatcgagcggcagcggctggagctgcggcagcaggagctgcgggcgcgctacaacctcagccagggcggctacgaggagctggagcgcgtcgtgctgcgcctcaagccgcacaaggccggcgtgcagtggcgcttcgccggctccttctacttcgccatcaccgtcatcaccaccatcggtaacggctcgccgggcggggggcgggaacccagggctgg

SEQ ID NO: 37256 - DNA, 336 bp, Homo sapiens
  chr2:26916088-26916424
  hyper
cggggccggctggggctgggggcgggggctcccccgagaggggctgggcgccgaaccctgcgctcgcagaaacccgagttcagcctggcgtgtgtgctccgcggggacggaactcggggaggcgtcgattcctggctccggacctgactctccggccgggccagccctaacttggccctgccatgttgcataggcccccagggactccgaagtgtgtgagaggggcagggacgaccggcggaggctcgggcaggaggggtgtggccgggccaggccctgaacagggcgctgagagtgagcggcgggagagcgccagtgctccgtatccctgaggat

SEQ ID NO: 37257 - DNA, 30 bp, Homo sapiens
  chr2:27008438-27008468
  hyper
gagagtcgcagatacgacacggggttgtca

SEQ ID NO: 37258 - DNA, 31 bp, Homo sapiens; identical to SEQ ID NO: 1391
  chr2:27069031-27069062
  hyper

SEQ ID NO: 37259 - DNA, 98 bp, Homo sapiens
  chr2:27069892-27069990
  hyper
tccccaccggatcgccggggagcccggggagggagggattctgcagctgcagcttggaggtccttgatgctgcattttaacgcgcatcgcaacgcctt

SEQ ID NO: 37260 - DNA, 1666 bp, Homo sapiens
  chr2:27070260-27071926
  hyper
aagacaggcactgggcctgagcgctctggacagggaagcacccgcgtggcgctgggcaaaatcttctcagtggagagaacgcactccgggttcgagacctccccgggtgcagatgcgaactgcggtggccccaagtggccgtccactttgttcatgagaacagttttcctataacgcccacccggccctttgcatcccgcaatcccgcgggcgtcggagcgggtcttggcgcgaaccaggcggcctcggcggggtcctgcggcggagggcagcgcggccgcagcccgggagaggcggccgcggcattgtttcagcccctggggtgggatccagctgggggaggggaggcggggtgtcctccggaaccgcccccggccctccctggggacccgtgcctcagcgcgtccaggctttgtggtgtcctgagtcgccatggaaacccgagggaacgcggagccgggtgctaggggggtcggtgagttctccggccgcgccctccgtccgctctcggaccccggccctgcagcagggcctgccgggagttgtagtccccaggcggcggcggcgcgcggcgccaaggatgcgggacgccgcctgtccccgcctccccttaacctgctagctgaggtggggagcggcgggaggagccggccgcgcggtgattggcggaggccgctcccagcccccgacacgcgcccctcccccgctccccactctggactcccgcgctgggcgcgctgaggcggcccccgagcgagcgcgcgtgcagccgccgccgccccgagcacccgcagctccggcgccgcggcgagacggagacggaccgagccacgggcccccgcggccgcagcatctcggaggagtgggtgatggcaggggggtcggtgggcttacccctcccgggctaggacatcctcctctcccccttctgtttctgcgtgaggcgcacaaaagggcggggagccgggtgagcctggggcccggccgcaggggacgcggcgggaggtgtggtttggggttgggaggtggccatcggggctaagccggggcgctcttggggtcctctttgtacgcccgcgaagcgccgtgccgggccttgctcatagtaagcgtttaatgcgtgctcgcggggttgcaaagccctggggtgaggaggcggctcggccgaggggtttcgcgcctagcacgcagtgggccgctttcctagccgggcgcggtgcagtggaccgctggagggctgggcgggggcgcctctggccgggggccagtcctgccggtcccaggatctgcgctgtccccggtcccacacaccacccagatacacaccctccgtccttctcgcctccgagctgggatctgcccagcctggacccgacccggcggtctgttccaccgcccggctaacggagcggacgcctgcagaggactcgcccgccgcctccgagcctcccgcctgagccacaaaggcctcctgcggctgcccagcccggagcgggcgccgagccgggtccctcggctggagcccagcgcgggagcccgccttgcagcatcgatctcagcgggcaccgacgtcgacgccccgggcctggggacggggctgtagtctgagctggagagaagccgggagagggcgaggggaggcctcggttgagaaaagatggggatg

SEQ ID NO: 37261 - DNA, 456 bp, Homo sapiens; identical to SEQ ID NO: 1393
  chr2:27072486-27072942
  hyper

SEQ ID NO: 37262 - DNA, 208 bp, Homo sapiens
  chr2:27274294-27274502
  hyper
gtcccagtttctgccgctttatctttcccgcctcccggcaggcaggccgttaaccgtcttccggaagacgctgctagaaccctccggccgctcctgcccgccatcgtccccgaacgacactcgctcaggtacccactaacgtgcgaggaaccctgagagctgaccaatggtagcgagctttactgggcgggtcgccagctgcagccac

SEQ ID NO: 37263 - DNA, 250 bp, Homo sapiens; identical to SEQ ID NO: 1395
  chr2:27308892-27309142
  hyper

SEQ ID NO: 37264 - DNA, 111 bp, Homo sapiens; identical to SEQ ID NO: 1396
  chr2:27309206-27309317
  hyper

SEQ ID NO: 37265 - DNA, 136 bp, Homo sapiens
  chr2:27341780-27341916
  hyper
gcctcgcctcccgccgccagcctcccccgggccgctccacgtggccgctccacgtcgccctcccggctggagccgccgccctggccgggcagagtccggagccagtgccagccgccgccccgcccgccggacctgg

SEQ ID NO: 37266 - DNA, 30 bp, Homo sapiens
  chr2:27346513-27346543
  hyper
gcacagccaagaaccgcggaggggaagaag

SEQ ID NO: 37267 - DNA, 30 bp, Homo sapiens
  chr2:27357671-27357701
  hyper
gcgcggggcgcgggcggaggaggtggagcc

SEQ ID NO: 37268 - DNA, 225 bp, Homo sapiens
  chr2:27440127-27440352
  hyper
ccggttttgcagtgcggagaccacgggggcccactccccgtggctccgcggaccccgccccttacgtgcccggccccgcccctcacgccgcctgtgtccgcgccgccgcagtctctgctgctgccgccaagcgcgcccgaggctcctacgctgccgcgcccggcttctctccagcgccccgcgccgttagccacgtggaccgactccggcgcgccgtcctcacgt

SEQ ID NO: 37269 - DNA, 397 bp, Homo sapiens
  chr2:27473081-27473478
  hyper
acagtgagggtctctgcctggcggaggggaaaagggtcttcccgtcctgaccccagtcctgagactccctgcaaagacttccggctgcctctgccgctgcggtggcgtatgccccagttgggggcgctgctccccagccagccgggctctaggaagcgggagggccaaatgcctcctttaagccggctgcaccggggccctgaccgggcgggagggctgctggagggtggtgcttatcacccgggcttcctcttgaccctgccggctgggccctgggccttggccttcgcctcttaaacgtggtgcaggactcaccctgggccacccccaggtgggcagccttgggagaagggcaggacctgcccatgtgcccatgctcctccgcccagtcactgca

SEQ ID NO: 37270 - DNA, 995 bp, Homo sapiens
  chr2:27484927-27485922
  hyper
ggaggtcggacggccgctcagaggggcaggtggacggtggcggcaggcgcgggggccggcggggcgcgttggcggttctcctgccacccccggcccgctgtcccggccgctccgcgcgcctcatttcacacctcgccgcccccggccccgtctgtgcggagccgggaatacccccgctgcccagaccgcacctgctccttcctcgccgccccctcgcttcccggcggccgcccgccccccaggggcccgcaagacccgcgcggagcccggcccatcctcgggccccggcgcccacagctggccgcggctggagggggcgcgcggaggggagcccccggggcctacagagggagctctgaagcctgggcagcgaggcgctcccgccctgggcccggggcaatgcggaccttggcgcaccgggcgagggctccggcccgaccgagcggcagctgctcccagggaaggcaggcgccgcgggggtggcggaggggtccggcggcctgggacgccggccggaggggagtgagaggccgcttcacccgaggaagtcaggcggccgggaggaggcgtagccggctgtgtagggctgggcgctccgtgtggccagaggggatgaagcggggtgcagcggagcgagggacccgcggtgcgctggggcggccgccggggcccgcgccgagagagacaacgaaatggacggagggtagtagggtggcgcccccgggccgagggccagcccaggtctgtcctacctcttcaaacgcaggctgcctccggcgccaccgcggtcccgggggctcaccaggcgagtggtctccaagcccccagcggctggagagggctccatgttcccggtgccccgaccgtctaggccccaccgaggaagagagaggccgggccggccccgcgccaagtccgagcagcccgccgacccccgggatccccgcagggcggcggggccaccagagtggagcgaactgcagcgactgtggcgc

SEQ ID NO: 37271 - DNA, 30 bp, Homo sapiens
  chr2:27546101-27546131
  hyper
cagctggactgtgccggaccctggtgtggg

SEQ ID NO: 37272 - DNA, 257 bp, Homo sapiens
  chr2:27593101-27593358
  hyper
gagctcgtcggctccgcgtaccagtaggcaggcccggctcttcactcaccctcgcgaacagccacggccacagcagccatcgccctcagtcctaggctccgcccgccgtggtcacggagccgccccgctgcctcgctccgcggctgcagggtccacagcgccacctgggctggaggctgagccgcagaagcgaagcgcgcagccccaatcggactacaatttccgacgggccccgaggccccgccccgcactacggg

SEQ ID NO: 37273 - DNA, 30 bp, Homo sapiens
  chr2:27632316-27632346
  hyper
gcaggaaagctgggcgcgacccgtgccgga

SEQ ID NO: 37274 - DNA, 30 bp, Homo sapiens
  chr2:27651383-27651413
  hyper
gaacgcccgagggccgggccccgcccaccc

SEQ ID NO: 37275 - DNA, 37 bp, Homo sapiens
  chr2:27712735-27712772
  hyper
tctccttgaccaatcccgtcgccgcatgcaaactcaa

SEQ ID NO: 37276 - DNA, 351 bp, Homo sapiens
  chr2:27717786-27718137
  hyper
cggtgcccagagggcggcccatcgcccgactcggtggcgctgcccctaccccatcccggcgcgggcccggcgacgcgggcagcgcggggccgagctgcgggcggagcgggcgcgggtctgcggagcccccagggctcgagcgggccacggagtctgtccgggagcagggggcgttgcccggacgctggcctgggtccccggtgcgggaggcagtgcggcggcctccgcccgcccctgcagcgggatgtgaccgtcccggagagccagccgccgccttctgcagcgctggccccgctcgctccgccgcagcccggccgggacgcgcgggcccgccccgcccagccggggttc

SEQ ID NO: 37277 - DNA, 132 bp, Homo sapiens
  chr2:27718172-27718304
  hyper
cgtcctctcggggctcctcccacgaccctcccaatggcgcctccggagcccccatcccttatcccttctctctcccagctgaagcggacgagtcggcgggggcgtggggggtgagacgcgggtgctagggtc

SEQ ID NO: 37278 - DNA, 352 bp, Homo sapiens
  chr2:27805989-27806341
  hyper
gactcggtgctgtacccgccgtgagtttcttggtttgaccgttatgctttagaggtagcgctgtcgagcccggaacacgcggtccctcgcttttgtcccatgctgagttggttttatcagaggccatcgtaggccccacccttctagatcagatcacctgtccctttttctttacccacgttctgctgcctgttccccacctccttggatttaattcctcgccacattaccattagtttctattccttttacatccccaatgtctctcatatccgttgtcttttcttttggcctcccttttagagcctgggacagggctttgagaatgggggaagacgaaggctctggtatt

SEQ ID NO: 37279 - DNA, 323 bp, Homo sapiens
  chr2:27851761-27852084
  hyper
tcatcagccctgcccgacgctaagaagatgccctggcaaccgccgcgcccctcacccgctcctttctgacgctgtggtggttttcgttcgcagcccagaacattgcggaagtttctctacccatgcggtgtctctatggtcgggtgggtggggccaggaggaagatggcggcgtccgcagctgccgctgagctccaggcttctgggggtccgcggcacccagtgtgtctgttggtgttgggaatggcgggatccgggaaaaccacttttgtacaggtgacgtacacagcatgggtgtagtaggggagcgcaaaaggttgcctc

SEQ ID NO: 37280 - DNA, 30 bp, Homo sapiens
  chr2:27886205-27886235
  hyper
acgaagaacaggcacggagcccaaggaatg

SEQ ID NO: 37281 - DNA, 30 bp, Homo sapiens
  chr2:27886740-27886770
  hyper
gggtttcgaaggagcggatttcgaagttgc

SEQ ID NO: 37282 - DNA, 309 bp, Homo sapiens
  chr2:27938296-27938605
  hyper
gagaagccctcctcccgggagcctgtttggggggcaggcctggccgagtggctccgtgaagacgcaggcgcggccggagggcgcggggctcgggcaggatcgcgccgccgggccgggagggggctgcgggcgcgcggcggatgtcacggcttacctcagagcccaaattagaaggctgaaaaaatcacagcaggaaataatgtgctgcctaaaatagaagcatcaactgggagagaggccggggagtaggtggcatctgaggctcccgccgcgtcctccccagcggctgcctgacgctgcatcggaggc

SEQ ID NO: 37283 - DNA, 30 bp, Homo sapiens
  chr2:27994669-27994699
  hyper
agtggggctggagacgccggtaggggttac

SEQ ID NO: 37284 - DNA, 215 bp, Homo sapiens
  chr2:28113198-28113413
  hyper
ccagacgccgccatcgctcaaaggtgctgctgtccaacctggacggtgacctctgccctttgcccgaccccgtaaccagagacgccactcctgccctccctaacgacgcgggcctttcagacgcctacgcgggtcgcccacctgactgcccgaaatcaccccgcccaccaagtgtcccctcttcttcctggaatagtctcggtgcacagcctcac

SEQ ID NO: 37285 - DNA, 30 bp, Homo sapiens
  chr2:28113732-28113762
  hyper
gggaggttggatcccgagtcgcacaggtgg

SEQ ID NO: 37286 - DNA, 30 bp, Homo sapiens
  chr2:28114149-28114179
  hyper
atgccacccctttccgttccatgacgtcag

SEQ ID NO: 37287 - DNA, 30 bp, Homo sapiens
  chr2:28613747-28613777
  hyper
gggaaggactgattcgttttgcgtcaaagg

SEQ ID NO: 37288 - DNA, 30 bp, Homo sapiens
  chr2:28615910-28615940
  hyper
ggggagcggggccgcgtccctctcagcgcc

SEQ ID NO: 37289 - DNA, 30 bp, Homo sapiens
  chr2:28616250-28616280
  hyper
ctgagctccggctgcgcgcgggggcgggag

SEQ ID NO: 37290 - DNA, 224 bp, Homo sapiens
  chr2:28617014-28617238
  hyper
cccacccctgccccgcgtcttctctctgggtggtggacagacaagaaaatctttgcacccactggcacctctcgacatcctgggaccctattccttcaggaaagccctctctctctcctccccgttctccatcagtcataactcctttctgaaaggggttggggacccagaaacatggttggactccttcaagtaatctggagcgagggcgagggctgccgctc

SEQ ID NO: 37291 - DNA, 202 bp, Homo sapiens
  chr2:28617455-28617657
  hyper
ggggaagagacatcacgcaggctcctgggtggttctggaagcagaaaacaacttgtttctaaagcagccggactggtttgcactggagggattgtgcgtgtgatctctgtgtttataaataccaggaaggtgctgttggcgggggggtgctgatggcgtgtctgccctctgctgcagctcccccacccgctctgtctcgaga

SEQ ID NO: 37292 - DNA, 425 bp, Homo sapiens
  chr2:28789406-28789831
  hyper
cctccccttccccaacatcagcgaaaatcagccgctggtttaaagctggcgttttgtttggatgtgctggcctatggggaggggagtcgtattctggtttgctttttccgtttttctactgaagtgatggggaaagtgcaagctccaggcccccgggctgtttctcgggagacgggcgtttctggctagtgtctgaagggtctcggcgtggctgggattttaacccttcattttctttcttggacccacgttacagcgtcggcggagatgagaacatcggcaccgttaccaccctggcgagtgagtacgcggcggcggccgggatgtttggtttggggcggcccctgcacgcttcccgctccccctgcaggtggcgcgggcctcgggaggagccccggctgcaggagcccgctaaattcaccagg

SEQ ID NO: 37293 - DNA, 433 bp, Homo sapiens
  chr2:29033264-29033697
  hyper
ccccttctcacaagaagccaccgtattcacacgttgtgcttttctcagttcaagcggcctcttccttttgagtaaccagggtaaccacgctgtgcccgcgtgtgccgggcggggaggggaggccgcagccccagccccgggggcctggttgtctaatcgaagggaagtaaacggccccaacgcaagcctgactgcgagacgtgcccaagggaggtaggtcgaatgaagagggttgtgtgagttttgcgcgggcaggcgggataacggaggagggaggcccgcggccgaggctcgggcgggcggggggcagggaggggcggggttcgccggcgcgcactcccaggcaggccccgccccctcggccggctgtgcgcgctgattggcccctgccggcctcgcgctccctcgctccgggttggcgggagaccttaga

SEQ ID NO: 37294 - DNA, 186 bp, Homo sapiens
  chr2:29093423-29093609
  hyper
acgacctccaggttcgctcttggacagcaagattgagagacaaaacttaacaaagcgctgtgcaaactgaaatcccaggcttagctcgcttgtgtcttgaacacggaagtcacctagtcacccacaagatgtatgagtacagctaacccccagatgcatttgacagacggcgtgggacgcgccact

SEQ ID NO: 37295 - DNA, 30 bp, Homo sapiens
  chr2:29120717-29120747
  hyper
tagagggtttttgtacgttatgtagctgag

SEQ ID NO: 37296 - DNA, 163 bp, Homo sapiens
  chr2:29337888-29338051
  hyper
agatatgaactaattgctcaacgtgggtgtagcacggattaggccttttacagcaagcgctgccagcagggaactggtggatgtactcttgaccacgctcggctggactctggggagcccaagacgggtaagactaggtccccggccccagcagctggtgggg

SEQ ID NO: 37297 - DNA, 589 bp, Homo sapiens; identical to SEQ ID NO: 1403
  chr2:29338158-29338747
  hyper

SEQ ID NO: 37298 - DNA, 297 bp, Homo sapiens; identical to SEQ ID NO: 1404
  chr2:29338809-29339106
  hyper

SEQ ID NO: 37299 - DNA, 248 bp, Homo sapiens; identical to SEQ ID NO: 1405
  chr2:30142810-30143058
  hyper

SEQ ID NO: 37300 - DNA, 185 bp, Homo sapiens; identical to SEQ ID NO: 1406
  chr2:30143137-30143322
  hyper

SEQ ID NO: 37301 - DNA, 768 bp, Homo sapiens; identical to SEQ ID NO: 1407
  chr2:30143382-30144150
  hyper

SEQ ID NO: 37302 - DNA, 679 bp, Homo sapiens
  chr2:30144174-30144853
  hyper
cgcaagtttgcagcgtccttgctctcaccggcgcctcggctcctcagagttcgcaggcactggagcggccccggcggcagcagctgagggcgttcagggcaggggcgcccgaaatcttgccgccccctcctcacccatcatcagcgcccgcggctttgggtggccgaccagagggcggccggaaagcacctcggtgccccgcgaccctccgaacagaggcggcgggaggtaccagctgctaccaccgctgccgcccccagagccgctggatcgcatctgcctgggcgcccgccacttgcagctggctgagccgcgcgagcgcgcgcagggagggggcggggcccggagggggcggggctcacaagccaactccgcgctgctgcccgacccacgcagtccggcctcgccccgccccacccgcaccctccaaccaatggcgtggctcgatcggctcctatgcaaatctgcagaggcctcggcattcattgagaaaaggagtgagcccgccccaccctccctctgttccctctccagtctcttgttcttcccctcctctagattccctgccctatttctctgcagtgtgaaagggagcaaatgtgagaactggaagaggcctttgcaatcaagcactctccctaattatacatttaagagattaaacgggtccgacttcgga

SEQ ID NO: 37303 - DNA, 30 bp, Homo sapiens
  chr2:30369440-30369470
  hyper
tgctgtgttgtgtgcgctcagctgaaaggg

SEQ ID NO: 37304 - DNA, 31 bp, Homo sapiens; identical to SEQ ID NO: 1409
  chr2:30369485-30369516
  hyper

SEQ ID NO: 37305 - DNA, 28 bp, Homo sapiens
  chr2:30453625-30453653
  hyper
cacaccttctgcccccgctgcagaccgg

SEQ ID NO: 37306 - DNA, 2030 bp, Homo sapiens
  chr2:30453784-30455814
  hyper
cggtcccccggctccgcgtctctgccaccttcccaccgcttcttctttaaccatgctcttgtttcccctcgctgatcgcaaggctgcgggcgaggattccagagagaggcctagtatggggaacaaacgcttcagaggggtccgaggtgggctggggacagccagtggatgggaaggagggcgctggcgccgggcggctggggtggaggagtggcgggtgccctaccccggcgcagagcagccgccgagctgtcatgtcccgagcggcccccgcgccctccttgcgcccacctccgccgcgctggagttcggggtgtgcgtggagggggctgtgagcgggaagcggcgcggacgcggagtccgggccggtgcgagtgagcgcgtgtgcgcgtgggagagcggcgggagggggccgggctcgcagccgcagcgaaccacggccccgggagcagagccgagcgcgcccccgagccgccgcccgccggagctgcgagcgctgaagccattcatgattttggtgacgttattccaggagtgggcgagggagggcggggcctctcggggccaagccccgcccccgcccctataaatacggcttcccgggctctttgtggggctgagtgctcagtggagagcggggagttgtgtccaccttgccgacgtcgctagccgtggggctgtcctgggaaggcggacggcgagcgcccggtgtccgcactcggccgcctgccgtgcccgtctgcgcccgtgtcatcctcactcgggacgcagggaccgtttttaaatcacaggggcgtgtgtcagcctgccctaggacttcatgtctatatatttccccattcactggtgagtaccctgcgcctgcggcgggcgtctgtctcgcggcggtggctgcgggcccgggcgcctgcttcgtgccggctccgggtgcgagggcagccggcggcgcgggcgctcagcgctaacccgccgcccgagcccgtgcaggagtcaacgtcaaggttgcaaaggtgggggtggggggagggggtgctgagaacatccagacaaaggacgtgaactcggagccctcacctaagtgacggccggagggtttgtattggttggcgggggagccaggggtcacgtgtgaatcccccccaatgaaaccaccctatgcggagagctgcaggaggcgcgcgccccacttggcgcaggggggctcctgctcttcccgggcccctcctctttttctttttgtttgcatgcaagtctcaacgtcgaggccggcagcagcggggctgagctggtgcggccgcagggtttgcagagctccgggggggtggggggcgggaaacgctctccccacacgtaaccccactaaagccacaagcagcagggcacgcgctgcagcctctcaacccctgccctctccaccgcccctaaaaaccgacgcacattggtgggggccgggactgggaggagccgccttcgccgtgctgaaggggaaggagcccgggccgggcgcggggcgtcggaggtttgccccggactggggatcggagccgggagggatgcagagagaggcaggcccctgactgctgggacttccttgctggcagtttcttccttcctgctctgggttagaggagaagcggccgggggcgagcgccggcagccccggagcgcgctctcaggtgcggacgtggggagctcggccccgagtctccggcaggcgctgagcgaagggaaaaccggcgcaagccgcggcggggtccggcctggcccaagaagcggaaagttcatgcttctcgcttcaacttttcgggccggcgccacagccccgagcgaggaagagccgcccctacgtcagactcttcaccctgcgtgcgctcttctggctcctttctttggaggtcgccagcagcctttccaagacccgggaggaaactgcctttgcagggcccagctcccgaacctaaacttgccgcaaagccccgcatcttctgttagtctccctgcccccatccgtcccagcctggcagtgttta

SEQ ID NO: 37307 - DNA, 30 bp, Homo sapiens
  chr2:30670289-30670319
  hyper
aaaatggcggcggccgggggatctcagagg

SEQ ID NO: 37308 - DNA, 319 bp, Homo sapiens; identical to SEQ ID NO: 1413
  chr2:31360270-31360589
  hyper

SEQ ID NO: 37309 - DNA, 125 bp, Homo sapiens; identical to SEQ ID NO: 1414
  chr2:31360630-31360755
  hyper

SEQ ID NO: 37310 - DNA, 890 bp, Homo sapiens; identical to SEQ ID NO: 1415
  chr2:31360816-31361706
  hyper

SEQ ID NO: 37311 - DNA, 528 bp, Homo sapiens
  chr2:31456732-31457260
  hyper
tctgtcctcgcagccgtccctgagagggcgctgttcccaaatcgaagccccagaggcggagactgagacaccggcactctcccactggactgggtcagcatccctctccccgcgcggccgcaggtctagagctgagcgcctgcccacaaacatggcggcgccctgcgcggcttcccgtcgccgcaaccgtggggccggccctgccttgccagtactaggggacttcctctgcgcgccggcttcctgcccagctggcatttaaaccaccgcctggggctgcaggatgctgctgcggatgcagagctgtccgcgggctgggcagcgtcgccgtctcccctgagccgcctcggtccggcaggagcggagccgaagcatcccttgctgcacgcagggcagagcaggcgagggctgggggccgatcggggaccccggcttgggaccccggcatctggcagtttccttgcaggttcaactttaattgccaagatttcacccctcctcctcaagcccagattatttatcctccct

SEQ ID NO: 37312 - DNA, 196 bp, Homo sapiens
  chr2:31457325-31457521
  hyper
cggccctcctagccgcgtgcccgggccatggtgcggctgagccccgcgcttgggtgaggcggcggcgcggctcggagcccggcggaccggtcctacgggacatcttcccctgaggaggagtcttcccctggggctgcgtgccgggggcgagcggcggccgcgatgttcagctggctgggtacggacgaccgccgga

SEQ ID NO: 37313 - DNA, 254 bp, Homo sapiens
  chr2:32236008-32236262
  hyper
actcgccactctaacgggtcctgcccactgagcatgcccagcaccgctgcctacccgccgaggaatctcaacgtgcacgctccgctctccggggtttagcggcagcagaggctgggaggtgggggcagggcgcggggagcaggacgcagccgcaaggcaagccccctcccccagccaacttcctcaaatggagagcacctagggctcgcggatgcggctttccacgaggacagtcccgcgggtatccatcatat

SEQ ID NO: 37314 - DNA, 30 bp, Homo sapiens
  chr2:32264568-32264598
  hyper
aacaagaagagccgcgagttacctgggaga

SEQ ID NO: 37315 - DNA, 30 bp, Homo sapiens; identical to SEQ ID NO: 1419
  chr2:32264803-32264833
  hyper

SEQ ID NO: 37316 - DNA, 30 bp, Homo sapiens; identical to SEQ ID NO: 1420
  chr2:32289443-32289473
  hyper

SEQ ID NO: 37317 - DNA, 30 bp, Homo sapiens
  chr2:32391020-32391050
  hyper
atcttatttggtcccgaagcgaccttgaaa

SEQ ID NO: 37318 - DNA, 30 bp, Homo sapiens
  chr2:32503008-32503038
  hyper
ggtgcttgggtggtcgccaccaagaagact

SEQ ID NO: 37319 - DNA, 30 bp, Homo sapiens
  chr2:32581579-32581609
  hyper
taagcttaactatgcgcttccagcacctcg

SEQ ID NO: 37320 - DNA, 448 bp, Homo sapiens
  chr2:32852631-32853079
  hyper
ggcagatttcccacccggccatgattcatgtagagcagtgtcaaaaccagatcctttccttacacgctcattcgccgaaagacccatgctatgctgacggggttccaacctgggcttcaccgactccacgtcagagggtctgtgattccctgagagggtacccttaggctgagagcaagggcccacctgcactctgcgcgaaggactgtggttttcatcgggttgtcgagagcgttctaacccaaaatgctttaagaatcacaactctagcccttctaatcaaactgctttggccaagacgtccgttttgagttgcatttgaaccctagccctcggtgggaggcacactcacttccacgttcacagttcttggaagcggtcccactgggggcggggctgagcgcgaccgcgccctcaactccccctattgcccgccccggggtggggc

SEQ ID NO: 37321 - DNA, 140 bp, Homo sapiens
  chr2:33171659-33171799
  hyper
tatctgaattcaaccccgcagcaagtatcacagcaaacacggataagaaaatgccggggcttccaaacaatatcaaacgcatggggcttctgaaaggacaggatcgttcagtaactttgctgagcgctttgtcctctccc

SEQ ID NO: 37322 - DNA, 143 bp, Homo sapiens; identical to SEQ ID NO: 1422
  chr2:33172104-33172247
  hyper

SEQ ID NO: 37323 - DNA, 30 bp, Homo sapiens
  chr2:37193466-37193496
  hyper
tactgggctcgggccgcccccgccgcagcc

SEQ ID NO: 37324 - DNA, 30 bp, Homo sapiens
  chr2:37310976-37311006
  hyper
cacctttaccctcccgcgctgcacctggcc

SEQ ID NO: 37325 - DNA, 30 bp, Homo sapiens; identical to SEQ ID NO: 1423
  chr2:37383979-37384009
  hyper

SEQ ID NO: 37326 - DNA, 32 bp, Homo sapiens
  chr2:37384212-37384244
  hyper
ctggatccagagtgcgcgcgagaggcactggc

SEQ ID NO: 37327 - DNA, 30 bp, Homo sapiens
  chr2:37458342-37458372
  hyper
gccagagaatacaacgttcaattcgaaact

SEQ ID NO: 37328 - DNA, 30 bp, Homo sapiens
  chr2:37458715-37458745
  hyper
gcaaagcatacgcgcgtgaaactcagccta

SEQ ID NO: 37329 - DNA, 30 bp, Homo sapiens
  chr2:37552530-37552560
  hyper
tcggcctttaaacgcgaatgtgaccctacc

SEQ ID NO: 37330 - DNA, 332 bp, Homo sapiens
  chr2:37571655-37571987
  hyper
cttgtgtctgtcacccagggccgcccagccccggggtttgcgaaggtccggggtaggagggctgcagcctgcgcgacgcggcgggaggctacccgggggcgatgggaaggcgggcgcagtcgacccaagggtggagaagagggaaggcgaaggacgcgcgttcccgggctcgtgaccgccagcggcccggggaacccgctcccagacagactcggagagatggcaggcggaagacaccggcgcgtcgtgggcaccctccacctgctgctgctggtggccgccctgccctgggcatccaggggggtcagtccgagtgcctcagcctggccaga

SEQ ID NO: 37331 - DNA, 164 bp, Homo sapiens
  chr2:37572274-37572438
  hyper
gaaatgtgtctcgccggcggctgctgagccgggaggcgagggcgcatcgcggcgccaccccccactcgggaccctggagggcaacggggccggcgctccggggccgctagggtgcggggtgcgcctgggggtgtgcccacagcccccccgctgcttcatccaag

SEQ ID NO: 37332 - DNA, 30 bp, Homo sapiens
  chr2:37898086-37898116
  hyper
gatctgcaggttggcgccccactaacaatg

SEQ ID NO: 37333 - DNA, 595 bp, Homo sapiens; identical to SEQ ID NO: 1424
  chr2:37898933-37899528
  hyper

SEQ ID NO: 37334 - DNA, 30 bp, Homo sapiens; identical to SEQ ID NO: 1425
  chr2:37899938-37899968
  hyper

SEQ ID NO: 37335 - DNA, 31 bp, Homo sapiens; identical to SEQ ID NO: 1426
  chr2:37980872-37980903
  hyper

SEQ ID NO: 37336 - DNA, 120 bp, Homo sapiens
  chr2:38152926-38153046
  hyper
tgctgggctctcgctcggctttcagccttgcgcaaacattttgtttttgtttgtgtggggttttttttgctctcagactccgtctgtgcctatttcacacaaaaacgaaggccggattat

SEQ ID NO: 37337 - DNA, 193 bp, Homo sapiens
  chr2:38301994-38302187
  hyper
cgccaccagctcgcgcgcctcgctcagcacgtggccctcgaggacttggcggctgcgcggctggcgcgtgaagaagttgcgcatcatgctgtgggctgcgcgccgctgcaccttccagtgctccgagtagtggccgaaagccatgctgcggccgccggacaccacacggaaggaggcgaaggccggccggtcg

SEQ ID NO: 37338 - DNA, 531 bp, Homo sapiens; identical to SEQ ID NO: 1427
  chr2:38302369-38302900
  hyper

SEQ ID NO: 37339 - DNA, 910 bp, Homo sapiens
  chr2:38302948-38303858
  hyper
cgcgggacagccggctccgagaaggaactgggacctttgcctagggcaagacgtcaacaggaacccgcagcccggcctggacacctgctgccctcactggaagctttaactcccactcgagtctcttggcgtcgtcagtgccaggagcgcttggattgggatggggacggagaagggtgcctcgctcgccgagccccgctgcccttggggacctggcaaagtcgaggtttcctcacagcgttgagattgagactgggggtcggtgagtggcgtcaattcccatgcccttgcggctctcacaactggagtcgcagaagcgctcgctcccactcccactccagagtcaaagcgcgccatcccgctcctccgggttttaaggactgggtagaaggagggcagcgcgacctggcagggcggggcctgcggggggcggggcgcgccgcacaccaggccgctttgacccggactcccgtccaggcgcaccggccggcctcggagctctaccagcaggctttcatgggagcggaggtgcccacgtttccattgtgcggtaaccgcgcttcatcacagccacctccaatcgaggccgcacggtgtccccagaaccacgctcggtacaacctgccccggccgctgcgctcgacttgggagcgcgccccgccccgagcgcacgacctcccttccctctccgcgacttgagcttgcttcccggaaagccagtgtagtggcagcggtttgcctcacagcgcccctggttggttgtttaaattttatcttaggttctcgcaaacaaattgccacctcagtggaggctctttggcatgctaaattttttccagttcttgcggcgagatcaggaatccctaaaagtagccgctcccccgccccggggccccgacagtgcttgggc

SEQ ID NO: 37340 - DNA, 30 bp, Homo sapiens
  chr2:38304060-38304090
  hyper
ggaggcgaatctccgcgctccggcgaactt

SEQ ID NO: 37341 - DNA, 30 bp, Homo sapiens; identical to SEQ ID NO: 1429
  chr2:38342432-38342462
  hyper

SEQ ID NO: 37342 - DNA, 31 bp, Homo sapiens; identical to SEQ ID NO: 1430
  chr2:38690639-38690670
  hyper

SEQ ID NO: 37343 - DNA, 30 bp, Homo sapiens; identical to SEQ ID NO: 1431
  chr2:38977942-38977972
  hyper

SEQ ID NO: 37344 - DNA, 198 bp, Homo sapiens
  chr2:39187543-39187741
  hyper
ggcaaggccaagccgctgagccgctctctcaaagagttcccgcgtgcgccgccagccgacggcgtggccccacgcctctacagcacgcgcagcagcagcggcggccgcgcgcccatcaaggccgagcgcgccgcgcaggcgcacggcccggccgccgccgccgtcgccgcccgcggcgcatccaggaccttcttcccc

SEQ ID NO: 37345 - DNA, 30 bp, Homo sapiens
  chr2:39347971-39348001
  hyper
cgctccggccgcggcgcccgctccgcgtag

SEQ ID NO: 37346 - DNA, 30 bp, Homo sapiens
  chr2:39664651-39664681
  hyper
ccgctgccgccggacgcttgaaaaggtttg

SEQ ID NO: 37347 - DNA, 103 bp, Homo sapiens
  chr2:39847386-39847489
  hyper
tttcatttgtcatgccggtggctgtggttatcagacattgcagcaggattttggcaaaaatctcataaatagtgtgcagcaatgtcagcggtctctgctgcta

SEQ ID NO: 37348 - DNA, 939 bp, Homo sapiens; identical to SEQ ID NO: 1432
  chr2:39893063-39894002
  hyper

SEQ ID NO: 37349 - DNA, 454 bp, Homo sapiens; identical to SEQ ID NO: 1433
  chr2:40678392-40678846
  hyper

SEQ ID NO: 37350 - DNA, 699 bp, Homo sapiens; identical to SEQ ID NO: 1434
  chr2:40678905-40679604
  hyper

SEQ ID NO: 37351 - DNA, 30 bp, Homo sapiens; identical to SEQ ID NO: 1435
  chr2:40679688-40679718
  hyper

SEQ ID NO: 37352 - DNA, 31 bp, Homo sapiens; identical to SEQ ID NO: 1436
  chr2:42067664-42067695
  hyper

SEQ ID NO: 37353 - DNA, 30 bp, Homo sapiens; identical to SEQ ID NO: 1437
  chr2:42111963-42111993
  hyper

SEQ ID NO: 37354 - DNA, 1333 bp, Homo sapiens
  chr2:42274595-42275928
  hyper
acgcgccttccctgcgcccaaaccgccccgaggcccccagtcccaggagggagcgctgagatcactcggatctccgcaccccggacttagctgctcgtcccctccggagcccgctacccgccggcctcgcccctttatctttcccccactccgcccggccggctccgttatccacctcccaatcccgttatccggccgccccggccccgttatccgccctcgcgttgggcgcggagcccccgcgcgcctcctggccgccgccgccccctcccccgctcccagacggagctcgggggaccgcgggctgggcgggaccgcgggctgggcaggaccggagccgcctccgcgccgcttcccaggcccggacggccgcgggaggaggtcccgctgtcagtcagcggggaaggccgggccgggcggccggagggggcggcgccgaggacgggctcgggccgggagctgggaggtggaggcggaggggcgggggagggggcgggggagggggcgggggcgggggcggggggcggctctgggccttataagcggcgggggcagggcggcagggaggcaagtgtcaggccgatgtgtcgcccgcgaggggccggggtcggggccgccggggccatgcgcgcgggctgggcagggggccggcggggcgcagagcggagccgcctcggagcctgagccgcccggggccggggccggggagccgcgcggggccggccggccggggggaggggagcgatgcggcgccggcgggcggcagtggccgcgggtttctgcgcctccttcctgctgggctccgtcctcaacgtgctcttcgctccgggctcggagcctccgaggccaggccagtcccctgagccttcgccggccccgggtccgggccgtcgcgggggccgcggggagctggcccggcagatccgggcgcgctacgaggaggtgcagcgctattcccgcgggggccccgggcccggggcgggccggccggagcggcggcgcctgatggacctggctccgggcgggcccggcctgccgcgcccccggcccccttgggcccggcccctgtccgacggcgccccaggctggcccccggctcccggcccaggctcccccggcccgggcccgcgcctgggctgcgccgcgcttcgcaacgtgtccggcgcgcagtacatgggctcaggctacaccaaggccgtgtaccgggtccgcctgcccggcggtgccgcggtggcgctcaaggcggtggactttagcggccacgatctgggcagctgcgtgcgcgagttcggggtacggaggggctgctatcggctggcggcccacaagctgc

SEQ ID NO: 37355 - DNA, 174 bp, Homo sapiens; identical to SEQ ID NO: 1440
  chr2:42329270-42329444
  hyper

SEQ ID NO: 37356 - DNA, 288 bp, Homo sapiens; identical to SEQ ID NO: 1441
  chr2:42329493-42329781
  hyper

SEQ ID NO: 37357 - DNA, 281 bp, Homo sapiens; identical to SEQ ID NO: 1442
  chr2:42720165-42720446
  hyper

SEQ ID NO: 37358 - DNA, 436 bp, Homo sapiens; identical to SEQ ID NO: 1443
  chr2:42720772-42721208
  hyper

SEQ ID NO: 37359 - DNA, 30 bp, Homo sapiens
  chr2:42721410-42721440
  hyper
gatgcctgctcccgcgtcctgccctgggcc

SEQ ID NO: 37360 - DNA, 30 bp, Homo sapiens
  chr2:42722036-42722066
  hyper
ccgtgcccagaaagcgggttccacttggca

SEQ ID NO: 37361 - DNA, 30 bp, Homo sapiens
  chr2:42722332-42722362
  hyper
acggagtccttttgcgctggttcttaagtg

SEQ ID NO: 37362 - DNA, 31 bp, Homo sapiens; identical to SEQ ID NO: 1444
  chr2:42796455-42796486
  hyper

SEQ ID NO: 37363 - DNA, 786 bp, Homo sapiens; identical to SEQ ID NO: 1445
  chr2:43019538-43020324
  hyper

SEQ ID NO: 37364 - DNA, 54 bp, Homo sapiens; identical to SEQ ID NO: 1446
  chr2:43020503-43020557
  hyper

SEQ ID NO: 37365 - DNA, 30 bp, Homo sapiens
  chr2:43038052-43038082
  hyper
gcggatggaggtggcgaggcgctccactgt

SEQ ID NO: 37366 - DNA, 30 bp, Homo sapiens; identical to SEQ ID NO: 1447
  chr2:43054969-43054999
  hyper

SEQ ID NO: 37367 - DNA, 30 bp, Homo sapiens; identical to SEQ ID NO: 1448
  chr2:43385829-43385859
  hyper

SEQ ID NO: 37368 - DNA, 288 bp, Homo sapiens; identical to SEQ ID NO: 1449
  chr2:43445792-43446080
  hyper

SEQ ID NO: 37369 - DNA, 82 bp, Homo sapiens; identical to SEQ ID NO: 1450
  chr2:43446675-43446757
  hyper

SEQ ID NO: 37370 - DNA, 621 bp, Homo sapiens
  chr2:43446816-43447437
  hyper
gcaaaacccatcaggagaggttgggccctggaggtgctgtggcttcctgctgccccgctccctcccgcctcctccctgcagggctcctcctggggaggcctgtccagctgccaggccccgccccgccacagcccccgctgtcctcctccctccctcagccgtgccagcagcggcacagaactggaattgccctggacggccacagctctgcatatcccccaggagtgtggacaagaaaaaataaacacaattagagttcacgacaatgggcccctgatggaaggtaagcccggctagcctctaagggctgtgccggctcccacgaacttccaaggccgaggacggtgccgagacccaacttccggtctcaagaaaacttggtgagagtcacatccgccctcacttgtcaccacaagcaaaactgaaggagagcgggtgtttggggacggttcctttccgaggttcagtgctctctagcgggcttcctccctgcacatggccaccctggcgtttttctgagcgcccccaggcaggttttagcaccgagcattctagtgccgggccaggctggcggccaagagctaggcctgcttgtttttcctgcgtcgggcccaccaggcc

SEQ ID NO: 37371 - DNA, 141 bp, Homo sapiens
  chr2:43447695-43447836
  hyper
ccagtggaaacgccacgatgaagacattctaaacaccatcacattctgggctcattttcacaactgactacggaggaattttctcctgtagtttctaagtgcaactcagtcttagagtcaacagtccgggatgggaatttt

SEQ ID NO: 37372 - DNA, 30 bp, Homo sapiens
  chr2:43448443-43448473
  hyper
cgtgaaacagctgcccgaggcctggcgtat

SEQ ID NO: 37373 - DNA, 30 bp, Homo sapiens
  chr2:43448760-43448790
  hyper
aagattttgttcaaccgtttgcgaaatcag

SEQ ID NO: 37374 - DNA, 30 bp, Homo sapiens
  chr2:43449097-43449127
  hyper
ggcctggcaggccaccggctgcagaaagat

SEQ ID NO: 37375 - DNA, 30 bp, Homo sapiens
  chr2:43450320-43450350
  hyper
atctttcaaaatttacgtaaacaaggaaag

SEQ ID NO: 37376 - DNA, 712 bp, Homo sapiens
  chr2:43451133-43451845
  hyper
tttttttttttttgttctattcgtatcacaactgccctgttgtgaatattttgttcaacagaaaaagttcgacttttttgctcaaaaagaatgaaacttcgtaataaaaataaaaaaaaaaagacaagaggaaaccgaaaaaggaggggtgggggcccctcccggcacagagttcgagtccaagtgctcggtcgggcttgcagtctgcctagggcccatgtcaccccccccactcccgtgcccccagcaagggcgagatggcgaggggtgtcctccaacatctctgaaccgccttcccttcctcctcactggcgccctcttgcctcagtcgtcggagatggagaggcggctgaagattggcaggcggcggccagggtcgaggctgggagactcagagccgctgaggctgccggagctcagggagccgcttaggtagctgtcgcggtccgacagcgagtccggggggctggggggcgcgtcgaacacgggcgagtcggacaggcggcgcggcagctggaagctgaagggcggcgagggaggtgcggcggccccggcggggagggtcgcgctgggcggcgccggcggctgcgcggggggcgccaggccctgctgctgctgctgctgctgactgcggtagtaggcggcggcggccacggcggcaaagttgtgggtctggatggcgagcggcgtgatgaggctgctgagctccgga

SEQ ID NO: 37377 - DNA, 968 bp, Homo sapiens; identical to SEQ ID NO: 1453
  chr2:43451891-43452859
  hyper

SEQ ID NO: 37378 - DNA, 30 bp, Homo sapiens
  chr2:43453309-43453339
  hyper
cagggcgggaggggcgtcccccagaacctg

SEQ ID NO: 37379 - DNA, 44 bp, Homo sapiens
  chr2:43454195-43454239
  hyper
aaatgccagaatatcgcaaccatccccgcggcccggcgggtttg

SEQ ID NO: 37380 - DNA, 346 bp, Homo sapiens
  chr2:43822950-43823296
  hyper
ccgccgaatcctggcgataccaaaggatgggaattggtgtggctcgccaggcagccctagcaaaactggccgagccgagctaccgcgggtctggcaggcaggacacctgggagccaaacctcgtgcacgtcggcgtctgagaagagtcgcaggcgcctggtccagtcccggaagcaggtctccttctacggcgtctccgaggctcgcagcgcggtccacggtcgactaccgggtcagggcaaagggagggagagaggggtaacctggaggagtcatcgcgagaattgaccaaacgcagctcctccaatcaggagttcgaggaggtcgtgacgtcaccggggtggcc

SEQ ID NO: 37381 - DNA, 412 bp, Homo sapiens
  chr2:43864231-43864643
  hyper
tctcgcagttgggacgttaggggtaccactccaggacagagctccctcctggggcagggactgggaggagccaaagttatagccacacccccggtgacgcccggtggtcggctgtggtctcccattggctacaccggctgccagtccctggaggaggcggtgcccttccccgccctctccgagctcggcttgaggcgggcgcgggctgagagtccggggatcccgggggccagtcgcggccgggacatcgggcgctgcggccggggacccgctgctgagatagacaggtgagaaagcccggggacgaggggccactccagagttcctgccaccctgggatccccgcccccttgagggcgccccgtccaggggggctcgcggggccgaggtttggggcgccgggaggagcggg

SEQ ID NO: 37382 - DNA, 30 bp, Homo sapiens; identical to SEQ ID NO: 1455
  chr2:44001237-44001267
  hyper

SEQ ID NO: 37383 - DNA, 220 bp, Homo sapiens
  chr2:44223034-44223254
  hyper
gggccgccccggcacgcagcaaccaacgcgcggatctcagcagggctgccattgctcgaacgtccccgcagcgggaagcacgctccgccagaaggacaggaggagcatgtgaccgcagggtagcctggcgcggcagagaccaactgccgggcgtgccaaatgtggggggagcgacggattgttttaggttggaagatggaaaaccgcacttctccgagga

SEQ ID NO: 37384 - DNA, 30 bp, Homo sapiens
  chr2:44588950-44588980
  hyper
atggcgtgacagctcggccctggttgccaa

SEQ ID NO: 37385 - DNA, 19 bp, Homo sapiens
  chr2:45029759-45029778
  hyper
ccctccgcagactcgcggg

SEQ ID NO: 37386 - DNA, 52 bp, Homo sapiens
  chr2:45029987-45030039
  hyper
cggctgccccgtccgggacccgctaattacagggattcggtttccccgctct

SEQ ID NO: 37387 - DNA, 30 bp, Homo sapiens; identical to SEQ ID NO: 1456
  chr2:45150461-45150491
  hyper

SEQ ID NO: 37388 - DNA, 25 bp, Homo sapiens
  chr2:45155185-45155210
  hyper
gtaggaagctcgaagcgcaaagcaa

SEQ ID NO: 37389 - DNA, 1010 bp, Homo sapiens
  chr2:45155355-45156365
  hyper
cgcagttttgcaaatccttttccctctccccatgcctcgcggtttaagaccacgcgatttcccaaaaagaaaaactcaaaagatgccaggcgccgggctggagtcacttagagccagctctggctgctcctccgcctccccgacccccggccgccgctccgccctgcccctcgcgcctcgaccccttctcccgaaactccgtcctctccgccgaggggctgccttgcccccaacccaccccccgcgtggagaataaacacagttgacatcactcttataatctttatttaaaactgtttccaaggttacaaattgccgagcctcgtatgcaacaggttcctccaaagcggtatcattacagattaactgtaatgtgtaggattagaataaaagcataagggattaggtaaaagggcgacgctccagacataacgcccgagcgcatctcgactgagtcagcctagggagactgcgaaggcgcagggtgtcggggcgccacggggccgcaaagccggactcggttcctccgctcccggccctggccccggccccagagcggtcgggacagcggcgccggaaggccaacgcggccgaaggtttcggagccaggcttcccgggcgtcaggggctagggacgggtccccggagctggggaagatgaggggccgagaggccgtggaggcggaggacgcgggcaagccacggcccggctgggagcttcgggaagcgccgcgcccgggacgcggtctccgggcggggcgaagcgcagggaaggcggcgagggggtccccacacccgcacggggcaccgggtttgtccatgtgggtgacactgccttcaaggcccaggcccgatggggcccttcctggcgtcctcctcacccccactccgccgcgcctcccctgtccagctggggctggggacagcggcaggggctgggcagccgcgcaggccgcccgcacccttccgagcccaggcctcgggccttcgccgcccgcccaggccgtgcg

SEQ ID NO: 37390 - DNA, 169 bp, Homo sapiens
  chr2:45156642-45156811
  hyper
gcagtgtggcgagagcgcgaacaaagccctctccggagccccgtcacccctcggtgaccccaggcccgccccgctgagccgcggggctcccgggcctcgcctccgagcaggccgcaccgcccggtgggcgcacgtcaggcctccgcggccgcccgggccagtgctcccc

SEQ ID NO: 37391 - DNA, 225 bp, Homo sapiens
  chr2:45156832-45157057
  hyper
cgcggccggccccgaaggcgcgagggacagcgcggccggcggtggagcctcactcaggcacggagcccacagagcgaggctgaggaggactccatgctgttgtccgtcgggaaaccggactactctggggcgcgctggagccaccattctgccagcagccggggaggggccgcgagggctcccaagtggacggaagtaggcgaccaacttcgccgcgactcctgc

SEQ ID NO: 37392 - DNA, 326 bp, Homo sapiens
  chr2:45157320-45157646
  hyper
ggagcccgggccctccgggagtgaagatacctttggaggtgagacggcctctctagcgcgttgacactgttgatggaagggattaaaggggtatcaggttattttaatttattgttgaagatgatgactgccccctccccgatccgcataccgtcctcactttcccaccccaaccctagacccgacaacaccgttcagccctttgccccgggcagcggaaatggttagcttcctctaggagtttctgctgaggaaggcgcaggcaaccctagtcggcttagagagagacaaccgcacgcgatcaccgagcacgatttctcccaaca

SEQ ID NO: 37393 - DNA, 497 bp, Homo sapiens
  chr2:45159698-45160195
  hyper
cagcttgagtctgagctcaaacgtgcgcgaccccctgggtctgcatggggagaaggaggtgtgcacgtgcaaacgcgggactttgggtggagtgtgaggttgatagggctttcggccccagggccctctaggcctcttttaaataccttcatctgcccaatttcttaacctttcaggacaaggagggagaccctccgcgatcctgcgccttgccaccctttgggaaggataggaccatcatctagggcgtctctcggtggactgtggctgggccgggctgaatgggcgggcggaggtctcgaggtcgtctcctggctctcgattgctcccatcacccaagccacctcgaggtcgagtgcgccctggggctatgtctggggaggtcatggcgtctcggggcgaatgatatgcacgttttggggcaaaactctcctaggcctcgcaggagcagctgtatttgtaacttggaattggcctgggcccgcctcccttggccc

SEQ ID NO: 37394 - DNA, 448 bp, Homo sapiens; identical to SEQ ID NO: 1459
  chr2:45161092-45161540
  hyper

SEQ ID NO: 37395 - DNA, 1348 bp, Homo sapiens; identical to SEQ ID NO: 1460
  chr2:45161597-45162945
  hyper

SEQ ID NO: 37396 - DNA, 50 bp, Homo sapiens
  chr2:45163153-45163203
  hyper
ctttctcaccagcagcgcacacccctcccttccccgcccctactttagcc

SEQ ID NO: 37397 - DNA, 67 bp, Homo sapiens
  chr2:45164540-45164607
  hyper
ggtggagggtcctttagagggcggcggggctcattaggcagagcagggtgccgagaggtgcgcgtcg

SEQ ID NO: 37398 - DNA, 1305 bp, Homo sapiens
  chr2:45164656-45165961
  hyper
cgctaacaaggcgtacaaatgccgagcccagcagctttcttgcaatgcccggccttagcagggcgccggactaatgagggtcactcaaaggggctgatcaaatattcaaatttccccgcacgccaggaacttttatgcatggagaaagttgaggcaactgagctgtgtttactgtccggggcgacaattgcttggagcgccagtccccggaggctaaggcggggggcgggggtgcggggagggagcagttgttgttgttgtttttcaaaggaaagtaatcggggtccttgaagggcttcgcggcctccccgcctgcgtgctgcgctcccctgcgccctccctggccgcccgcgccaagcgcctcagtttgcagcttgcggggaggcccagactacgggccacccggccagcctccgcctcccgacatcctgggagccggaaggggcgttgcccccacagggcaaaccttcccccggcctcctggtcggctgtttagagctgagcaaggccaagtgggtgcagctgccccaaccctccggatcctcgtctcccggaggcctgcagacccgttggctttccctgtaacccaaaacaaggagagagtgggaggtctctcgggcgttctccagatgtggttgagactttcccagtgctggggtggcgggtgacatttgtaaataaatgccagttggtccgggtacaaggagaacactatttaaaccccaaagacatcttttctccctgccccacctgaaggcgatattttagatcgccggggccaggattgaagcggggatgatggcagcaaatttgttctgcacaggtgacccggcctgtacgggcgccaagtcccagatcccgcaatcagagcggccagagagcagagaagagacctagaggatctgcaagctgacctatccacccgagactctccgctctgagcgaccccagggtgcaggcgccctccacgcgccacctcctctagcggtcccccagggtcccttcccagtcctcgcactgccctagggcttgcttggttcccagaccagcgtggaaggccgctgggccccggaacccaaggtccctctgcttctgctccactccccagtgcccagcgcctgggaatttgggaggggaagctctggcgctccacagccctgcttcccacccaaacacgcactcagaacccctcgactgagatcctatggagcctgcgcccccagcccggcggggagccagtccggccctccgctctgggaccagccgccccgcctccctgccctgctctccggactctcaacttac

SEQ ID NO: 37399 - DNA, 30 bp, Homo sapiens
  chr2:45166299-45166329
  hyper
gttttttatttcagcgctttcggcagagcc

SEQ ID NO: 37400 - DNA, 30 bp, Homo sapiens
  chr2:45168906-45168936
  hyper
gctgaatcttgactcggcggtggttggctc

SEQ ID NO: 37401 - DNA, 796 bp, Homo sapiens
  chr2:45169326-45170122
  hyper
tctggcgagtagcggcggcgggaacggtgcgggaggcggcggcggcgcgggaggcggcagcggcggcgggaacggtgcgggaggcggcggtgctggcggagcaggcggcggcggcggcggcggctccagggcccccccggaagagttgtccatgttccagctgcccaccctcaacttctcgccggagcaggtggccagcgtctgtgagacgctggaggagacgggcgacatcgagcggctgggccgcttcctctggtcgctgcccgtggcccccggggcgtgcgaggccatcaacaaacacgagtcgatcctgcgcgcgcgcgccgtggtcgccttccacacgggcaacttccgcgacctctaccacatccttgagaaccacaagttcaccaaggagtctcacggcaagctgcaggccatgtggctcgaggcgcactaccaggaggccgagaagctgcgcggccgcccactcggcccggtggacaagtaccgcgtgcgcaagaagttcccgctgccacgcaccatctgggacggcgagcagaagacgcattgcttcaaggagcggactcggagcctgttgcgggagtggtacctacaggacccctaccccaaccccagcaagaaacgcgaactggcgcaggccaccggcctcactcccacacaagtaggcaactggtttaagaaccggcggcagcgcgaccgcgccgcggcggccaagaacaggttagtggcggggcccgcggcctggctacagcctcagaggcctgggaaggggagaggggttgagatggggcta

SEQ ID NO: 37402 - DNA, 212 bp, Homo sapiens
  chr2:45171351-45171563
  hyper
gggcggtggggaacccgcagctcccggtgtgtgtttgagggagcagggacggggttactaggggaactcgaccggtcgcggggcagccggctcagtttgaagagccccagggactgcggagggaagaagcgcccggctcctctccgacttctgcttctccagggcttggcgtactttgtcgcttgcacccaggcctccccaagcggccgggc

SEQ ID NO: 37403 - DNA, 43 bp, Homo sapiens
  chr2:45171836-45171879
  hyper
cgcgcagacaccggcacctccatcctctcggtaacctccagcg

SEQ ID NO: 37404 - DNA, 59 bp, Homo sapiens
  chr2:45172156-45172215
  hyper
cccaaaggaccccgacgccaacagacagtcaaacgctgatgttgcgggcagaaaacata

SEQ ID NO: 37405 - DNA, 460 bp, Homo sapiens; identical to SEQ ID NO: 1463
  chr2:45176824-45177284
  hyper

SEQ ID NO: 37406 - DNA, 30 bp, Homo sapiens; identical to SEQ ID NO: 1464
  chr2:45180074-45180104
  hyper

SEQ ID NO: 37407 - DNA, 30 bp, Homo sapiens
  chr2:45182202-45182232
  hyper
cttgttattggacacgcgagagtttagaga

SEQ ID NO: 37408 - DNA, 251 bp, Homo sapiens
  chr2:45182674-45182925
  hyper
ggaaggctgcaggtcggatagctagattccatgatgcccccaagaagttgccagactccagtctgggagctctcaagagccagagacccagggaagtcccctctttggcctccgaggaccccgaagcctggcagcagtgctcagccttggaccccgcggttccgcggccggacgcccctcgcgctggctgtgcgcaccctggcgcaaagcactgcaggttggaggcggaaagcagcgcgctctggggccac

SEQ ID NO: 37409 - DNA, 116 bp, Homo sapiens
  chr2:45231367-45231483
  hyper
tggttcagatgcgtcgtttaaaggggggggctggcactccagagaggagggggcgctgcaggttaattgatagccacggaagcacctaggcgccccatgcgcggagccggagccgc

SEQ ID NO: 37410 - DNA, 864 bp, Homo sapiens
  chr2:45231696-45232560
  hyper
cggccgccggcccggccgccctgagtccgatttccctccttccctgacccttcagtttcactgcaaatccacagaagcaggtttgcgagctcgaatacctttgctccactgccacacgcagcaccgggactgggcgtctggagcttaagtctgggggtctgagcctgggaccggcaaatccgcgcagcgcatcgcgcccagtctcggagactgcaaccaccgccaaggagtacgcgcggcaggaaacttctgcggcccaatttcttccccagctttggcatctccgaaggcacgtacccgccctcggcacaagctctctcgtcttccacttcgacctcgaggtggagaaagaggctggcaagggctgtgcgcgtcgctggtgtggggagggcagcaggctgcccctccccgcttctgcagcgagttttcccagccaggaaaagggagggagctgtttcaggaatttcagtgccttcacctagcgactgacacaagtcgtgtgtataggaaggcgtctggctgtttcgggactcaccagagagcatcgccaaccagaacggcccacccggggtgtcgagtcttggtagggaaatcagacacagctgcactcccggcccgcgggccttgtggcatataaccatttatatatttatgatttctaattttattataaaataaaagcagaaatatttcccgaagaacattcacatgagggcattacggggagacggcaagtcggcggctcggggggcgcgctcagccgggagcgctgtagtcacagtcccgggaggaagagcgcggtgtggcggggcctcgccaagagagaaggaggaggggcgtatgacgaggcggcgtttaggggct

SEQ ID NO: 37411 - DNA, 1439 bp, Homo sapiens
  chr2:45235529-45236968
  hyper
gaaaggcctaagcatcgtccaagtcaggccgggctgccgctgggctgtggccgggcctgggggcccagtttaggcctctccgggggaccggcagaagccctgcgaacccctcccttgggccccggggagctggcgccgaagaaggtctacttactcgtacctttccttggcctcggccgcccggtcgcgctgccgccggttcttgaaccagttgctgacctgtgtggtggtgaggcccgtggcctccgccagctcacgcttctcgcggggtgaagggtaggggttgtgcgcgtaccactcgcgcagcacgctgcgactcttttccttgaagcagtagctggtctcctcgccgtcccagatggagcgcggcagcgggaatttgcggcgcacgcggtatttgcccacggcgcccaggggtcggccgcgcagcttctccgcctcgatgtagtgtgccttgagccacagctgctgcagcttggcgtggttgtgcggcgagaactggtggctctccaggatcttgtagagctcgcggaagttgccgcggtggaaggccaccacggccttggccttgagcacgctttcattcttgtgaaggtgctcgcaggcgggcagcgaccacaggaagcggcccagccgctcgatgttgccgccctgctgcagcacctcgcacacgcacgccacttgctcctgcgtgaagccgaaggtgggcagcatggacatggtgccggctgcgtccccgcccgcccgcgcgcgccctcaccgggccgcgcggtcccgcatgggagcttcctcgccgggccgtccgggccgagacgcgggcggggctggccccctggcccggcactggcccccggtgagccccgagtcactgccgtacgtccccgcgccggccgcgggtcccacgaagctccgaaccccaacggcccgcgcgcctggcccaagccctcgcccaagcccgggggccgcccggggcgccgctccgcatgctccgcgcccgcccgccgttccctcgctcgcttctcactcgttctccctcccgtctagctggctctcagctttcttaataatattattctaagcgggcatgaggcgcggcggcccgcgccctgattggtccggttatctgacccggggcctgccagcgccagacaatagtcggagtcaaattattcgccatggagacgctgtcagtcactggtaacccgagcctcggcgggccgggcggctccccccggccggctccgctgacagatcgccccgctccgcgcagaactgagggcggctctactggagcctggggcgctctgagagcctgggaggcggagaggggccgggttggggccggcggcggcggagattgacggggcggatgcccaaagagggagggaggaggaggacaggagagcggggggagcgggcgaagacgaaaaggggtggat

SEQ ID NO: 37412 - DNA, 719 bp, Homo sapiens
  chr2:45237181-45237900
  hyper
cacattctaccccggcgcaggccagtgggatgggagagtttggacgtgctcgggtgccgcccaaagacttggctttttctgctgacagcgccccacccccatcctagaaactctggactcagcggtcctcgagggaaaaggggagggagtagacgaaagaaatggggaagatttggcagtggccgcaggcggacgccggagaatcgacttcccggaggatcccgcctttcctccctctcctagccccgccggctgcctggcggcctgtaccgccccaactctgcgctctctgctcctcgccgggcggggactcagacttaaccccacgggtcccacagcccgaggagcgccaggcagttccgtgtggcctctatggaagctgactccggccggcagctgcgacgcagaaccccggacggcgcagacccgcagtctgcccaccggggcgggggagaggggcgacggcagggactctaggacggtggtggggcttccccggtgggtggtcggggaggagaacggaggcaagattcccagtcctcccgcttcgccgctggggatcggctcggctcctggccactccagcctgggaaccggctcgctgagctccgggatgaggtgctttaaaagggggtcctgttttttgcttctttgtcagggtgccaatggaaacatgtggtgctggtcctgtgggagaagggctcgcacaaaggtgggag

SEQ ID NO: 37413 - DNA, 62 bp, Homo sapiens; identical to SEQ ID NO: 1471
  chr2:45240364-45240426
  hyper

SEQ ID NO: 37414 - DNA, 140 bp, Homo sapiens; identical to SEQ ID NO: 1472
  chr2:45240490-45240630
  hyper

SEQ ID NO: 37415 - DNA, 405 bp, Homo sapiens; identical to SEQ ID NO: 1473
  chr2:45240763-45241168
  hyper

SEQ ID NO: 37416 - DNA, 476 bp, Homo sapiens
  chr2:45241232-45241708
  hyper
cgggcagggccacggggcgaggggacgggctcgcggctttgggttcagggagccgcggagctccaccgccgggttgttttgcaatggggctttggagaggttgcgcgtcccgggccccatggctccgccgggtctgcacgccagcgcccccacgcggcgggcccagagttcaggccggcggggctgcgcgctcggctccccgcaggcctgtagcccaggagggagaggagggagaggacgcggagagggcccgctggttcttccctcctcaccccagcactgacccgcctgtgcgctggcacggagggctcgaaaatcggggcgcgtccgcgaagagcgagacctcggagacagacacacaacccagaggtgcactaggttgccagacggtctgatcacaggattcttggggggatagacgctggcttttctccatcacacgtttcccctgcaacgtctgggtgcccaggaaatgt

SEQ ID NO: 37417 - DNA, 1406 bp, Homo sapiens
  chr2:45395854-45397260
  hyper
ttgtattttgagaaccgctccctttcccgcacacgcattgctgcctcctctcgggcttggttaatgagtctgtgcgccaagccaggtcgctccgggcagttcgcgcttccgcgcctcggcactcggatgaccgtgtcctattcgtctctctcgtgaatgtcgctgaaaaaaaataaaagtttgttctaagcccgtggcatttccgcgcgcagatggaaaggcaagtgggagaggagggtgcaggtgcggggcgggcgcggcggccccttcaggcgccgggggctgggctgcccccggccgggagcagctccgctccgcgcacgtggctgtgggcgctgcggacgggggacggcaggcgggggacggcaggcggggagtggagggtgcagtgcccgcaggtgccgacggcttcctcccagagcccttcgcgccgcgccttgcctggctggtggcgcggggaaaccatggcagcattgcggctccggcgggcgggctctgcgcggggccccaccgagctttccgggagcctctcccgcagccgatgggcatctaggggcgcagaacgaagagtgggcgccgaaacgggtgtaggcgctggaggccgacggggaggcccggggcggtcaggcttctcggtagagagggccgtgcacctcgcggcctgcgggctaaggcggggagccgctcctgcggcggccgggcgcgcggactggagggagggaagcgccacggactggggaaccggggtgacggggagacgggggggctggtggggtgaggtcggcgggcagcagccaagtgttctgcagctccgaaccccgccaccctctgggcgaacggaatggcacccgcggagacgggcggggacgggcgaaagcgggtttgctccgacccgaagctgagcccgggttggagggcgagaccgtaggcgagaatggccgcgcgggctgggagacccgggccggtatggagtgagtggagccgcccgaggtagggtagttggggatggtagttgtgaagacagtcggagtctagctccgggcagacgaaacaccggggcgcgccagggtccgtttcctccttctctctgctttcccaccagccctgtagatacggagccagcagtcgggctagagcggaggctgagggtcgcggttccaagggcggtctctcgccccgggtcaggccccaccccgcggtggcggtcgcgtggcgctgtcctggagttgagctgtccccgcgccgcggcccgcacgcccaggaccgcacaccgccgcccgcaggcagagacgcctgcaacctcgccctctcgcccggctcccagctcggggctgggaaccggaaaggtgcatttccgtgtggggtgggggcgattcccggctgtcggcggtggggctaggccttgc

SEQ ID NO: 37418 - DNA, 102 bp, Homo sapiens
  chr2:45837796-45837898
  hyper
tcctacatgccaggcgcactacagaaggtgcagttgattcagacagggccaccatgaccgtgaaaagggtgcttcctctcccacctccgataattttaggta

SEQ ID NO: 37419 - DNA, 30 bp, Homo sapiens
  chr2:45877164-45877194
  hyper
aatccccagctccccggcagcggagccgac

SEQ ID NO: 37420 - DNA, 143 bp, Homo sapiens
  chr2:45878849-45878992
  hyper
agcgccgggcgcggcgcccgctttcccgcagtccggagccggagagccagcgaggcggcgaggcagcccccgcggcttgcagcggagccgacagctcgtcttctcttctggaggtgcagctggtggtcggggggagagacttg

SEQ ID NO: 37421 - DNA, 509 bp, Homo sapiens
  chr2:46524184-46524693
  hyper
gagcccggctcccggccgcccctcggccctgcgcaggctgcctctccccgacgcggagtcccaccccgctacccgccgcccagacgacctcataaacaagtcctcgaagtgcggaggcaggaggcggggcgcagcgcgggggcaggaggcgggccagggtcagggcagaggctgcggccgcgcgtccccattggccgggacgcagtgagccgcccggagctcggcgcgggcggggcctgccggcgcgtgcccgcccacacacccgcgccggtgcccgccccccgccctccgcgcccgccccgtgcccgccccaagccggccgacggagtttttaaagtgggctgccggccgcgggagctttacactcgcgagcggaccgccacacgggtccggtgcccgctgcgcttccgccccagcgctcctgaggcggccgtacaatcctcggcagtgtcctgagactgtatggtcagctcagcccggcctccgactccttccgactcccagcattc

SEQ ID NO: 37422 - DNA, 1523 bp, Homo sapiens
  chr2:46525000-46526523
  hyper
agggagcccaggtgctcggcgtctgaacgtctcaaagggccacagcgacaatgacagctgacaaggagaagaaaaggtaagcgggcgtccgggccgatcagggggccggtccgaggccagggccgggctgcgcggggcaggcgcgaccgagagtggttgggagaagagtgctgagaggtcttcggagctcgaggctcggtttggagggctgtgagggggagagcatgtgcccggtttgggggcgcggatcagcagctttgcagtggagacttctgcggctcggaggagtcggggatttgcgcgcacggcgaggccaggaggccgagggagatggcctggaggtcggaggtgcttccgcggtgcctttgaaaatctcccagccgccccgcagcagattaccgtggccaccggcgcttggaaatgtttgtgggtgcatgtcctcgactttctctggtctctcattttggggcagcatccacgtctctatttttctctggattcgcggagtccttccaaatgcgctcctgtgcccgcgccgcggcccaagtgggcaaaggggggcgggaggcggagagcggctcagggacacgatcctaccgaggagccaggacccttcagagcgccccgctgccgggctccagaccccaccgaaggttggagaacccacttcctcgtgccgcaccttgactctggggagagtaggtagtgagtgacctggattgccctgcgggggcagatggttcggtgtgtaggaagcggacggcaacactggatgtccctggcaggtccgggtgtctgtctccgaagaggacagagaagggcagccacgatctgcccgcctgccctcgcgagcctctcggcactgggtgagaggcaactctggccatttcttgctgccctctcgccctctcccggccgctcccagtccagccgggcccggcgctacccgagcgagggttcgagccctctgcgcggccgcgcagaagcaggcagggcctcaacttctgcaaatgtgtgcggctcgccgcctgtcccctttctcctcctgtctccacccgtgcggccccagtggcctggagcttccagccccgcgcttggccgcggcttggcgaggctatgctgcgggaagctggaatccaacgcgcggccggctgaaccgcctgagccgcgggaaaccagcggcggagcggcggtatagaggtgcgaggatgaggaggaccgactcgctaagggagggaggtgactggccgggagggctcactgccgaggttgatttgctcttgttccaacttccactacgggactggagccagaaaccgtgtatcctccggtcgaaagcagcggttcccacctcggggcaccgataaggatttgataaacgggagcgaatcgcgcctgtcctggctcggcgcccgggcccttcactgcgggatcgctaggggaggggattgggccctgctcccctttcctggccgtagtcccccctttctcgtcaccgtcgcgccctcagacccaagacaagt

SEQ ID NO: 37423 - DNA, 30 bp, Homo sapiens; identical to SEQ ID NO: 1479
  chr2:46526744-46526774
  hyper

SEQ ID NO: 37424 - DNA, 396 bp, Homo sapiens
  chr2:46727294-46727690
  hyper
aggagagttcccaaaccctcacgtatcctttgagtaacttgccaacttggggtgatgaaaacgcactcccctcctcccgccgccgctgggtcgggctctgaacgcacgagcctcggagctatgaggtcatacacgggtcacgtggccgctgtcgcatctgtcaactgtgatacaattactaagactgtccggacattcaaacctgctctctcctcctcctccctctccggtacgccggcccttttcacaccaagggaccgtctcaaaagtctaggctccaaatgctacgacgtaagaaaggaggagaaagagggaggaaaaaagtcgaagactacacttctcgttgctgccgtttgaaaactatgcctaagccccgttatttaaaatcctttctgc

SEQ ID NO: 37425 - DNA, 30 bp, Homo sapiens; identical to SEQ ID NO: 1480
  chr2:46768929-46768959
  hyper

SEQ ID NO: 37426 - DNA, 30 bp, Homo sapiens
  chr2:46925738-46925768
  hyper
tccatgctgaagggcgctggagagactcat

SEQ ID NO: 37427 - DNA, 30 bp, Homo sapiens
  chr2:46926995-46927025
  hyper
agggaagggagcaccgaccaagtcacttgg

SEQ ID NO: 37428 - DNA, 256 bp, Homo sapiens
  chr2:47143091-47143347
  hyper
actggcgggactgacgcagttcttctacctgctttcccaagggcgacactcggctccactccagttgggccgctggacgccctaggggcccggcagttgctaggcaacgccggaagccctcaggaacgtagttccacgggcgacgtaggatggcggatccggatggggcggaccccaaagctggctcccaactccgctcaccccctcctatacagggctcttggttcaggtctcttggttcgtcctgctgcaagtt

SEQ ID NO: 37429 - DNA, 82 bp, Homo sapiens; identical to SEQ ID NO: 1481
  chr2:47167905-47167987
  hyper

SEQ ID NO: 37430 - DNA, 30 bp, Homo sapiens
  chr2:47169173-47169203
  hyper
cccccaccgcggtccgagggtggggtgtcc

SEQ ID NO: 37431 - DNA, 483 bp, Homo sapiens
  chr2:47499350-47499833
  hyper
cgggttccgggcccacgtcctccagaccatgcccctcacccccggccaccaccctccccgactgaccacacctggaagggaaggaagggtgggggtggcctgcagagggtgtggcgagatctggacggcctgggggcgggggactaagttgaccggaaatggggctaggccgcggccagggacggcagcagatgatggttgaggagtggcctaggaaggcctccctgacggcgcccacacacgccccgcggcaccgcgaacacggctgacagggcagttgggcagcgaggtagtcgggaaagagcagggggagcccagcggctccgttgcgccctctgtcggccgccagcctccattgcacgcggcgccgcccacctgcgcactgggaccccggccctgggccgaccaggaaccccttgcgcccgcgccagctcgagccctgttgcacctgtcgtggtcaccgcaagcctctctgggagaagg

SEQ ID NO: 37432 - DNA, 329 bp, Homo sapiens; identical to SEQ ID NO: 1483
  chr2:47596114-47596443
  hyper

SEQ ID NO: 37433 - DNA, 27 bp, Homo sapiens
  chr2:47596455-47596482
  hyper
cgctagtccttcggcgagcgagcacct

SEQ ID NO: 37434 - DNA, 343 bp, Homo sapiens; identical to SEQ ID NO: 1485
  chr2:47596505-47596848
  hyper

SEQ ID NO: 37435 - DNA, 41 bp, Homo sapiens
  chr2:47596941-47596982
  hyper
cgccttggtagggaaatggccttgggcggaggcgggggaca

SEQ ID NO: 37436 - DNA, 337 bp, Homo sapiens
  chr2:47630204-47630541
  hyper
gaagctgattgggtgtggtcgccgtggccggacgccgctcgggggacgtgggaggggaggcgggaaacagcttagtgggtgtggggtcgcgcattttcttcaaccaggaggtgaggaggtttcgacatggcggtgcagccgaaggagacgctgcagttggagagcgcggccgaggtcggcttcgtgcgcttctttcagggcatgccggagaagccgaccaccacagtgcgccttttcgaccggggcgacttctatacggcgcacggcgaggacgcgctgctggccgcccgggaggtgttcaagacccagggggtgatcaagtacatggggccggcag

SEQ ID NO: 37437 - DNA, 156 bp, Homo sapiens
  chr2:47635538-47635694
  hyper
ggagcaaagaatctgcagagtgttgtgcttagtaaaatgaattttgaatcttttgtaaaagatcttcttctggttcgtcagtatagagttgaagtttataagaatagagctggaaataaggcatccaaggagaatgattggtatttggcatataag

SEQ ID NO: 37438 - DNA, 280 bp, Homo sapiens
  chr2:47637231-47637511
  hyper
ggcttctcctggcaatctctctcagtttgaagacattctctttggtaacaatgatatgtcagcttccattggtgttgtgggtgttaaaatgtccgcagttgatggccagagacaggttggagttgggtatgtggattccatacagaggaaactaggactgtgtgaattccctgataatgatcagttctccaatcttgaggctctcctcatccagattggaccaaaggaatgtgttttacccggaggagagactgctggagacatggggaaactgagacag

SEQ ID NO: 37439 - DNA, 148 bp, Homo sapiens
  chr2:47639551-47639699
  hyper
gataattcaaagaggaggaattctgatcacagaaagaaaaaaagctgacttttccacaaaagacatttatcaggacctcaaccggttgttgaaaggcaaaaagggagagcagatgaatagtgctgtattgccagaaatggagaatcag

SEQ ID NO: 37440 - DNA, 151 bp, Homo sapiens
  chr2:47641406-47641557
  hyper
ggttgcagtttcatcactgtctgcggtaatcaagtttttagaactcttatcagatgattccaactttggacagtttgaactgactacttttgacttcagccagtatatgaaattggatattgcagcagtcagagcccttaacctttttcag

SEQ ID NO: 37441 - DNA, 135 bp, Homo sapiens
  chr2:47643433-47643568
  hyper
gggttctgttgaagataccactggctctcagtctctggctgccttgctgaataagtgtaaaacccctcaaggacaaagacttgttaaccagtggattaagcagcctctcatggataagaacagaatagaggagag

SEQ ID NO: 37442 - DNA, 201 bp, Homo sapiens
  chr2:47656879-47657080
  hyper
gattgaatttagtggaagcttttgtagaagatgcagaattgaggcagactttacaagaagatttacttcgtcgattcccagatcttaaccgacttgccaagaagtttcaaagacaagcagcaaacttacaagattgttaccgactctatcagggtataaatcaactacctaatgttatacaggctctggaaaaacatgaag

SEQ ID NO: 37443 - DNA, 111 bp, Homo sapiens
  chr2:47672685-47672796
  hyper
ggaaaacaccagaaattattgttggcagtttttgtgactcctcttactgatcttcgttctgacttctccaagtttcaggaaatgatagaaacaactttagatatggatcag

SEQ ID NO: 37444 - DNA, 125 bp, Homo sapiens
  chr2:47690168-47690293
  hyper
ggtggaaaaccatgaattccttgtaaaaccttcatttgatcctaatctcagtgaattaagagaaataatgaatgacttggaaaagaagatgcagtcaacattaataagtgcagccagagatcttg

SEQ ID NO: 37445 - DNA, 152 bp, Homo sapiens
  chr2:47693795-47693947
  hyper
ggcttggaccctggcaaacagattaaactggattccagtgcacagtttggatattactttcgtgtaacctgtaaggaagaaaaagtccttcgtaacaataaaaactttagtactgtagatatccagaagaatggtgttaaatttaccaacag

SEQ ID NO: 37446 - DNA, 99 bp, Homo sapiens
  chr2:47698102-47698201
  hyper
gcaaattgacttctttaaatgaagagtataccaaaaataaaacagaatatgaagaagcccaggatgccattgttaaagaaattgtcaatatttcttcag

SEQ ID NO: 37447 - DNA, 247 bp, Homo sapiens
  chr2:47702162-47702409
  hyper
ggctatgtagaaccaatgcagacactcaatgatgtgttagctcagctagatgctgttgtcagctttgctcacgtgtcaaatggagcacctgttccatatgtacgaccagccattttggagaaaggacaaggaagaattatattaaaagcatccaggcatgcttgtgttgaagttcaagatgaaattgcatttattcctaatgacgtatactttgaaaaagataaacagatgttccacatcattactg

SEQ ID NO: 37448 - DNA, 206 bp, Homo sapiens
  chr2:47703504-47703710
  hyper
ggccccaatatgggaggtaaatcaacatatattcgacaaactggggtgatagtactcatggcccaaattgggtgttttgtgccatgtgagtcagcagaagtgtccattgtggactgcatcttagcccgagtaggggctggtgacagtcaattgaaaggagtctccacgttcatggctgaaatgttggaaactgcttctatcctcag

SEQ ID NO: 37449 - DNA, 249 bp, Homo sapiens
  chr2:47705409-47705658
  hyper
ggtctgcaaccaaagattcattaataatcatagatgaattgggaagaggaacttctacctacgatggatttgggttagcatgggctatatcagaatacattgcaacaaagattggtgctttttgcatgtttgcaacccattttcatgaacttactgccttggccaatcagataccaactgttaataatctacatgtcacagcactcaccactgaagagaccttaactatgctttatcaggtgaagaaag

SEQ ID NO: 37450 - DNA, 177 bp, Homo sapiens
  chr2:47707833-47708010
  hyper
ggtgtctgtgatcaaagttttgggattcatgttgcagagcttgctaatttccctaagcatgtaatagagtgtgctaaacagaaagccctggaacttgaggagtttcagtatattggagaatcgcaaggatatgatatcatggaaccagcagcaaagaagtgctatctggaaagagag

SEQ ID NO: 37451 - DNA, 451 bp, Homo sapiens
  chr2:47709916-47710367
  hyper
gcaaggtgaaaaaattattcaggagttcctgtccaaggtgaaacaaatgccctttactgaaatgtcagaagaaaacatcacaataaagttaaaacagctaaaagctgaagtaatagcaaagaataatagctttgtaaatgaaatcatttcacgaataaaagttactacgtgaaaaatcccagtaatggaatgaaggtaatattgataagctattgtctgtaatagttttatattgttttatattaaccctttttccatagtgttaactgtcagtgcccatgggctatcaacttaataagatatttagtaatattttactttgaggacattttcaaagatttttattttgaaaaatgagagctgtaactgaggactgtttgcaattgacataggcaataataagtgatgtgctgaattttataaataaaatcatgtagtttgtggaatttga

SEQ ID NO: 37452 - DNA, 458 bp, Homo sapiens
  chr2:47747970-47748428
  hyper
gtgactgagagaagcaaaccacgcccggcggccccgcggcctggagagggtccccggcgcgggcggacgggcggtctacctggaggcgctggtctcggccagccggttgttcatgatgcccagcgcgcccacgccgcccgagaagccgttctggcgcgtgttgacgcacacgctgcgcgggtagccgttggccgtctccgacagctgcttctgcagcagcgccagcgacaccttgttggaggccgtgaggtcgcgcatggagatgagctcgcccgagaggcggcggccctcggcgtcgctgtcgcgggccgcggggtcggcaccgagcgcggccaggcggcggcgcagccgggagcctggggtgatggcattgcgccgggccaggggcgcgccaggagccgggcagcagcgcgcgcagcagcggcagctcagcttgcgcagcatccagttgagcacct

SEQ ID NO: 37453 - DNA, 2288 bp, Homo sapiens
  chr2:47796744-47799032
  hyper
gggtggaaaacaggaaggaaccggtagcccttggcacgtattcttagaggagaaaacggaggctcacaaaggtcagatcacagagccggccagtgttggagcacaggcggcccggggtgagcgccagaggtgggctttcttccctcactgaaagccgggagggagagagagagagagaacgggggccggcggagaagagggcgagacgaaagtaagcaaagggacattagaagggaaggcagagccgagggacgcggaccgagcggccgagcagtggaaagggcggcaggtgaaaggcacagagaggaaagatgcgcgggggacgcgccgctcacctatggttgacaccacggtgcccacgaagtagaaggcgccggggaagtcccagcgcgggcgcagcgcgtcggcgcggacgccggcggccagcgcggcctcgtagtgccggaggaaggcgcgcagctctggctcggccacgccgtgcgcagcgctgaagttgcgcagcgtggcgccccagcgcgcccgcgcctccgcctcgccggggctctcgagcgccgagaagactgtggcacccgccaccaggtagaggccgatgagcgccgccagcagcacgaagcggccggtgtcctcgttgaggtgcgaacggcggcagcagcagcagcagcaggaggggcgcggcaggcggcggcggctacggcggggcgggggccgggggctgcgggaggacatggtccggagctcagccccggggccggggcggcgctcggggcccgggccacgacatccccccggcgggagcaggagcgtgaggatggtggccaggggtccggggccgccgcggagcccctcgccgccttcgcagagcccctcgtcgccttcccagagcccggacagaggggcgcctccgcctcctccccggcgctcaggccacacgcgagtcccgtggcccagcgggtgcccgggcaggggcgctcctctgcgcgccccgacgcctcgccggctcccgcggctccttacccgccgctctcgggcgcggggctccgcagctaggcccctgccgcccggtggccggcgtccgcggggccccgggcctcatactcctctccagacaggccgcgggctgcgggcggggtgggccgtggatcccgggcgcctaggaccgggacgcggcagcaaggcgtggagagagcccccgggggcgtcccatgaggcgttcgggatcggcgcctcctaggtgcgggctgtgcgggcagtcctgctcccgcccccggggctgagctggcggcgtcggcttcagagcctcggagccgagccgagtccggggaagcgctcctttctcagctccagccgaagagccgcccggcagggagaggcggagtcactggcgcccggggcggggtgttggggaggggtgagtagggacaggagggagggggtggagagttgggctgctgcgacgcctcccggtggctctggcggcaccaatgcggggcaccggagcaggtgtccgactgcggtgcgggctaccactccgccggggaacctcgtcttgctcctccctgcgcttcgcctctggaatctctcccttatctcatgccgcggtgaaactttgctcaagttggtggtgctctgaggtctccagggctggaggccgcgcgacgcgaatcgccgacactggattctcgggcgttagtccgaagtttaagttcccttcgttcactcctttgccctggatcgaaccgcagccccaggacgcagcgggttccactggaaacggggaatcggggagaggcggtcgctgggctccgggcgacctgggaacgagggcgtttgctccccctcccgaccgagcgggcggccggcgtcagcaccgcggacagcgcatcggtgccgcagccgcgggcgggcgccgctagggctgccaggggtccgaggcgcgggcaaggctgctcaccccgctgtgctgtgcaccccaaaccttccctgttttcctttctacctcccgtgtgcacccccctacccgccacccgaggcaggtgcggtcgctgaagcaggctgctgacagggcggggacgctgcggaatagagacgggggaggagtcaagcgcgggtagggggccaaggtgccacagggagaaagagcccaggcccggcggactgccgggctcctcgcgccaccccagctcaccgacccctctagcccggggcggggaataacaccctgggtgcggtagagagtagaggaatagaggaggtgtaggggaagctcactggcagctcccctgaggccg

SEQ ID NO: 37454 - DNA, 21 bp, Homo sapiens
  chr2:47799123-47799144
  hyper
cggctgcgggtgctcctctgc

SEQ ID NO: 37455 - DNA, 193 bp, Homo sapiens
  chr2:48009755-48009948
  hyper
aatcttgagaatacaacgtgaaggtgaactgctgactaaagtttggtccctttcgctccgtctccttgcgaaaatgctctaacggcaggaggtcacgcgagcgctggacgcgtttctccccgcgagcccctttccgaggcctttcgggtccccccggttatccccgcccgggcggtgcgcgcccccgctgttc

SEQ ID NO: 37456 - DNA, 413 bp, Homo sapiens
  chr2:48010219-48010632
  hyper
cggcgaggcgcctgttgattggccactggggcccgggttcctccggcggagcgcgcctccccccagatttcccgccagcaggagccgcgcggtagatgcggtgcttttaggagctccgtccgacagaacggttgggccttgccggctgtcggtatgtcgcgacagagcaccctgtacagcttcttccccaagtctccggcgctgagtgatgccaacaaggcctcggccagggcctcacgcgaaggcggccgtgccgccgctgcccccggggcctctccttccccaggcggggatgcggcctggagcgaggctgggcctgggcccaggcccttggcgcgctccgcgtcaccgcccaaggcgaagaacctcaacggagggctgcggagatcggtagcgcctgctgcccccaccag

SEQ ID NO: 37457 - DNA, 36 bp, Homo sapiens; identical to SEQ ID NO: 1489
  chr2:48011382-48011418
  hyper

SEQ ID NO: 37458 - DNA, 198 bp, Homo sapiens
  chr2:48018064-48018262
  hyper
gttgtgacttctcaccaggagatttggtttgggccaagatggagggttacccctggtggccttgtctggtttacaaccacccctttgatggaacattcatccgcgagaaagggaaatcagtccgtgttcatgtacagttttttgatgacagcccaacaaggggctgggttagcaaaaggcttttaaagccatatacag

SEQ ID NO: 37459 - DNA, 171 bp, Homo sapiens
  chr2:48023031-48023202
  hyper
ggttcaaaatcaaaggaagcccagaagggaggtcatttttacagtgcaaagcctgaaatactgagagcaatgcaacgtgcagatgaagccttaaataaagacaagattaagaggcttgaattggcagtttgtgatgagccctcagagccagaagaggaagaagagatggag

SEQ ID NO: 37460 - DNA, 2546 bp, Homo sapiens
  chr2:48025748-48028294
  hyper
ggtaggcacaacttacgtaacagataagagtgaagaagataatgaaattgagagtgaagaggaagtacagcctaagacacaaggatctaggcgaagtagccgccaaataaaaaaacgaagggtcatatcagattctgagagtgacattggtggctctgatgtggaatttaagccagacactaaggaggaaggaagcagtgatgaaataagcagtggagtgggggatagtgagagtgaaggcctgaacagccctgtcaaagttgctcgaaagcggaagagaatggtgactggaaatggctctcttaaaaggaaaagctctaggaaggaaacgccctcagccaccaaacaagcaactagcatttcatcagaaaccaagaatactttgagagctttctctgcccctcaaaattctgaatcccaagcccacgttagtggaggtggtgatgacagtagtcgccctactgtttggtatcatgaaactttagaatggcttaaggaggaaaagagaagagatgagcacaggaggaggcctgatcaccccgattttgatgcatctacactctatgtgcctgaggatttcctcaattcttgtactcctgggatgaggaagtggtggcagattaagtctcagaactttgatcttgtcatctgttacaaggtggggaaattttatgagctgtaccacatggatgctcttattggagtcagtgaactggggctggtattcatgaaaggcaactgggcccattctggctttcctgaaattgcatttggccgttattcagattccctggtgcagaagggctataaagtagcacgagtggaacagactgagactccagaaatgatggaggcacgatgtagaaagatggcacatatatccaagtatgatagagtggtgaggagggagatctgtaggatcattaccaagggtacacagacttacagtgtgctggaaggtgatccctctgagaactacagtaagtatcttcttagcctcaaagaaaaagaggaagattcttctggccatactcgtgcatatggtgtgtgctttgttgatacttcactgggaaagtttttcataggtcagttttcagatgatcgccattgttcgagatttaggactctagtggcacactatcccccagtacaagttttatttgaaaaaggaaatctctcaaaggaaactaaaacaattctaaagagttcattgtcctgttctcttcaggaaggtctgatacccggctcccagttttgggatgcatccaaaactttgagaactctccttgaggaagaatattttagggaaaagctaagtgatggcattggggtgatgttaccccaggtgcttaaaggtatgacttcagagtctgattccattgggttgacaccaggagagaaaagtgaattggccctctctgctctaggtggttgtgtcttctacctcaaaaaatgccttattgatcaggagcttttatcaatggctaattttgaagaatatattcccttggattctgacacagtcagcactacaagatctggtgctatcttcaccaaagcctatcaacgaatggtgctagatgcagtgacattaaacaacttggagatttttctgaatggaacaaatggttctactgaaggaaccctactagagagggttgatacttgccatactccttttggtaagcggctcctaaagcaatggctttgtgccccactctgtaaccattatgctattaatgatcgtctagatgccatagaagacctcatggttgtgcctgacaaaatctccgaagttgtagagcttctaaagaagcttccagatcttgagaggctactcagtaaaattcataatgttgggtctcccctgaagagtcagaaccacccagacagcagggctataatgtatgaagaaactacatacagcaagaagaagattattgattttctttctgctctggaaggattcaaagtaatgtgtaaaattatagggatcatggaagaagttgctgatggttttaagtctaaaatccttaagcaggtcatctctctgcagacaaaaaatcctgaaggtcgttttcctgatttgactgtagaattgaaccgatgggatacagcctttgaccatgaaaaggctcgaaagactggacttattactcccaaagcaggctttgactctgattatgaccaagctcttgctgacataagagaaaatgaacagagcctcctggaatacctagagaaacagcgcaacagaattggctgtaggaccatagtctattgggggattggtaggaaccgttaccagctggaaattcctgagaatttcaccactcgcaatttgccagaagaatacgagttgaaatctaccaagaagggctgtaaacgatactggaccaaaactattgaaaagaagttggctaatctcataaatgctgaagaacggagggatgtatcattgaaggactgcatgcggcgactgttctataactttgataaaaattacaaggactggcagtctgctgtagagtgtatcgcagtgttgg

SEQ ID NO: 37461 - DNA, 267 bp, Homo sapiens
  chr2:48030557-48030824
  hyper
gatgttttactgtgcctggctaactatagtcgagggggtgatggtcctatgtgtcgcccagtaattctgttgccggaagataccccccccttcttagagcttaaaggatcacgccatccttgcattacgaagactttttttggagatgattttattcctaatgacattctaataggctgtgaggaagaggagcaggaaaatggcaaagcctattgtgtgcttgttactggaccaaatatggggggcaagtctacgcttatgagacag

SEQ ID NO: 37462 - DNA, 119 bp, Homo sapiens
  chr2:48032047-48032166
  hyper
ggctggcttattagctgtaatggcccagatgggttgttacgtccctgctgaagtgtgcaggctcacaccaattgatagagtgtttactagacttggtgcctcagacagaataatgtcag

SEQ ID NO: 37463 - DNA, 91 bp, Homo sapiens
  chr2:48032755-48032846
  hyper
ggtgaaagtacattttttgttgaattaagtgaaactgccagcatactcatgcatgcaacagcacattctctggtgcttgtggatgaattag

SEQ ID NO: 37464 - DNA, 751 bp, Homo sapiens
  chr2:48033341-48034092
  hyper
ggaagaggtactgcaacatttgatgggacggcaatagcaaatgcagttgttaaagaacttgctgagactataaaatgtcgtacattattttcaactcactaccattcattagtagaagattattctcaaaatgttgctgtgcgcctaggacatatggtatgtgcaaattgtttttttccacaaattcggttttttgagagggcacttctcttgctagcacatgtatcgctaatatttttctttcttaaggcatgcatggtagaaaatgaatgtgaagaccccagccaggagactattacgttcctctataaattcattaagggagcttgtcctaaaagctatggctttaatgcagcaaggcttgctaatctcccagaggaagttattcaaaagggacatagaaaagcaagagaatttgagaagatgaatcagtcactacgattatttcggtaactaactaactataatggaattataactaactgaccttaagtttcaaagaaacagtaaaaggggaagggatgatgcactatgaaaaaacaaaaaaacttttttttttttttttttaattttaagggaagtttgcctggctagtgaaaggtcaactgtagatgctgaagctgtccataaattgctgactttgattaaggaattatagactgactacattggaagctttgagttgacttctgacaaaggtggtaaattcagacaacattatgatctaataaactttattttttaaaaatga

SEQ ID NO: 37465 - DNA, 30 bp, Homo sapiens; identical to SEQ ID NO: 1490
  chr2:48132059-48132089
  hyper

SEQ ID NO: 37466 - DNA, 31 bp, Homo sapiens; identical to SEQ ID NO: 1491
  chr2:48339288-48339319
  hyper

SEQ ID NO: 37467 - DNA, 30 bp, Homo sapiens; identical to SEQ ID NO: 1492
  chr2:48541249-48541279
  hyper

SEQ ID NO: 37468 - DNA, 30 bp, Homo sapiens
  chr2:48543176-48543206
  hyper
agtgtaatagagtgcgctagcggcactagg

SEQ ID NO: 37469 - DNA, 312 bp, Homo sapiens
  chr2:48757493-48757805
  hyper
tctccccgcgcccgccctggccgcccccaggggcgccctggggcccgcagagggatggcctcccggcagggactcctcggctcccctctgttctgagactgctgctgggaccggggtccgactctaaagagaaaactcaaacagcaaaaaaaggaatatcgactcagttccgagggcgggggccggggctcgttctcacccgcgcgcggcccctcgacctctcggacccgggccaccagctctgcgcccctcacgcctccctcggggtctctgtgtctctctcccgctcccggactccctcctccttctgac

SEQ ID NO: 37470 - DNA, 124 bp, Homo sapiens; identical to SEQ ID NO: 1493
  chr2:48982576-48982700
  hyper

SEQ ID NO: 37471 - DNA, 152 bp, Homo sapiens; identical to SEQ ID NO: 1494
  chr2:48982753-48982905
  hyper

SEQ ID NO: 37472 - DNA, 14 bp, Homo sapiens
  chr2:50573362-50573376
  hyper
tccctccccgcccc

SEQ ID NO: 37473 - DNA, 154 bp, Homo sapiens
  chr2:50573484-50573638
  hyper
cgccccatccggccactgagtgaccttctggcaactgacgcccccttcccgcggggcccagccgcgcgaccagggctggtcctttagtaggtgtccacatctctctcccagtacctcgacaaggaacgcccctcccacccctcaccaccaacac

SEQ ID NO: 37474 - DNA, 664 bp, Homo sapiens
  chr2:50573691-50574355
  hyper
cgcaccaagcacacccaaatgcacctcccttttgtcgagctcccatttctctgagccttaggagcccaggagcgagtgcagggtagaaagaggggagcgaggggataacccgcgagaacttggcatcgcagacccaccgtgtccgcctcgcaaggatgccggtgacctgtagattgcaataggcactgaatgatgcttgctgctgccatggaaatggtggatgtggtgcgctcccaaactggatgccccccacgccactcctaggaggccgctgagggtgagcgggactatccaaagcagggccaggcgcccccctgcgccgccgccgccgccgccgccgccgccgcccccgggcgagcccagctcggcgccgcaccggagcatcctctggtacatggcggggcgcccgccgaggggcagccgccgcgggaggcaaagtttggggcgcggggagaggagagggcgcaggggagcgggcggcgcggagtgggctgaggggccggccgcctcaccgcgccagggcacccatcctctccctccttcggacagtcttctcggggtcctggagtccgccgtgcctagcaccccaaacaatccgaaacatagccgaggcgaatgcagctggagaggggcttgtccggaaaggcagccccgggaacagcaa

SEQ ID NO: 37475 - DNA, 283 bp, Homo sapiens; identical to SEQ ID NO: 1498
  chr2:50574401-50574684
  hyper

SEQ ID NO: 37476 - DNA, 375 bp, Homo sapiens; identical to SEQ ID NO: 1499
  chr2:50574738-50575113
  hyper

SEQ ID NO: 37477 - DNA, 31 bp, Homo sapiens; identical to SEQ ID NO: 1500
  chr2:50629761-50629792
  hyper

SEQ ID NO: 37478 - DNA, 264 bp, Homo sapiens
  chr2:51259537-51259801
  hyper
ttttacctttgcatcgtccccttgcagggggagcctgatcctgggggcggggaccttccgcaagcgcttctaacttgtcaccaccctctcttccccatcggaaagaaagaaagagagagagagagagagagagagagagagagagagagagagaacgaacgaacacgaaccagagaaccacgtagcctactgagcatgcccaggcccctgctagacccatggaaagctgtatggagattccacttctccggggtttggtagtga

SEQ ID NO: 37479 - DNA, 30 bp, Homo sapiens
  chr2:53340315-53340345
  hyper
gaggtatcagggccccggcattgcaaagag

SEQ ID NO: 37480 - DNA, 30 bp, Homo sapiens; identical to SEQ ID NO: 1502
  chr2:54013787-54013817
  hyper

SEQ ID NO: 37481 - DNA, 30 bp, Homo sapiens
  chr2:54015303-54015333
  hyper
tcaaattgaagtcccggaaaaagcaaaatt

SEQ ID NO: 37482 - DNA, 30 bp, Homo sapiens
  chr2:54197241-54197271
  hyper
ggggaaggaagaaccggaggaagcaaggag

SEQ ID NO: 37483 - DNA, 30 bp, Homo sapiens
  chr2:54342569-54342599
  hyper
catcctccccagtccgggaagagaggccta

SEQ ID NO: 37484 - DNA, 42 bp, Homo sapiens; identical to SEQ ID NO: 1503
  chr2:54682462-54682504
  hyper

SEQ ID NO: 37485 - DNA, 141 bp, Homo sapiens
  chr2:54683031-54683172
  hyper
cccctattgtcctgctcgggtagcggcagcagcagtgcccaccccgccccggccagcctggtcggtccccgccgctgggaggatgaggtccgggctggacccgggaagagcctcagctggagaggacgtggacgcgcccga

SEQ ID NO: 37486 - DNA, 30 bp, Homo sapiens
  chr2:54684119-54684149
  hyper
ccgcgggtggggagcgggggcggcggtgac

SEQ ID NO: 37487 - DNA, 20 bp, Homo sapiens
  chr2:54784816-54784836
  hyper
ttcccacaatgccttgcaaa

SEQ ID NO: 37488 - DNA, 1015 bp, Homo sapiens; identical to SEQ ID NO: 1505
  chr2:54784958-54785973
  hyper

SEQ ID NO: 37489 - DNA, 460 bp, Homo sapiens; identical to SEQ ID NO: 1506
  chr2:54951618-54952078
  hyper

SEQ ID NO: 37490 - DNA, 30 bp, Homo sapiens; identical to SEQ ID NO: 1507
  chr2:54952331-54952361
  hyper

SEQ ID NO: 37491 - DNA, 30 bp, Homo sapiens
  chr2:55276441-55276471
  hyper
aggagcaacccagacgggtagacaaaagca

SEQ ID NO: 37492 - DNA, 30 bp, Homo sapiens
  chr2:55278254-55278284
  hyper
cactcagtctaaaccgcagcccccgaaatt

SEQ ID NO: 37493 - DNA, 33 bp, Homo sapiens
  chr2:55459764-55459797
  hyper
aggggtgggtccttcggcgggagctccgggaaa

SEQ ID NO: 37494 - DNA, 136 bp, Homo sapiens
  chr2:55496369-55496505
  hyper
tcggtaggtcagtccgtccccgctacggtccccgccgggcttccggtcccgctggaaaaggttctttccggaattcagagagttgctgtcgccgctgggggtgggactgtctgcggtgtccgcggcgggcgtccag

SEQ ID NO: 37495 - DNA, 582 bp, Homo sapiens
  chr2:55509212-55509794
  hyper
gatcagggagggctgtgagatcgcaggcgccgccccgcagcgaggcgcctgttgagagctcccgcaggccttcgcaagccggagccctcagcggacgatgttcagggactagcgggcgaggcgctcagacagggcggacccgccttcaccaggcaccagcactacgctgccggcgtcggccgagatccctctgggcagttccgcctcaggcttcggtctgcgcagccgcgggaagccgtgccgtttttccgcccatcgccacgatagcggctccacggcgggcgcggagttgggagcggcgctcgagcagcggctcggtgccctggccatccacactgaggtcgtggagcaccccgaggtgaggcccctagaagcgaccgccgagacaggcccagcggggtgggctgtgctgcacgtccgtcgggcgaggccgctgagatcaggtgtcccagggtcaatgtaccgtgagaacgtcgctcctggaatatttccccggtctcaaaatacgaaagtgaccctgcagggacagcagaggacttccatcttgggaccatgaggttactgcacggaaatctttactct

SEQ ID NO: 37496 - DNA, 584 bp, Homo sapiens
  chr2:55646415-55646999
  hyper
gacgacggacaccacgagcagcagcctgcgctggaaatgtctgtaccgggcgaggaggggcagagaaaaggcatctggaggaggaggaagggaaagggggctggaacccaagacaaaaagcccgtcaaggttgtccagctcctggaggatccagaccagcgaaactgctcccaatgaatcaatcccaacgggggctaaatgaaatacgttaaacagagaccacgttaaggataccgaggcgccaccagactcgacctcggcgttccgacctctacacgttccacccaccgatgggcatggagccgctttcgacccgcggagcctccactgcccgcagcccctcagtaccaacaggcagggctcgccccttccccccgagcagacaccattcctccgccgccctcaagcctcgcctccagcccccttcccctcccgggggtgggggcttgaatgtgtgtccctaaccccccagcttcctaagccctgccagcctttcagcgcgtctctgggaatccctggcacaaaatcaccgccgcgctccagccttctccgccctctatggagaagccggagtaacggcctca

SEQ ID NO: 37497 - DNA, 30 bp, Homo sapiens
  chr2:55746810-55746840
  hyper
tcctgggggctgagcgactgcgggccagct

SEQ ID NO: 37498 - DNA, 30 bp, Homo sapiens
  chr2:55843757-55843787
  hyper
gtgtgtccatgtatcgtggcaacagtcagc

SEQ ID NO: 37499 - DNA, 30 bp, Homo sapiens
  chr2:55844279-55844309
  hyper
cgtcggactctgcccgaaccagcagcgaca

SEQ ID NO: 37500 - DNA, 221 bp, Homo sapiens
  chr2:56149728-56149949
  hyper
cctccccctcctgaaccttctcggtagccaacgaacgaggcagcaaagacgtaaaaactgctgtagaattgcatttcacgttactccatcctgctacgctgtttacatacaaaagacattcagcgtgcattttatactgcacctacaaagcaggctgcagaaagagggggtcgaaaggaaaaaacagtaatccatttcaaaggggacggtgcatttcctgc

SEQ ID NO: 37501 - DNA, 314 bp, Homo sapiens
  chr2:56150221-56150535
  hyper
actctcaaagtggcatttccacgcctttctctgcgcacagctttgtttaaaagtcccaggttgtgtggaggggcagcccaaagcgactgattctcttttgtcttatcagtctgggtccccgacacgctaccttcggtttcaggctgcctaggaccggaaccagggatcgcaccgcagcccaaggtaccagtttcgggcgggcggcctggcccggcagggagatgaggtcccctttcttaacagcaagctaacgcggcggtcccctggagctgctcagcgtcccagcttctaaccagctcctatggaatccaggt

SEQ ID NO: 37502 - DNA, 513 bp, Homo sapiens
  chr2:56150681-56151194
  hyper
cgaggctgcacacctccacctccctctctgcccgagacaccctgcacagtccagggcagttctcgggtactcaacacccctcagctcaccccacctcactctcccgcgcgcggcccagtgagtactgggctcgctcggggcgaccccccgttgggggctcctacctgtgcggccgcgctgcgctccgggcccgggcagcgaggggagtgcgcaggggagggcagccccgtgggtctgatctggcgaagtccggcagcggccgcggcggcaggaggaggaggagaaagggagggaaagggggagggcgaaggggggcggaggagagagctgagggaggcgcgagcgctgagcccagcgttgcgagcccggcggtagagcgcgcagcgcagcgaggtccgcgccccctgctccaggggccctctttgccgcccccgcttgccctcccttgccagctcctcgtttcccagactcgcggggaccccacgccagagaggacacgttgacatgtgatgt

SEQ ID NO: 37503 - DNA, 1555 bp, Homo sapiens
  chr2:56411056-56412611
  hyper
agctgctgcgggttacgggtggccccagctccaggctcctcctccagccggtcccccaccctccaccccttctcgactccgctctgcaaatcgaaggctttccggagcagcctaggagcggccgcgggcgcagcgaaggcggcaggaggagcgcagcagccttcgggcagccgcggcggcgtcgctagagcagccggggaggcgccgcggtgcccggcgcgccctccaagctaggagaggggagaagccgggggctgcagctgggcaagggggaggaaagtgcgtgtgcgtgcacgcctgtgtgcagggcagagagtgcggggggcgacagtctcggcttagggcggaggagagggcaggggaacggcggtgcagctcccccgctgtccccgaggatttcccgcggcagccccgggctccccagtgcccctcaccatggacttgcgcggagttgggacgggcctcggcagcagcaagcggctggctgccgggccctgggggagcgcgggcgcgcgcgcggggatggcgaggtaggatggccacccagcgcgacccccgccgccccaacccagcggcccctgggcggtgccgctgactcgccggagcgcacaggggtgtgggcggaggcggcctcgccgcgcccgcgccttcgggagtcgcctcgcctcttccacccacttgcacctgccaccccgcggataccatgtcgaaggcggccggaggcgcggcggcggctgcggcggcggcggaaagttgttccccagccccggccggctcgtccgcggccccgcccgcgccggtggaggacctgtccaaagtgtcggacgaggagctgctgcagtggagcaaggaggagctgatccgcagcctgcggcgcgccgaggcggagaaggtgagcgcgatgctggaccacagcaacctcatccgcgaggtgaaccgccgcctgcagctgcacctcggcgagatccgcggcctcaaggtgagcgcgggccaggtggggaggcgcggcgcggctgggagcggggtgccccgaggaggaggcggggccaggcaaactttccctccctccctcaacaggtgaccctccccttctcccggtcggcaccccctacccccagtccccagcccctgtgtaacttttccaaacttcggaggcgtctgctcccctcctctccccaacacggggcgctccactgtctggctgttcggggaggcgctgaggacgctggaaagcagggagggaggtgaagggcacgcgaacctttcatttcttagggaggctggaaaatctgtgcctggggagccgggtttcagtcagttaggcggaaaggccagtgagggggtgaatccaggggatcttcgccttggagggtcgggaatgcggctgctctgggccagcagctcttgggcgggcagagggcgaggaaagggcgccactgccagggagagcggctggcggggcgcccgggagaagcagcgggcgccaccctcagagcagtcttgtgtcaccgggtacataggagttcaagctctgccttcacgtcttctcccaatt

SEQ ID NO: 37504 - DNA, 84 bp, Homo sapiens
  chr2:56412855-56412939
  hyper
ctccttggagagcgccgggtctgcgaggagtgtgcctgcccagctgcagtacactagtggccgggaaccgccctgctggcgagc

SEQ ID NO: 37505 - DNA, 161 bp, Homo sapiens
  chr2:58273537-58273698
  hyper
aatagttagttgctcggcgagagctcggtaaggactagccatttggaagctcgtagtactcaggttgtggtacaggagatctaacactcctacacaaatgcatgtcgtgcttatttcgtaccaaactggtctggcggcggttcttcgtccagacgctggcg

SEQ ID NO: 37506 - DNA, 55 bp, Homo sapiens
  chr2:58274019-58274074
  hyper
ggggtcttgggtggcgggcggcacctccgcttgcagtgccggagccgcggccccg

SEQ ID NO: 37507 - DNA, 233 bp, Homo sapiens
  chr2:58274306-58274539
  hyper
gcgggaagttggggcgcggggttggccgtaggtccccggcgtgctaagggcggacggaccaggcggctgggccgcgctgcttctcgttaccttccgcagggtcaggggccgcggcggggttggaggtcagcccaggcacatgttaacccctgggtaccagtttgctcggaaactcgtgttgaggactcatcttagccctgggaaggtacccagaagccgaagggacacccctg

SEQ ID NO: 37508 - DNA, 30 bp, Homo sapiens
  chr2:58467868-58467898
  hyper
tgtacaggtacatacgacttggcaaagggc

SEQ ID NO: 37509 - DNA, 30 bp, Homo sapiens
  chr2:58468566-58468596
  hyper
gaggattccgcgggcggaaatgaaggtgaa

SEQ ID NO: 37510 - DNA, 30 bp, Homo sapiens
  chr2:58655089-58655119
  hyper
gtgctagagttcggcgggaagaaaaggtga

SEQ ID NO: 37511 - DNA, 64 bp, Homo sapiens
  chr2:58655448-58655512
  hyper
gggactcgagacggcggcaggttcaattagctaaacaaagaaatcatggcggattgtttacatt

SEQ ID NO: 37512 - DNA, 345 bp, Homo sapiens
  chr2:58655775-58656120
  hyper
gctgtggctctgttcgtttgctgctgctgctgctgctgctgctgctgcagccagggggaaggggtggggagagttggggtgggggcggcagagcagtgtggagagcagtgcccctccactcgtttgttgcctcttggggtcaggacctccccgcctgggccagcccagcggacggccccggtgcgcgctcgccttgcgccaccgcctccgggacccaggcggagcgcgccactcagcccgggaggtggggccgggcagtgaccccgcgcgaagtgccagtgcggagggcgggggtggttaccgaaagatgtaatcccaggaggggccgccgccttcgctgtcccc

SEQ ID NO: 37513 - DNA, 102 bp, Homo sapiens; identical to SEQ ID NO: 1521
  chr2:58776939-58777041
  hyper

SEQ ID NO: 37514 - DNA, 30 bp, Homo sapiens; identical to SEQ ID NO: 1522
  chr2:60777404-60777434
  hyper

SEQ ID NO: 37515 - DNA, 30 bp, Homo sapiens
  chr2:60779314-60779344
  hyper
aagggttggcagagcgtttggcttcggttt

SEQ ID NO: 37516 - DNA, 176 bp, Homo sapiens; identical to SEQ ID NO: 1523
  chr2:60780328-60780504
  hyper

SEQ ID NO: 37517 - DNA, 30 bp, Homo sapiens
  chr2:60781114-60781144
  hyper
ctcccccccacacacgcggactctaaaatg

SEQ ID NO: 37518 - DNA, 176 bp, Homo sapiens
  chr2:60782017-60782193
  hyper
aaaatgggaatggagagagagcgacaggctcgcaggagcagcggggagaccacggtggtgagatgaccgcctcgggtcaccgccgcgctccccaggcgccgccggccaaggcgcacacccaggagccagcagccccctctcgcctttctgcagacgttccctggaaattagggaag

SEQ ID NO: 37519 - DNA, 786 bp, Homo sapiens; identical to SEQ ID NO: 1524
  chr2:60783807-60784593
  hyper

SEQ ID NO: 37520 - DNA, 30 bp, Homo sapiens; identical to SEQ ID NO: 1525
  chr2:60784832-60784862
  hyper

SEQ ID NO: 37521 - DNA, 324 bp, Homo sapiens
  chr2:60796320-60796644
  hyper
aggctgactgagggggagtcacgtgggcagcccgtgggcagcggcggcagcagctcaaaagaaattgactgactggccgcttgggcgcatttcaatatatggaaatgaccagaggcttctgcaataaatcagcactcaacactttgtcatttttctagttctgcttcattttcctattttcctcttctcctcacagaagcctcatttcttgcattttgccttgccgcgtctcttcccacttccaacctacaccctctccaaatcttgccccatcctctccatcgctcccaaccaccgcgcgcccccacccccgacacacacaca

SEQ ID NO: 37522 - DNA, 624 bp, Homo sapiens
  chr2:60796703-60797327
  hyper
cccctgtaattggaaacatccggtctacgacgattttttccttttctttccctttcaaaaaattttccgacaaaatcaggcagtatttgctgccctgcctcggattatctgagacaagaggcgcccaggatgagctcatgtaatccccaggatgggaacctcaagccccttatgataaagaaaaaagaaaaagaccaggatactcattccttaccccagcccccactccaccctcgaggagttcccttagcaaacttaaaagactatcagaagcaacttgtgccatgcagtgccatggagagcgctggatggctagccagaagaaaagggaaggttgtagtggaaatctacgtgggtttgcaggttcctgcttttcttgtgtagagcctccggtgccctccacctaaccctgccccaatgcctcgggtcttttttgaactaatgctgtgcgtctccgcaatctgcaattactttggatatttctcaggagctaaacgcagcctgaatttcgtggcgcgtgcaaaaaaaaaaaaaaaggcgaaattaacaaaaccccaccaccgcgctgttgtttttttctggagtttttttttttttttttttttagttcggttcagaagcaaa

SEQ ID NO: 37523 - DNA, 30 bp, Homo sapiens
  chr2:60809201-60809231
  hyper
gtgtcatcgtggccacgactgcttgtactg

SEQ ID NO: 37524 - DNA, 333 bp, Homo sapiens
  chr2:60962744-60963077
  hyper
agatcaaaccccagctcttggcggtgcgccacaggaactctccggtggtcgggttgtagatgaagagcttccactcggcgaggctctggttgagggactccttcttcatcgtgtgcgcgcggacgacgaggggagcggcggccgcggggacggaggcggcgagggcagcggggacgggggcggcgagggcagcggggacggaggaggcgagggcagcggaggcgcgtcccggctccggcggcgcagcccggcgacggcaggggagggtgggacgaccgagaacacctcctcgttactgggagtactcgagccgactgcagtgtttaaattttt

SEQ ID NO: 37525 - DNA, 30 bp, Homo sapiens
  chr2:61109140-61109170
  hyper
tgcttcagggtttgcgtgcagaatccaagc

SEQ ID NO: 37526 - DNA, 99 bp, Homo sapiens; identical to SEQ ID NO: 1529
  chr2:61109420-61109519
  hyper

SEQ ID NO: 37527 - DNA, 78 bp, Homo sapiens; identical to SEQ ID NO: 1530
  chr2:61109818-61109896
  hyper

SEQ ID NO: 37528 - DNA, 138 bp, Homo sapiens
  chr2:61110112-61110250
  hyper
taaggttgagggggacgggagagccggggcggggggataaatcaagtagcctggggtcgagttggtcttttaccaggattttggcaaggtgagtgggggacactttccagacagaggaagcagcgtgagcaaaggcag

SEQ ID NO: 37529 - DNA, 457 bp, Homo sapiens; identical to SEQ ID NO: 1532
  chr2:61175642-61176099
  hyper

SEQ ID NO: 37530 - DNA, 254 bp, Homo sapiens
  chr2:61244605-61244859
  hyper
tagggagttgtagccgctaccagaaatatcgatgagcctttaccctgaggtttagaaaggcagctctttctggggcaaatacaaagagcgtgtttcttcctacaaattagtggcatcctcccgctgtatggattcagctggcaaagtaactcaagccttgtcctgactgcaagggtgggcggggtggacggctcggtgttctgcccgttgtgtcttacgctccaggtgctggtctacgcgggcctggacagtca

SEQ ID NO: 37531 - DNA, 30 bp, Homo sapiens
  chr2:61245121-61245151
  hyper
aggtggagctggggcgcttaccagtgggga

SEQ ID NO: 37532 - DNA, 30 bp, Homo sapiens
  chr2:61293315-61293345
  hyper
gcctcagccggccgcgcctcgagcagccag

SEQ ID NO: 37533 - DNA, 139 bp, Homo sapiens
  chr2:61404132-61404271
  hyper
cgcaaacggtgtgacgtgtgcgcgctgtggccccaaaggccggtcttacagcgacctgggcgttcgaggtcgtgtcctcgagagctatagggagcctgccgaggccacctgacggcggtgtcgcgtctacactgccggt

SEQ ID NO: 37534 - DNA, 30 bp, Homo sapiens
  chr2:61697806-61697836
  hyper
gtctgcgcagttctcgcacatcgttcggcc

SEQ ID NO: 37535 - DNA, 67 bp, Homo sapiens
  chr2:61765458-61765525
  hyper
tcagcccatggcgccgcggagcgtttggaacctgggcctccgcccccagcccgccctcctattggtc

SEQ ID NO: 37536 - DNA, 827 bp, Homo sapiens
  chr2:61990959-61991786
  hyper
aggcgaagacagggctcgctgacgcccccggtcgcccgcgcctcttcccacagctctccgaggagcccagctaccggaaacacgccacatcaggcctcggaattctgggcatcggacggacagctcgtgacctcagaaggaggaaaacggtcaccttctgaaagaaacacgaactcctctttcctgtatcagaacatttctcattcacctgagcgcggcgtttctatcctgagatgttgggaggaggttcgaggtgggcggggtgacggttttctcttggaaatgaaaaacagcctttcctgctacccctgcccgctcacacaggcgagacttggagtctgccccgcggaaagccgtttctatgggtgacgacgtatggcaacgcgtctaagggaacgtcggcgagtcgactattgtgttcccaaagtcgccctgaaatgaggacagaagttcgggggagccgggggcgtagagtaaaggcacgatctgattggcccgcggccgcgcaacgatgggcgggacggggcagaagtgtgggcgagctggggcgtcaccgcgcgccgggtagtctctctcacgccctggcgggtgcgcaggtctctaaactgggcggagcaagggaagtgatgtgtggcctccggaaggacgcgcgtaaatcctcacccataagtaacgagtcgccgtggtcaaacaaggccctcctacgataccaatcgcgtggcgggtgtggtactgccgaacccgaggaatgagaaaggaggcccggcagaaagttcggatcagctgccggccgttcccggcgtagcctagggcggggagggattgac

SEQ ID NO: 37537 - DNA, 30 bp, Homo sapiens
  chr2:62115561-62115591
  hyper
gcggtcctgataggcgcctttcccgcggcc

SEQ ID NO: 37538 - DNA, 68 bp, Homo sapiens
  chr2:62115905-62115973
  hyper
ctgtgggtgaagagcgccgggggaacctttacgcgaggcagcaatgacaacgcgcgattttaaaggcg

SEQ ID NO: 37539 - DNA, 175 bp, Homo sapiens
  chr2:62132599-62132774
  hyper
ctactggaaccaaacggatatttccgtggaggtatcctaaggggatgggtgttgcagagcaaagctgtaagctgccaactctgacccctggggaagccttgcctccaggttccccgaggttccccgtggtggttttgcacaggctatttaggcacatctcggccgccgtggcggg

SEQ ID NO: 37540 - DNA, 30 bp, Homo sapiens
  chr2:62422674-62422704
  hyper
gcaccactctgggtcgtgagcacctaagag

SEQ ID NO: 37541 - DNA, 30 bp, Homo sapiens; identical to SEQ ID NO: 1535
  chr2:62422969-62422999
  hyper

SEQ ID NO: 37542 - DNA, 30 bp, Homo sapiens; identical to SEQ ID NO: 1536
  chr2:62424204-62424234
  hyper

SEQ ID NO: 37543 - DNA, 222 bp, Homo sapiens
  chr2:62424784-62425006
  hyper
acttgttaaaacaaattcttccggtataattatttgtgcctctggaggtggtaaacgaggtggccgacagggccgggactgggagtgaaaaggcggggaccctggccgagccagtcccggggctccggtgccggcttatagtcgcacccatgcggatctgacagctgacccggagggaggaccggcagggcagggcagggcggtcacttcccattgtcctaa

SEQ ID NO: 37544 - DNA, 638 bp, Homo sapiens
  chr2:62732952-62733590
  hyper
acgcggagaccaggcccggccgggggcgggaggccgccagcgcctcagctccctgtccggcccggcccctcctccaaggcgctctcccgcactgcggagaactggctgaaggcgacatcgccattttaggtacgggcaaattctggacgctccaaaatccacgccaagccctcggcaggccacaccccctgcaccgggcctcggtcactcacccggaccctcattggactctggaccggtccgattggaatcactgaacacggcccggctgaagtttcccagccgctggcgcaccggatccggcagctccatgcctgggcctcagtatccctcaccccctcagacacgggctagtctgcgggcgctccgaggctccgtggttcccacggcaaccgggcggcgcgaggccggcgggacccgggagcgcgcggggctgcccggctgggctgggtctcgtccggagcccgcgcaacctggaagggaccggcgcgctcagagcgcgttccaggcccagggagccgcgcgcctcggccgtgtacaaaacggcagatcccttagttctgctttgagctcgaccatcctaaaaacaaacctatactaagaaatgagctggggttggactgcgatacaaggagccc

SEQ ID NO: 37545 - DNA, 274 bp, Homo sapiens; identical to SEQ ID NO: 1538
  chr2:62798172-62798446
  hyper

SEQ ID NO: 37546 - DNA, 98 bp, Homo sapiens
  chr2:62798511-62798609
  hyper
cggagcccagcggctctagccagtctctttacttggcggcaggtggtgtgggggtgcgaaggaaggggagatgcggcgaaatcaaagtactttttgta

SEQ ID NO: 37547 - DNA, 30 bp, Homo sapiens
  chr2:62932081-62932111
  hyper
ggggcaaaagagtccgacagcgaagaggaa

SEQ ID NO: 37548 - DNA, 182 bp, Homo sapiens; identical to SEQ ID NO: 1539
  chr2:63275326-63275508
  hyper

SEQ ID NO: 37549 - DNA, 409 bp, Homo sapiens; identical to SEQ ID NO: 1540
  chr2:63275877-63276286
  hyper

SEQ ID NO: 37550 - DNA, 203 bp, Homo sapiens
  chr2:63276530-63276733
  hyper
taccgtattttattcggactccaaaggaaagtgtcgcttgggggagggggaagcactttgatgagcggcggccgcggccccttttcactcagcgggctcccccttcgttctcctcctcctcacccagcgcccggtccgctctcggcgcccgaccccgcagcccgggcagcgcgagtgctccccactgcgatgcgcctggaggc

SEQ ID NO: 37551 - DNA, 30 bp, Homo sapiens; identical to SEQ ID NO: 1542
  chr2:63277312-63277342
  hyper

SEQ ID NO: 37552 - DNA, 600 bp, Homo sapiens
  chr2:63278421-63279021
  hyper
gatggtgaacggccccggcagctgagggcaggtaaggagaaagccgcggggccaccccggactccgggagcgcgttggttacccttatctccccctcctcaaatggatcccggcttccccggtccccagcaggtggtcggggctgtgggagcggcctggctcccctcttggtgagccgaggaccccggggcgctgtcgcggcccgcagccccctcccccgcctcctccgaagtaaccaagctgaagtgctaagtttggagaaagtctttgaaaactcacgctgcagcttcgcaaagccgtcgcagctttgagtcccattttccttcggccctagagccctggctgcttcccttccggtccccttcctacaagctggactccctcagcccaggtcttgggtcccagaagacgggggcgggaacggggctggggggagcttctttagctctaacttctctccttgaacgtcctagcccgagtccctggcttgcttcacagcgatcccgctaagcggggtgtagcgatggccccccagggccccaggcccagtttccagcgcccctccctgacccctgagagtggcaccccgggttcccggca

SEQ ID NO: 37553 - DNA, 183 bp, Homo sapiens
  chr2:63279141-63279324
  hyper
cgcgacttgctgccctccggcttcacaaatccccgagaccctttgaggtgctaggccagtcacccttcaccccctgctgggaccctgcggtccgcagcccagactgggcagagagaaggccgggtgcgcgctggcaacgaaggacgctggccgcagctgaggcgctcccgacctcaggccgca

SEQ ID NO: 37554 - DNA, 614 bp, Homo sapiens; identical to SEQ ID NO: 1544
  chr2:63281019-63281633
  hyper

SEQ ID NO: 37555 - DNA, 200 bp, Homo sapiens
  chr2:63283951-63284151
  hyper
cccttcagctgccctcgattttgctccacgcctgccggccagagcctcccggcgtttcttccgccccagcggagtgcgctggggcgcgccagggctaggcccgccggaggagcgcgtccccagccttccgcgcacagagccgcatcccgccccgccctgcgctggactggttcaagcttccgcctcggcgggaacgctgt

SEQ ID NO: 37556 - DNA, 85 bp, Homo sapiens
  chr2:63284465-63284550
  hyper
tgggcgcgggatatccgaagtgtggaggaaacagacaagtcagggtacagaggtgggggttgggcaggggcgcagggctgacccc

SEQ ID NO: 37557 - DNA, 1039 bp, Homo sapiens
  chr2:63284759-63285798
  hyper
tgcaccttcgttctccgaaatctgcggagagcccgcgcgcctgtgtatcaattttggctttggccgcttcgtccagtaggtgggaaagtaatttgtaaatttgatttgtctgatgtgaagatcacaaattacttgttgaaatgtaaggcagtccccctcctcctctttatctacattacttcccgaaaataaatgcaaattaatgaacggcttgtcagtgttgctcttctgattccagcccgaggtcctggtctcggggggctaaaagcgagggaaactccgtgttaataacccgcgtgttaatgacctgcgtgaagctggaggccaaaggatgaggcgggaggacttggcaagagaagtccccagaaactttcgcttagggagtgtctccccccacccccaccacgcccctccgcgtcagcctggcctcttcccccaggcgttttgaccccgcatcccccctcgccatccaggacagagacaggtgtcaggactcaattcccgaagcaattcctttctcttcagaggcaggagcctggcactgatttcttcaccctaattgcctgcaccagaaagaagagggggaggggaagagggtcgggaggcgggaaaggatagctctgtaatgctctcagagctgagccaaaaaggaaaagaaagcaaaacgacaaaaaactgatccgtgtcctgcatgttggcagcagacaaccttccttgctgctgagctgtcccgggtggcttcaccgcggctggggaatccgagccattccttccacgtgctaagatgtccctctaagccctcagctcctgccagaagtagccaaattacctttcttcgtactgtaaacttcctttaaaacatacaaactcataacctggaaaagtcgacaaggacgcctttcactttggcaggggaagaagacgactggcttgcatctgggggtcaggaaggacagttccatctccctctgagggaagacggggttgaggggtaatcctcccccagaaaatgcagagcctggaactgtccagactctgg

SEQ ID NO: 37558 - DNA, 226 bp, Homo sapiens; identical to SEQ ID NO: 1546
  chr2:63286358-63286584
  hyper

SEQ ID NO: 37559 - DNA, 54 bp, Homo sapiens; identical to SEQ ID NO: 1547
  chr2:63286693-63286747
  hyper

SEQ ID NO: 37560 - DNA, 361 bp, Homo sapiens
  chr2:63287082-63287443
  hyper
ggcggcgggaacgcggaaggttccctccacccccaccccaacccccacccccacccccgggccggccacctgttgacaggcaggttctctgagaaccgacttcagctcgcccttctgtccaggaagtttgttcggtttgggtttgggtgttcgtgacacaatcggagcaattagaattgaagcaacttcaggagatttagcaacccgcgaaaatttagcaacgttcagacgtcaacagttttctttctttgagtggtcaacgaaaacttgacgttttctactcataccttgtattctctgcttatactgtaggggcaaaaaagtctactcttagacaaacgtgtgtgaagtgctttaaggg

SEQ ID NO: 37561 - DNA, 322 bp, Homo sapiens
  chr2:63815745-63816067
  hyper
cgtgggggtgatgtcgctaaggggtgattctcccctccctagagttacacacgctatctctcccgccaattgccgggctccatcaggcaggtcctttcctcctgagcccaaaccatccgtttgttgtcgtcctccaatcacaggggctcatcctcagggactactttgcaatcggcgcagagcgcagtgagaagagcttgaaaaaaacctctggtatcgggaagtgtagttcaacacttgaaggaaatgctttggagattgcgccacaaccagggcagcgtaaactacagttcccagagagcgccgcgtcgggagcggagcc

SEQ ID NO: 37562 - DNA, 30 bp, Homo sapiens; identical to SEQ ID NO: 1550
  chr2:64067525-64067555
  hyper

SEQ ID NO: 37563 - DNA, 30 bp, Homo sapiens; identical to SEQ ID NO: 1551
  chr2:64247015-64247045
  hyper

SEQ ID NO: 37564 - DNA, 325 bp, Homo sapiens; identical to SEQ ID NO: 1552
  chr2:64455370-64455695
  hyper

SEQ ID NO: 37565 - DNA, 15 bp, Homo sapiens
  chr2:64682188-64682203
  hyper
ggggcctgccctcct

SEQ ID NO: 37566 - DNA, 30 bp, Homo sapiens
  chr2:64752331-64752361
  hyper
tcaagaaattatctgcgtctcctctccagt

SEQ ID NO: 37567 - DNA, 148 bp, Homo sapiens
  chr2:64752590-64752738
  hyper
aaattttttactgggcggggggatgaaacaaaagtaatggttccgtttcaaagttctcactttaggagaagtaaagtagaactttggttttcaacttttcctacagtgtaagtcttccttccacctcctattccgaggattttatttg

SEQ ID NO: 37568 - DNA, 183 bp, Homo sapiens; identical to SEQ ID NO: 1554
  chr2:64836249-64836432
  hyper

SEQ ID NO: 37569 - DNA, 162 bp, Homo sapiens; identical to SEQ ID NO: 1555
  chr2:64836470-64836632
  hyper

SEQ ID NO: 37570 - DNA, 86 bp, Homo sapiens; identical to SEQ ID NO: 1556
  chr2:64836746-64836832
  hyper

SEQ ID NO: 37571 - DNA, 30 bp, Homo sapiens
  chr2:64879896-64879926
  hyper
atacctgatattttcgtgaaacttagaaac

SEQ ID NO: 37572 - DNA, 30 bp, Homo sapiens
  chr2:64881341-64881371
  hyper
gagacactccggcccgaggaccaccactgc

SEQ ID NO: 37573 - DNA, 396 bp, Homo sapiens
  chr2:64994379-64994775
  hyper
aaattataagaaataaattaccgttaaaaaaattccccgttttaattactgcaaatgttaacgtgactaggtaagaactatttttaatcacctataattacacggttagtgtacagctaaaagcacgaagtcagtatccaaaagccacaattaaaaaaaacaacaacactaagacaaactttgcttttgtttgaaatgtgcaatatttttcctttacatgctctctcttcccgaataaatgctacgtttagaattgctagggttccgcagatacagaaagccagctagaaacatcccttccctgaattcgatgggcttacgtcttacccagcttgagcaaattcttggcgaatatttcatgaactcacaagagacgaatttgacatatttagaagg

SEQ ID NO: 37574 - DNA, 90 bp, Homo sapiens
  chr2:65215419-65215509
  hyper
gaacaataaggaaccgttcaggatggccaaaccgccgtctgcgctgttttctcgccagggctcaggcctgggaacggaagaggttaaaat

SEQ ID NO: 37575 - DNA, 30 bp, Homo sapiens; identical to SEQ ID NO: 1559
  chr2:65216103-65216133
  hyper

SEQ ID NO: 37576 - DNA, 30 bp, Homo sapiens
  chr2:65284247-65284277
  hyper
cagcagcctggggacgaatgtccaaaacct

SEQ ID NO: 37577 - DNA, 30 bp, Homo sapiens
  chr2:65455227-65455257
  hyper
cgcgggcgtgggagcgagccggccgttccc

SEQ ID NO: 37578 - DNA, 30 bp, Homo sapiens
  chr2:65657866-65657896
  hyper
caagcccgcgccgccgctaccttggctaat

SEQ ID NO: 37579 - DNA, 30 bp, Homo sapiens
  chr2:65658568-65658598
  hyper
tcctctcgctccgccgtgttttttatgaat

SEQ ID NO: 37580 - DNA, 1161 bp, Homo sapiens; identical to SEQ ID NO: 1560
  chr2:66652772-66653933
  hyper

SEQ ID NO: 37581 - DNA, 386 bp, Homo sapiens
  chr2:66659956-66660342
  hyper
ggagagctctttcaaggcaaagcgcttctgaaggttttgggagaacgtgtgtcagcccttcaggcacacagggtgccagtacggagttgggggcggggaagggtgcagtgcaggcggctgggaaggctcatctgctcggctttatggaaacgctccactgttgggggcaaccaaccccgcgttgactcctgcgaagtgctaaaggaagcgatagatgtcgcctaaggagactacggacgctcggtggaacctcattccagacctatgttctcatgctcgccctgtgtctcctgctcctcggaagcccactctatagaatcttcagtcctacctcgcagacggacgcaaattatcttttactttgcgcttaagagttggcttcaata

SEQ ID NO: 37582 - DNA, 734 bp, Homo sapiens
  chr2:66660561-66661295
  hyper
gcattccccgcagatcgaagctccctgctgatcgattatttgataattgattttccccgcagccaatgcgcggcggcctgggcgggggcgcctcctgattggccgagcactcctccacggctgcctaccgagatttgggtgagctcattttccagtcgaccgcagggggagttttctgcgaggtttcagctggagggagggggaaaaatcctctcggagccgagcgagctgcgagccctgcttgtggatgtgaggtttccagccactggtagagctgctgcggctgagccatctcggcagatcagagcccagcggacagaaatataaatacgaaaataacgccactaaatataatcacaagggagaagcttagagcgggagaataaagagaaggggtgagggggaattaaagcccaggcaataggtgttaaagttaaaaacaaaacaaaacaaaaaacagtggttggttggagcctccgagttgtaggtacaggcagcttttgtctgaaatctcagcttccgaagcggatttctttttctctggcactgggaggtttcgccgagccgggttggggacgggaaagaggagcgcggggaaggatgtctggggtggtgagggcagggcttcgctggagaaagagctagtggggcgcgaggttcttacaggcccgggagaggtcgaggctggagcccctcggcgcctctaagacaaaggcagcggtggctgcagccgg

SEQ ID NO: 37583 - DNA, 30 bp, Homo sapiens
  chr2:66661501-66661531
  hyper
gggcacattccccgcgctcagctcattgtt

SEQ ID NO: 37584 - DNA, 31 bp, Homo sapiens; identical to SEQ ID NO: 1563
  chr2:66661598-66661629
  hyper

SEQ ID NO: 37585 - DNA, 134 bp, Homo sapiens
  chr2:66661767-66661901
  hyper
ccctccttttcctccacgatcccgctttgacttttctccttgcagtgtttagttctgagaattcagtactttgcgcatcaccccctgccccgaaaaacactggcagaccccaataatttcgaggaaagtcatga

SEQ ID NO: 37586 - DNA, 197 bp, Homo sapiens
  chr2:66662725-66662922
  hyper
agatctgcttttttttgcccccgctgctgtcttggaaacggagcgcttttatgctcagtgactcgggcgctttgcttcaggtcccgtagaccgaagatctgggaccagtagctcacgttgctggagacgttaagggatttttcgtcgtgcttttttttttttttttttttttttccgggggagtttgaatatttgtt

SEQ ID NO: 37587 - DNA, 810 bp, Homo sapiens
  chr2:66802568-66803378
  hyper
tctccccctcccttcgcagagccacaggaaaagaggaaagtcggcttcgactgccatcttttggggatttcgaaaaacgactcggtaggaaacggagggaggcggaggcgcgggagtgggggaaacccccttattatccagtgtcggaactggctcccttaatctgatgcttaaatatttgatgtggaaaaattacccataaaattagttactaacaatttcaaattgaaatcacttatcgaattataaacgcattaaagctgtatggatggtattaggagttcctcgggaggcagcgggtgtctccttgaagtgagccaggcgggcgagtttcgccccggggaaaagagcccccagccgagcccgggggcaaggccgggagggcggcgctgcaacctgggcgcagggtccgggtcagggggatcgagcgggcggccgggtcctggtggaggctgcggctgcttcggctcgcgggggcggggagaaggggaggggaaggagccttggtgggaggctccgaccccggagcagaggcgcctaccagcaaacttcgtagtgaagtcgaaggattctgaaaaggaaaaacgcaagccctgccctccccctccctctcgcgtctcccacgcggcgtgcagacttcgcgctcgactttgcgatcggggttagttgctgtgtgcagtgtcccccaagtctgcgggaggagcggaagggtataggctccagtcctggggttgggcccggctccgtgccccgagaggaaatccagcgggcaactgcgcagagctccagccaggacgtgctacccctgag

SEQ ID NO: 37588 - DNA, 170 bp, Homo sapiens
  chr2:66803682-66803852
  hyper
agactttgccacatcgggggccccagactccagagtcccatagtggccctgggagcgcgacccagagagcctgggggctggagggcacatggaacgcgtgcacggcccactaggagggcgttgggaggagagtgcccgagtctggagccgcagccgggaagccgtagaca

SEQ ID NO: 37589 - DNA, 30 bp, Homo sapiens; identical to SEQ ID NO: 1567
  chr2:66804130-66804160
  hyper

SEQ ID NO: 37590 - DNA, 114 bp, Homo sapiens; identical to SEQ ID NO: 1568
  chr2:66808519-66808633
  hyper

SEQ ID NO: 37591 - DNA, 615 bp, Homo sapiens
  chr2:66808726-66809341
  hyper
cgccggccggacgtcggctaggctccttctccccgcgggctgggggccctggggctctgcaaggctctggctccgaacagattgcgcctcccgcctggctgccagtaggaactggggtgggagccgcgtaactaacagttgcgcgcaggaggcgagccccaggtgtgagcgcagaggctctctccccagcccgcgggtctgggaacctttcaggacgcctccctccccaactcctacccatgcgtctgctccctaggccgagcccccctcgtgaggttttaatgaccgcggacgcaggggagcccgcacttgagcgaggaccgacttctctggcgggtccacgctgctcgcgcttgcgtccgcgggtagcgcgctgtgcccgggtcagggggcgagctgcgagaagtaggaggggtcaagacccccagaaatccctccatgggcacacacacaatcaagaatagggttgagggtcttgagaggtagaactaccctaggcagggcttctccaactcggcctttggaccccgcgcgcgcccaagggcgtgcccaccgcggaagcacagatcatcttcccgggactgggtctcctggaccctgcgttgctcccttttt

SEQ ID NO: 37592 - DNA, 30 bp, Homo sapiens
  chr2:67593787-67593817
  hyper
aaattatctatttcccacccacttttttct

SEQ ID NO: 37593 - DNA, 164 bp, Homo sapiens
  chr2:67624276-67624440
  hyper
actctcagtttacgcggacctgactactacccgaacaacccccaccagtctggaggattttgagcctagacactcctccagagcaggctcctgtcccggctgcggaagtgcgcgcgccctcggcaccttaacagttccgcccctctcccggacccagccaatca

SEQ ID NO: 37594 - DNA, 30 bp, Homo sapiens
  chr2:67624825-67624855
  hyper
tgccttggcttcggcgccgcatccccacat

SEQ ID NO: 37595 - DNA, 30 bp, Homo sapiens
  chr2:67639753-67639783
  hyper
gaccccaggaacattggggttgcttactgc

SEQ ID NO: 37596 - DNA, 30 bp, Homo sapiens
  chr2:68384726-68384756
  hyper
gataatgccagatgcgctcctgcgatcgca

SEQ ID NO: 37597 - DNA, 30 bp, Homo sapiens
  chr2:68480145-68480175
  hyper
aaatccaagtcctgcgagaggcagtcaaag

SEQ ID NO: 37598 - DNA, 198 bp, Homo sapiens
  chr2:68546318-68546516
  hyper
ggggaccctgctgccaccaggcgccccgcactcactcgacctgcagcgtgctgggtttaatcttcacctcaaccttgtaggaggagccggtgagcagcttgatggtgcggttctggccgaagcgctgcccgtccaccttgtaaaagaccgggccgtcattaggctggatgcgcagcgcgatggagaggcgcacgaggc

SEQ ID NO: 37599 - DNA, 812 bp, Homo sapiens
  chr2:68546552-68547364
  hyper
cggcggctccggggggcggaggacagcgccggctgcggccgagtggctggagcgcgaggggcggagaggaagcgcggggagggtgagggaggtggtggagctgaggctgccgctaggaacccgcgccgtcgccgccgtccgcccgggcttttgaggagcagctccttaggctgtggcccccctccccactcggcgaggaagcgggcccaagagacggctccaaggccgcgcgcttccccatcccccgctccagtgctgcgccctccacgcacccgaaggctcgctctggcccgcaggccgccgcgcagatccgcgcagctgggggcgagggagttaatcctgtttacgcaccacaatccccttcagctggggaagcggacatttaggctcctcctagaacagccccgggcaggaggaggagaggtttgggaggcactgggaaggcgctggagttaagcgaccactatgccaaggagcgagacccccggaatctggataccgcctcggccagctacgtgaggtggacactgctgctcgcggatccggcgccagccaggcgggaggaggctgagggggggtaaagggaggcgggaaggggggacaggaaaccgctagccggtgatttaaatttcaggaaatatgagtctttccaaagcttaggggaaatggccgaggaaaggcgcaattccacgtgatggagccacgctggatgaggaatggatgcaagaggaagaaaataaccatattcaaggagctacatcttcttgtgggtgtacatttccattatacgtatgctcgtcccaaaaatgaca

SEQ ID NO: 37600 - DNA, 30 bp, Homo sapiens; identical to SEQ ID NO: 1573
  chr2:68694333-68694363
  hyper

SEQ ID NO: 37601 - DNA, 684 bp, Homo sapiens
  chr2:68870368-68871052
  hyper
tcctttgcaagctcgcggctgagcggggccgtgtccgtccactccgacggcgctgggctgccaaggtgagccgccgaggagccccgtgccccgaggcgggcacagccgccctgcatgggtgcccccggcgcgggattgacgcagagccctgcccggagccccagcgaccccgttcctgccccaggcggccgttccgaagcctgagccgggcaacgcgcagcccgcctggcccggctccctcccgcgcgtcctcgtcgcgagctgccgcctgggagctccagacgctcccgcccagggcgatccggacgctcccgcccagggcgatcccggcctctgcagcccagctggcgacacgcctcgccaagagcccgcacctcggcgcctcacggccaccggaggcggggacagggagtccggcgcgggccgggtcgggggatctgcagcggcggcgcgaaggtaactcccccgccagagccgggaaagagccccgagcagaggaggaagggagcggggacctgcccttcgcctgccggcttctggaagaagcgtctcctgatccggccccggaataagaaacccggaccttgcctgccgggctccgcgatgccgcaggtacagagcgcgccctcccggggaggatgctccagggaccccgcgctgcactggctgcggccgtggggtgcg

SEQ ID NO: 37602 - DNA, 30 bp, Homo sapiens; identical to SEQ ID NO: 1574
  chr2:69220161-69220191
  hyper

SEQ ID NO: 37603 - DNA, 979 bp, Homo sapiens
  chr2:69240027-69241006
  hyper
ggagtaagaaaacacgcacagctcacatgagaatggtaaggacaaggaaatttatacgcgaagcctggaagcgcccccgcccccgacgcactcccgcgggtcccacgcgtgctttcgccgcctttgtccacaaggtggcagcctttgaactttcttccccgtaagaacgcgaaaggggggcagagaggaaggagagaaggcaaagcactgcccccaccaagaacaatttgaaacccccccccccccccatcatatttaaaatctgggacaaagaaccgtcgggacggaactccttccattgcaaaagctcggcgcggcctcgggagctgcccggcggccccggaccgaggcagccctcccctttaaaagaagcggaggacaggattgggatccttgaaacccgaaacccagaaacagcatcggagcggaaaccagaggggaaaccttgaactcctccagacaattgcttccggggagttgcgagggagcgagggggaataaaggacccgcgaggaagggcccgcggatggcgcgtccctgagggtcgtggcgagttcgcggagcgtgggaaggagcggaccctgctctccccgggctgcgggccatggccacggcggagcggagagccctcggcatcggcttccagtggctctctttggccactctggtgctcatctgcgccgggcaagggggacgcagggaggatgggggtccagcctgctacggcggatttgacctgtacttcattttggacaagtaagtgccgcgagttgtcccccccaccccaggctaagcgggcgaaaacgctttcgccccgggccgggctcgttggcagggtcgcctggggacaggagcgcatctccagggccacagagggaccgcgcggcaggcggcggcggagtgctgcgcctttgttggggcgcgctcctcccagcctcggctccagagcccgcagccgaggcgacgccgcttgctcgga

SEQ ID NO: 37604 - DNA, 340 bp, Homo sapiens; identical to SEQ ID NO: 1576
  chr2:69533477-69533817
  hyper

SEQ ID NO: 37605 - DNA, 30 bp, Homo sapiens
  chr2:69534292-69534322
  hyper
ccctgccctccagacggcgccccgggacgg

SEQ ID NO: 37606 - DNA, 31 bp, Homo sapiens; identical to SEQ ID NO: 1577
  chr2:69614637-69614668
  hyper

SEQ ID NO: 37607 - DNA, 30 bp, Homo sapiens
  chr2:69870511-69870541
  hyper
atgtattttcccggcgagaaaaaccgtggg

SEQ ID NO: 37608 - DNA, 70 bp, Homo sapiens
  chr2:69968733-69968803
  hyper
tcactttctacttttccggccacgggctcggcacgacctgccgttgggagacgaacggtttcccgaggtg

SEQ ID NO: 37609 - DNA, 30 bp, Homo sapiens
  chr2:70056696-70056726
  hyper
cgcgccggattgtgcgcaggctccacctgc

SEQ ID NO: 37610 - DNA, 30 bp, Homo sapiens
  chr2:70057452-70057482
  hyper
agcgccttgggagacgccaggtgttccgca

SEQ ID NO: 37611 - DNA, 30 bp, Homo sapiens
  chr2:70121033-70121063
  hyper
cgttttctggtcggcggtaaaagctcggtt

SEQ ID NO: 37612 - DNA, 30 bp, Homo sapiens
  chr2:70141868-70141898
  hyper
caatgggagaccggcgaggtgcttgccttc

SEQ ID NO: 37613 - DNA, 298 bp, Homo sapiens
  chr2:70313323-70313621
  hyper
aggggtgcattctagagctttcgggccgaccccaatttctcgttggcgacgaatgctaaccacgtgtcgccattttgtgttcaggaaacatggcggccgccccaagggtaaggaacaggggaggcggagtagcgccacgttagccgctttccctgagagattgtgaagcacgttgcgcacggggccctttctggtctggcttagcccaaggaggaaggggaaaaggcagaaatcacaactcataggccagcgtcttgagcgacacttcctcagcgggaagaaccggcaaaaaaggcct

SEQ ID NO: 37614 - DNA, 30 bp, Homo sapiens
  chr2:70313932-70313962
  hyper
ccacgtttctagcacgccccacaaacagca

SEQ ID NO: 37615 - DNA, 468 bp, Homo sapiens
  chr2:70351164-70351632
  hyper
acataggacagcagccggctctttttttcatcaggatgtggagagtgggcgccttgggaagacgaaattgagtatgtgcgggggaggggtcatatgaaacaaggtcgggaagggggcggggagagctggggctctggaggagcttggggctcgcgctgcgggggaggaagcgccttccgcggtcgctggggggaagtggttaggaggaagcacgggcagtggaggggactgctggagggtcccatctgggaaagcaggcacggatgcggggacatttccgcccgtcaccctggcaaagcgctcgcagggctggagggacagagttctcagatccaagtagagaaaaccgggaacggttccggctctggggactgacattcatcgcggcagtttctggtggcaaaacagaggaaacaaaggaatgatgaaatgaactgagctgccttcatgccccggatgaatgttcag

SEQ ID NO: 37616 - DNA, 30 bp, Homo sapiens
  chr2:70359575-70359605
  hyper
ttagaaaaacaaaaccgataggcaaatcca

SEQ ID NO: 37617 - DNA, 296 bp, Homo sapiens; identical to SEQ ID NO: 1580
  chr2:70369035-70369331
  hyper

SEQ ID NO: 37618 - DNA, 30 bp, Homo sapiens
  chr2:70418109-70418139
  hyper
ctctcttcgcctgccgcggccttttacaaa

SEQ ID NO: 37619 - DNA, 31 bp, Homo sapiens; identical to SEQ ID NO: 1581
  chr2:70418190-70418221
  hyper

SEQ ID NO: 37620 - DNA, 30 bp, Homo sapiens; identical to SEQ ID NO: 1582
  chr2:70475906-70475936
  hyper

SEQ ID NO: 37621 - DNA, 287 bp, Homo sapiens
  chr2:70485365-70485652
  hyper
tgccccgagggcgccgagctgcgtgctccgccagataaaatcggtaggcgagaagggggcggcgcgggaaggtgctggagcgcgccccgcgccgggcggccgctgcgcagtgcgcccagatcccacagccgcgacgcagtccagcggtgcaggccgagccagctgcgcaggtcgcgctttcccccattcacacttcagggcggctttcagctctggtcggaataggactgtgcattcccaggcgtggagaggtgcccacttgaggaatgggcgtggacggggacagg

SEQ ID NO: 37622 - DNA, 203 bp, Homo sapiens
  chr2:71357125-71357328
  hyper
ctactaagcggtggcgcttctggaaggcaccctctgcctaagtgacagcagctgctgtggaacgcgcccccgggggaggacattagatcaaggtgctttggccacgccgaggcctcctccgcccccgaccgccgttcccacgctccctgtcccatggcgaaggtcgccggtgcccggtattcacctacggcattcgcggctgc

SEQ ID NO: 37623 - DNA, 30 bp, Homo sapiens; identical to SEQ ID NO: 1585
  chr2:71357785-71357815
  hyper

SEQ ID NO: 37624 - DNA, 1134 bp, Homo sapiens; identical to SEQ ID NO: 1586
  chr2:71453494-71454628
  hyper

SEQ ID NO: 37625 - DNA, 931 bp, Homo sapiens
  chr2:71503407-71504338
  hyper
aggtgttctgtaaacagcaggcgaagaaattattagtcttaaaaaggacagaaagactcccgcaaaagcagcagcgcgtgccgaacaccttaggcctcacagaccttctatttgaggaatgtgctcccccaatcccagaccgctcctggtggggcgggcgcgagcgcaggaccgcggagcctgctgcgttgctcggctgcaggggaggagctgggccccgcccccggcttcccgcgctccgcgtccattggctggcctcgggggtgggcgggtcccgccgcacggagtcctgcgccttgaggctcaagcggcggcgtgcaaggcgtgtgaggcgcgtagagagccgcgcgcgccgtctgcgatgccccgggacggcgttcctgccgggaataccaccccggcggcagcccaggctgccgcgcagagcccggattccgcgactgccggggcaccgcaggttttggactcgctgaagcggtgagctctgcctttgccctatatgccgcgctctcgcccgtgctctggggcagttggcagtgggtgggcaggaaggggcgggccggcagggcgtcgcacgttggcgtccccgcgtcgcgggaatggggttcggattccccccgtgaatgtcattccccaggctaccggtctttagcgctaagttgcatgggctggtgtgccagtcggtcagcgaatagcggcagaacgcctggccgggccggcgttttccgggacactcgtttcggcctcgcagtggcagcgcctcctgcgagcctagaccggctcagtggacgcgccgcgctgtgcacgcgggtctggggagacggcggttcttgaatgatccctcacactgcagggtatctgggagcggtggattgagggggcacaacgtggcttctgtgtcggtgaaatcgcttggaccagctccagttct

SEQ ID NO: 37626 - DNA, 103 bp, Homo sapiens
  chr2:71504755-71504858
  hyper
cgcccatccacttagcggaaggaaagtcagccactaggctgcgggctccgggctgtccccagcgtgggagaggctgtcctgctggcccggctgtttattgcag

SEQ ID NO: 37627 - DNA, 30 bp, Homo sapiens
  chr2:71558954-71558984
  hyper
taaactgtgtggggcgcggatgggatccag

SEQ ID NO: 37628 - DNA, 30 bp, Homo sapiens
  chr2:71559295-71559325
  hyper
ccgttgcactgggccgaggatcgtgaagag

SEQ ID NO: 37629 - DNA, 30 bp, Homo sapiens
  chr2:71680992-71681022
  hyper
aggagccagagattcgagccggcctcgccc

SEQ ID NO: 37630 - DNA, 467 bp, Homo sapiens
  chr2:71693564-71694031
  hyper
tcaccggaggcccccgcggagcaggccccacggcgccttgtgcgctctcggaggccgagctgcgcgcccgcgtcagcggcgcctcgttcctggccgggagctgggacccgcggagctagggaccagcacccccacaggcgcccgtctgacccctgtccctccccgcccgccgcgggcagggcggatctgggtaggggccggagggggagggtccgcccagcgggtgtccggtgtcctccctgcagcctctcccaggcattggtcacttctccgcggaggagcagcgaaggcgacagctctcttggcgcggctgcctgggagccgggcgcttgctgggtgggtgctcgggcccggtgctcccgctcccgccctgactgcgcgcctgtgtgccgccggggctgcccagccatgctgtgctgcctgctggtgagggccagcaacctccccagtgcgaagaaggaccggcg

SEQ ID NO: 37631 - DNA, 1675 bp, Homo sapiens
  chr2:72371578-72373253
  hyper
ctgttttttggtaatgactttcgagaggaaagaggtatcccggacagctggacccgaagcgggagtctccgcccccacccccacccccacacccccaccccgcgctcgggagcctctcggaataaatatttccaggctccgggccacgggctggcgagaccccgcggggtggccgcaggccaaagattatttatagcggtaagcggtcggtgcccggaggcagcaactacagatgggggttggagtttcctccgctctccggtgtggcccgcgcagggacccggcggccctcggaggactctgcagggcggggtcacgggcccagagccgcgattttcctaatgcattttgccctggaaataacggagacggactttggttgccgccctggagtttggaacccgagcgcggggcggggcgggaccgggcagggcgacccgcgcaggtaaccagatccccggtggtggcggcgcaagccgaggatggcggggccggggccggccggactctcgaaacggctggcggagccggccgggcgcgggtaccggaaaccgtggagacctcagaggggcgggggcaagggcgtcccgctcacctttgacgtcggcactagttaccccaccccacgttaacccttctcctgccggggcagcacccggcgcaaaggggaggggcgccacctgtctagccgccccgcctgccagcccacgagcgtaccgactcgggctccagatctacccgctcctgcacccccgaggggacaactcagtccccctagcccgggttggtccccctcctcactttccttttttccacagaaaactacttccagctaaatgtgcacacacgccagtacagccgaaaagtgactctgcagaacccggagccctaatcacttttccacatgcgcctccggcccggcgcgcgacggggaacgagctgggagcgcccgcgcagccaggaggggggctgggccgcgggaacgctgtccccctcccaggctggaaggcggggataattccccctgccgtgcagcccttctagacggcgtctacccctttaagaaaaatctaggcggaggtggggtgcgacagaaggggtggtgaggcgagggtttccctccctccgtctgctatacccgtctccctcgctccgtctcactctccgtctttcctctccttcttttcctctgtttttcttttctttcaacacaaaagttgggttgtgaattttccgaggtcgccgccgcctcgcccccaccccccgcctctgatctgcctaactataattaaagtgcgttttttgtggcattaataaagagttatttgtccgccgtttccacggtcttcacaaagagtactttcataggggcggccgctcgggccgcgagtccaatttatacaaaaatgttgtatttttagccctgggctctgtttagatggcgctcggtggaaacggagagcccttggaggtccccccgtaaaatctgataaatgactccgaaaaaataacgctgggattcagagggctctcattaaccccttaggcgctcctgtacacgtaccccctatttccctcctcacctccagatctagggccccgggttggagggatggggaggcttaggtttcctcctccctaacttctgtgcaggttggacgctgacccccagggg

SEQ ID NO: 37632 - DNA, 30 bp, Homo sapiens
  chr2:72373674-72373704
  hyper
cgcgcggattgcacgcgtctgttaatttca

SEQ ID NO: 37633 - DNA, 256 bp, Homo sapiens
  chr2:72374269-72374525
  hyper
aacacagttttaaatcggcaattcaagctgccaccagccccctcctctcccgactcaattttcggctcccagcgacacagccaaccccagaaagccgagggcgactgggggcttgcagcaccgaggggaggcgaaagcggctcaggaccggaccctcccccgggaccgcgcctcgctaggcgcccccggggcgctccacgccccctgccaggccagccgcgacccaggcaagtccatcttgggagccccctcaggt

SEQ ID NO: 37634 - DNA, 126 bp, Homo sapiens
  chr2:72374563-72374689
  hyper
cgggcgccagtggtcccggaaccgcgctgccggcgggctggggaagcccgggctgctgcggcagagaggagggaaggggcggggcggggaccagtgccttcaggctcccggcgccccctggccggc

SEQ ID NO: 37635 - DNA, 302 bp, Homo sapiens
  chr2:72374713-72375015
  hyper
cgcagctagcggaccccggagtgcagcggagcgagcgcgcccttacctgcagcagccagtggccggtctctccgatgagcgggaagcccatggatcccttggggatgggcagcttgcagctcttgtcgcgagtggcggcccagcgcagctgccacagctgctgcgacacggccagcagcagcgtcacggacaccaggcacgcggcgagggtggccagcgccgacaccagatccaagccctcaaagagcatgttggcggccgctcgggggattggctgtgccggccgcggcgggggaggggag

SEQ ID NO: 37636 - DNA, 115 bp, Homo sapiens
  chr2:72375597-72375712
  hyper
tgggctgcccggggcggcgcgctcgagccccagagccgccgcagcacccccgaggcaggagcggcgggcgaggcggcgaggcgggcgctgcggcccgagcgcgggtgcggagccg

SEQ ID NO: 37637 - DNA, 142 bp, Homo sapiens
  chr2:72376224-72376366
  hyper
cgccgcccgccgcccgcagcccgcccgggacccacttgtagccgccgcaggatcaaactcagttcacctctcgcctcctcttctttctcgccggcgtctcgctgagcccagcgcctacagacggacgagatgagacacacgc

SEQ ID NO: 37638 - DNA, 244 bp, Homo sapiens
  chr2:72376425-72376669
  hyper
tccgcacacacggtgcgcactcgcttagtgcctgcttggcttctaggctccttcccttcctcttttcctccttcccaggtcagcggtcccctcctccagctccgagcagtccctcctgggccgaagccccggcagcggaggtcctggccggactgccccctcgactggcaggcgcccaaagccctcgaaactgtgccttagggtcccgagcttccaacccccgggatcccgctggctcttatct

SEQ ID NO: 37639 - DNA, 259 bp, Homo sapiens
  chr2:72376930-72377189
  hyper
ccggcaagtgtcctgcgcggggacaaacgcggcggccccggtacccagaggcgggagaagacgggcacaaacgttcattgatacaaatgagtaaataaacatgctgggtgagcacggccaccttctcagcgctggcagcagagggcccggcgcgcgtgcctgtgtacggtgtgcgtgtggcccggggccgcacctgtgtgttcgcgcgcgtggccttgcgtcggcccgacgtctgaggagcgacgtggtatgtctgtgg

SEQ ID NO: 37640 - DNA, 710 bp, Homo sapiens; identical to SEQ ID NO: 1596
  chr2:73052643-73053353
  hyper

SEQ ID NO: 37641 - DNA, 261 bp, Homo sapiens
  chr2:73114241-73114502
  hyper
gctgagcttgcgggcgaagaacacggcagcgctgggaaccgggctagggctttccgtgtgggccgcgcctgccggccctctctgttgtcccacttggcacggactgggctaccgccacggtttgacttccgccaccagcaaccaagggaaccagatcccaagggaaccagcacccctgggcgctcgcggcccgaagcctgaggttcccgccccgccccggcagggcggccccgccgacacccgtagcggtcccgccccccg

SEQ ID NO: 37642 - DNA, 38 bp, Homo sapiens
  chr2:73114709-73114747
  hyper
tggaggccgagctgggcgccgagcggtctggcctgcgc

SEQ ID NO: 37643 - DNA, 30 bp, Homo sapiens
  chr2:73114996-73115026
  hyper
gtagcaagtggaggcgaggtgtacaggaag

SEQ ID NO: 37644 - DNA, 319 bp, Homo sapiens; identical to SEQ ID NO: 1598
  chr2:73141974-73142293
  hyper

SEQ ID NO: 37645 - DNA, 46 bp, Homo sapiens
  chr2:73142352-73142398
  hyper
agagatcttcctgtctcagcctcccgagtagaaatgtcagcatttg

SEQ ID NO: 37646 - DNA, 30 bp, Homo sapiens
  chr2:73142709-73142739
  hyper
acaggcccaggcaacgtttacccaactgaa

SEQ ID NO: 37647 - DNA, 1662 bp, Homo sapiens
  chr2:73142997-73144659
  hyper
ataaagagcctgagacacaaacgagaggaaaagaccatcacagaaagctggaaatctccggagaggccagcgagaacccgcgctccccacggattccatcattccttccgaaggcgcctctgcggtgtctcagccgtgccaggccccggggttcccaggacgcggaggagtgctgggtgcggccgcctcgcctccccacccctggccgcccctccccacctcgcccaagggggccggaacggcgtcggcgcgcgggggcttttcggagcagtcgagtggaaaatagactttaacccgctttgtggcggccggggcgccctgagcgctctccaaaccacggctcccggcgctcaggcgggccgctgccaagacccggcctggagtccccgcagagttgcgcggcgcacggaccccgtggccttggggcgtcaggaggcccaacccagatctgcgcgcccaggcagcgctcaggccgctagaatggaccccggcagcggcgaggaagcggaactctctgcggctccctctccgcagtgcgccggcaaggtccaggtcccagcctccccaccgccgcccgcgccctcctaggcctcggagcggcgcctttctgcggcctcgaaggtggggtgggaaagtttggggagtcccggctctcacagcctgtcgtgagaactgcccccggggaattcgtccgccgtacggaaaaactggccggagcagagtcgtccgcggttccgcggtcgcgggtggaaggtgaaggtcgagggaggtcaggctgcttctgcgtgtcctgacggctggcgtgttctcttgagatgggctcgggctacttggccagcttcaatttaagccacagtgtctccgaggccctgacctggtccggcccgccgacacttgagcccccagagcctcagagaaggcgagggggtggatctcccagtgccgaggcccgccgtcctggtccaagccggtcgcggcaccgtgtctgggcactggagctgcttccagccccgcgaacagctggagggtggcagtgggaccgctccggcggcttctcccgcgcagtgccccgcctggccccttgtgaagggagtgagcgtcccctttccagagctgtcccccgtgacatccagaaaacgcgaaacctcaggaacaaggtcgcagcttcagaccgcggcccaggaggccgatggtgggtgagtgggagagtcccggagagcaggggggcagagagctggttttcgggaaaaccaatgtgttggaccccaaacatccaccctccgctcggatccaagttctctgagaactgaaacgacatcccgggacgaatgggagagttaggctgagctacacaccggggaggggagggttggagtttagccccaagcccttcggacgccttcttcggctcccgcgtgggttgagacggcggcacggccaccagactcagctaaagggcggagtcgcgaggagaagccagtggcgaggggaggaggaggcctggatctccccgcgaaggctccagtccggcttttgcctccgactgcgggctccctccccacccgccgtccctcgccccgccccgccccgccccccaccttggggcaggtgagcggcggccaatgggcgagcgcggggcaggtgcccgctaactcgcgcctc

SEQ ID NO: 37648 - DNA, 710 bp, Homo sapiens
  chr2:73144991-73145701
  hyper
ctgggtgcacaccccgcaaggcggcggcgccaggacgcggagcgctccccagagcccggctgcctcgcacagctcccgcggctgcgaccatgttccagcccgcggccaagcgcggctttaccatagagtccttggtggccaaggacggcggcaccggcgggggcactggcggcgggggcgcgggctcccatctcctggcggcggccgcctccgaggaaccgctccggcccacggcgctcaactaccctcaccccagcgcggccgaggcggccttcgtgagtggcttccctgccgcggccgccgcgggcgcgggccgctcgctctacggtgggcccgagctcgtgttccccgaggccatgaaccaccccgcgctgaccgtgcatccggcgcaccagctgggcgcctccccgctgcagcccccgcactccttcttcggcgcccagcaccgggaccctctccatttctacccctgggtcctgcggaaccgcttcttcggccaccgcttccagggtgagtgtccacgctgtgcccgccgaggcggccggccggcgcccgtgctgcggcgatgcgggggaggctcgggggcgcgcggggctgtttagaagttactgccgggaaggctgcaggtccgcggaggtagattcccaggcagggaagagctgtgcggcatccacccgcgccttcgccgcgtaggtctccctcccaggaaa

SEQ ID NO: 37649 - DNA, 264 bp, Homo sapiens
  chr2:73146035-73146299
  hyper
tggctgtcttgggatgtttctcggcaaccttggcccgacttctccaagtcacacgtgcctctcctacccaaggtggggaaggtttgcagtaagcaaactggcttccgccgttgctcgccgccttcgggagggagcccacccggctgctggaataccgaggacagttttcccgggcagggggcgggggcagagggcttttaaggtcgtagccagtccgaaccccggagtttgcatccagcaatcggcttgctaataaagatcctc

SEQ ID NO: 37650 - DNA, 519 bp, Homo sapiens; identical to SEQ ID NO: 1602
  chr2:73147008-73147527
  hyper

SEQ ID NO: 37651 - DNA, 100 bp, Homo sapiens; identical to SEQ ID NO: 1603
  chr2:73147966-73148066
  hyper

SEQ ID NO: 37652 - DNA, 106 bp, Homo sapiens; identical to SEQ ID NO: 1604
  chr2:73148174-73148280
  hyper

SEQ ID NO: 37653 - DNA, 908 bp, Homo sapiens; identical to SEQ ID NO: 1605
  chr2:73150975-73151883
  hyper

SEQ ID NO: 37654 - DNA, 284 bp, Homo sapiens
  chr2:73151946-73152230
  hyper
cgggcagcgcaggcagcaccgaggccactggagctggctccagccctggcattcctgcagcccttttcccgccactgtgtcggggcgctcatagtcctgcggggagccggtccgcactggctttgctgctgttcctgggcaaaactggcggggccttggctgcccaccagccaggagcgtctggggagaaagcccaggtgtcctcagactaccaacagaggggcttaaccagggaggggccagcccctgcttggggcccgagggttgctctgatccggcccagg

SEQ ID NO: 37655 - DNA, 60 bp, Homo sapiens
  chr2:73152264-73152324
  hyper
cgcgcagagcatctgagtggcctgggcctggtgggaaatagaccccgggtactcaggtgc

SEQ ID NO: 37656 - DNA, 49 bp, Homo sapiens
  chr2:73152629-73152678
  hyper
tcagtctctgcgtgccggccggctcccagagttgcgagaggccggctcc

SEQ ID NO: 37657 - DNA, 285 bp, Homo sapiens
  chr2:73152739-73153024
  hyper
cgaccctactacaccaccgtcccctcccaagtcccgggcagtgagaagatgcccggcatggggggcagccggagcctccctttagcagccagagtaggaagggggcttagtgagggagcccagacccaaacttcatccgcagctttcttcggcggaccttaccctctcctccttcagtggcattttggcatctattgtcgtcatatctgtctgctgccccacttaatctacaaatcgctcacgggtcggaggcaggacccgtgcgttttcagatgtactagctgg

SEQ ID NO: 37658 - DNA, 30 bp, Homo sapiens
  chr2:73298974-73299004
  hyper
gcggcgcttacaaccgtagactgcggagag

SEQ ID NO: 37659 - DNA, 30 bp, Homo sapiens; identical to SEQ ID NO: 1608
  chr2:73340709-73340739
  hyper

SEQ ID NO: 37660 - DNA, 30 bp, Homo sapiens
  chr2:73404194-73404224
  hyper
ccaagccacttccccgctctacgccttctc

SEQ ID NO: 37661 - DNA, 30 bp, Homo sapiens
  chr2:73429315-73429345
  hyper
ctgcgtcaaggacggcgcgggtcagctgag

SEQ ID NO: 37662 - DNA, 271 bp, Homo sapiens; identical to SEQ ID NO: 1609
  chr2:73429565-73429836
  hyper

SEQ ID NO: 37663 - DNA, 64 bp, Homo sapiens; identical to SEQ ID NO: 1610
  chr2:73429858-73429922
  hyper

SEQ ID NO: 37664 - DNA, 214 bp, Homo sapiens; identical to SEQ ID NO: 1611
  chr2:73429976-73430190
  hyper

SEQ ID NO: 37665 - DNA, 171 bp, Homo sapiens; identical to SEQ ID NO: 1612
  chr2:73430201-73430372
  hyper

SEQ ID NO: 37666 - DNA, 225 bp, Homo sapiens; identical to SEQ ID NO: 1613
  chr2:73430442-73430667
  hyper

SEQ ID NO: 37667 - DNA, 30 bp, Homo sapiens
  chr2:73460640-73460670
  hyper
ggtgtgcccgtagccggacttgcttcagct

SEQ ID NO: 37668 - DNA, 502 bp, Homo sapiens
  chr2:73511725-73512227
  hyper
gaggggtcttcggcgccgccctaggggtgtagggatggctcgcgccgcgctcctcccgggtcccagtcttcccggctcccggcaccgcccagtgcattccccgccctgggcacctccagctgtggcttctgttgcccaccttgaatcagggcctctccgccctaaccctagcactctggcttgggcctgcttccacgcgggggcaaatccgggggtgggtggttctgtgaatccggaagggggcgggcgcaggcgctactcctgagacatgcgccacggtccctaagcggcctcatgggcagcgcgcctgggtcgtgcactcggcgacctcgggtcagatgcttggtctccgcggagaccgcctgggatgatcccctctgggcattcctagggaacccgcggaactgctgctggaccccatccggagacccaattctgctcttaaagagccgcctaggaacacgtgtacccatcacaaatcccatcccggacctagaggagg

SEQ ID NO: 37669 - DNA, 1568 bp, Homo sapiens
  chr2:73518215-73519783
  hyper
agtcccgcgcgagaccgccttggcgctgccccagcctgtctctgggggttatagaggaaggcgtggggcgtgtgccagttacaaaagactgtcttgaatcccagggtagtgcctattcactgggtggtctcagaagacttcccccaaagcgcggctgacaagggtgacagcgcctggaccgcgggaactgtccgcggagctggtgctgaatagggcgtgtgcggcgggcgcttcaaggaaactggaagcgggaccggaggccggccctcgggcgtgcgaggaggagttggaagaagagcggggaggggaacggcccggaactcgtgcgcgccgaacggcggcgccccaacccataaacccatctcttgctcagagagaagcgaaggagaggcccagcgagtaaaagccgaggcccttgagccgctcctcggcgcgcgccttctgcttgaggtgcaccttgctgtgccgtttcttctcatcgctgcgcgcgaagcggcggccgcacacgtcgcaagcaaaaggcttctcgccggtgtgggtgcgcacgtgcgtggtgaggtggtcgctgcggctgaagttgcggaggcagatgcggcactggaagggtttgtggcccgtgtggatgcgcaggtggcgattgagctcgtcggagcgcgcaaagctccgcacacaactctccaccgggcaagcgaaggccttggcgtgcggccgcgggcagaagcagcgcgtgctgcatttgccgccgcggcgccccttgcgtcgcgccttggcctgggggaaaggggtgggcggcggcggcggcacgggtggtgcagccacgccactgcttccagggatgtccgccaccagaggtttagggaagtccgccgcggcggcgctgcgaaggcccagcggggaaagctgaggctgcgtactggccagaaactctccgccgtcgccgctactccctccctccccactaggaggggtcaggagcccagggaggccctcagccccctcccctaagtcacccggggccagcgggaaagcgtcataggccccgctgggatagagtctgttggctgggacggccggcagttccgcagggcagctgatggacagcaagtcctcaatcttggtccctattacgggaaaacgagcctccggggcggcctggtagtctccctgtgacccacagttccctggggcccccacagaaagcagctcccagggcgcgtagggacccttgaaggcagagacagcgtccagcgctggcgaggcgggaggcgcccggaggccgggcttgacgtcgggcggggagagctgaggctcatacaggcactgcgagggggcacccgcgcaaggcgaggcctcccagaacgcctctgggaaaggggcagcgcccagatccggggagtaaaggtccggcggacccggcagcaaggcatcggaccccgcaggaaaaggggcatccagcggggatctggacgctgctgcctctggaccggggaagggtgccaggcctaagatgcccgacatgaggttgaagagtgcctccgggtcgtgcgggtgttcgggcactgcctgaa

SEQ ID NO: 37670 - DNA, 927 bp, Homo sapiens
  chr2:73520124-73521051
  hyper
aggttcctgcggaggcgctggcggcccagtgtgggtgggaatgggggtgcgcaccccaggactcctaagcttcccatcgcccctattctcatagctccaatgtcccagtccctcctggttctcaggtatggtgcgcccccgcgctgcgccgtcgtcgtctgagcacccctgctcgccctccttacctccagggtagccggtggccgcgggagcgtccctggcaggcagccggggcaattcagcgctgggttcggcgcaacagccttcagtggacttgacgaggagcgcgtcgggttcggaaaactcgctaaggtggagcatggcgcggcgccggctgtggggcgcccggggcctcgcccgctgggcttgggggcgcgcgggtggcggggaggctggcggtaggggttccccgcagcgcacagacctaggcgcccgggctcctggcttcgggcactcacctctgggaaaggagtcggggagccgcggcgccctcgctcgcccgcaccggcctcgggcggcggctcctcgcctctccaaagcgctgccgggctcccccagcccacagcccccccacttatatagctgcggcggcgctggctccgggcttccgactccccgggccactgccattttgggaggccccggccctgccgccgtgacgtaaatgcccaaacatggacacaggatgtgtgccggggactcccgaaaaggaaagctcgagctgtgacgttgttgttgtcgccgccgccgccaggctcgcgccgctgcgtgcgcgcgcgctccccaggcgtggagcgctggggccgcggatgcgccagtctggggcgctgcgcctcaccgggccgaccgtccggtagatgcgcttcccacctggaggcagaggccgaggggcagcaggggaggaccgtgttgggtttgaatctgccc

SEQ ID NO: 37671 - DNA, 30 bp, Homo sapiens
  chr2:73612692-73612722
  hyper
cgcggggccctctgcgccccggaaggcgcc

SEQ ID NO: 37672 - DNA, 30 bp, Homo sapiens
  chr2:73964628-73964658
  hyper
cccgtcaacggacgcgaaggagaacagggg

SEQ ID NO: 37673 - DNA, 207 bp, Homo sapiens
  chr2:74007132-74007339
  hyper
aagtcggccaaaagcgccagtccggcgccctcaatgccaggataagaccctaaacaggaaaagactcggcagccacctacgccgcgctccagcgtctcgctattgcgcatgtgccaccgccggtcgtgatggcgtagccacgctggcttactgagactcctgatctgtaaacaggactttggtggctacagcgccctctttagccag

SEQ ID NO: 37674 - DNA, 161 bp, Homo sapiens; identical to SEQ ID NO: 1618
  chr2:74153737-74153898
  hyper

SEQ ID NO: 37675 - DNA, 258 bp, Homo sapiens
  chr2:74154120-74154378
  hyper
ctccagaggcctgcacgcggggcgcgggccccgaaggctctccatcgaaggcaacattggtaagggccggaaagcggctgccaagccttggcctccgccacgcaggcgacagaggctgggaaaggagctgggcccggaatggcctgcgtctgatgcggccggcctctttttctgggctgcgaggagagcctttcccctcgcaaagtgcactgtgtatctttgcctccttgtttttaggatatcgggcctcagtacccg

SEQ ID NO: 37676 - DNA, 30 bp, Homo sapiens
  chr2:74211425-74211455
  hyper
ctggacagggcattcggccgtgacccctgc

SEQ ID NO: 37677 - DNA, 30 bp, Homo sapiens; identical to SEQ ID NO: 1620
  chr2:74211830-74211860
  hyper

SEQ ID NO: 37678 - DNA, 30 bp, Homo sapiens
  chr2:74212716-74212746
  hyper
gcagtcccgccgagcgaggctctcagcaaa

SEQ ID NO: 37679 - DNA, 71 bp, Homo sapiens
  chr2:74230020-74230091
  hyper
aaacaaaaacacactggaaggcgggggagcctgtctgccgtgatccaggcggcagctggaggcaggaagat

SEQ ID NO: 37680 - DNA, 30 bp, Homo sapiens
  chr2:74405361-74405391
  hyper
acattctcctggggcggcatttaacaccga

SEQ ID NO: 37681 - DNA, 300 bp, Homo sapiens; identical to SEQ ID NO: 1621
  chr2:74405877-74406177
  hyper

SEQ ID NO: 37682 - DNA, 1040 bp, Homo sapiens
  chr2:74425423-74426463
  hyper
gaacttttctcttgtgttgtccggccttcggtgacactagcggcgtcaggcaggagtttgacttcctcagcctatcatggcacgttgccgaggcttcagcgccttacaggacctcgctccaggctcttctggctccaatcaaaagcagggctctttcggacttcgcttacgtttaataaagaaaaccggttggccccttcggctccacctggctcaacagacagccagtggcatgcggcagggaccaatgggtggcggagggaggcggggcctgccacgaggccgcagtataaccgcgtggcccgcgcgcgcgcttccctcccggcgcagtcaccggcgcggtctatggctgcgacttctctaatgtctgctttggctgcccggctgctgcagcccgcgcacagctgctcccttcgccttcgccctttccacctcgcggcagttcggtaagagggtcacagagctcggtcagcgcggaaagctgaggggaacggagggcgaggggcacgccgggcccccgagggacaccgagggaagtccttcccgaacatctccgccccggcggtggtggccgctgaggggtgtggcggggcgacgtggcaccgagcgccgccgcagctctcgactggggcgcttcctcggcgcggagggctggtacccgaagcccgcctttcggagggagccgctctcctgcgactcggggcgtcgccggggcccgtggccagtcggcgggcgggacgggggtggcgtgcggaacgcgaaggcatcagtttacgcggagccttccgacagcgccggccgcctctggctgggatgctgagagtcgtctgggggagaacaggcgagggttccaaaagagcagccctcggcgagttgtccttgcggggaccctagcggcggagggcgctgctgcagctgatgaaatcgcggagccgacttgctcggggtccccgcgccgccctcctccctccgccggtgggagtggcccgcgctgcctccgctctgccaggaacatgaacggactctgggcaccctagctt

SEQ ID NO: 37683 - DNA, 30 bp, Homo sapiens
  chr2:74648475-74648505
  hyper
gtttgagtgggcaccgtgcaggtgtaggtt

SEQ ID NO: 37684 - DNA, 30 bp, Homo sapiens
  chr2:74684551-74684581
  hyper
agatgctgctgaagcgcgaggagcgggcgc

SEQ ID NO: 37685 - DNA, 232 bp, Homo sapiens
  chr2:74685368-74685600
  hyper
gtattggctattgccgctgtcagtcagggccgtgggtcgaaccttcacctactctttgtctgtacaagctcttgttgtctgggtgagcggcggaggcgctgctgtggattggtcacagggagaaacctctgatctgttcctattggcccgtccgtcaagggacgatgatgattggtagggcagagcaatctgagtcctagttggtggagttctgcccggatggaagctccgg

SEQ ID NO: 37686 - DNA, 196 bp, Homo sapiens
  chr2:74726156-74726352
  hyper
ttctctcctgcctttctctatcgcgattgccccgcctacaaggaacagagcaacaggtcgctcagttggcgacggtctgcccttttcccttggcactggcggccttccggagccgccgcggaacctagggactaacggaggagaggtgagaagtcgcaggtgcgagtcctggcacgtgggctgaggacaggggagg

SEQ ID NO: 37687 - DNA, 1003 bp, Homo sapiens; identical to SEQ ID NO: 1624
  chr2:74729734-74730737
  hyper

SEQ ID NO: 37688 - DNA, 232 bp, Homo sapiens
  chr2:74740410-74740642
  hyper
ggcccccccgggggccggggcgggccggggaaggtaatgtaattccggcccagctaacccgattaccgcggcctgcaccgggcagggcggcggcgggggcgggtctaaggctcaggggcccgcccgcgggggtcccatccccgggaaggacgcagagttcacgcactcccggctcctggattcatggccagaggtcacaaggtcaccaagcggcttaggtctttccccacct

SEQ ID NO: 37689 - DNA, 965 bp, Homo sapiens
  chr2:74740879-74741844
  hyper
ccagccccaagaacccgccggcctgatttggcccgggttgagccatggtccgttttacacggattttggaaaatcgaaattctaggaaacacaggacaccaattaccggtgcgcatgaacagggctggggggacctacaggagaggccagaaggcgcaccacgatcgccagcccaaagcggccgttccccgcccttagcccctgccgtccccttcccacacctgttctcttcctgggcctgcagctcaccgggcgccgttccccagccgcttcttacgcagccgggaaaccacaacgagatttggtcttcgagagcatttaggcggggaccacaacgaatccgggagttggccagaaggatccatcgagaggcgaagagtgggggctgggggaggaggcacctgcggaggaagccggtgaggcggaggcagcccaaaggcggaggccgcccaaaggcggaggccagcaaggatggaggcgcggtgagcatctccgctgactcagcggcccatgctcgggcccctcccgcgctgagcctggctcctaacaccctggccccctgtccccctccccgcacatctccgccagccagccttccccctgcgcttggcgcaaacaggcgtcccttcccctttaactgctgggccccgcccctgccctacccccagcccccactacccacccgggccgatccgtcagtcactgccccagccggagctggccaaccctctccacccgggacttgggcagcggcgccggcagcccagcgtctatttgcgcttaagagccagcaaggaagctccaggggccccagctggccgtgctcccccgggatgcaagtccctgcgctgacgcccggcagcggctggcacgggcgcggctgctccgggtgcacagggatgctgctgtttcggggaccccggcgccctgccttggccagccccgcgggcccctgaggccactct

SEQ ID NO: 37690 - DNA, 278 bp, Homo sapiens; identical to SEQ ID NO: 1628
  chr2:74741872-74742150
  hyper

SEQ ID NO: 37691 - DNA, 323 bp, Homo sapiens; identical to SEQ ID NO: 1629
  chr2:74742324-74742647
  hyper

SEQ ID NO: 37692 - DNA, 451 bp, Homo sapiens; identical to SEQ ID NO: 1630
  chr2:74742693-74743144
  hyper

SEQ ID NO: 37693 - DNA, 30 bp, Homo sapiens
  chr2:74756867-74756897
  hyper
ccgaagtcctgaggcgcgccggaagggcta

SEQ ID NO: 37694 - DNA, 37 bp, Homo sapiens; identical to SEQ ID NO: 1631
  chr2:74776039-74776076
  hyper

SEQ ID NO: 37695 - DNA, 31 bp, Homo sapiens; identical to SEQ ID NO: 1632
  chr2:74776507-74776538
  hyper

SEQ ID NO: 37696 - DNA, 59 bp, Homo sapiens; identical to SEQ ID NO: 1633
  chr2:74780964-74781023
  hyper

SEQ ID NO: 37697 - DNA, 222 bp, Homo sapiens; identical to SEQ ID NO: 1634
  chr2:74781865-74782087
  hyper

SEQ ID NO: 37698 - DNA, 247 bp, Homo sapiens; identical to SEQ ID NO: 1635
  chr2:74782218-74782465
  hyper

SEQ ID NO: 37699 - DNA, 30 bp, Homo sapiens
  chr2:74942354-74942384
  hyper
tcaggggtgggagccgaagagagtaattta

SEQ ID NO: 37700 - DNA, 1611 bp, Homo sapiens
  chr2:75060917-75062528
  hyper
agtcgccccacaccccgggtccgcgatcacgctccccccacccatagccgagcctgacgcggcggtggctcatgcgcctttccgtcccagcctttagccacggaccacacgtcccatctcaggcgccccgcccctcccccgccccccgcccccggcgcgcctccccaggctgccggctccggtgtctgagcggccgcgcccgcgagccgtgagcgatgattggctgcgccacggcggcgggcggtccgtgggcgcacacaccctccccgcgcagccaatgggcgtgcgcacgtcactgatccggaggcccgcgggccggcagcccctcaataagccacattgttgcatgaaactccggcgcaggagtcccgggctgccgctggcaacatcgtgtcacccagctaagaaaatccgcgggcccgagccacgcgcctgtgaatcggagaggtcccactgcccgagtggagccgggctgagattcttctcaagttgagcctcagtgatcctgtggccgaagttagcgccttgacgtgggacaaccggacacgtcgccaggagagaactgaggcgccttctagcagttgtgacgccaaaatcacgtctccggagacccgcgccctccgccagccgggcgcaccctcgccggtagccttctttgtgcgccgtccggactcccagctcccggcccggcagccgagccccagcacaaagcagtcggaccgcgccgcccgcctcccctctcgcgtctccgcctcggtttcccaactctgcgccgtcgggccgcggcaggatgattgcctcgcatctgcttgcctacttcttcacggagctcaaccatgaccaagtgcagaaggtaagtcagcgcgggcggggcggcaggctgggctctggcaaagtggtctggcctccatcagtctcttcctcgaccctgcggggacccgcttcctccctactccgggcctgggagcggaaaaagtttgggcagccgggacactcctgggcgccaggagccacgtccgctaagcacagccggcgagtgcgcgcgggcggggagccgaggtcgcgctccgccgggcgccctccctccctgagctccggcacgcgctcacgctctctcccccagtccctttttccctgttactggaggggcgggtcaccccgcaggtagtcagggattgctgcgcccacgtgggagggagcccccttctgcagcgcgagttccggcgagagcacgtggagagaatcgtggctgcgggaggctgctccgctgccgcgtggggccgccgggggccgtccgcgctcgcggaccgcgtgtaggagacgagcggttcccttctccttccccgcggccctgcgggggtgggctcgaggagaagctgacccgggaaggagtaggaaaggggcagaggaactccgcccgccgcgccccctccccggaactgtggcgcccggaactgaggctcggcgaggggcgtcccccattaacccccgcccctccaaatcagcctcgggaccgcccagcctcgtgtcctcaggatctgcctctgagtaaggggaggactttggttgttactttctggtttgccctaaaagttactcggagaggccaac

SEQ ID NO: 37701 - DNA, 244 bp, Homo sapiens
  chr2:75062575-75062819
  hyper
cgaaaacgagcttttttttccttaagcctcgacctgtctgttcccacctggctccgcagctccctatggctgagcgctcaccgcggccgggtcatttacataagaaagagcctcaggccaagccgggaagctctcattccccgcctcggggtatgggggtggggatggggccggggccggggacgggcagggccaggggcgcgctcagaattgagtttctgaaatgcccgggattaggggattg

SEQ ID NO: 37702 - DNA, 113 bp, Homo sapiens; identical to SEQ ID NO: 1636
  chr2:75146989-75147102
  hyper

SEQ ID NO: 37703 - DNA, 1010 bp, Homo sapiens
  chr2:75426494-75427504
  hyper
gggggcccattgcagcgcgacctgtaaaagttctgagcctatggccaggattctggagcttcgtatccagctggagatttttccttctcttttgctgccgctgccgccgcctgcagtttcgcgggcacctctcggttcgggttgctcagctcgcgagttagctgcgcacgaggcttttataaccccctgcagagacgtcactgggaaggggcagtacctgggctgcgtactcgccagtcccggtgcgcagcgcggcagctgcgccagctgttgacaactgtctcattccaccgccgcagctaccacgccttttgctgcttgctacttgccgtgggagtctgcgagccgggagccccacgcactccgcgagggggcagtaggtggcttggaagtaactgacacagatgcggtccgcagctggaatcgtcgttgcacgaggggtgctgggaggaaggaaggatttgggaaacagctggagtggaggacaatcaacttccagggaatgaagcccagagccctgagacagctctgcagaggcggcttgcctgtggcaatgggaaacggtcatgtgtgggggcgatgtgccagcgccgcgctccgggccgcgctccagctaccgagaagccagaggcgacgactccctggtccaggtgtcccgaaaacaactttcctgaggctgtgtttaggaaacacccccacaaaatatctagctcagttacctggctagctgattcacctgggaagtgacagtctctaagctttgaggacactttcctcagccaccctggtgacttggcccctcgttccaggagaagctccatttgagccctccacctgacccctctggatgagcctctgctcaatcactggggacagggctgagctccctgcgaatcttggtgagcgcaggagccacactcataggcagcttgtcgctcagacgcgcggctctgggctctccgccagcaatcactgcggcgctgcgtttgcctcccggggacctggcagcc

SEQ ID NO: 37704 - DNA, 495 bp, Homo sapiens
  chr2:75427722-75428217
  hyper
ggaggaggcagggcaaagactcgccagtccgtataaacccttttggagaagccaagatgggatgagctccgcagcacgttcccgccagactgctgcaggcagagttccgcggaaaactgaaccccgggagtcctcaggggcccatctaccccggtgcaccgccccctcctttcactgcggggactcggagctgtgggactggagcgcgcaccggcagacttgcgcgcaggttggagttggcgcacacccgcgccagccggggagcggcgtttacgcactggtaccgcgagcgctcaaagcatctctcgggaagtgctttaaggctgggaaatttactatacacttatgccgggcaaaaattggatcccacgccggggaggagaatctgctgtttcactctgtattttttcggagcctgggattttagcgtatataggaaccgcacattgctttgccaggttctcctaggcacccgtaaacacactgcatagaaaa

SEQ ID NO: 37705 - DNA, 66 bp, Homo sapiens
  chr2:75787178-75787244
  hyper
ggtggggacccccacgcagacctcccagatagagcagcgtggactgtctgcgcgcccctctccaaa

SEQ ID NO: 37706 - DNA, 582 bp, Homo sapiens
  chr2:75787703-75788285
  hyper
gctctgggtgtttccgaaaagagggcgcttcggagaagccggagcccgctggggatgccgggcgcccccagagttcagggagcgctctcgggcacctcttacctttgctggggccccggcgcgcacttccggggactgcgcttggggcgcgcggggccgagcagggggacccggagctgatcactgaggggcggacacgacaaagcgctgcccgggtcttgggccggcaccagtacctcggaaaggaatcccggcggaggggccgccggggtcagggctggcctggggatgtggggtcccggcctgggtgctcacggacggcggcgccaagccccgcagaagctgcaggagcccgagtcagtgggaggaaaaggttgtctcatttccttcgatctcccccctcctccacccgcttggctccggacctgccctccctctcccccgcccccttctgcaagccagcggcccatgtgggcgcccgcaagacgcgaaacctgaacggctgcggcgtgcggcacctccctccgcgccaagttagttcacgctcccaactcctgcctgcctccccgcgctgccgactgt

SEQ ID NO: 37707 - DNA, 108 bp, Homo sapiens
  chr2:75788330-75788438
  hyper
cggtcctccaggctttccccctgctgggacgagcccagatttgaaagcagacctccaagcccctgccagcatccatcctctcattcctgtcccgtcgcctgctttgag

SEQ ID NO: 37708 - DNA, 30 bp, Homo sapiens; identical to SEQ ID NO: 1639
  chr2:75836395-75836425
  hyper

SEQ ID NO: 37709 - DNA, 30 bp, Homo sapiens
  chr2:75873967-75873997
  hyper
caatgggcctaggccggagtttccaagccg

SEQ ID NO: 37710 - DNA, 153 bp, Homo sapiens; identical to SEQ ID NO: 1640
  chr2:79740170-79740323
  hyper

SEQ ID NO: 37711 - DNA, 243 bp, Homo sapiens
  chr2:80529665-80529908
  hyper
tgtggatctgcacggcgttctcggcgtgctcgccgcctggaagagccacggtggcaggctcgaatgtgccgtcgtgctgcccctccccgccgtccgcgagcgtggtggccgagctggcagggggccccagatcactgcggttggtgacggccgagagcaggtggccgctggtgggctcggccccatcctcgcacaggtggaaggcgtacacggcgtccaggacgtcctcgccctgtgcgtact

SEQ ID NO: 37712 - DNA, 342 bp, Homo sapiens
  chr2:80529985-80530327
  hyper
cgcccgcaatcccacaggttcccggccagggtgatgcttgtcagggacttccaagagttgaggatccggggctcgatgtaggtgaggcggttggagtccagctgcagggactgcaggtgcggcacggtctcgaacacatggggctccatgtactcgatctcgttgcccgacaagtccattttctccaggttccaaacccagtccagcgagctgaccacaatggccaccttgttcctccgcaggcagagcgagtgcagggagatgaggcgcgggaagtgggcgaagttcaccttgaccaagtcgttgtgctcgaggtgcagctcggtgagcttaaacaagccg

SEQ ID NO: 37713 - DNA, 178 bp, Homo sapiens
  chr2:80530408-80530586
  hyper
cgcacgggcacaaactggatggcgttggcccgcatatgcagcgtggtgagcttccgcagcccgtggaagaggtcgggcgcgagcgcctgcagcttgttgtacgagaggtccacgctgcgcaggttgggcatgggccggaaggtggtgttgggcagttgggtgatctggttggaactca

SEQ ID NO: 37714 - DNA, 1306 bp, Homo sapiens
  chr2:80530622-80531928
  hyper
cgtccccctgcacggagcagatgtgattgtgatccagatagagccacgtgagctgcattaaccccgtgaactggccggcgcgcagctccgagaggctgttgtagcgcagggacaagcccagcaggccggacaggttgtggggcgcctcggtgaggttgagcgcctcgcagtacagcagccgcccctcgcaccggcacagctgcgggcacccgctgggggcggcgggcagcatctgaaagcaggcccccagcagacacaagaccacccccgagggcctcctcagcagccagtatagacagagaccgagcagcaggaaatccattagcgagaatctttccagagagactggagaatgtccattggaagcgctcggtcagaaatctacatcatattttattccgagggaggggaagcgggggagggggagaaaagggcaaaaaatcaaataaatacatagaaataaagaaggacccccctccccaaaaaccacacgttcacctctaagcatgcagaaagctgggcagcatagaaagttcacagccacggaaagatcaaagagatggtgatttggtccatgttagatgctgcagcaaagaaaagggaggaaaaaaaaaatcttcgggaaagaatttaattaaaaagtgtcttacccacccttttccagagagtgacaacctccattcagctgctccctttgtgtgcaggctaattatatgcagggcgagagaagacccctctgtgtttccgaggcagccccggtccgcggccggcggatctggcaggcgcacaatgtctcactttgctgctcggctcggggctgcaagggcggccggcaaggcggggaggcgacttctaggacccgcaagtttcccaactacgtgccggagcccgagcttcgccttcctgccgccttcctttccctctgcagttcggactgtgacgttgtggggggaaaaaactccaaactcggggctcgcgactccccaggatctgacagtctggttaatgtccgtcattggaaacgaccactgaccggcgccaccttttactccgcggaaacagcctgccattcgcgccccgggcagctgcagagagcgggctcactcatgctttgcgggcggcgggcggcgggcggcgggcggtggggaggtgcggacggcggcgcggggagcggcgagcggcgcccgggctccttccctccaccaggcagtgtgcggcgcgagcttgcacaggcacctactgctcactgagtgtcgtaagctgctcacgattgtgcgtcttccccgagcacctcagacatgggcag

SEQ ID NO: 37715 - DNA, 300 bp, Homo sapiens
  chr2:80549625-80549925
  hyper
ggcggctacgctccccgcggggctgcctgcagcccccgggcccttgcagctccgggacggcgcgcggcggcggaggccgcggggccccaagcgccagcctggccccggcgcagatgcgctgccccggccgcagcccagccgccgcgtgtgttgtcaggacgatcggaaacgcgtgtgtggggagatgggtgccagtgtcgccttgtccattatccaaaacccagtcgcttttgctggttcctcactcagcatgtgagagagattgtcttctcactcggtgccactcgggggccatactcc

SEQ ID NO: 37716 - DNA, 362 bp, Homo sapiens
  chr2:85107404-85107766
  hyper
gggtttccctcacccacaaaacgttgatgcgaacatctaaagcgcccggctggacacgcaaggctcggacagtggtcactccgcgaacgcactctgtgacctggagcacacaggtcccccgctgagtgtcagtttcccagatcggtaaaaacaagggaaatggcttcaactccctaaagtcccttctaactcaggcactgaacatatgaaggttaagccaagcagcttcagggcgctgttaatattttgataagagcaggtgaaattaaactcttaaggaagagagggaagaagaaacttcaaataaatgtgcccaagttcctggtccggtactccctggcggatccgtcccccgaaagctc

SEQ ID NO: 37717 - DNA, 30 bp, Homo sapiens
  chr2:85132035-85132065
  hyper
cccttcacacaatgcgtctaacagcattta

SEQ ID NO: 37718 - DNA, 30 bp, Homo sapiens
  chr2:85154183-85154213
  hyper
tggagggagactgacgaactcaactaccag

SEQ ID NO: 37719 - DNA, 31 bp, Homo sapiens; identical to SEQ ID NO: 1643
  chr2:85198256-85198287
  hyper

SEQ ID NO: 37720 - DNA, 65 bp, Homo sapiens; identical to SEQ ID NO: 1644
  chr2:85359942-85360007
  hyper

SEQ ID NO: 37721 - DNA, 35 bp, Homo sapiens; identical to SEQ ID NO: 1645
  chr2:85360497-85360532
  hyper

SEQ ID NO: 37722 - DNA, 62 bp, Homo sapiens
  chr2:85361466-85361528
  hyper
cgttctttaaaggacccccgtaccctgggtaccccttcctgatgatcccggacctgagcagc

SEQ ID NO: 37723 - DNA, 14 bp, Homo sapiens
  chr2:85361628-85361642
  hyper
gcccccgggcttgg

SEQ ID NO: 37724 - DNA, 199 bp, Homo sapiens
  chr2:85553951-85554150
  hyper
ttcctccccagattcggttttgaaagcatgaggagaaagcttccctttgtcagcaagctggtttgtgtcagccttggggagctccttgttatcagaagggttggagatgggcttggaatggtctttccgggaaggctgctctggaaccaccttgttagggctgtcttttgaggtctgctcctccgcacccgacttgctg

SEQ ID NO: 37725 - DNA, 30 bp, Homo sapiens
  chr2:85555559-85555589
  hyper
gatcacctgcaaagcgttgccttcgcatcc

SEQ ID NO: 37726 - DNA, 30 bp, Homo sapiens
  chr2:85765069-85765099
  hyper
gcgttcttgtcacgcgctccgctcagggcc

SEQ ID NO: 37727 - DNA, 217 bp, Homo sapiens
  chr2:85822390-85822607
  hyper
accaactagagggccgcgggggcagaagtgtccggcggggatccggacagcgcatccggaagcgccatgggccaacgctcgcaggaacctgaacccctgggccagcgccgcctttgctcgcagaggcctctagcatctgtactgtcgaagccctctgagcttcagggcagactgaagagccttacacaccagacacttggacgcgatcgcgccagaa

SEQ ID NO: 37728 - DNA, 236 bp, Homo sapiens
  chr2:85829250-85829486
  hyper
tcaacaccttatccagcgctcccgttgggtctctgagcgtccaaagtttgggctgagcccacggcagaacgtgaacaccctctggcactgggggcctccgcggtcaacccaaatgccaccggcgtgctgagagacgcaggcggaccgtaacatctggaagggagttaccctccttctgagggaccagggctgggagaagggctggacaaccgaagaggccacgccaaggagaggct

SEQ ID NO: 37729 - DNA, 30 bp, Homo sapiens
  chr2:85829877-85829907
  hyper
ggacgtggagtccgcgcagccccggcctcg

SEQ ID NO: 37730 - DNA, 30 bp, Homo sapiens
  chr2:85838626-85838656
  hyper
tgagaatcattcagcggagatttgggagcg

SEQ ID NO: 37731 - DNA, 30 bp, Homo sapiens; identical to SEQ ID NO: 1648
  chr2:85839346-85839376
  hyper

SEQ ID NO: 37732 - DNA, 89 bp, Homo sapiens; identical to SEQ ID NO: 1649
  chr2:85842677-85842766
  hyper

SEQ ID NO: 37733 - DNA, 128 bp, Homo sapiens
  chr2:85980914-85981042
  hyper
tgcttcctgtttctttaaaggcgctcgcggctcgggcggcccgggctggggaggcggtggcggcgggagctgcctcctctccgggcggcggcgctgactgatctcgcgaactgggcttctgtgtaaac

SEQ ID NO: 37734 - DNA, 30 bp, Homo sapiens
  chr2:85981947-85981977
  hyper
acgaccgggcgaagcgactgccgcctcctc

SEQ ID NO: 37735 - DNA, 169 bp, Homo sapiens
  chr2:85982462-85982631
  hyper
ccagttggtggtggcaaggtccggaacgctgcggtgggacagtccgggggagttgtcagcccctcttcaggccccagcggtgatgccccgaacactcaggttgcttccgggctatgcactccttgccctggcatcctcaagaacccgcgctacaagcctgtgccctctc

SEQ ID NO: 37736 - DNA, 30 bp, Homo sapiens; identical to SEQ ID NO: 1650
  chr2:86114868-86114898
  hyper

SEQ ID NO: 37737 - DNA, 30 bp, Homo sapiens
  chr2:86116369-86116399
  hyper
aaagcataaatattcgtgaaaataagaaaa

SEQ ID NO: 37738 - DNA, 113 bp, Homo sapiens
  chr2:86333309-86333422
  hyper
cgccccaccttcctgaaggtcgaggcacgctttcccaacatgctctgcagagaaatcaaagatggcggttgtatctgctgttcgctggctgggcctccgcagcaggcttggcc

SEQ ID NO: 37739 - DNA, 30 bp, Homo sapiens; identical to SEQ ID NO: 1651
  chr2:86426654-86426684
  hyper

SEQ ID NO: 37740 - DNA, 31 bp, Homo sapiens; identical to SEQ ID NO: 1652
  chr2:86428203-86428234
  hyper

SEQ ID NO: 37741 - DNA, 30 bp, Homo sapiens; identical to SEQ ID NO: 1653
  chr2:86564038-86564068
  hyper

SEQ ID NO: 37742 - DNA, 30 bp, Homo sapiens
  chr2:86564567-86564597
  hyper
gggacggaggggcgcgggggagaaggccac

SEQ ID NO: 37743 - DNA, 116 bp, Homo sapiens
  chr2:86565023-86565139
  hyper
cctcagcgttccagcggagaaactgaagtccgaacctgaacctcgggaatctgtctgcacctgtctaggtgggatgctgtcatccctcattcagctagtgcgttagcctcataaag

SEQ ID NO: 37744 - DNA, 43 bp, Homo sapiens; identical to SEQ ID NO: 1654
  chr2:86668218-86668261
  hyper

SEQ ID NO: 37745 - DNA, 31 bp, Homo sapiens; identical to SEQ ID NO: 1655
  chr2:86850367-86850398
  hyper

SEQ ID NO: 37746 - DNA, 30 bp, Homo sapiens
  chr2:86850742-86850772
  hyper
aggatggggcgtcgcggtctctgcagatgg

SEQ ID NO: 37747 - DNA, 924 bp, Homo sapiens
  chr2:87017639-87018563
  hyper
ataggaggaaggtgggactggcggcggcgccgcgcggctggaagagccacgagcagcccgacgtcgggttggacagcagcacctggcacttcagctccactgtctcgcccaggttccaggtccgatccagcggcgacacccggaactggctcggcctggcggcgtctgcaggcggcaagcagcgaggctgagcccgcagtcccgcgccccccgccccccgcccgccccatcccctgccttcccgggcgtctcaaactcacggagcagcaaggccagcggcaggagcaaggcggtcactggtaaggccatgacgcgctccccaggacgctgcttggctcgaagctcgggcgcgaggggaggcgcgcgggagccggtggggcgccgaggggggaaagttgcgcccttcggccggcccggagcctgatttcgcatttggaggatgtgatgtcacccgaagcccccgccgaggagagtcaccctccttttcgcggttgtcgccttccagcccggcgaggaggctggggcccgtgaatagggccgtcgaggcagcctggccaggcaactgggggcagctgaaaactgcgggtttggggatgaggaaaagggcttggaaatagtccttggaaatggttgtcttgtgagagtgacagagtgggtgaagggagaccaaagatttcaagaagtgagggcgagagtaggcagcaaaggaggggagtgtcccttcctttgccttcactaaaggcgtctcttgtactgtcaccttgggactttttattggcaaaatgggcactgagggctgaaaaggaagaggaactagcgacctgcccgcttctgaggaactcgctagagcagccccagttttcaccgaggaaggaccctctcccttcccccaggagatttccatgagagcggcagcagccgaag

SEQ ID NO: 37748 - DNA, 769 bp, Homo sapiens
  chr2:87034563-87035332
  hyper
tcttacttggagggtagagaacggtgcttccccacgctgctgtgcaatggataggagctatgtgaagctggcgtatgggtggggtttgcaggcttcgtccggcttcatcgccggctgctgacccggcaccaattcctgttctgcaggtctcaccgcagaggggcacgccagccatgaggacagatgagggaacacgtgatgccacgatgggggtgccaggatgaggtgggtgcggtcgcggacaggcgcacgaggagcccagcggagcgccacccggagcaggcgcggaggagggctggggagggccaccaaggcgacgagagccggtgtgcctgaatcagcctaaaggagacggaggaggagtgtggtgggcgcaggggcagggagctgggggaagggcggggggctagcccaggctgaaggcaggcaggagcagggccgcgatgtcagacaagaaacggcagcagtgtgtttgggaacctagcaccaaccgcaccggtggagacagggtctgctgtagaggaggtggggccgggtcccagctaagtaaggcggtggatcttgcagcccttccatcctcagccgctcattctgcgcaaatctcggggccagccttggtggagccgtaaagcgtccaccagaacctggatccctccgccacctttcccatgaattcacctttctgtacacagcaagcgcctgagcggagacggccgacacgtttcccactgttaccccaggaaaccgcggctcctgagggggtcagggc

SEQ ID NO: 37749 - DNA, 30 bp, Homo sapiens; identical to SEQ ID NO: 1658
  chr2:87088819-87088849
  hyper

SEQ ID NO: 37750 - DNA, 850 bp, Homo sapiens; identical to SEQ ID NO: 1659
  chr2:88315962-88316812
  hyper

SEQ ID NO: 37751 - DNA, 30 bp, Homo sapiens
  chr2:88650233-88650263
  hyper
ccaggcctgccagccgcctcccccgccgcc

SEQ ID NO: 37752 - DNA, 154 bp, Homo sapiens
  chr2:88751265-88751419
  hyper
ttgggtggttattcctccatccgctcccacccgcagcctggacaagaagactcctggcagatcttccagccgcacaccgacccctgcgccggcccttgcgacccgcgtccgccctccccggctgggaagcacctgccagcggccctcacctggg

SEQ ID NO: 37753 - DNA, 355 bp, Homo sapiens
  chr2:88751460-88751815
  hyper
cgacaggttgtggcggatggagttctgccagccggccttgctgcgctggtagaaggggaagctatcggcgacgaactggtagatgtggctgagagtgagtttgcgctcgggcgcgctctgaatggccatggcgatgagcgccgaatacgagtagggcggccgcaccatcttcatcaggtcctcgcggctggccatggacagccagcccagctccccgggccccgcgggcgcggcgggcgaggcgggcgcggcgggcgcgggctgcgcgaagggccgctgagagcagccgaagtgccggcggcaggcggtggctgcagaaagggcccggccgcggccccggggggcggcggcggcg

SEQ ID NO: 37754 - DNA, 909 bp, Homo sapiens
  chr2:88751942-88752851
  hyper
gtaaggcgccctggctgccgggggggcgcccggggcggcggcggtggcggcgggcgggggcaggccgggctgcgaatacactccgaagttgtcgccgcagtagagggccatgtcggcggccgtgggcggctgcggcgcggccgcggcgaggggcgagcggggctggtctcgccgctcgggcgagagcatccctttgggggccaaccctgcggctccgccttcacccgcgctgggcgcccggtgctccgggccggggtcgggcgggtgctagcggagcgcctgctagccggcctcttataaccgagcccggcgcggctcctcctgggccggcccggagcggggcggtggccgcgggcctgggctctccacgcccccgccacgccccacctgcccgcgcgcccaaacccggagcccgcccgccccgcccctaccgcccctctgcccgggcccgggagcgtctgggaggccggcgcctccaggtttcgggcaaaaagcagcaccccattcctagcccacgtttcttaacatcataataagtaaagccacgaatattaaagagaagataacccgaacagtacgaatgatttctaaaaagttaacttggggtggccgctcgggccacctgcctagtcatccttttggcttttctacctctttcctcctaaccttttgtgatcgagtcgcggaattcacgtccagtctcaaccgatcggcttccagtcgaaaataatcgatgtgatttacaacgctttggggtatacggtagaggttattaacaggcccgcttggcgtgtccccttctcctcggggattctgtgattggaggaacggaaatcagtgttgagtttttctaaccaaactgtaggttcgctcacattcgggaagcatttattcgttttctgtgcggtt

SEQ ID NO: 37755 - DNA, 192 bp, Homo sapiens
  chr2:88927112-88927304
  hyper
cctaccaatcaaatcgtaatttcgtcgttcgaggcccgtccctcttccggacgcaattaccaatgagaaatgcccttccccgacgtctttttacctgattggtgcgctcatcagttcccggaatacctttcctacaacagattggccatcgcggtggttggcctcgccccacaaagcgaggcgctggagaag

SEQ ID NO: 37756 - DNA, 30 bp, Homo sapiens
  chr2:88990723-88990753
  hyper
agctggcgccgtgtcgcatgtgagtttcct

SEQ ID NO: 37757 - DNA, 30 bp, Homo sapiens
  chr2:88991003-88991033
  hyper
gagcccgtcgccggcgattgcgcattccgt

SEQ ID NO: 37758 - DNA, 170 bp, Homo sapiens; identical to SEQ ID NO: 1663
  chr2:89064805-89064975
  hyper

SEQ ID NO: 37759 - DNA, 294 bp, Homo sapiens; identical to SEQ ID NO: 1664
  chr2:89065128-89065422
  hyper

SEQ ID NO: 37760 - DNA, 1543 bp, Homo sapiens
  chr2:95690893-95692436
  hyper
ccagcgccgaaccagcgccggctcagtggacgcggaaggggccggcggccgcggccggtcccatcccccactgcagacccccagcctgtggcggtggtccagttccgccaggaaaccgccgcctggagctgtgggtcgcgcacattaacgcatccagcggaaaaatgaaggagacccaaattcaaagttaaagtaatggtgacccgagaggtgccttgatgagaaggtttggggtcccggttactgatggttatcattcttacgagatgctggtcacctacgaagggagaaaggcacgaggagcgcctgaccaaagtggttttgccctgcttcccgcaagaggtggcacccacggctggaacgcaggagtcagacccacagtccccagctctggacgcccgcagcggggcctcgaagaggttcagggcggtgcccgcggcgctcgggccgggtctcccggggcgtggggcggggggcggggttgggcggcggccggggctcctccctcttctgccccgggctcccctgctcttaacccgcgcgcgggggcgcccaggccactgggctccgcggagccagcgagaggtctgcgcggagtctgagcggcgctcgtcccgtcccaaggccgacgccagcacgccgtcatggcccccgcagcggcgacggggggcagcaccctgcccagtggcttctcggtcttcaccaccttgcccgacttgctcttcatctttgagtttgtgagtggctcctggccggggaagggacggggtgggctgagccgtgcgctctctcgggcgcccagcacagctgtcggacgggatccgctagctgcgcaggttctgggagcatcggggcagcaggcgcagggcggggactaagccagggaagtcccctcccacctccggtcctttgtgcccttctagaccaacagaatgaggggaacagtctacaggactatggaggaaaaactgggttcccaactggggtcagatgtaggcagcggggcagggggggacggctcttggttcgctggtcccaaagctgcgcgcggggcccacttgacgcgcgcagcgccaccgaagctcccgccgcgctttgcgcggttgggtagaagtgcgcagcttttacaagggagaaggtttcgttaaaaaagaaaaaaaaatcagcaagagaaacattagtattaccaaccgagatttggagatgagagggagctgaatccggtttattttcttctggccttttaaagtttctggcgagggaacgtatttgcgaccaattcgatctggaaatgaggccatcgtttgcttggccgcagtccttctgccccgtgtgcggggtgggggtggaggagatggggggtggggggtggggggtggcggcgagagcgatccgcgcgcctcgactgaccttgggcaggcccggggcctctgcacctgcggtcggtcccgccttgcacgcacggtctctgcctgaggctgcaggaaagcgcttcctactgagaactcctgataagcgctcacggtgtcgcgaagccgaagtg

SEQ ID NO: 37761 - DNA, 346 bp, Homo sapiens
  chr2:95825282-95825628
  hyper
ccagtacaggtctgcgcgcccgcagtctccgaacgctcacaggaccaggccccgcccgccaccccgcgccagcccccgcccgccaccccgcgccagcccccgcccgccaccccgcgccagcccccgcccgccaccccgcgccagcccccgcgtccgccccgcgccagcccccgcgtccgccccgcgccagcccccgcgtccgccccgcgccagccccgcctcccgaggccgtcccgagcttgcgcagacgcggccgccgccggggcccttcagagccagcgccggtggcggggtgctggcgcggcgaagctggagaggcggggctcgcgggcgcctgtaggacctc

SEQ ID NO: 37762 - DNA, 30 bp, Homo sapiens
  chr2:95831101-95831131
  hyper
accctgcctggaaccgcagccctgctctca

SEQ ID NO: 37763 - DNA, 253 bp, Homo sapiens
  chr2:95873227-95873480
  hyper
agggccgtcagccgcgccccgcggaggattctgggagtggtagttcggcctcatggttggccggcgctaggcgtccccgccggctgttagatgcctttgtcgtcgggctcggcttcctcagtgtgtggctggaggtcgaacccagggtagaggagggctgaacgcatccccttttaatctgagtgtccgggaggagggtggcgggaggacccccgggtgggggcgccaggctgcccacgcgtgcgttcccggc

SEQ ID NO: 37764 - DNA, 30 bp, Homo sapiens
  chr2:96011949-96011979
  hyper
gagtgagggcttcccggatcccccgccgcc

SEQ ID NO: 37765 - DNA, 30 bp, Homo sapiens
  chr2:96012313-96012343
  hyper
ggggcggccgggagcgcccgggacccccgc

SEQ ID NO: 37766 - DNA, 30 bp, Homo sapiens
  chr2:96657388-96657418
  hyper
aataagaagccatccgagcacaagcggtcc

SEQ ID NO: 37767 - DNA, 30 bp, Homo sapiens
  chr2:96874520-96874550
  hyper
caggcccagcagcacgcaagctcccgcgcc

SEQ ID NO: 37768 - DNA, 195 bp, Homo sapiens
  chr2:96931838-96932033
  hyper
ctggtagttcgaggcggtcccgcgatgctttccctgccgaggtgaggggagcgactacaactcccagagggtatggcggccgcagcagtgggcagttgagtttccggggcgacccaggtcctccggcggaagcgggagcctctgtcggccgcggaagcctggagtgggcggtacgcagacgcgcgcggtgagacc

SEQ ID NO: 37769 - DNA, 483 bp, Homo sapiens; identical to SEQ ID NO: 1666
  chr2:96990898-96991381
  hyper

SEQ ID NO: 37770 - DNA, 30 bp, Homo sapiens
  chr2:97001945-97001975
  hyper
cagggctttggaagcgatgtggttaccgtt

SEQ ID NO: 37771 - DNA, 211 bp, Homo sapiens; identical to SEQ ID NO: 1667
  chr2:97171201-97171412
  hyper

SEQ ID NO: 37772 - DNA, 198 bp, Homo sapiens
  chr2:97173862-97174060
  hyper
tcacccgccagccccgctgcaaacctttgctctgagaggggcgggcccgtgccctcaagcgcggggcggtctccgctgtgcagagactgaggcggcccctgctggcggcggtcagtactgcaggaggcgccgagggcccgggagcccccaaagccgggaggggcgccccagagggaggtgagcggcgccgaggctcac

SEQ ID NO: 37773 - DNA, 287 bp, Homo sapiens
  chr2:97175213-97175500
  hyper
acaatgtcgttctggcggagctggtgagtcagggagcatccacgccgcctgggaagaccggctctggaggctggagggcttgaccagcactgccacccggtggccggcagcggaactgaccacaggcctggtgccctggagggaatgggccacaaacgctccgccaggactgcacctgtgtcctaggcgccgccctcagccaccaagtcggcctgcctctcgagcacccaacaactccaacaagccctctggaccaatagctgcagcccccacggggccttgggggt

SEQ ID NO: 37774 - DNA, 49 bp, Homo sapiens
  chr2:97193014-97193063
  hyper
aggcaggggaaggcctcgggagggacacgacggtccggcagcagagcct

SEQ ID NO: 37775 - DNA, 396 bp, Homo sapiens
  chr2:97193251-97193647
  hyper
cggtttgagccagctcccctttttgagtcagatccggcggcagggccagaaaagcgctttctgaaaccccagcgcggtcctcggtgggggtggaatggggtggggtggggggcgcggccgcgccgctgggcgccctccccgccctcccccctccccacccccagtcctccctccgctgcccgccccccaagcccggtgtcgccccctccgccccctgccgcatccccggagccagtgcccacaggggccaggcagcccgcaggggtcgctcacggctggtgtaggggcttggtccaccacgctagtacttcgggcaccaaaatagaaaaagaataacgcttggaaagaatctgatgtttccgaaggagcatcgaaaatcgccgttacgggaaaagt

SEQ ID NO: 37776 - DNA, 269 bp, Homo sapiens
  chr2:97203313-97203582
  hyper
gtgtgtccccttgtcttccctcggtctgcagaagggacggggtggcggctggggagcgtcaggggaagagggcaagagcgtgggctacgagcttgcaggcgatgcccggcttcgcgctcggcgggagctgcgggccaacccgggcccgcgctccgtccctccgcggtgtctaggggtcgcccgggctggggtcgcgtcaccctccgcccagcgccggcgtggtggggcttgcgcggtgcaggacccccgagggcccagggggtcccaag

SEQ ID NO: 37777 - DNA, 31 bp, Homo sapiens; identical to SEQ ID NO: 1673
  chr2:97304170-97304201
  hyper

SEQ ID NO: 37778 - DNA, 31 bp, Homo sapiens; identical to SEQ ID NO: 1674
  chr2:97405566-97405597
  hyper

SEQ ID NO: 37779 - DNA, 244 bp, Homo sapiens
  chr2:97426259-97426503
  hyper
aaaagcacttttctcgccctgcctgcagagcgggccacccctagctgcaggtgagggacgggagaggagcctcccacgtgcggccgtgcgaggccgaggaacaggaacggcgtagctaggagaccaggtcccggagaaggagagctggccccactggcagagaaaggcggggaagggcgcggaggcggagcactgggcgggtacccgctggcggctctcgcgcggcggcgctgctccaccttaa

SEQ ID NO: 37780 - DNA, 299 bp, Homo sapiens
  chr2:97482862-97483161
  hyper
cgggcggctgcgggagcgggtgctggagctggcgcgcggcggcggcgacccctacagcgatctcagcaagggcgtgctgcgctgccggaccgtggaggacgtgctcacgcccctcgaagactgcttcatgctggacgccagcaccgtgctggacttcggcgtcctggccagcatcatgcagagcggccacacgcgcatcccggtgtacgaggaggagcgctccaacatcgtggacatgctctacctcaaggacttggccttcgtggatcccgaagactgcacgccgctcagcaccatca

SEQ ID NO: 37781 - DNA, 30 bp, Homo sapiens
  chr2:97523293-97523323
  hyper
cagattctgctccccgggccctctctcaaa

SEQ ID NO: 37782 - DNA, 39 bp, Homo sapiens
  chr2:97523808-97523847
  hyper
ctgatctggccgctcggcgtccgcggctgtcgccctagt

SEQ ID NO: 37783 - DNA, 30 bp, Homo sapiens
  chr2:97534042-97534072
  hyper
agccactggggctccggaccctgccaacac

SEQ ID NO: 37784 - DNA, 157 bp, Homo sapiens
  chr2:97535759-97535916
  hyper
tccgcgcccctaggctcgggctccccgcgccaccacggcgggcgccggctctttctccagcgcggccgcggctctccgcccccttccccttgacgtcaggctgggggggtcgagcggaggccgggggcgggccgcgaaggctcgctcaggagggggc

SEQ ID NO: 37785 - DNA, 104 bp, Homo sapiens; identical to SEQ ID NO: 1677
  chr2:97779475-97779579
  hyper

SEQ ID NO: 37786 - DNA, 30 bp, Homo sapiens
  chr2:98207363-98207393
  hyper
aatcaagtaacattcgctattgtgattaga

SEQ ID NO: 37787 - DNA, 70 bp, Homo sapiens
  chr2:98261937-98262007
  hyper
ctggtagggggtcccgcccccggccctgtcctcctccccaggccgggacctccgcgcctcccacacacag

SEQ ID NO: 37788 - DNA, 30 bp, Homo sapiens
  chr2:98262415-98262445
  hyper
gtcttgggagtgggcgggctcgagggctgg

SEQ ID NO: 37789 - DNA, 134 bp, Homo sapiens
  chr2:98280678-98280812
  hyper
tgatgtcatggctccgtcttaaaggggacgcgggcggcagaaagtggagctgggctggtgtgcgcgcggccggagtctgtggagctggaaattcaccggtccaggaagacgtctttcccgcgtcccagcaccgg

SEQ ID NO: 37790 - DNA, 30 bp, Homo sapiens
  chr2:98612516-98612546
  hyper
gggccccacctcctcgtcccgctctcggag

SEQ ID NO: 37791 - DNA, 636 bp, Homo sapiens; identical to SEQ ID NO: 1680
  chr2:98703182-98703818
  hyper

SEQ ID NO: 37792 - DNA, 74 bp, Homo sapiens
  chr2:98962826-98962900
  hyper
caccttactttcccacggagagggaggccacaggctccttcagcagtcgccgagcagagtcctgggccgggagc

SEQ ID NO: 37793 - DNA, 450 bp, Homo sapiens
  chr2:98962973-98963423
  hyper
cggagaagctcaaactttggcagggtaaggatttttaggggctcttgagctggaattttttggggggcgccgggaggtgtgctggggccgcagaccccatacaggaggtaagttagagaaccacacgcaggggagggatgctgctgcttccaggggcgggcgcggcgctgtccgcagcccccggtgctgaaacgggccgcgggctggagagaaagtgaaaaaggatcggctacggcctcggctcccactccccggctcccatacccctccagtccagttcaaaggacaggaagccctccccgtgctccccaagccgatcgcacccccttttactcacgtcccacagccgcgctgggccgagcccgctgagccgtcggggcgggaggcagaaggagcagggctggctcccgctggggacgggtagggcttgcagccgcgaccccaccccat

SEQ ID NO: 37794 - DNA, 188 bp, Homo sapiens; identical to SEQ ID NO: 1682
  chr2:98963637-98963825
  hyper

SEQ ID NO: 37795 - DNA, 456 bp, Homo sapiens; identical to SEQ ID NO: 1683
  chr2:98963868-98964324
  hyper

SEQ ID NO: 37796 - DNA, 31 bp, Homo sapiens
  chr2:98964752-98964783
  hyper
tagctgggactttggccgtgactacgtgtgc

SEQ ID NO: 37797 - DNA, 30 bp, Homo sapiens; identical to SEQ ID NO: 1684
  chr2:99061368-99061398
  hyper

SEQ ID NO: 37798 - DNA, 30 bp, Homo sapiens
  chr2:99224749-99224779
  hyper
ggagcgcccggccgcgctacctggaccaca

SEQ ID NO: 37799 - DNA, 101 bp, Homo sapiens; identical to SEQ ID NO: 1685
  chr2:99346430-99346531
  hyper

SEQ ID NO: 37800 - DNA, 258 bp, Homo sapiens; identical to SEQ ID NO: 1686
  chr2:99346574-99346832
  hyper

SEQ ID NO: 37801 - DNA, 149 bp, Homo sapiens
  chr2:99439368-99439517
  hyper
ggccctgggggccccttctcctcatccgggagcacgggcggcgtcggctccgcttccttcgggacactgcgttctggcccgtcgcgagcagagggcgcctctgaggtggcggcggggtcagtctcggggggagtcgtgtccccctcagg

SEQ ID NO: 37802 - DNA, 283 bp, Homo sapiens; identical to SEQ ID NO: 1688
  chr2:99553384-99553667
  hyper

SEQ ID NO: 37803 - DNA, 30 bp, Homo sapiens
  chr2:99770996-99771026
  hyper
atgtaaagacccagcgtaatacctgtatgc

SEQ ID NO: 37804 - DNA, 30 bp, Homo sapiens
  chr2:99771969-99771999
  hyper
cagtgcagaggtagcgaagtgtcccaagaa

SEQ ID NO: 37805 - DNA, 204 bp, Homo sapiens
  chr2:99797343-99797547
  hyper
gcctgcggataccgcgactccgaatctagttctactgcccgctttagcacagtggctgcagctgtgctctgcgggtcctgcctcagcccggacttcgccataattctggaagttctcctccgcctcaacccaggatgaagttgagcgggtctgctgcgcttccgggaagtggtcatgtgatacccaggcgcctgcgctctcttt

SEQ ID NO: 37806 - DNA, 93 bp, Homo sapiens
  chr2:99952954-99953047
  hyper
tccgggtacacggccgaactggaaggccgcaaagcattgtgggagttgcagtttcttagtgcgcaggctgtcgtggccggactttctcaggag

SEQ ID NO: 37807 - DNA, 30 bp, Homo sapiens
  chr2:100106966-100106996
  hyper
actgtgtgaagatgcgccagacgcccgggt

SEQ ID NO: 37808 - DNA, 825 bp, Homo sapiens
  chr2:100721080-100721905
  hyper
cccccgactccgggccggccgggctggctgcagcggccggcgcactcacccgctccccggcttgcgcgcaggcacactcaagagagagcagcgagctcgccgcgccgccgccgccccccgcccccggccctgcgcccgcccctcctcccctccctcgcggcggcccggcccgctgctgcagccgccgccgccgccgccgccgccgcggtgctctgcgcccgcccgcccgcctctttctcctccgggaggcgcgtgtgcgcgggcgaggccgaggcgcgcgcgcaccgtgagccccgcgccgcgcccgccccgcgcgcccctgtactccccgcgccgctcctcggggtcccgcggcgctcgcaggccgcgccgccctgccgcccctctctcgtggcttttacggcccgcccgcccctcagcagccctggggtgcccggggcggccctgcaagcgggagagagcggcgaggcggcggcgccgagtgcggggggatgcggagccgtgcccggccctgtcgcatccctcggccgcccgcccgcgcccggccccgcccggccttgcccgggctgcacgcacttctcccgcggcccagaatccacttgaccctgctgggcgctcccgcgggcggcggacccgggtgggtgcgggggaattccccggccgcccaggcgcggggagagtgagctgtgccgcccgcagcagcgccccaaacaaaccgtttaaggtctctggagcccgcaagttcagcgaaataaagcggcggcgcggaggaaacctcttccacccggacctgctctccgttgcggtttggcctccagtggtggt

SEQ ID NO: 37809 - DNA, 30 bp, Homo sapiens
  chr2:100898038-100898068
  hyper
acaggcaggtttgggcgatgaatggaaaaa

SEQ ID NO: 37810 - DNA, 392 bp, Homo sapiens
  chr2:100898413-100898805
  hyper
acccggttcctgatgcgtgatgtttctaagtgctcagtaagtaccaatctactcccacactgcagtatgtgggcgtgtgatgctgaacagagagagcacgatgtgatcatagttaattccctctggtatcaaaaaaataaaaacctatcaaaaaataaaaacgtatgttgctctcgtctgcgtcatcattgttgttcagacttttacataacatgccgaaggagaagactcagaaagccaggcagaatcatgaagaaataactgaatagttctgattccaagaactgtgtgaccttatgacatttaaagagtgaggaagagaaagcaacaggttccaagtattatagcaagcataccagctttacttcaggaaggctcgtggagaagctgtg

SEQ ID NO: 37811 - DNA, 451 bp, Homo sapiens; identical to SEQ ID NO: 1690
  chr2:100937758-100938209
  hyper

SEQ ID NO: 37812 - DNA, 215 bp, Homo sapiens; identical to SEQ ID NO: 1691
  chr2:100938329-100938544
  hyper

SEQ ID NO: 37813 - DNA, 235 bp, Homo sapiens; identical to SEQ ID NO: 1692
  chr2:100938574-100938809
  hyper

SEQ ID NO: 37814 - DNA, 199 bp, Homo sapiens
  chr2:100938984-100939183
  hyper
cgcctccccgcagaggtgccggggccctgggagcaggtggccttggccgcgggctgctggcgcgccggcaccgcggcacctgctcttccccagaggcctggccgcccccacaacctgtggctccgcttaagcaagaacccaggaaaagtcaccaaacgcatcacgcatctctagcttcgacttaggaaattgtcctaaa

SEQ ID NO: 37815 - DNA, 197 bp, Homo sapiens
  chr2:101033435-101033632
  hyper
tgactcccctcgcaccgaagctgcacatgctccttcttccctgccttcctctgcatgctccttggacccaagctgaaccctttcttcctctctccatctacaattacaaacgcaaattctcagccaaggatgaaagaagtaaattgtaggctcgcacaatatcaataattccgcgggtcacagcatcccgcacaagg

SEQ ID NO: 37816 - DNA, 540 bp, Homo sapiens
  chr2:101033731-101034271
  hyper
cgccaggacaaaacccgcgggttccccggtttttccgtgcgccccgcggcggggagaggggcccaggcgctgaaacccacccgcctgcgcgtccccgagctcaccctactggagcggcgctcgtccgggtccttaggctcctcccctggccctgggggcgccgcgcgggtcgggcttcgccgggcctgtgggcgaagcgcgcggggtcctgggagctcgggaggcccgccccaccttgccccgaggcctccgcgccgcggcccgtcgggtcccgggatgtggcggcggcggcagcggaagtaaggaagacgcccggcgcgctagaccggctttgggggccagaacgccggcaccgcctcacgcggccccctcgcgcctatccggccgtgcgcgccgcctgcccgcgcgcgtccccgccgccgtccccggccgtgcgcgttccagcgggtcgcggggagtggggaggggcgcggccgcgggaccccaggcccggatcccgagtctccctttctgccgctgcaaaagcgttctttctgaccg

SEQ ID NO: 37817 - DNA, 30 bp, Homo sapiens; identical to SEQ ID NO: 1696
  chr2:101179215-101179245
  hyper

SEQ ID NO: 37818 - DNA, 400 bp, Homo sapiens
  chr2:101435151-101435551
  hyper
aagggccagcgggggcgctttccttccagggccacttgccggaatgtaagagggacggagagacgtccggaaaaggctgccacgctcggagcgctgcgccaggccaggcacctaggccaggggagcggagacctcgtgggagcgggcagggggacctttcccctctcccgggcttccacccaggcgcctccccgctgtgaacgccgccgcccaggtgaaggggaaaccggccacgtttccggacctcggcggggcacacggtctccggttttcaccggctctgtcttggagccccgaagggcatcagacagcagccccggcacccggggattattcctgtacctctgcctccctccgcttggcgtttgcgggaaccttggtaaaatcctccctgtttctc

SEQ ID NO: 37819 - DNA, 796 bp, Homo sapiens; identical to SEQ ID NO: 1699
  chr2:101435590-101436386
  hyper

SEQ ID NO: 37820 - DNA, 802 bp, Homo sapiens
  chr2:101436605-101437407
  hyper
cggaagagtttgccgcgcgagcagccggcctctcgcaggagccgagggacccgcgcggctgcggcccaggagcggcggccgcggagcccggagacccgcagccgcggcggcggcggcggcggcggcagcagctagagcagcgcctcccgccgccgcccgggaggagctcgccgcgcccgctcgccgcctcgtctcccagcggcggcgggaggcgcgtctccccggcccagtccgcgcccggccccgcggggccgctccggcccgctccgaggtaaggggccgcgcctaggggcgcgggggacccagggtgggtagtacgtgcgcgcggggtcgcaggactcggtcacctgctcgccagcgtggaggacgcgcgggggcggaggggcgctcaggcgcgaggctgcgcggcaccggggaccccggacgcgggggcgcggagaggtgggttcccctccacagtcaggccgctgggggcttcgcgtcctgcaggaggtagcaatcgctgggccggtgggctccgggcgcgtctcgacgcagaagacagaggactgggcatccgagcctcggaatttgggggtcctcggggtgtccgacagggtggagaaggatcgtgccccagggcaacagctttggggattgcccgtggttgtcttcgagacccatcgcgctaccctccgaaacgtcgggcgtcctggacccccggagagtgcggcgtgcgcgccctgggcccgcggtctctcggagtccctgggtcggaattggttccgggccggattgggtgcggaatcggtgcccccaaccc

SEQ ID NO: 37821 - DNA, 705 bp, Homo sapiens; identical to SEQ ID NO: 1701
  chr2:101767138-101767843
  hyper

SEQ ID NO: 37822 - DNA, 956 bp, Homo sapiens
  chr2:101924526-101925482
  hyper
ctgaagaccccagcctcggctgccgcgaagtccccctcccgtcctcgcgccccggcctgctcacccgcgtgagacatgggcaaggtgatgttcccgtagcgctcctcattgtagaggacgacggccgaggcgttcctccgcgccgccaccagcaccttgtccttgaaggtgcagcccccacgagccaccagggcgacccagggcgcggcccctcggccgccgggctcgggcacgaagaagcgcgtgtcgggcgcgcagccctcgaggtctccgccgggcgcccacgggacgcccaccaggccatgcgcgccctccttgggcgagctgtcgccgaagcggccactctccgagacgctccacaccgtcaggttggtctgcgggtccacgtactcgatgtttaccacggccgagaaccactcgagagcccggccccgggccccgggcacgcacagggccagggcgagcaacgccagagccaacacgccgcgagccccgacgctggcttcgcgccgccgccacgccatggcagcaccgctgagctgactagggggagtcagggtcacgcgcgagtgcggtgcagtcgaagagcagagagaagcggacacccaccgccgccctggaagactgaggcggggtcggggccgctgcgcacgcgcacctggcggagtggacgaagggcgtgatcggccctggctccgcccccgtccgaccggccgcgttgtgcgcaggcgtaagctccgcggagcctcggaccgcgatccgtcccgggatctcaggcgcctgtgggccgaggcggggcgcgcagcctgtaccacagcttgcgccacggcggaccctgtggccaggggccaagtttgcgcaataggacgtctagcacccccaaagtgaagggaagtaactccagagaaacgggaagcttccctgaaagcaggtgtgggaccgcagttctgtaaaat

SEQ ID NO: 37823 - DNA, 921 bp, Homo sapiens
  chr2:102003345-102004266
  hyper
tcccatccagggcaccgggcacgtctggtggacccggatctcagtcccgagcggtcgcgagcacgtccctgtccccgtcccccggccgccgcctgaatgccaggccccctcgcgctccccgccgggcgctcaccttcttgtgggtggacacggtggccaggcagccccagacgctggcatgggccagggagcgggcggtggcggcgcgcagtctagggcccgggggcgcactggccgtctggccgccctcgcgccggtaggagaacatcccgggtggcgcggggggcggcctggcccgggcggcgcccgcccggggccgcaggtgcgcgtcctccttgtgggcagaggcggggaagctttgctgccagatgctgcccgaatcctctagcagcgcgggcatagcctcctcagtggaggcgctgtccagctcctcgtccacctcgttggtgacggcccaagacacggagctcacgatcacgtagcccgcggccggggacagcagggcgctgcagcacagcagccaggagaggcgggtccccggccgcgccggccgccggccgcggcgcacggacatcttgcaggcagcacgcccggccgccggggccgccagcagcgctagtgccggggagcccggcagcgccccactgcggcggaagcaaggagcccgagcccccttcccgcccctgcaggatccccgggcgcggtcccccgcgcgagtcccggcgaatccctgcagccgcgcgcgaagctcagaagtccaggctcgcagaagaccaggttccacgcacacgccgcgcatcctgcggagtcctcctcgcgcgccaggtcccgggatgggttcgtttcctgcaggatggcacaggttccgcagccagagggtgggcgttcaaatcccggcttaatacacgcgtctgctcaaca

SEQ ID NO: 37824 - DNA, 819 bp, Homo sapiens
  chr2:102090422-102091241
  hyper
ggaagtcacagatgggaagcccggccccatcgccgattcgggcccggggcttttacgcgtgtgcgtgcatggcaggtccctccgcgctgcggcgggcgagcatcagaaagcgctgggcctggggccgctcctcacacccggctttgacccggcgtcccgagggcagccgtagcgggaaccacgcttcccctccccggccccacctcctccatcccagcgtcccaggcgcctggcggctcaccactggatgacgccgctgtgcgggccccggctaccctcgccgctcgacggcgaggccggcaccccctcggccatggctcggccccgggcctgcagcaccgaggcaggcagcgagcggcggccgtgggcggcgctgggttgcaccggtcctgctaccgccgctcctcggtgtttactttagaaaggagcgcgcggggggcgcgcggggcgcggggcgggagcccagtcctccaggcccgagcccgggggcgcggaaggcgcgcggcgagtacgggaggccacagctccccaacccccgcgccccgccgaggatgcgcggaccccgccctgcatcctgcggtgtgggctggagctgcctcccgctctcacccagcgcccttcccaccggcgtagcaaccagtcaaacagggacgcgaacaacaagcaccaacttacaccttttccaatctggtcgcggtgttgagtccgtgggtgtccttgacttgcttgagcgttggagttattcaggcagttttcaaaaatattgataccccggctgccgctccccatcccagccccgccccaccccaccccaagagg

SEQ ID NO: 37825 - DNA, 332 bp, Homo sapiens
  chr2:102313749-102314081
  hyper
caccccagctcctccccggggaaatcccagcccgcttcctccccgctcctgcagttttcgggagcgccgtgcggggtcgagcgcggaggccgcaccctgggcgccgggcgtcgtgtcgggaccgctgcccgcgctgcccgccggcgcggccattgttcgagccccacccctgatgaatattcacgccgcgcgggcgcctcggcccgcgccctacccggcagggctcggggtgtgagtgcgtttccgccggtttttcctgcctgaggaggaaagggggagctgttttctctctcctcagaatatatttttggtgtcccgtttctcctcctcca

SEQ ID NO: 37826 - DNA, 153 bp, Homo sapiens
  chr2:102314091-102314244
  hyper
cgccccctccctccccacctcgctccccgcctccgcctccgcctcccgggttatctttgtctcgctgcctcgcgctcactcgctcaactcggcgccgccgcggccccacgctccgggcccgtcctcgaggcgcgcggcgcggggcgcgggcgc

SEQ ID NO: 37827 - DNA, 160 bp, Homo sapiens; identical to SEQ ID NO: 1706
  chr2:102314986-102315146
  hyper

SEQ ID NO: 37828 - DNA, 189 bp, Homo sapiens; identical to SEQ ID NO: 1707
  chr2:102637362-102637551
  hyper

SEQ ID NO: 37829 - DNA, 129 bp, Homo sapiens
  chr2:102720909-102721038
  hyper
gttaccgtgcagtggcgggtgttggtgtttcttaagggtctggcacgtttgctgagtgattctggctgtctgcctggctctgagcttcctgttcatagttccccagatgtgtcacggccgagggattaa

SEQ ID NO: 37830 - DNA, 64 bp, Homo sapiens; identical to SEQ ID NO: 1708
  chr2:102972743-102972807
  hyper

SEQ ID NO: 37831 - DNA, 1297 bp, Homo sapiens
  chr2:103235355-103236652
  hyper
caagaggagagaacaggattccgattccgtgggggcgtgggaacactgagttccgcgcagggagtttccctgttcagagcaccttgtgcgcgagttgataactctcggaaaggaaacaaaatttggctttcctaaactttctgtacgtccagagaatcccatgccttgtcttggcctccgcagcgccaggctggggtgacagcactcctcctccaccggcccgggcttctcctccggaccgcgagcctgtggcgcctccccgcgcgcccagcgcaccggggtgtccccttggaggagcctgcgggggcgggggaggagggaagggcgcgactcgtgggtcgcgctggttccttcactggatggacgtccgacgctgcctccggggcggagacagctccggccaccatgcgcccgttgcggcgattccacccacagttcgctggctctgggggtggcgggtcttggcgcgcggtgcctgcgcgaagggagggcagccatcgcccccgcggtcactggggccccgcgttccccgcgggctcgggcaggtgcgcggtgtgccggccaggtccccttgtcctcctgccctgcggcttgggcgccgcgcccgccccgcccccgcccgcgggccgccctgggcagggcctgccgctgcggctggagagcagcgcaccggcatgggcaggcggccggcggcggagggcggctgagggctgctgagggtacgcgcagcggcctctcgtcgccctgcacgtgcctcgccaggcagtgcgcctgctcgcagcgaggacctagccctctggttgcagagacccggtgccgcagcagcggcgggtggctgtcgctgccctgccctgcacggggcagggcggagcgggctgagcagcccgggcgcgatgcgttgagcgctcggagggccaaccgccggtccccttggcggcaaccggcggcacccatggaaccactgggcaactggaggagcctgcgggcgccactgcctccgatgctgttgctgctgctcctgcaggtggcggggcccgtgggcgccctggcggagaccttgctgaacgcgccgagggccatgggcaccagttccagcccgcctagccctgcgagcgtggtggctcccggaacgacgctgttcgaggagagccggctgcctgtgtttacgctggattacccccacgtgcagatccccttcgagatcaccctttggatcctgctggcctccctggccaagattggtgagcgaactggacttgtggggaatgggagggggcgatctcggggggacacctgg

SEQ ID NO: 37832 - DNA, 24 bp, Homo sapiens
  chr2:104069671-104069695
  hyper
tatgcaggccgtgcacggtggctc

SEQ ID NO: 37833 - DNA, 177 bp, Homo sapiens; identical to SEQ ID NO: 1710
  chr2:105458974-105459151
  hyper

SEQ ID NO: 37834 - DNA, 565 bp, Homo sapiens; identical to SEQ ID NO: 1711
  chr2:105459902-105460467
  hyper

SEQ ID NO: 37835 - DNA, 149 bp, Homo sapiens; identical to SEQ ID NO: 1712
  chr2:105460915-105461064
  hyper

SEQ ID NO: 37836 - DNA, 250 bp, Homo sapiens; identical to SEQ ID NO: 1713
  chr2:105461163-105461413
  hyper

SEQ ID NO: 37837 - DNA, 112 bp, Homo sapiens; identical to SEQ ID NO: 1714
  chr2:105461555-105461667
  hyper

SEQ ID NO: 37838 - DNA, 204 bp, Homo sapiens; identical to SEQ ID NO: 1715
  chr2:105461699-105461903
  hyper

SEQ ID NO: 37839 - DNA, 30 bp, Homo sapiens; identical to SEQ ID NO: 1716
  chr2:105462231-105462261
  hyper

SEQ ID NO: 37840 - DNA, 30 bp, Homo sapiens; identical to SEQ ID NO: 1717
  chr2:105467129-105467159
  hyper

SEQ ID NO: 37841 - DNA, 1299 bp, Homo sapiens
  chr2:105468557-105469856
  hyper
catcttttatatatacatatacgcatacgtaaatataaaaagcaacctttgggggccgcagaggaaaaaaatccgttctgtttggggtttggttaccaccgcctttggtatctataccttggcaataatggctttgctaaaacctacctacgatggtatctcacccggcaagcaggagctggacaagagcctacataaattctacgcgtctagtgttaatcttgagatcacgcgggggctgcctggctgcggctgggcaggagaactcctgctttcactgagttcacttaactgcgctcggcagaggcacgatacagcgggagagaagggcaggcccgttcacattttaatcggagcgcaccggcggccgctcctcggctgcgtcctgggctgccgctcgggctcgggactgccagatgcaggctctggctgggggcggcgggcgcaagcgggcgcacccgcagctaggggtgcggggtgcacgcacacgcacgctcattaagagccatgtatttattgaatgtccgagttgggttagttcattggaaatccccgaggagggctcaatttgcccttgttttcgttgccactttctcttttttcttggttcgctgaggttcctctgtgcagcgtttccgcttggccgcgtccccccaccccaccccaccccacccccgcttctctcgcctaccgggtgcactccccctcccatcccccttaactctttcagctgggttagagctgagaaagcatttgtcgccgccagccccatccaccacgcaaatccatctgagacagaaaggaaagaaaaaaaagcaccaccatgcctaagaatagagagcgagcaaacccccccaccgctaatcacacacacacacacacacacacacacacacacacacgaggaagcggtggagcagagaagggcgcggctagccgatcccggttctttcgcccggctcctgctgccacagggaattcctaaagccattggggtcgaatacacttacgatgaatctatgggggaaggtcggactgattgcttttcaaatacatcgcacggctccgctgaccggcaccctccaaactcacaagggcacgcacgctacttgcacgaatcccagaggagggaggagggaggaagggagggagagcgaaggagggagagagggggtggaggagccagggagcggcggcagcgagcggtccgtctcgcacgcgcgggcaccgcgctggtcctgggctgcaggtttcccagatgatggcatccgagaacttaaacaaagggggctgccgccg

SEQ ID NO: 37842 - DNA, 929 bp, Homo sapiens; identical to SEQ ID NO: 1719
  chr2:105469880-105470809
  hyper

SEQ ID NO: 37843 - DNA, 217 bp, Homo sapiens; identical to SEQ ID NO: 1720
  chr2:105471236-105471453
  hyper

SEQ ID NO: 37844 - DNA, 462 bp, Homo sapiens
  chr2:105471963-105472425
  hyper
gcggcatggccacggcggcttctaacccctacctgccggggaacagcctgctcgcggccggctctattgtgcactcggacgcggcaggggctggcggcggcgggggtggcggcggcggcggcggcgggggcggcgcagggggcgggggcggcggcatgcagccgggcagcgccgccgtgacctcgggcgcctaccggggggacccgtcctctgtcaagatggtccagagcgacttcatgcagggggccatggccgccagcaacggcggccatatgctgagccacgcgcaccagtgggtcacagccctgccccacgccgccgccgccgccgccgctgccgccgccgccgccgtggaggcgagctcgccgtggtcgggcagcgccgtgggcatggctggcagcccccagcagccaccgcagccgccgccgccaccgccgcagggccccgacgtgaagggcggcg

SEQ ID NO: 37845 - DNA, 1272 bp, Homo sapiens
  chr2:105472712-105473984
  hyper
ggtggagcccagagcttggtgcacccggggctggtgcgcggggacacgccagagctggccgagcaccaccaccaccaccaccaccacgcgcatcctcacccgccgcacccgcaccacgcgcagggacccccgcaccacggcggcggcggcggcggcgcggggcctggactcaacagccacgacccgcactcggacgaggacacgccgacgtcggacgacctggagcagttcgccaagcagttcaagcagcggcgcatcaagctgggcttcacgcaggccgacgtggggttggcgctgggcacactctacggcaacgtgttctcgcagaccaccatctgccgcttcgaggccctgcagctgagcttcaagaacatgtgcaagctcaagccgctgctgaacaagtggctggaggaggcggactcaagcaccggcagccccacaagcatcgacaagatcgcggcgcagggccgcaagcgcaagaagcggacctctatcgaggtgagcgtcaagggcgcgctggagagccacttcctcaagtgccccaagccctccgcgcaggagatcaccaacctggccgacagcctgcagctcgagaaggaggtggtgcgggtctggttctgcaatcggcgccaaaaggagaagcgcatgacgccgcccgggatccaacagcagacgcccgacgacgtctactcgcaggtgggcaccgtgagcgccgacacgccgccgcctcaccacgggctgcagacgagcgttcagtgaagccagggcgcagagcgaagagggccgccgccgccgccgcctccgcagccgccgtcagcaccgccgccgcccctgccgccgccgccgccgccgccgccgccgctgccgccgccgcgccgaccctgcacctgggccgctccgggctccagcccaggcccatccgccgccctcccctccacccagagacaggcatgcccgcccttggaggagaaaacgcgggagaaacggaccaaggaggcatttttgcagtccaaggaaggaggggccaaaaaataaaaagcataataaacacccagactgttttgtatacatatataacaaacaaaaccggaagagaaaaagggggcgatcatgagatctcgttcatactgtggtggtgtttcgtttttgtttttgtttttaaagaagggtgaagatgcctgacgcacgaaaactgcactcgtgaggtttttccaccctgagatgacctacacggcagcggtggacagcacctgcctcgtcttctcctctttg

SEQ ID NO: 37846 - DNA, 689 bp, Homo sapiens
  chr2:105478380-105479069
  hyper
agcagaagcctctgcgtttgcatcctgaactttgcagcctaggaaaggaaatagtgcgcaggctggaggagctgggggtgggggcagcggagatagcaggaggggtacttgtgtaatcagattctttgattttgttagcctggctcatggcctattaattagattactctctctttcattcttgatttcacatccgtgtttgttcctgtatcctaaaatgcgggcgcgagcttggcgagcaggagcctatgatgtcactgccggccagaggcggccgcctggccttctggcgggctgtgcgctgcgttcttgatgagtccggtcttcctcaaggaagagttggctctggaagtgacctcagaggggtctgggaagagggcaacagtcattctcttggcggcacgatgtgtgcgctagtgtgtgcgcgcgcgtgccgtgtgcatgtgggtgcgcgtgaggggagggggaagcggaaattcgcagtctggaccccgaagccctaggggtacaggcgacggggtcaggtgtaaggcctgcctccggtgaaaaccccggatcagaagaggcggagggggagggggacccgaggcagccgggcgtccaaagctcgcttctctccgggagggagggcagggctgggcgcggaggtggggcggtggcggtcgcggtggggcggccgggtccctgct

SEQ ID NO: 37847 - DNA, 30 bp, Homo sapiens
  chr2:105479372-105479402
  hyper
aatggcttgaaacgcgatgttttgttcatc

SEQ ID NO: 37848 - DNA, 448 bp, Homo sapiens
  chr2:105483551-105483999
  hyper
gcagtagcagcattgcgccgctgcagcatcccgaggtcacattcagaaagcccgttcttccaggacagcatcgccccaatactgcaggcggggcgaaccgtgtttatctgccccaggcacggaggggagattgtaaccaaaggaaaagaatctcgcagaaggggatctggaagagggcagttgatcctgggcagatcccctgcgccgggccctctccgctgggggcgagcccggagggaaccgaggggcccgggagggggagctgctgaaggcgcgcaggctgacaaagctataacaaaggctccctacaaaactagtactaaggatctttaaaggatcacacaccttgcaggcgtgtccccagctcccgggacgcagagcccgctgactgttcccccgggctccgcagacgtgcccgggttgtcagaggtgtggggctggaagtcca

SEQ ID NO: 37849 - DNA, 340 bp, Homo sapiens
  chr2:105484038-105484378
  hyper
cgggtaggggtaggtgcccgcgcctgggcccgcggggctttggtcatggctgttccccgggaggctcagttaggcagcagccttgctgggcaacaggccccgcccttggttaatccgggaaggtcgcgggctgcaatctggcctgacgaggcaggccctgaagtctccccgctgggcgatcagaagagcgttcgagaagccgggagctggtggggttggcagggcgtctgagtcacccgagctgcagaacggacgcccccacgacgcgctgtgggcactcacagcggctagttgggcatttcccagcagccaaggctgcgcactccgcccccgctgaggt

SEQ ID NO: 37850 - DNA, 1705 bp, Homo sapiens
  chr2:105488275-105489980
  hyper
aaagaaactcaatgctcaatgcgaacgcagaaagaactcaacaactgaaccgccagtggaatccagtatctgggcaagttcactttattccttcgcaggaagagggtcagcgacggccagcgaaagtttcccccgctctttgaagagggaggtgacaagacctgccagaccttcccacgcgcgggccgcctgggttctggggctttcgtgacgtcttccctcatcgcgctccccacccccgaacacacacacacagacacacacacacacacactcttccttgctcgggaaacttggcttcaacctggctccccctttcaaaaccccctggagaacttcccctgcagggatgccctgcgcccgccggctgcgccctccctctcctcagccctgctcctcctgtccgctccccggcgttctggactcacccggcacggtccttccattccacatacagacaggaaaccggcctcttcgggacaacatttgaaaccacattttatcaacatcatcaaagaccagagcacacacttcgggctctgagctctggagcccgcttcttgcagaaaaccgggtatgggggaagggctgcaggggcgagaaatcctgcttccaactgcgatttcagctttcttatggaaatgaacgcgacggcccgttcgccccgagcctccctcccgttcccagcccctcttcagcttaccctttcctcccgctaacccccgccctcccggtccccgagttcccgcggcggccaggctggtggggacgcactcgctctgcgcccgggtctcggcgcgcgcggaaacccaggccgcgggctcccctccgccccgccggcccgcgtgcagcattaaatattcatagggatgctactttcttaaaggagaacctaccgcgcgggaaagttcacagccaaggagaggcacaaaagaaggtctccgcgctggttctcaagggcgaggagacgcatcccttcttgacagtgcgcctccagactggcattaaggagaggactagggaatgggatcacctatcgtcaagtcacttattttagaggggtttggagaagaggtgaacttggtggtggagagaaagcgcgctccctaatcacctgttaaacagttattttaaaattagctgtcgcatctgacgccctagggtccccaagggccttttcataagggagtctgtttaacttcactggctttgggagcgagaaagtttgccctttgtttctggaaacacgcccacgcagtacgcttaggtaaccttacactgaacaatttccttggagcggctaaaaccgcaacaaccaaacttgcacctgcgccattctcttaaaaacagggcagcggctgtgagcgctgggccggtaagtaagggcagagaaaggggctgtcgtgtgcgtcccagctctccgacccgcacgtccgggacccctttccgcccgcgcaccgcggtcacttgcagccggcgctggctgcttgagcccgcggccgggtcgcccggcttctctccgggagagtggccagggcctaggcgctcgctcaagagggagagcgaagggaaaagaagaaagttctccgccggccgcgcgcagctcctcccgtgagcgcgccccagccctgggccggcccgacccgacccgcgacggggccacgcgtagtgccaggcaactcctgtgccctgtggccagccccgc

SEQ ID NO: 37851 - DNA, 133 bp, Homo sapiens; identical to SEQ ID NO: 1730
  chr2:105490035-105490168
  hyper

SEQ ID NO: 37852 - DNA, 30 bp, Homo sapiens; identical to SEQ ID NO: 1731
  chr2:105654400-105654430
  hyper

SEQ ID NO: 37853 - DNA, 30 bp, Homo sapiens
  chr2:105760360-105760390
  hyper
accgcggaggactgcgcccaggagggtggc

SEQ ID NO: 37854 - DNA, 30 bp, Homo sapiens; identical to SEQ ID NO: 1732
  chr2:105760875-105760905
  hyper

SEQ ID NO: 37855 - DNA, 84 bp, Homo sapiens; identical to SEQ ID NO: 1733
  chr2:106362017-106362101
  hyper

SEQ ID NO: 37856 - DNA, 30 bp, Homo sapiens
  chr2:106362532-106362562
  hyper
ttcagggacaaagccgagcgtgcgtggagt

SEQ ID NO: 37857 - DNA, 30 bp, Homo sapiens; identical to SEQ ID NO: 1734
  chr2:106685357-106685387
  hyper

SEQ ID NO: 37858 - DNA, 30 bp, Homo sapiens
  chr2:106810131-106810161
  hyper
gaggagcaaacagtcggagcgggggctctg

SEQ ID NO: 37859 - DNA, 30 bp, Homo sapiens
  chr2:107159440-107159470
  hyper
aggtccgggaggttcgcgttaatgtaccct

SEQ ID NO: 37860 - DNA, 42 bp, Homo sapiens
  chr2:107501992-107502034
  hyper
ctcagtcccccaacacagaaccggcaaatccgaatgagatgg

SEQ ID NO: 37861 - DNA, 398 bp, Homo sapiens
  chr2:107502087-107502485
  hyper
cggaaagtaaacccaaaagcggagtttgccgcctgccaactacataagaattaacactcgggtatttaggattctaaagatccctactaccccaaacattatagccacagagaaccagaaatgaacagaacacactttaacctttaagaagtgcagttttgtacgggggttggctgaagaaagacaaaaatcttcactcccttccagagccaaaagagccaaaataaaagatcacctttactgagccacaggggcacaactgtatccgcccgtccccaaagcgcaagccgtcctcccgttcgcttctccagaatttcctgcttttccccaaaccaccttcaacattccccacacacgggtctcgctcctaaacacggagtgtaactccgcgcacagca

SEQ ID NO: 37862 - DNA, 211 bp, Homo sapiens; identical to SEQ ID NO: 1736
  chr2:107502518-107502729
  hyper

SEQ ID NO: 37863 - DNA, 42 bp, Homo sapiens; identical to SEQ ID NO: 1737
  chr2:107502865-107502907
  hyper

SEQ ID NO: 37864 - DNA, 815 bp, Homo sapiens; identical to SEQ ID NO: 1738
  chr2:107503421-107504236
  hyper

SEQ ID NO: 37865 - DNA, 30 bp, Homo sapiens; identical to SEQ ID NO: 1739
  chr2:108160503-108160533
  hyper

SEQ ID NO: 37866 - DNA, 40 bp, Homo sapiens; identical to SEQ ID NO: 1740
  chr2:108603441-108603481
  hyper

SEQ ID NO: 37867 - DNA, 30 bp, Homo sapiens
  chr2:109150298-109150328
  hyper
ctgcaggctccatgcggagctcaggcaccc

SEQ ID NO: 37868 - DNA, 30 bp, Homo sapiens
  chr2:109403278-109403308
  hyper
atggagccgagggtcgtcaagccaccgggg

SEQ ID NO: 37869 - DNA, 30 bp, Homo sapiens; identical to SEQ ID NO: 1741
  chr2:109583297-109583327
  hyper

SEQ ID NO: 37870 - DNA, 543 bp, Homo sapiens
  chr2:109647968-109648511
  hyper
agcagtcggctctgcccgcctcgccgggctgcaccgagtccgcgggtctctagcgcacggcctggccccacgtgcggcgaggagggcgcagtgaagttctgctgtgtgcaccccctgcagctcggccgggaagcgcccgctggaggaacggagagcgccgcttcagcgtcggccacgtgggccgggctctgccggtggcaacctggacgcgctgcgggcgccggcgagacctgcgccaacgcctacctccgggccacaggcgggataaagctgccccactttgcccccagcgaagagaaccctccttcctctaagtattttcttcagcaactaagcttttctgtttgctcaatttcttgtcccgtgagcgctaccacccaccccccgccaccttcttcccctccccccacatccgttcactctctttgaccttttgccaaaactctgaacgctcgctgccctccctcccatttcctcaccgcgtttcaggagctgtaagttcttggtgttcaaaccccctacggttacgtaaacagaactctg

SEQ ID NO: 37871 - DNA, 1823 bp, Homo sapiens
  chr2:109744564-109746387
  hyper
ggactggaacccagcccttcccgacgggaacgcaaagcggccacgagggggcagcgcacggcagggaatcttcgccgccgaccccagcccaccgccaaacttccctgctgctctcggtcctcctgtacgtacttccgttgctctgacgctcccagaagccggggcgtcgggaaggagagcgcgaattcaccctcctctgcgcctccgtaggaaaaaattggagcgggggttcacgagactgcgccgcggcgggcgctagagcccctcgcacagcgtcgccaagggtgcggcgtggagccgggcgcctggcgccagggtgctggtcggcgggcagcggcgccagcctccgacccgcgactccggcgagccaaggctgcgccgggaggagtcggcgcgggccccggggtgcccccttcaactggagcgccttcccctcctgccttgcggcgcatccccacacctacaccggaacgaagctccggggctgtcacttctgcgcgcttctcggaaaggagtctgaactgggagcgctccggggggtcgtcggggaggatgcccgggcgtcggctgtgtccccaagctgctcgccggcgctggcgaggaaggcagtcgggataacgccgcccaaactttccttcgcagcagcgttggcaggaaacgtccctctctgaggctcacgaaaagccgaaaaagactcggacgcttggaggaggcagggccaagcctgcgcaggagaggttccccggagccctggagatgtcctaggggaccaggctaatcgccggcttgcgcccaagcgaagggaagtcctgcaggcacggcgcctccttccctgagccccgcagtgaccgtgacctccgcgcgcacccccgcgcacgtgctcgcggccgaggaagaggaacggtcctgctgaatcctctggaggacagcgactagcgagcaggccaggggcgcatggaggtgccgcgggggcggtgcggctcgccagctgcgcggaggagcgtgcacgccgcgccccggcctccccggggacctggccggccgctgcccgcacttcctgccgctggtctcccaggcgcgagccgccgcttgcagcacagaacccgttgagcttcgtgcccggcagcacccccggtcccccgcgcggggcggacttgcggcgggacaggtgtagcccgcagccgcaggcgctgcgctcaggactgggcgggctcggctggccggtccccgccacgcaggccggtccccgccacgcaggccggtcggtgagccacttcgcaccgccacagccctagcatcgggccaccagccggggtgaagaaagtcacggcggagcccggctccccagtcctgatgctggctgccggtggcgggctccacgccggccccgggacctaggcagccgcgcgagaccgctgcgggcgcctcccccatgctgctcggagcgtcctggctgtgcgcatccaaggcggccgccgctgctgcgcagagcgagggcgacgaggacaggccaggcgagcgacggcggcgtcgggcggcggccaccgccgcgggggcgggcgaggacatggacgagtcgtcgctgctggacctgctggagtgctccgtgtgtctggagcgcctggacaccacggccaaggtgctgccatgccaacacactttctgccgccgctgcctggagagcatcgtgtgctcgcgccacgagctgcgctgccccgagtgccgcatcctggtgggctgcggcgtggacgaactgcccgccaacatcttgctggtgcgactgctggacggcatccgtcagcggccccgcgcgggcaccagcc

SEQ ID NO: 37872 - DNA, 1543 bp, Homo sapiens
  chr2:110370720-110372263
  hyper
ccttggtactattaacgaaaatagttgtaaccacacttggaaaaccgctggcttactaacaagcgagataaatctacaaaagtaactggaaaggttcaaaacagtgaacaaacgcgttcttttagagtacaaaagagtcaaggcgggaaaaaaacggtttaaaatcccaatggaggaaaacttggacgaccacaccatcggataaaacgggagagcttttgaaaagccaggggagccgggctttctcccggcggcagggaggctcggaagtgctcacggctgcaaaagatgaccgctattcaatcagtccgcactgcgccttcaactccgttatagccgtaagagacccacaaacaccgctgtggatgtaacttttggcaaagaccgggaagtcgttcaagaactctcccaccgtcccgacgctggcgccgcgccccgcgaaccggggtccggccgcgcccaggctccgcagaggctcctctcccgccccaggcgcccggccgccgcggaagccggggagcactgggcgggcggggccggagggggcgcgggtcacaatcccgggccggaccagggggccggtgggtcgagggcgggaagtcccgcgggggccggggagcgcggggctggggccccggcgtcggcgggactcaccaggtgccgcgccacctcggaggaggccatggtcgcgggcaggggcacggtgaagcggctgtatcagcccggccccgagcggctggtcccggcgacggcggcgggaaggccggagggcagaagcaacgggcggggcgcgaggctaggctgcctccgcgacggggaagggacaggggcggggccgagctggaggcctccgggggcggggttggggcggacgccctgtggtgcgcgctgagcgttttgcctgcgccaagcgagcccctcacaggagctaccctcgacgcctgaggactgagcgtcagcgttggggcgggctgaaggagagctgggactccaggaagacggcgcgaggaatgcaggcgggaactgcggagcagtgattgcggccctcgcgaggccggaagtgggcgggccttgaggcgaggccgccctaggtaggtgtggccgagacagcggggagcggaagtgggcgtggcctggtggcgtgggcgcggggcgggggtgcggggggcgtgtccgcccgggcgcggcccagtgaggcggtggccgagtcctctggcctcagacgcgtaggctggcagcccgctgagcccgccagactccgccgccgtcgggagccggccgctgggagcccgtcgctatgggaccgcgctgagccgcccgctggcgggggagcagcgcggtcgaggatggaggggccggcagagtggggccccgaggcggcgctgggccccgaggcggtgctgcgcttcctggcggagcgcgggggccgggccctgcacgccgagctggtgcagcacttcaggggcgccctaggcggcgaaccggagcagcgcgcccgcgcccgcgcgcacttcaaggagctggtgaacgccgtggccactgt

SEQ ID NO: 37873 - DNA, 137 bp, Homo sapiens
  chr2:110372284-110372421
  hyper
cgccaagtacgtgcacctcaagaagaggttctgtgaagggccgtccgagccctccggggacccgccgcgaatccaggtgaccgccgagcccgaggcccccgacggccctgccgggcccgaggcgcgcgatcggctcc

SEQ ID NO: 37874 - DNA, 30 bp, Homo sapiens
  chr2:110927414-110927444
  hyper
taaaatctccaacagcgatgtattcttcac

SEQ ID NO: 37875 - DNA, 117 bp, Homo sapiens
  chr2:110962327-110962444
  hyper
atggggtaagggggcgttacaacctgggaaggtaagtaggttgggggcaagctcccaggattaggtggggtcacggtgggaaggcgcagtgcgcgcagctgcgtccgcctgtcgccc

SEQ ID NO: 37876 - DNA, 30 bp, Homo sapiens
  chr2:110962672-110962702
  hyper
caaatgttctcttgcggtggtcatcccacg

SEQ ID NO: 37877 - DNA, 30 bp, Homo sapiens
  chr2:111436544-111436574
  hyper
gaagatggggctcacgggactggactctct

SEQ ID NO: 37878 - DNA, 814 bp, Homo sapiens; identical to SEQ ID NO: 1747
  chr2:111490023-111490837
  hyper

SEQ ID NO: 37879 - DNA, 1140 bp, Homo sapiens
  chr2:111874607-111875747
  hyper
tgcctagcattggtccgccgtctcactgtactgaatttcaagaatcatggcctactgccagccaggtcaggaccgaaggcgctagtctggggagactggagcaggtctctagtggttcacctgttcggaggctcttcctgttcagttccctctgcgcgccagagggtggcaccccaggcactccagaggtggagaggaggggacgacaggggaggcaaagagagaggagcggagggaaggaccagggaggaaggaccaaggagggagctttaataaattctcagaccttggtctcgagttcccggctaatttgggggcaaagccgaccgaccccacgtccacgcccacccccttacgggaaaagccggggtttccactgggctaggtgtcagagttgggaatgtctaaaacaaaaaaggcttccgagggttattcatggccaacagtttccacaggagaatccaaagggaaactagtttccggggccgctgtgtgtgcgggtgcttggtgggctgaaagctgctgtcactagatggctgtaagtgtgccaacatctgacctgtcccattgtgttgtgttttgcagttgctggatttgtgcgactcggtgaaggatgatgcccggagggtgatctcgacctttaacattccacacacctacctccacgcaccaatcgccggaatctccaacccgcgggccgcgtgggctttctaccctgcaccgctgcagccgcggccacgggaagaggcgcgctcccggcggcccaagctgggagccaagctctaacgggtgtggcgggaagtgtggtggcccgccagcagctgccacgacgctcgctccaccgacgcccagagctgtggccgaggccgggggctggcacccgctgggccgccactctcggggattttggtggcaaagcggaggtcccgccgaggctggcgaggtgcgcggctggctgctaggaaagagatccagacggtcgcctggtgcgctggatccctgtgccctttccctgaaacccagcctggcctgactgcaacctctcccaacttcagtgccggatcccctagacaatcagggtgggctccccgctgcgagcgcgccccacagccgggtgccgccaaaggtctcctgctgtta

SEQ ID NO: 37880 - DNA, 714 bp, Homo sapiens; identical to SEQ ID NO: 1749
  chr2:111877552-111878266
  hyper

SEQ ID NO: 37881 - DNA, 30 bp, Homo sapiens
  chr2:111879696-111879726
  hyper
actcgtgtctgcggcgcaccaggagagaga

SEQ ID NO: 37882 - DNA, 86 bp, Homo sapiens
  chr2:111880645-111880731
  hyper
agagatgtgcacctcacggtgtgcacctcagagaagttctgtctgattcggtgcggcgtgcggtacgggagcgggagggagggagc

SEQ ID NO: 37883 - DNA, 30 bp, Homo sapiens
  chr2:112641877-112641907
  hyper
ccgtgcgactgatgcgaaccccgaagccgg

SEQ ID NO: 37884 - DNA, 31 bp, Homo sapiens; identical to SEQ ID NO: 1750
  chr2:112655268-112655299
  hyper

SEQ ID NO: 37885 - DNA, 638 bp, Homo sapiens; identical to SEQ ID NO: 1751
  chr2:112656486-112657124
  hyper

SEQ ID NO: 37886 - DNA, 22 bp, Homo sapiens
  chr2:112791985-112792007
  hyper
ttttgagatggagtctcgctct

SEQ ID NO: 37887 - DNA, 28 bp, Homo sapiens
  chr2:113012388-113012416
  hyper
cggacgtggccccggactgcctccaatc

SEQ ID NO: 37888 - DNA, 30 bp, Homo sapiens
  chr2:113033403-113033433
  hyper
gtctgtgtctgtgtcgctcactagtaaccg

SEQ ID NO: 37889 - DNA, 30 bp, Homo sapiens
  chr2:113239334-113239364
  hyper
agaggaagaggaagcgcttcttcattaggc

SEQ ID NO: 37890 - DNA, 631 bp, Homo sapiens
  chr2:113341820-113342451
  hyper
cccaccagctacagtcggagatttggagcgcttgtgtctgaggctcaatcccgtcaggtgccgcgcaactcagcggcgcattctctttggacccgaggcaccaccatactttccattgcttacttccgttaaaccccgagcgctgccatggcaagccggaaatagggatgaagcaatttagccagaagagggcggaagtggctactcagggcgccgccatgacgagccgggccggaagaagaggtagggcgccgccgtgacagattagtcctaaagggaacggggttgttagttcaattggctaccggaaaaaaccaggctgggctgggcgccgccatgacaaccgataccggaaaaggcgggtcgttccccccggacagccctacgccggcaaaggtctcgagatgtgagtagtgagagcgcctaccccatacgtgctgccgctccccttcttttacccagtgatctagacctagtctaggacctcgggaactaggaccagcctccctccttcttggagatctgaccctcaggattcagcgccttcgctcacgagctccaaccctccgcatgcccaagccccgccctctaagcgtttaggcctcgccccctctcgcgctgcttaggactt

SEQ ID NO: 37891 - DNA, 30 bp, Homo sapiens; identical to SEQ ID NO: 1753
  chr2:113469219-113469249
  hyper

SEQ ID NO: 37892 - DNA, 30 bp, Homo sapiens
  chr2:113522192-113522222
  hyper
ttttcttcaaacgccgcgcctgtagccagg

SEQ ID NO: 37893 - DNA, 4 bp, Homo sapiens
  chr2:114034670-114034674
  hyper
cgcg

SEQ ID NO: 37894 - DNA, 27 bp, Homo sapiens
  chr2:114035443-114035470
  hyper
ggctcccgggcccgggaccaccggctc

SEQ ID NO: 37895 - DNA, 89 bp, Homo sapiens
  chr2:114035830-114035919
  hyper
cgcgggtgggtcccgcgaatcccgtgctgacgctctcgagatccaaccacccgagcgcacgcacggacgctcagcggcgcgggggctcg

SEQ ID NO: 37896 - DNA, 237 bp, Homo sapiens
  chr2:115918655-115918892
  hyper
acagttcttatggtttttaaccgacctttaggagttccaccgacgtgacccaagcagctggtaggagaatctgggctggattcggaaggcgcagctacaggacgcccgctgccccggatcggaaggcgcagcacctcaggccacaatctcagacacgccctcgggtcccgacaggtgttgcccgcctcccacggggctccgggaccccggtccccgggctgccccctgccttctggg

SEQ ID NO: 37897 - DNA, 87 bp, Homo sapiens; identical to SEQ ID NO: 1757
  chr2:115919337-115919424
  hyper

SEQ ID NO: 37898 - DNA, 955 bp, Homo sapiens
  chr2:115919830-115920785
  hyper
cggggaagggggcagagaggtaaaggctgaaggtgccccggggaaccccggcgggcggcccaccgagggagggagaggcggccgggaccaaggaatggggcctcttggttccccattaacgcacgctgaagaaatctgctgcgctcctgacggccgctcaccgggttcgagccccgtcctcctatagccggggcgctcgctggccaaagcgacccgagcaggcgaatgacctttaggcggacggggttttccctctgctttcttgtttcttttgaggagacgggtgtgtgtttgtgaggtggggatgggggaagagtgtcccagacatccgtagtctgctgagcggaacggagcttggggagcggcgaggcattaacgattaagtggagccgggaaggcgctggctttggtgatgtgttgggtttggatgtgtcgcgtctgcacagatgaggtgccctgcgtgggctgagggttattcctgtctctttcccgtccgtctacacccgccaacccctttttgttttggtctttagaaatctgtagcataaccgtaccgtcgtggatccccatctcgtctctgtccctgatctggggtgattgggacttcggtgtcgctctttttccaaagttggagggtcgggagcgccgagacaccctggcgaggaggaggaggaggaggagggaggctgcgctgagccgggtgcaggtgcgctcacgtttgcatcaattaggaactccgggcagagagagctgcacttaggtcagggattaactgtggacccgcgggacccaagcgctggggtaggaggactggggatctttgttcggagtgcgctgcgaaggctgctggaggcggacaccctcccagcttattgctagcgtgggatagagggagcgcacgcggctaggctccagcagcgactcggcttttcgcgtattctaagcactgaagagc

SEQ ID NO: 37899 - DNA, 30 bp, Homo sapiens; identical to SEQ ID NO: 1759
  chr2:118771506-118771536
  hyper

SEQ ID NO: 37900 - DNA, 815 bp, Homo sapiens
  chr2:118981041-118981856
  hyper
ttaaaatattttgctttatcacgcctggcgtgaaaagaaccaagaacactgaacccagggcagcagcgaatcccacgccccacgctccctcttcccaaacctcaatatcgttgcttaaaatcttccgggcttattgtgaagccaagggcgcttggcatgggaagagagccgctcgtgatttatttgggagagggatggggttttggaaaggaaattggggggtttacaaggaggacgggtgggttttactcaacaacttattcttgggcgttttcgtggactggagaggagtttcgatcccgtctcgggctcacctgggaagccccctcctggcgcccgctttgtttggcgttcctttaaagcccggtgttggcagagcgacccacaatgaaacaaattctcattttatgacgtctttccccccgtaggagtccgaacaatgtctgggggcttggcacgcatgaagataaaagaattttattttaaatgcgatacatgtcaggattagacagcgtttcctttcagctaaactacagagcgaatcttcatttcctgtttcactgcttcccccgaaagaaacttttctttttctttttctttttctttttttttcttttctttctctcccccagcagagagtccgagagaaaagtgctgggcacagagctccccacgaggtccccggaaagcagacttagctcctgatcgttgtcaatctttgggcaacccggggcctcgcaacggctcgggtttagtgtgatctggggaggctgcagcccagttccggctaccgtgggcgcctgagcagagccggg

SEQ ID NO: 37901 - DNA, 202 bp, Homo sapiens; identical to SEQ ID NO: 1761
  chr2:118981945-118982147
  hyper

SEQ ID NO: 37902 - DNA, 143 bp, Homo sapiens
  chr2:118982253-118982396
  hyper
cggaggagccgggcgagaaagcccgaaaagggaggcggttatttacgaccggcgggttggagtctggcaccagatggtgggggtctgtcaggcccggccgccccgcccagcgccccgcaaacagcgcccggttggcagcgtcg

SEQ ID NO: 37903 - DNA, 632 bp, Homo sapiens; identical to SEQ ID NO: 1763
  chr2:119067605-119068237
  hyper

SEQ ID NO: 37904 - DNA, 546 bp, Homo sapiens; identical to SEQ ID NO: 1764
  chr2:119532058-119532604
  hyper

SEQ ID NO: 37905 - DNA, 255 bp, Homo sapiens
  chr2:119566151-119566406
  hyper
cagggttgagggttctccaatcgcagcaaagggcccgggctgggtgttgccgagcggtcctcggctccccggtggaccatgcccctccagaggtctggcccagcgtcgctctgctctgcaaaaaagtggctctccgctgatctcgaatgcaccagcgagcctccagattctgggtgaagccgattttggaaatccatatgccgccctagcaaacacatcaggattgaggttaccgcataagagcagcctgcagag

SEQ ID NO: 37906 - DNA, 522 bp, Homo sapiens
  chr2:119590773-119591295
  hyper
gatatggtacatggggctcctggctctccctgtgtaatgtgccccaagttcccctggattccactgaaaatagggagtggaagggtgggtttggagtgaggataaccaggatcgtcacactcacataagcacagaacctcagggatcttcagggctgacaccctgaacgcccaccactttccctagcccccagtgtctcagctctccaggcggggcctctgaggctagaccgctgtctcgcccagggatgctcgcggactgcggcactagcgaacgcgcaattcccttccccagggaagccacgcaggggctttccccgacggcgtctcacagccaagtgagcttgtgaacacggagacggccgaggatccgagacaaggagctcgctcgctcggtttttcccgggctgtgtttgccattcgcgggaataaatgaagcatcggtaatctccataaaagagctttcacgcttcattctctgaaactaagttgaggcttagacggaaaggagaaaagagacttt

SEQ ID NO: 37907 - DNA, 171 bp, Homo sapiens; identical to SEQ ID NO: 1766
  chr2:119591903-119592074
  hyper

SEQ ID NO: 37908 - DNA, 1388 bp, Homo sapiens
  chr2:119592575-119593963
  hyper
gcaggaaaagttcagttggcagcccttcgcgagcaggtcctccccagcccgcaccgagaaggcaggcgcccgggccctctgactccagtggctcagagccggctcaggactggcagggcgaggagccggcgggccgagccagcgagggtttgggctgcccgcggtgtgtgtgcaagagcgcgcgcctcgtgtaaccattcaggaccagttgaagcaacacaaataaagtcaggtctcttcagccttgctgtccacccctccccctcttcctggtttgaccctggcctggccgctctgaggcccagtttgcgcagccgacattgcgtggctactctcattaccaggggaagggcgctccccttttccctggtaatactccgggagcccctactcggaagcccaagagtcaaagggatacaggggtgactggagagcagcgggggacagcgtggcctcacccaaggtcagcgctggtccccacgtgtcggccgggggaggggaggggagcggacagtcggagcgttcggatgtccagttgagccgcggcgcggggcagccgggggcgcaaagttggaggcagggctgggcgacgaggagagagggagggccgggagccgaagggacgcccgggtgcaccccgctgcagaggccgagtccgagcggccggagaaggctggtcgcagaagggcggcctccggtgcaaaaaacggaaaccttggagcagaggatgaggaggaatacggaggcggggagcccacagaaaaagatgttgaggaaagaagaggagaccccggcctaaacaaatcgaaactgtgcaatgaacgtggcccgggagaaccgggggtgaggggcgatggctggagctgcggcccaagcacagctttcagacgcttgcccggaccctggcgcggggaggcggccgggactgcctttctgcgcgcgtccctggagagcgggtgggcaggacctgcgccccgcggtgggcaagaagatttggggtttcgcagttcctggggtcgggggcgggggtgaagtgccctcagagacctcggcggagccccagttgcgctcccatctccagcccccactggagagagggggtccagggccgtaccctcctgcggcctgggctgcgctgaccggaagtgcctgtaagaagcgccctccgcggaccgtgccgggcgcgggcagctccagccgggttggagcaaggccaagacgcccggatggggcgggccgtttcggcggacccagtctggacgcaggtgcgggaggaaagtgtgaggggggaaactgctgattgtgcggggataggggcatcttaatctgggaaaagatcggaatctcttgggacgctaatctgagacccgggtcggaggtgtagagta

SEQ ID NO: 37909 - DNA, 30 bp, Homo sapiens
  chr2:119594610-119594640
  hyper
cagagccgtgggtctcgctgcaggaaatgg

SEQ ID NO: 37910 - DNA, 1123 bp, Homo sapiens; identical to SEQ ID NO: 1768
  chr2:119599829-119600952
  hyper

SEQ ID NO: 37911 - DNA, 73 bp, Homo sapiens; identical to SEQ ID NO: 1769
  chr2:119600995-119601068
  hyper

SEQ ID NO: 37912 - DNA, 105 bp, Homo sapiens
  chr2:119602524-119602629
  hyper
ccccaaaaaggccccactgcccgttctgcatccgggacatgttgaagtgttgttgtatgtgtgtgcagaggcacggactcttgtaataaaatcgttcctagtctc

SEQ ID NO: 37913 - DNA, 357 bp, Homo sapiens
  chr2:119602828-119603185
  hyper
cgtggctacgttgttcccggccccctgccggaccgggtgtctggagtgctgatcttgggccaaagcttctgccgctctcccagacactgcgggccggggcgtcaggcaggccttggccttctctcccggagcccagctcaggtctcctcctcgggttcgccaagcgcgaggggcacacggaaaagtggtggaaggaaagccgagaaaaacaggcctacggatgccagaagtctgctggatgtgcgggtgaaaaaaggaaagcgccgcgcggggaggatgcgggaaccgttccgcggagaagctacggaggaaactggctctcatgcccttggacacgcttcctggcctgagcctgac

SEQ ID NO: 37914 - DNA, 408 bp, Homo sapiens
  chr2:119603628-119604036
  hyper
cagagttcaaaatcaaagaatcgagacccgagcctcctgtgccacgagctgtagcttctcgggtggtggccgcagaggccaggatcgcatagctggatgaacattcggttgtgactggaactggggtgaggaagcaggcgtgagagactggagtacccgaggccgggtttgctctccctagcgccgcagcttggcgttctggggcggtccgcggggccagaaggcatggcgcagcccggagttgggtactcaccggaggatggacgatccgaataacgtgtgcagtacacccaggcgggccatacgagaggctgctgcgagtcagttttgaccacgggcccgccgttggctgagcccataagtaggatagccgggttgccgtgctccgggtatttggtgccctgcgct

SEQ ID NO: 37915 - DNA, 44 bp, Homo sapiens
  chr2:119604049-119604093
  hyper
cgccgcctccactgccgccgccaccggtgtccgagggcttggct

SEQ ID NO: 37916 - DNA, 527 bp, Homo sapiens
  chr2:119604152-119604679
  hyper
gttcccagctttagacgcgcccgcgccggcggcggctggctgggagccgtcgggtgggccacagttcgcgtccggggcgcacaggagcgaggcagcgcctggcgcccgggtgcccaacgggtggacagggtctctacctgcggcagtctggcctctgtcacgctcgacccggcctcctcctcctgcgcctcctctggccgccgcagccaccagaagctgcggtggcggctgctcctttttgcagccgaagtccggcctcaggatgttgtcgatgaaaaagttggtggtgcggtgcagctgggccgctggctgcggctggtgagcaggcgccgcgagatgctgaggcggcgggggcggggggtgtggggggaggtgcgggtggtgggccaggggcggcaggcaaggcgccgcgggcggcgaggggggcgcaggctgcggggacaccggcacgctgtctccatcgctgccgctgccgctgctgccgctggcgcccggactgaggctcaggctgaggccgcccggagtcg

SEQ ID NO: 37917 - DNA, 227 bp, Homo sapiens
  chr2:119604689-119604916
  hyper
cgcgccgagggccgagtcgcgctgacttttaggttccggctgctgttcttccatgctcggccgccccgccgccccggccgccgcgccggcccccgcccccaccgcctcgctccccaccccactttgccagcggcccgtgggggtgcgcggaggaaggaggcaggcgaagcctcagcgaaggcacggggcgggtgcaggaaaaaagctcaggcgtctggcctggatcg

SEQ ID NO: 37918 - DNA, 198 bp, Homo sapiens
  chr2:119605271-119605469
  hyper
gggagagcgcgtctccgccagcgccgggctgtttttttttttttttttttttttttttttttcaaatctctgacagctcggatctttgcacaaactctctcgcttaaaaaaaaaatcacccaggcacactttttgccttcaaaccggaagcacgtgagtcagggccgcacgtgtgcggagccaatggcgagccgggac

SEQ ID NO: 37919 - DNA, 82 bp, Homo sapiens
  chr2:119605501-119605583
  hyper
cgcgcgcgggactttgcggataaataatccgggggcgtcaaccgctggcggagagggggcgcctcggcgctggccctgtgcg

SEQ ID NO: 37920 - DNA, 459 bp, Homo sapiens
  chr2:119606040-119606499
  hyper
ctgcgcctagctagcgtcgcacgtttacgtttgtacgtctcctgccggcccgctgcattgctttccctttgtggggaatccgcacccatgcccttcccggtccagactttcgacaacaccctggagctgccctggcgccatagagccaagcccagagggctaggaatagccccagagccagttgcctggaccttccctggcagtgggagtccgggcaacgcagattaatctcaggagggccccggggccggcgagtcagaacgcggatgcgcgctaggccctagcttttagagttcagggtaacctctgtgttagatttccctgcaaagtaaaatcaaataaatgaaagcgctgcaccccaagtatttgccctggctagctgaagttgtgaacagggagtttccctcaattgccgggtgactgaatttcctgggattgctcccaactccctgggtgcct

SEQ ID NO: 37921 - DNA, 130 bp, Homo sapiens
  chr2:119606630-119606760
  hyper
cgggaatgtgagggacgggggtggcgtgtggactgaagctctaggcacctgcgggacttgtctccggattcgttttggaggaccagtatccgactatgctgaagcctgcggtggccgagaaaggcgtcag

SEQ ID NO: 37922 - DNA, 181 bp, Homo sapiens
  chr2:119607442-119607623
  hyper
ctgcaggagacgcctcgagaagggctgcggaagataatttataggttttaattactcttcattccgcctgatcagcttggcgttcatcacaggcctgtgaataaaaccctggtcaaaagctctgtcacatcgcgctggcaagacgcttaatcaaagtgagcggccccgcgcgccgcgcggc

SEQ ID NO: 37923 - DNA, 289 bp, Homo sapiens
  chr2:119607847-119608136
  hyper
cgtccccccacctccccgaggcccggcctgggccggacgctcggtaccccgcgccgctctgcgctccatgacctccacccagaccctacgccctcttctccctcctgcaaatgaacatgccattgggaactctgtgtgagcgcattggcgtcttgtcaagcatgcgagtgaagtgtgtgagggctgagtgaacaaatgttggccgagagggatgggtgagggtttcacaggactctgagtgagcccaggattgggcgtgtgagtgaggaactacgggcagggtgagttg

SEQ ID NO: 37924 - DNA, 30 bp, Homo sapiens; identical to SEQ ID NO: 1774
  chr2:119608636-119608666
  hyper

SEQ ID NO: 37925 - DNA, 27 bp, Homo sapiens
  chr2:119609413-119609440
  hyper
gtgtagatcagatggcggtggggcctc

SEQ ID NO: 37926 - DNA, 276 bp, Homo sapiens
  chr2:119610098-119610374
  hyper
atgtccccatcatccggtcttcccccagagttttctccctcttatctaaggcagttcacagcatggaccgttttgttctagaaatagtgcctctctctctcctctctctctctcaagctcagacaaactgagacctttctcctcttgactccccgcgggaaacggtggaaagatatcaatgatttctgtacattgcacccggtggccaggattcagaaagcgctcctggggccctggtttcctctctgagccccgccggctgtccacaggcccgcg

SEQ ID NO: 37927 - DNA, 399 bp, Homo sapiens
  chr2:119610540-119610939
  hyper
cgctgggactgtatcacacagccagacaggcctctggagctgagaattttagacttcgctgctccgggaagcaagaggactacatacaattccctatttatttttcttcactttaatctgacatcccgctttttatgcttacactgaatcctacccaaaccccagaacccagacccgaatttgggtttaacccctttctctttcgccgaaaaaaagaaaaaatccggagttaattcaatgtctacgcctgaattttcttctatttttttattttgcttttctccctgtatggctccctcccactccccaaaaaattccccgaggtcggtgttctcaggcctaggggaccctctcccacccctggtccccacctgtccgagtggccgctctcgcctggat

SEQ ID NO: 37928 - DNA, 254 bp, Homo sapiens
  chr2:119610998-119611252
  hyper
cgattgaggaggggccagcgcggcttctgggttctgctacccccacccctccgctcagtccgtggtctccaggaggtctgaacccgacttcaaagctgggaacggaaaacgccagaaaagaagaaaaaacacaacatccaagtcctttgtgcaggaacgcccccgtgactccaaaaccgttctttttgcttgtcccagaattaactgtcttccttctcttccctttgactcctgtaggggtgcgggtggttgtc

SEQ ID NO: 37929 - DNA, 604 bp, Homo sapiens; identical to SEQ ID NO: 1778
  chr2:119611311-119611915
  hyper

SEQ ID NO: 37930 - DNA, 30 bp, Homo sapiens; identical to SEQ ID NO: 1779
  chr2:119612307-119612337
  hyper

SEQ ID NO: 37931 - DNA, 30 bp, Homo sapiens; identical to SEQ ID NO: 1780
  chr2:119612772-119612802
  hyper

SEQ ID NO: 37932 - DNA, 30 bp, Homo sapiens
  chr2:119613862-119613892
  hyper
ctgaatctgagcagcgtctgtagacacctg

SEQ ID NO: 37933 - DNA, 1159 bp, Homo sapiens
  chr2:119614602-119615761
  hyper
cgggaagccccggaacggtcctcgccagacatagccggctgtcctggtccttagcttcaggctggcggcgcaaggccagagcggctgccttctaggcacctgggtggaggtctcgcatagcattccctgagaagcgaaactgcccttggggccgcagcgagcctgccacatcgaactggagaccctctgctttcgggatagatgggacgtttctgctctgtccttcttggagtcccggaatcgttctggggccgcgtgctgcctggaggcggtgaatttcagggtcttgagaagccgcgcacacacgggattctgggcgagcgtcccgtctcttaattcctattaagagacgggaaaatcgagggactggaggtcccatcattgtcgcgtgagcagcctcctgaacaccaagcgagacctgagggttccgctggggcctcgccctgacacccgggccctccgtgtggtcgagagtttgcgcccgctcccgctagggcagcgaggtcccacttgcggccggctggggcatggtggcaccggttgtctactccccacttgtgacaccgacagcttccaactcctcagacccaccccgtggaattctggactttgtgagggccgccggggtcctggccctggggtcagctgccatctgactaagccaggacggcggagctccaggccttgctccagcactgccggtgcgtcggggcccgcggagagcccagggcgggagctgtgggctgagccgggtggccgcgtggacacagatgcccggccggactgagcggcagccaagactctccgtccatcccgccgctggactcgactctcccagacccgccacggaacccagatttgagcacgcaagataaagacgccagaggcgagtgcgcggcggagaactggccgcgacacgggaagcttctggggcgcagaacgctggctccgactcgcgcggcgcagaccagcttctgtggttgcactcaattgaacaacaggcggatttacgttaaactttgttttcacctttcactaagatgtttccaatttaccaaggggatagaatgagagacagagatgtgagagatacagagagagagatagagagtgcagggtcgggggaggaggcagagagcggaagcggttctctttaggg

SEQ ID NO: 37934 - DNA, 569 bp, Homo sapiens; identical to SEQ ID NO: 1783
  chr2:119615982-119616551
  hyper

SEQ ID NO: 37935 - DNA, 512 bp, Homo sapiens
  chr2:119616781-119617293
  hyper
cgctgaggcagtcgcctctccgggtcgctccactcccggactccggcagcctgttggccttcctgtcaccacctcgcatggagcaccctgccctaagccctggaactgggcccctggctcgcaaggaagagggtgggggtggggtagggaggaaaggccgggaagcctgctagagagaaggaggtgactgagggccagcatcgccaggaggcatagttccactagtccccagtcccatggttccaccttgaccccagttcacctgcagggcggcagggaactcctctgattcccgaacctgcagctggtgctgcactggaggggtttccgttggtccaacgcaccccggtgaagggaattccctggagaagagagaggaggtgccagaacctggctgtaaggggggtgcaggtgtgcagagagaagcgggttgtcccgggctgtgggtcctgcagcgcagcacctgagacttcagtttccttccttttccttactcccgtagtcttccggga

SEQ ID NO: 37936 - DNA, 30 bp, Homo sapiens
  chr2:119769308-119769338
  hyper
ccacccacccacctcggaagacagacgcct

SEQ ID NO: 37937 - DNA, 105 bp, Homo sapiens
  chr2:119914247-119914352
  hyper
cgcagggatttgtcttttccaaaggagatgtcaggaagtgttatgaatcgagagtggcctttgccaaggagccgcgcccgggcggagaccgggcggcctgcagcc

SEQ ID NO: 37938 - DNA, 30 bp, Homo sapiens
  chr2:119914729-119914759
  hyper
cctcctcgcgccgacgagtctgggaaatag

SEQ ID NO: 37939 - DNA, 101 bp, Homo sapiens
  chr2:119916524-119916625
  hyper
cggctcccaggagccacaagtgggcgcagcgggcgcggtcccaagccggggcacatcggacacacccacccgcggccacactcacgcgccccccaccgata

SEQ ID NO: 37940 - DNA, 30 bp, Homo sapiens
  chr2:119981154-119981184
  hyper
tcaggaagtgttggcgccggctggcgacct

SEQ ID NO: 37941 - DNA, 30 bp, Homo sapiens
  chr2:120124266-120124296
  hyper
cttcccccgcgtgccgtccccacaacgggc

SEQ ID NO: 37942 - DNA, 30 bp, Homo sapiens; identical to SEQ ID NO: 1786
  chr2:120189852-120189882
  hyper

SEQ ID NO: 37943 - DNA, 30 bp, Homo sapiens; identical to SEQ ID NO: 1787
  chr2:120190187-120190217
  hyper

SEQ ID NO: 37944 - DNA, 489 bp, Homo sapiens
  chr2:120281411-120281900
  hyper
aggcactgccacgggcggctccagaatttccgtgtaggagagtttcagaagccagaccagaggaaggggtcggtggtgggcacagggattcatcttagagccgccttcgtctggcgcgcacgatgtttttctttgggaaagggtccctccggagaagagctgggagagattaatgttgggaggattgggagggaagagtccctattcctcatgggaagatctgctagtccctctccacctgcatcctgcccgaggccggagaaagggcgagactgtcgctccctcgggtccccagcctgcagaagggcgcagtactcaccgagtgcgcggcgcaggcgagcagcaccggcagtagtagctgctgcagcggcggcgacaggtggggacgcatggtgcccgcacgttccccgagggcgccccgacgtccgcctgcccgtgccctctgcccgctcgggagctcagcgccccgcgcagggtcccgggctccgg

SEQ ID NO: 37945 - DNA, 140 bp, Homo sapiens; identical to SEQ ID NO: 1789
  chr2:120281938-120282078
  hyper

SEQ ID NO: 37946 - DNA, 661 bp, Homo sapiens; identical to SEQ ID NO: 1790
  chr2:120301686-120302347
  hyper

SEQ ID NO: 37947 - DNA, 30 bp, Homo sapiens
  chr2:120436519-120436549
  hyper
aggagcctctgcggcggccggagcccccca

SEQ ID NO: 37948 - DNA, 30 bp, Homo sapiens
  chr2:120436994-120437024
  hyper
gatggccctagggacgttggactttggtcc

SEQ ID NO: 37949 - DNA, 30 bp, Homo sapiens
  chr2:120516994-120517024
  hyper
cactgaggttggggcgacctgctgccaact

SEQ ID NO: 37950 - DNA, 129 bp, Homo sapiens; identical to SEQ ID NO: 1791
  chr2:120770808-120770937
  hyper

SEQ ID NO: 37951 - DNA, 199 bp, Homo sapiens; identical to SEQ ID NO: 1792
  chr2:120770966-120771165
  hyper

SEQ ID NO: 37952 - DNA, 30 bp, Homo sapiens
  chr2:120981259-120981289
  hyper
agacctgtgggggccggcggcgggtgtatc

SEQ ID NO: 37953 - DNA, 30 bp, Homo sapiens; identical to SEQ ID NO: 1793
  chr2:121009840-121009870
  hyper

SEQ ID NO: 37954 - DNA, 30 bp, Homo sapiens; identical to SEQ ID NO: 1794
  chr2:121010900-121010930
  hyper

SEQ ID NO: 37955 - DNA, 30 bp, Homo sapiens
  chr2:121101032-121101062
  hyper
cctgcttctgacttcggtcggcaaactcac

SEQ ID NO: 37956 - DNA, 30 bp, Homo sapiens
  chr2:121101969-121101999
  hyper
cccagagcggcagccgccggcggagcctgc

SEQ ID NO: 37957 - DNA, 30 bp, Homo sapiens
  chr2:121102417-121102447
  hyper
acctgaacagattccgctttctcctcctcc

SEQ ID NO: 37958 - DNA, 30 bp, Homo sapiens
  chr2:121103458-121103488
  hyper
cgaggcgccccgagacgcccgtgcggcagt

SEQ ID NO: 37959 - DNA, 336 bp, Homo sapiens
  chr2:121103740-121104076
  hyper
cgccctcgtcgccagcggcgcaccatggacgggctgcccggtcgggcgctgggggccgcctgccttctgctgctggcggccggctggctggggcctgaggcctggggctcacccacgcccccgccgacgcctgccgcgccgccgccacccccgccacccggatccccgggtggctcgcaggacacctgtacgtcgtgcggcggcttccggcggccagaggagctcggccgagtggacggcgacttcctggaggcggtgaagcggcacatcttgagccgcctgcagatgcggggccggcccaacatcacgcacgccgtgcctaaggccgccatggtc

SEQ ID NO: 37960 - DNA, 823 bp, Homo sapiens
  chr2:121104109-121104932
  hyper
cgcgaggacggccgcgtggagatcccgcacctcgacggccacgccagcccgggcgccgacggccaggagcgcgtttccgaaatcatcagcttcgccgagacaggtgggtccggccctccggctgtctgccgcggtccccgctcgctcccgctctccctctccttgctagctccggctgccaccgccgccaccgcagcccgcgcgccctggggcagcctggactcccggcagagctccttcggccgtggccctgcgcgctccgcccgggttgcagtcctcttcccccaggccgcagacccttgcctgctgcctcaaccccccgccgccgatcgcctggccctccacccctgctctccggaatcgggccccagcgcctctgggcgcgcgtccccctcccggcagatgcgcgcggccctggctctgcgggcacttgcttggtgattgcttaatgtttttgtttcccacgatcggagtgtaggcttagcagtgtggatggagatgtgtgtgcttgttgatatacgtgggccggaggagagagagagtgtgtgtgtatctgtgtgtgtgtctgtgtgtgtgtgtgcctgcgtgagaggcccctggggccgcttccatcaccggcggcgtgggcttgccaggattgctgaagcctcgctggggagagctaggcaacctctcttccgattgtgtgggcaccggaatcgggcggaaggcaggcttctcaacaggtccatcatttacacagagaaagccgcggttcggggacagccccgtgcctctcggcttgcctggcagctgcagcagacccctcgcccgagaggcagag

SEQ ID NO: 37961 - DNA, 114 bp, Homo sapiens
  chr2:121105160-121105274
  hyper
ggccccatttgtgccgaggggactgcggagaaggtcgcagagggggaagccccggtgcagttagggcgggggcaagcggggagcctcggtggggggagcggttgtgcccctggc

SEQ ID NO: 37962 - DNA, 319 bp, Homo sapiens
  chr2:121199616-121199935
  hyper
tgtcatttgccgggcgttccgctttctccactgtaccatgctaatttttcgagggacaattttttgacaatgagtcctccagcccgaacagaaaccctttatggggccggccccagggaggccgcggcgctgccaaggcaaacaaaggctcattgctgccgcggaacatgcctgcgcctttcagggccgggttcgcagagcgcgccgcctccagcccgcgccgaggtaacacctggtccgccaactcctggcgcctaatcaagatatcaatcacggcgcgggggcaggggggcgcacgggccccgaaggctccagaacc

SEQ ID NO: 37963 - DNA, 565 bp, Homo sapiens
  chr2:121200234-121200799
  hyper
gcccccactgggacagagaggcgcaagagtccaccaacccctgccacttgtggcctttcctgactgcccagggcttccaacaatgtagaagagtgacagtaaatgtccaggtccctgcatataggtgtttctttaatctgcacaccaggccggaaaggccatgcacgtcgtcgtcatcccatttcgtagatggggaaaattagctcggagaggtgacatcttgcccgaagtcccacggctggtcagtggcaagtggacagtggcaactgcgcctggaaaacgccgtccgtggcgcggtcgcggcgccaggggcatgcctgacagccaccttctctcccgtgaccgccgggctccgcatcagggcgagccactcggctcgggagagcaggaaactggggagggccgagcctccggccacgccttgtcagccccggagcctccaccaatcccgggcccggaaagaccaggcccactgccggccccgcccagcacctgcgcaggtagcgcgcgcaggcgaaccgcaggcccgggcttctggggcctcacgctgcgcggagaggctgcc

SEQ ID NO: 37964 - DNA, 30 bp, Homo sapiens
  chr2:121245106-121245136
  hyper
tgtgatctggcaatgttgaagcttgagtag

SEQ ID NO: 37965 - DNA, 31 bp, Homo sapiens; identical to SEQ ID NO: 1799
  chr2:121427431-121427462
  hyper

SEQ ID NO: 37966 - DNA, 31 bp, Homo sapiens; identical to SEQ ID NO: 1800
  chr2:121438058-121438089
  hyper

SEQ ID NO: 37967 - DNA, 857 bp, Homo sapiens
  chr2:121493453-121494310
  hyper
tgcagaagtgccggcgcttgccagccgaggcagcacggctccgcggactttttttcaaactcccatcaatgagacttcgaggaggagcgggcggcggcggcggctgcgactgcgaacgcggaggaaggccaggagccgcaggaggagccggaggaaagagcttgggccgcgcggcgcgccgcagcctcggggagccgcctgctcgccggcggtaggggctgcgcggcgcccgcccgcctctcggtcccctctcttgcctggcccgccccgccccggctggctggagccccggcacaaggcagccagccgagggtcgccgcgccagccaaggtgggatgggggcccacagccaccgcccggcgcccgagaggccacctgcgtgctagaggcaaacttttgtctctctcggtaaagttgcattggccttcttttgcttgcttttcgtgacgaagcgcctcccacctcggccaagcgcgggccgactgggatgctgcgccgtctcggggggtccctcggccgggtaccggcgcctaggccttgggatcggggccctgggcttcgggggactagaggctagtaggcgcgaccccgcctggggctctggacgagcagggcggggacgtaaggagagtcctggggcttggagctcgtggccagaggtcgatgttgcaccctctccctacctgggggagagcaccactcttctcggggtgcacagcgagccggcctccgcgcgccggcgggggtctgttttttcagggggtggagggtgggatcggaggctgggatgctccgaagctgccgtaggtgggcatgggagcgtgtctgcgggcgtactgagcgcggaggggctgcag

SEQ ID NO: 37968 - DNA, 571 bp, Homo sapiens
  chr2:121494677-121495248
  hyper
tatgtgatggatggggagaggcgcggagagagttgggcgccaatcctattaagggtttagagaggggagtcttttccccggacggggcgggggcggggagctgggagggagcgtgtgcttgcgtgtgtgagtgtgagcgcgcccgccgcgctggagagctgggagtccacccagctcggcgccttttcagcccggcggtaactgctgtcatttcctaggaaacccgacttttaccgcgcggggagctggggatggagcccgtgcgcctcaccctgggtgatcggtcgctgaggctctcggggacctcgagcccccccgagggtgcctctttccactaccttctcttttgtgtaattgttctgtggctcctagagttgatcccagctggaaaagtagacctgtccctactgtctggtcccgcgccctgggagtcttgtaggcgtccctctgtcccccagcccgggcatcccgctcggtgcgcgacctctggcacgggctttgcagctcggtggccgcagcggtgtcccgggccccctctccgccgctcttgccgggcgtgtgaaggtttaat

SEQ ID NO: 37969 - DNA, 130 bp, Homo sapiens
  chr2:121499324-121499454
  hyper
agcgccccgggcccgcggctgcggccctcccacctgcgcgccggcctggtttgcagctcccaaacaatggccacattgtcgcagccgcacaccggccgccgccggcgagtggcgggaggccggactctgc

SEQ ID NO: 37970 - DNA, 51 bp, Homo sapiens
  chr2:121499643-121499694
  hyper
cgaagtgaatgagagcactccacgggagccgggaagagagaggccccgtga

SEQ ID NO: 37971 - DNA, 183 bp, Homo sapiens
  chr2:121834573-121834756
  hyper
tgtctgggaagcagacgctgagacggagtgaggggtgcaatagcgtaacggggagcaccacctgtaagaggagagggaagaagcaaggtgggcggggccggccatcctgatgcatcctccctgcacaacctgcacctgccagcagagggcgccggagcaaagcgcgcccgtcccatctcagga

SEQ ID NO: 37972 - DNA, 877 bp, Homo sapiens
  chr2:122042083-122042960
  hyper
cacgcgcaagaccatcgcgggaagtggggcggcctgcccctccgagcccgccgcccgcccctcgtccaaggaagggcactgcagagggcgcgaggctgggagaggggccccggcggagacgggcaaagagcaggggacgaacttccccgggccgggcaccaggctgctggcaggaagtttcctctgcttctccgatacgcgggggagaggagggccgcagggggcggacgggccaggggaggcggcgggccggcaggtgcgcgccctgcaccctctctgccgcctgggaggagccctcgcagacatagggctctgcgcgctcgcctccccagcgggcccccaactccgcacgtcgggtcccgccggcgtccatctgtcagtccctaggcgggacgctgggcgggtctctcagtccccagagggcggacagcggggaggccagggcccagcaggggcgccccctctccgcccctggacgtccaacggcgcccggcccgccggcccggcccgagacccgcggggaccgcgcgcggcccttaccgcaggtagctgccggagttgtgctggttgtagtgctcgggctgcgtgtgccagaagagcatggctggaactcccagcgcgccgaccggggcgcggcagcaagcgcagacgcggggcgcgccgaggacccagcggcggcttcgcgctccgaacccgcggtgccggccggctcggcgcatttatcggcggcccaggggcgggacagcggtgagacccgccccccaggaagcgcggcccggagggcggctccccgcggcagccgcacctggctgactcccgcgcgtgcctttccggcgagcgagcgcgcctccggggcggccagaccagagggctctag

SEQ ID NO: 37973 - DNA, 30 bp, Homo sapiens
  chr2:122288036-122288066
  hyper
caaagagattagcacgaagaaggatgatct

SEQ ID NO: 37974 - DNA, 30 bp, Homo sapiens
  chr2:122408348-122408378
  hyper
atgggagagaagtgcgggagaactatgaga

SEQ ID NO: 37975 - DNA, 30 bp, Homo sapiens
  chr2:122493555-122493585
  hyper
actatgtcaatcaacggataagcaaggaca

SEQ ID NO: 37976 - DNA, 140 bp, Homo sapiens
  chr2:122512973-122513113
  hyper
cagccccacttgcccgcaccacctacacgcccgtccccgccctccctcaggcccacgtgctccgagggccgccttcgcaggttgtttctggcgatgcctgtctgaaggcctcagactgaggccccgcccactctccctct

SEQ ID NO: 37977 - DNA, 30 bp, Homo sapiens
  chr2:122513361-122513391
  hyper
gtgagcgagatcttcgtggagctgcagggc

SEQ ID NO: 37978 - DNA, 760 bp, Homo sapiens
  chr2:124782571-124783331
  hyper
gcatccttcgacagcggcctttgaaaatctcctttaaatttcaatacctctactcgtttcccaaatggggggaagggaagagaaagccggggggtagagagaatttccttcccctttccctcccaggtagccaaagcgcaccgcagcggcttggcttcctggaggaaaagcgcccgagcggggcaaagacccgcccaggctgctcttataggcgagcgcggggcgggcctggctgggggcggtgccgcgcggccccgctcgcctataaggagctgtccgccacccgggtgctgattccagctctcgcgcccgacgaggtggatttggctgtccaccgagctccggcgcctgtcgttctaattgggtttggatttgcaccgttaaggaggggggaagagaaggaagaggcgggcgaggaaggcgagtccagctagcggctgttgcggggaccgtagccccagctgcagctccgaagaatcccccgccacggtttcggtggagcgtctgggcacgggatggagtgaaagagcgagtgcctctccaagcgggggtgggagggggtcaggctgtgcagaggagagagacagcgagaagaagccgcggctggctactgcgaatttgggattcgattgggagggaccgctcactcgggggaaatggattctttaccacggctgaccagcgttttgactttgctgttctctggcttgtggcatttaggattaacagcgacaaactgtgagtacgaggagctgggggc

SEQ ID NO: 37979 - DNA, 381 bp, Homo sapiens
  chr2:127413346-127413727
  hyper
ccgcccagctatccagcggccgcgcagccagccaagatttcaacacaggtctgccctatttggtcaccatccccgacagtgctgggccaggccatcatgtcacattggggagttttccctgcactccagggggaattctcaaccacaacctctgtatccggtagtggcagatggaaagagaaacggttagaaaagcgtggttcttgcgcaggaaagttggagcaaagaagagttcagaagtgggcgggtgtgtgtttaaaaaaaaaaaagggggtggaaaccccaccagccaagtctgcagaaaaaaaataaatgaagtctgcctatctccgggccagagcccctcccctcggcccgcgcgggaggagtgtgacccaggtg

SEQ ID NO: 37980 - DNA, 26 bp, Homo sapiens
  chr2:127413969-127413995
  hyper
cggacgccctggtgtcccggtccgtg

SEQ ID NO: 37981 - DNA, 266 bp, Homo sapiens
  chr2:127414108-127414374
  hyper
gcagcctccacgcgctccgagctggagaagccgccagcccgccctcccagggcgtgtcgcccgctttctgtttctttgtgcggggcatgtgaaatgtgtggggccagaattgtctccctaaagaacagttaggtgagagttcacatcacaagttgcttctgtgctgctccccagccagggtccgaccggccaggctccggtgaactccaggcaactccagccttgcccagggacttgctcgctccgctgggcgccgcaaaggcaca

SEQ ID NO: 37982 - DNA, 30 bp, Homo sapiens; identical to SEQ ID NO: 1805
  chr2:127464270-127464300
  hyper

SEQ ID NO: 37983 - DNA, 525 bp, Homo sapiens
  chr2:127534681-127535206
  hyper
ggaatgtggaccctggggccacgcaggggttgggaagtgaagggcagggaacgcgggcggcgcccggggtctgcgggtaggcaggcggcctggccgcggaggcttccccgagtcctgcgccttcctagagagggaggggctcatatcggctggcacagccaccacgggtaccgaaacttggggacgtgcccgaccatgcctcctccggtggcccgggggccaccccgcattgcttagaagtctcgcttcccgttcctcctctctggttcagctcattactcttccggtgaccctgggtatgccacgcttattctccaggcctcagtttccccatctgtgctgtgaggagtggaaggaacgggatgactaggagccttttaagaccgagtattcgaggttctttccggccccgcggagccaggaggtgccagccgagatgcgcgtgccgcgcgcgccctccagtgcccggttcccgcttctgcacggtcctcgctgggcaagggcgtcccaagaaaggaggaaagg

SEQ ID NO: 37984 - DNA, 179 bp, Homo sapiens
  chr2:127643945-127644124
  hyper
accctcccagccccctaaccccggtcgggcccatcacccagagccccaaacgcaccctcgcggcgcttcagcggggtgggcgtggtctggtcgacccggtggtgccgccccacagcgccccctcgcgtgcgccagccagctcggcctcagctccccgcgctcctgctcctgcctaagga

SEQ ID NO: 37985 - DNA, 30 bp, Homo sapiens
  chr2:127729745-127729775
  hyper
ctatctccccctggcggagcagagctggta

SEQ ID NO: 37986 - DNA, 334 bp, Homo sapiens
  chr2:127782974-127783308
  hyper
accctttcagggaccctgcctcgaactccacgacatgggaggcaggggcgggccttttgcaggggaaggactcccccagcaggacgtttactgaatctggagggagtcgccctgcagatatcccgcggaagccggaggagacccaggtgcgccccaccggctagctgcgcctgcgggtgcccaaattggtgtccgggccatcctcaccgcagtgactcctccgcagcgccaacgcactccattttccttccaccctgccggtggggggcgtttgcttgttctcactctgcagccgcagccagtggcgccgctaccaaggtccccgcctcgccat

SEQ ID NO: 37987 - DNA, 217 bp, Homo sapiens; identical to SEQ ID NO: 1808
  chr2:127783371-127783588
  hyper

SEQ ID NO: 37988 - DNA, 31 bp, Homo sapiens; identical to SEQ ID NO: 1809
  chr2:127810838-127810869
  hyper

SEQ ID NO: 37989 - DNA, 909 bp, Homo sapiens
  chr2:127863394-127864303
  hyper
gggcaggcctggccgcggggcactggggggccaccctggcagaaacacagattctgcaatctcagatttcagagttggagtcgtcaggggaagtggcgtcagcagctggcgtgatccaattcaataaaccagaggtggcttgggatagacaactgaccgggtgcagacccccgcccctcaatctctgcatttcctgcacgctctgggcaccctgggaggccccggctccatcccccattccagctctccgcgaggaggggtcgggtttcctgtggcgccttccacgcgcctcctccaggccagctccccacccggccgtgggctcccaaagccagtgccgccacccgctccccggccgccggaaacgctaagcccctgctggggcgagggcacctccttgcggggtgcgtagccctgggctcccggtggggccgggctgggcgggagcttccaggccgcaggcacctctcgggaaaggaaacccaatccctccttcggcccacggagaacgaaagtggagaagcagtgggaaggaaggaactgtgggtgccggttcgagaagcagccttgggagtccgggggaatagtgtccccaggggcagagggacatactccctctcgccccgagcgccggcccagcctaggttgcctgcatgggcctggagagctgagggtcaccacctggcctcccagcctcccggcccttggcctccaaagcggggtagcctggagcgcgcgcctgagaagagcctggagcagggccggccactgctgtgcagccgagccacgaaggtgcaaagcggggccctgtcctgccccggccgggtgtggggagacagaggacgcaaacctaagagggcacccagagcgccggggaacgcagcctggggacctcgaagcccctcgaaa

SEQ ID NO: 37990 - DNA, 30 bp, Homo sapiens
  chr2:127864763-127864793
  hyper
cggtcggcgccccccgcccgccccctccgg

SEQ ID NO: 37991 - DNA, 59 bp, Homo sapiens; identical to SEQ ID NO: 1811
  chr2:127865203-127865262
  hyper

SEQ ID NO: 37992 - DNA, 243 bp, Homo sapiens
  chr2:127976385-127976628
  hyper
agtgcgtgctgggccgggcacccggggaggcggacgatgggcgaaggcatcggagggcgccgccgcggctcgggtgcagtgcccctgccacgaagggcgcaacggaggtgggcgtgggaaggacagcactcaggctccaagtgggaagcgtgcggaattcgccggccccaacgccctagcgggtggctgggacccctgggttcctcccacgtccctgcctccagtcccggcgcgaactccagg

SEQ ID NO: 37993 - DNA, 13 bp, Homo sapiens
  chr2:127977370-127977383
  hyper
ctgcgaaccttaa

SEQ ID NO: 37994 - DNA, 153 bp, Homo sapiens
  chr2:127977421-127977574
  hyper
cgcccagtgcccggggatccctgcccgccgcccctccctgggactccccaaccccgcgcccctccctggcgccctcccgcccgcgccgtcagccttctgggcagcagcccgggctggctccctcccggggcggcgcgcgctacctggatctcg

SEQ ID NO: 37995 - DNA, 69 bp, Homo sapiens
  chr2:128165991-128166060
  hyper
acagggccctggaaacgcgggtctgccgggagcaggggacaggaaggagaccgcggctctcccagtcct

SEQ ID NO: 37996 - DNA, 579 bp, Homo sapiens; identical to SEQ ID NO: 1814
  chr2:128173486-128174065
  hyper

SEQ ID NO: 37997 - DNA, 57 bp, Homo sapiens
  chr2:128284116-128284173
  hyper
ggccaatgagaagacgcaacagcaatgacgccaggcacggccggaaaggagactcct

SEQ ID NO: 37998 - DNA, 105 bp, Homo sapiens; identical to SEQ ID NO: 1815
  chr2:128421744-128421849
  hyper

SEQ ID NO: 37999 - DNA, 201 bp, Homo sapiens; identical to SEQ ID NO: 1816
  chr2:128421890-128422091
  hyper

SEQ ID NO: 38000 - DNA, 30 bp, Homo sapiens
  chr2:128433043-128433073
  hyper
agcgcggccagcggcgggcgcgggtcaagt

SEQ ID NO: 38001 - DNA, 106 bp, Homo sapiens; identical to SEQ ID NO: 1817
  chr2:128459398-128459504
  hyper

SEQ ID NO: 38002 - DNA, 30 bp, Homo sapiens
  chr2:128459921-128459951
  hyper
cgttgggagctcctcgatgtcagctttttg

SEQ ID NO: 38003 - DNA, 30 bp, Homo sapiens
  chr2:128568909-128568939
  hyper
gaaagaagcgactgcgtttcgcagtgctga

SEQ ID NO: 38004 - DNA, 30 bp, Homo sapiens
  chr2:128615611-128615641
  hyper
gatgagctgtgaggcgtcctcctctacgtc

SEQ ID NO: 38005 - DNA, 30 bp, Homo sapiens
  chr2:128646900-128646930
  hyper
ctgtgtgtcctccgccgctgtgtccacttg

SEQ ID NO: 38006 - DNA, 30 bp, Homo sapiens
  chr2:128784607-128784637
  hyper
ggggtgcggacgggcgatctggggacccga

SEQ ID NO: 38007 - DNA, 72 bp, Homo sapiens
  chr2:128848513-128848585
  hyper
aaactggatttcaccgactgactgttgaagctttcgggtctcagctgttggcccaacgaaccttcccaagac

SEQ ID NO: 38008 - DNA, 30 bp, Homo sapiens; identical to SEQ ID NO: 1819
  chr2:128848800-128848830
  hyper

SEQ ID NO: 38009 - DNA, 31 bp, Homo sapiens; identical to SEQ ID NO: 1820
  chr2:129063668-129063699
  hyper

SEQ ID NO: 38010 - DNA, 381 bp, Homo sapiens
  chr2:130737256-130737637
  hyper
cggcggcggcggctggggaagccgaagcgccgcgcgtgagagatcccggatacatctgcggtttgggctccgccaccctccgtctctctcccgcaggtctctgagccgggtgcggaaggagggaacggccctagccttgggaagccaaagcacacccctggctcctgccgacaccgccctccttcccttcccagccgcgggcctcgctccgtgctcggctactctgccgggaggcggcggcggctgccagtctgtggcgagccctgctgccctccagccgggctcctccagccgggctcctccaccggcccttgcaggggcgcagagagctcggcgcccgcccttccgctcgcctttttcgtcagccggctggaggagcat

SEQ ID NO: 38011 - DNA, 157 bp, Homo sapiens
  chr2:130763519-130763676
  hyper
tgacagcaacctgagcggacccgcgcctaggccctccgccaggcctgcgctgcctcgccccgggagaggaagactgagcccggctcaggcggctggagcgcgcgggcccgtttcctttcagcgatcagtcccctggcgtcccagcagcgccttcccc

SEQ ID NO: 38012 - DNA, 30 bp, Homo sapiens
  chr2:130940021-130940051
  hyper
tcaagtgagcggggcgggtgggggccgcat

SEQ ID NO: 38013 - DNA, 221 bp, Homo sapiens
  chr2:131099779-131100000
  hyper
cctccatcaaggggcgttcccatctggggatccccacgccggcagcaccaaggcctctgggtcagcttctttaagggcaagcgcccttagagaagcagcacggaagcaaccaatcaactggtttctccaattagcccccaagtggatcagcctgctgaactgtcggctagggttataggtggttctgagtccttccggaagctgccgaatcttagaagtcg

SEQ ID NO: 38014 - DNA, 30 bp, Homo sapiens
  chr2:131113000-131113030
  hyper
ccctggtgccccagcgcatccgggaaaaag

SEQ ID NO: 38015 - DNA, 379 bp, Homo sapiens
  chr2:131485128-131485507
  hyper
aaccacctttagtttctgtaccgtaatcggccaaaaaggcgcaggcgctgctgctcctggcagctgcgtaacaggctctcagaggaggacgcggttccgggctgcggcgggcgtggtccggggctgttctgggcgtggtctttggctgtgatgggcgtggccttgggctatggagggcgtggtcccagggctgcgatgatggtggtccggggctgtggtgggcgtggccccgggctgcggcgggcgtggtccccgggctgcggcggacgtggtcaggggcggttctgggcgtggtccctgggctgcggtggacgtggtctcgggctgtgacgagcatggtccctgggcagcagtggacgtggtctcacacccagagtct

SEQ ID NO: 38016 - DNA, 900 bp, Homo sapiens
  chr2:131513384-131514284
  hyper
ctcgtgacgaggctccgggtggccgagcccttccgagagtgctgcggtcggcagggctgggctggctctctgggctgagggggaggggctcccacacctgtgcgctcccggaagaggggacagcggcgggggcgccgtgcgcacgggggcgaggggagacgactgcacctgagggaggcgcagccgcaaccgggtgggaggcagagacacccagaaacagagacggggcgatacgaacagacaaagccggctcgagcgcggcccgagcggcggcgcagggaggcggcagcctggcggagcagcccccaccgcggccggcgcgccccctcgccacccctgcgcgccagcgccggcccgcccctcccgctggcctctggcggcttaaccctcgcctgcccgaccccgcggggcccctggagccgcggtgggtgggtgcgggcgccgggcctccccctcccggccgcggcgcgcggcgccgggagctgaccgtggtgctgagcgcggctcgcgctccgacgcggtgcccgagcctgtcgcggccgcgccctgctgcactgcgggcccccagcggtaagtcgccaaggccccgagaggctgcgttggtcctgccccgcggatgtggacccccggggagggcaaggattggggaatttggtgcattctctggcgcgatggacgggctgagggcaggaagcagggtcgacaccctccacccagcggttcccggcgcagtcaggggcctgggagcggtgacccttttaggtctgggctagggaagcggagaaaccctccgccggcggatgcaggagctgagggagagccaatatcgctgtgaggcccatctccttgcccctgggcaggccaggaccgcccagaggcgccctccaaggaggtgggcca

SEQ ID NO: 38017 - DNA, 30 bp, Homo sapiens
  chr2:131555455-131555485
  hyper
cacaggactggcttcgcaccactggccccg

SEQ ID NO: 38018 - DNA, 312 bp, Homo sapiens; identical to SEQ ID NO: 1821
  chr2:131720786-131721098
  hyper

SEQ ID NO: 38019 - DNA, 147 bp, Homo sapiens; identical to SEQ ID NO: 1822
  chr2:131721437-131721584
  hyper

SEQ ID NO: 38020 - DNA, 415 bp, Homo sapiens
  chr2:131721866-131722281
  hyper
gggtctgtgctcttgggaccccccgcccccctcctgcctttccttctcctccctcactttctgcctgtcgtttccatctcctggtcccttccttcccattgcttcgccctgctattccttttctttttctggtttccttctgattcccactgcctgtctctctgatccacgtctaccggtgggccacctgttacagccgggaccttgttggcccccataccagagcgcgctgtcaactgggaaactgattaaggtgagactagaatttggtgcccgatgcgctgtgttcctttccccaaactgttcttgaccagttgcacctgtctggctttacctaccgcagctgcttagcctctgtaaagccaggaggatggaagggggccgctggccgagggtggaacggattgcgccacct

SEQ ID NO: 38021 - DNA, 504 bp, Homo sapiens
  chr2:131792015-131792519
  hyper
acaatgctgctcggacgctgcggtcagtgaagaggggcccctcagggtggatcgctcccaccggagtttaaatcctgcctccgccatccctgcattcctgcgcgattttatgactgagcagaatccctaacctttcagagccacgtttactcatctgtgaagtgggggcctgcggccagtccttgtaaggaatcagagtccctggcccatccctccccaaagcgccggtgccaggcgttttggcctctgtatctctgaaacgaggaggtcccggggcatccccgagcgcccccgtggccatctgtgccactggccagcccagggccaggactgctgtgccggcgtggagattcccgaccctttccaaggaggtgccaagggcgcagcgcagcgcacgcccgagccgccgcggtccctctgagcctctccagcccgccgccgccgccgcccccgcccgcacagccggcttggttgccagggttgccagggcttggggcctgggag

SEQ ID NO: 38022 - DNA, 215 bp, Homo sapiens; identical to SEQ ID NO: 1826
  chr2:131792531-131792746
  hyper

SEQ ID NO: 38023 - DNA, 81 bp, Homo sapiens
  chr2:131792920-131793001
  hyper
cggagggaaggcctccttccaccccatgtgctcactaccagggcctggtccgggggtgtcgccgagcgggtgcctgagggg

SEQ ID NO: 38024 - DNA, 30 bp, Homo sapiens
  chr2:131851157-131851187
  hyper
ccggtcccagttggcgaaagggccgggtgt

SEQ ID NO: 38025 - DNA, 256 bp, Homo sapiens
  chr2:132152275-132152531
  hyper
ggatctccgatgtccctgctccgcgggcgcccgcagtgctgagccgaagctcggcggggctgagctccagctgggggcgggtagctgacagcctctaggcccgggctccctccagaggcagcgttgcaccctgaccctaacttccgcctgcggcgttcagatgcggaaagcagggagcctgaacccaaagctgcgatcagagaatcgtgtgtgtgaagggtttcttgtgtcctccgtgttcccctgtggaagcgag

SEQ ID NO: 38026 - DNA, 29 bp, Homo sapiens
  chr2:132286403-132286432
  hyper
tttatacagggaaacgtgcccaagtgcga

SEQ ID NO: 38027 - DNA, 31 bp, Homo sapiens; identical to SEQ ID NO: 1827
  chr2:132431406-132431437
  hyper

SEQ ID NO: 38028 - DNA, 156 bp, Homo sapiens
  chr2:132439906-132440062
  hyper
caggggcctttcgtcgtcccctgggctgggcagaggctcagcctgtgccgcaaccctaagcggcttctggcaagtccgagccgcggtccctttaagagggggtggagcttcaacctggcactagggatgctgctagcgtgcgtgtccctacggagc

SEQ ID NO: 38029 - DNA, 276 bp, Homo sapiens; identical to SEQ ID NO: 1828
  chr2:132767359-132767635
  hyper

SEQ ID NO: 38030 - DNA, 247 bp, Homo sapiens; identical to SEQ ID NO: 1829
  chr2:132767688-132767935
  hyper

SEQ ID NO: 38031 - DNA, 279 bp, Homo sapiens; identical to SEQ ID NO: 1830
  chr2:132795725-132796004
  hyper

SEQ ID NO: 38032 - DNA, 341 bp, Homo sapiens; identical to SEQ ID NO: 1831
  chr2:132796063-132796404
  hyper

SEQ ID NO: 38033 - DNA, 62 bp, Homo sapiens
  chr2:133062236-133062298
  hyper
ttccaaatgcacggacgtcaaaggctaccttcacccgggtagccttgcgaatggccactgct

SEQ ID NO: 38034 - DNA, 1 bp, Homo sapiens
  chr2:133062361-133062362
  hyper
c

SEQ ID NO: 38035 - DNA, 530 bp, Homo sapiens
  chr2:133173852-133174382
  hyper
ccagggcagcggtggacgtgggggcagtgcgggcgagaggaagtttgtctttctcccagctcgggagggtcgccagcttccccggggctgcacctccttgggacgcttgtcgggttggagcgccgcagctgcctctgcggctgccgcctgggtgacggagggtggggcgggggtgggtcgctcgtagctcgagagccacgatctgatttcagggaccgtgcctatgtgctgagtcaaaccccgccgctgggctgggtctgcagccgggccgctgagcacaatccgctgtggttaatgattaatcgctgaccaccccgcctcccgcagctcgggagagggtgctctgggaatgtggaccggggctctcaagtgccggcagctggaaaggaagaggagtgctgcgaggcggagtgcgccctcggcgaagaggggcagaggcggagcgccaggtgctgcggtctcactcccagccagccaggagtttagaacgttcttcctccgccctctccccgcctcgccccagccacata

SEQ ID NO: 38036 - DNA, 1871 bp, Homo sapiens
  chr2:133426128-133427999
  hyper
cgggttcagatccggcccccacagagcccaccccggaaatcacgaccatcccacgcctcagagccaggcggctcccagcctctggcaggcttagaccactcctgggtctccgggtagggctggatgtggctgacaccggcagggggcggcgcgggtacctagggtcctacggaagaaagtggaatagtgcccgccacccctggaccccggctctagacacaaagcgcccatccattaccaccccaggccttttcccaagaagttgaagggagggtggggacggtaccaccgcaagagtgaagtagctctggagatgtgcgttagctccagcctaagccaaaggatttgcctaattgctaattggttacaaattacttaattactattttggcaccattcgtgattacattcgcagacgtctttttagtttttatttatttaatttttaaagtcagcgtttctgtgccagggctctgaggatccctgagcgaccacctgggaacaacttgggtggaggtgccagacgccaagcgctgctgcgccgcaagtccccgagcccgggtcggcggcccttctccggggccgtccccgcggcgacccgaatggccacagagggtgggaaagggcgtttgtgagcgcgcgcaccctggatccccgaccccgcagccctttcttccaggccccggctttcaggacaaccgttcgactagggtcagtggtcggggttccagctctgcagagcttagtcgggagccagtaggcgaactggagagaggacgcgagacctttgcgcctctggacgcttcggcctggctgttctcggtgtacgcgctcctgtctagacccaactacccacgctcccgcagccccacatctatcgcactctgagcgcagcaacccagcttcagcgtggccgcaggctgcctcgcgcatcgctcacctgtcggcggcgccactcccacggggtgccggaggcgccagacaacttggcagggttcgggagatgtcgccccctctccctcgcccagaacccagcaccgctcggaccctccctcctctcaagcccagcttctcccgacggtgcagccggacaagctgcagcccggagtcccgcaaacccgccgctccccgctctcctcctgcagcgcgggacttggacactttcccagcctcgcgccccggggcaccagtcgcggccgccaactcccgctgggcagccccagcgcagggctggccccgaggtgggcgccttgggggcaaaagggctggcgggtagatggattgtgcgcacctggcctcggctgctggcctctgggtattctcacctggaagcaagaacaatccgcaaaaagttgccgcgatgcctaggacccacattctcccggagtcccggggccgggagagggcaagcgcatcagaggaggcgacagcagcggaggctgccccggctgcagcggctgtggctgccgaggctgctggggcccgcgctgctgccgcggagacgacggtcgtagcttagaggagccgcaggtgccgctcgcggagcctgcatcgcccgcgctcgggctcccggctgcgggtctctgctcctcccgctcgcgctcccgggccgagcaccgcgcctccggagttggcggctgagactgaaggaactactggcgatcgggagcacccacaaaagtctcgccttttctccccacctcccactccaggcatcacgtgacggctgccgagttggggtgggggtggcgggcggggaaggctgggacggtcgcttcacatccccacccccttcctgtcttcctcttctcccgcctccgcacgttcctgggaaaggggcgccggggggcgggagagaactggtagttttc

SEQ ID NO: 38037 - DNA, 230 bp, Homo sapiens
  chr2:134024403-134024633
  hyper
tttcctcctggaggcgcgcgttaaagatctgcctgggagcgcccggcgggcggctcggcttgcgctctgatgaggaggctggggcccatcgattcccaccccctacccactccccctcccctcccctccgccgggcccccccatcagaagctgcttaggatcggcgctgtcaaatccagcccatctgctgcaatcataatcagtctcaaccgaacggttctgacaaatct

SEQ ID NO: 38038 - DNA, 225 bp, Homo sapiens; identical to SEQ ID NO: 1837
  chr2:134325851-134326076
  hyper

SEQ ID NO: 38039 - DNA, 1423 bp, Homo sapiens
  chr2:135475590-135477013
  hyper
aagggtctgcagacgcgccctccggaaacatcaggtttcagtggcatccatccagatgaggttggtggcccaaatccaaatgtcccattcctctgccccatcatgagacgacggggcagggacccactgtgacccgcgtccgcgattagaatcggggactgcccgagaccagaggccgcccgagtcccggctcgctcccctccttgcgcccttcgccggggcgggcagccgggcggccgccgagggacatctcgcggctacacccgcagagggaagttctcccaggcagccggcggagccgcaggggactacggaaaggaggatgcaacgagcctgggtccctccgagctgagtagggcccggagtggcccagaagcgctcgactccgaacgcaaaaaatgcctcccgcaaacttttcccgtgggcgccggagggcctggagctggcggagaggagggcgcgagtccaggcggggtcggcctgaaggcagctggggtctgggcttcgagggaaggaaccgcagccgaggcggtgccggccgcagaaggtggggctgccgctctcggctagcggcgttctcgccgggaagtcggggctccgcgcccccgcgcgctccgagccccgcgcctcgcccagcgcggcccgcgagtggggagaggcgggccccgagcagccaccccggtcgccggccgggtcgggcagctcgcgctcacctcggtcctccagcccgtcgctgaactggccgctctcgctgatccgcacctgccgctcctcctccagctggggcggctcgcgcaccggggagctcagcggggccgggccgggggcggcagccggtggcgcgtggccccggggcggcggcgggacggtgggcccctgggagctgcggcgctggatgcccgcggccggctccatggcgcggggctgcggatcccggcggcggcgacgacaagcgcggcggggactcgagtcagaagtgcgaggcgccgcggctctggcgggggcaggagcggacggactggccgcgtggacagggagggagggcgggcgggcgccgcggagtggaggtgcacgggcgggggcggggacgagcggagagccgctcggctccgcggccggtggcggaggctggggccgcgttgttgccgccgcgctccgcccctgggggcaggtgcgggcggcagggacccgccccaaggcccgggcgcgggagccggcgcaccgaggcggacgagagggaggaaccagcgtgaggacccacaggcggccctggcagagcttggctagggcgtagcggggacccgccccacctgcgccgcgggatggtgcccagaggggacccctcccactggattcctctggggtccgcgaagcccgcggccgcgcgtgggtagcagacagcgcccctaatttggcatctttc

SEQ ID NO: 38040 - DNA, 30 bp, Homo sapiens
  chr2:135675554-135675584
  hyper
cgcagaaaccacagcgcagcctgaaaacac

SEQ ID NO: 38041 - DNA, 30 bp, Homo sapiens
  chr2:135809729-135809759
  hyper
ttaacagacctgggcgaagaagcagcactc

SEQ ID NO: 38042 - DNA, 89 bp, Homo sapiens; identical to SEQ ID NO: 1839
  chr2:136288365-136288454
  hyper

SEQ ID NO: 38043 - DNA, 30 bp, Homo sapiens
  chr2:136289103-136289133
  hyper
ggttaattccctttcgtaagactcttactt

SEQ ID NO: 38044 - DNA, 30 bp, Homo sapiens
  chr2:136634142-136634172
  hyper
acggaaagggatttcgcgccaaatgcaaag

SEQ ID NO: 38045 - DNA, 3177 bp, Homo sapiens
  chr2:136873850-136877027
  hyper
gccactcccaggcggcgtggggggtggggtgggtgctgctaggaggggcagtgattaactttttgtaagaagtttttcgcccagggagggaagaggggagaagggaggatcacggggggagggcgggggcgttgcaaagactcattctcctaaagcgcaaaaacttaattttcccacgcctgcctaaatacaaaccattctgggcttcaagcaacttgtagtgggtaaagagaatgcggtcttaaaacgaaggcccttcggtgcttggggtatattgggcgggagtgtcagaaaatgaacaaacggcacctcctcccccaagcgggcgctcctccggtgtgtgggtctcttgccatcctcgtgtttatcacttggcgcgtttgggacgttagggagcggggcattttcctgggtggagaaggtaacggggtctgcacccgtggtcctcgccccaagtttcatttcctcactctcccgggtggcttcccattaccccgccactgatccagttaacccggccggaggtgggcagctggaagcctccaggcggtgggcacgcggggggccgggtcgtccagccccgggccgccgcggctgcccactacacccacgccaaccgcccgcaagcagcgctgcaggggctccgctgggcgacacgccaggctctgtcccacagggtgctggggagcgactgggcggctccgccgcgagcgtctttgaattgcgcgccgctgcaggaaaccaaaaactccctagcaagagggtttcaaaaggtttctggaaaccaccgacggttaaacatcacaactggactcggagagagccaaacggtttccccacttgcacctgccagtcttcgcggcggcgacctggcagcccaggtgcggtcttaaccgcccccgcccctcaccccgtacccgctcctatccccggagcgcaaatctcagggctggcagctgcgcggtgtcaaaggggaggtcaaaccactccgctgacctctgcacgaccccaaactctcgaactgcaggacccactcgcggccgtggggaagaggcgcgcttcggacggcgggaaggttttccccctcaaacccaaagcgcgcgggcggatcaactcctagctgctgccaccactcgatcccctcagaggatcggcgcggtgggtccacccgcctctcccgccctctgcctactgtgctgggagactggcacagctccgtcggccgcacagagtttaacaaacacgcacccagtgtcaagaacagtcaccaggcgcttaaccccgaagttaaagcgggcgcaatctcctcctgggaactcagcccaggcacgccgccctccgcctctaaattcagacaatgtaactcgctccaagacatccccgcttccccaaggaagagaccggtggtctgagtcccgaggcagcgcgcacgccttctctgcacttgtgcacagaatgttcttacgtttgcaaacagcgtgcaagccgccgcgcgcggcgggactcaagggggagacacatgcagccactggaacgctctttccagtcgtttctcctcgactcacagagaaaaagattccaatcctgctccccccccacccacccgcactatataggcatggtcaagaaaactcctttcggtgacccttttttggagtacgggtacctccaatgtcctggccgcttctgcccgctcggagaggggctgcgctctaagttcaaacgtttgtacatttatgacaaagcaggttgaaactggacttacactgatcccctccatggtaaccgctggttctccagatgcggtggctactggagcactcaggccctcggcgtcactttgctacctgctgccgcagccaacaaactgaagtttctggccgcggccggacttttataaaaacacgctccgagcgcggcgcatgcgccgctggggcggggagggagaaggcggggtgggggagaggggcagacgcgaggaaggagggcgcaggggcggggcggagaggtgcgcggcttgggaagcccaggggaccctgctgtttgcgggtggtcggtagtgagtccggagccggacaggacctcccagaggcatttcctaagtttgagggaagcgggatgcgcctgaagacaggtgggaagcgcgggctaggaacgcgtctctctgtggcgcgtccatccttgctaaagtggatggaattccagacctgggaatgctacagtagagacactgaggcccagggaaggggagtgacttgctggagtaacccaaccagtaggcggcaatgctggaagtagggccaagcttccaacgccattccccgcgctttcagcagacgcagcccattcaggaggtaaaaggagtaaagatccttccttcggaggatgtagctatacttgcacattcacagcatcactagggtcaggtgcagataattaggagatactttcagaagaaggtaggatttggcataattctggagactgatcagatgtagatatgtattgctcagtaatttcataatagcggtaaccaattcgcgaatagtgctttattatcctaaaagtatgctttattataagagtaatttagcgaccagtactttttgtaacagatcactaggaacttgcacagaatcactcattcattctcacaacaccgtgtgggtattaccatcacagagatgcatttagtccgatatttatagaaggacgaactgcgtgccacgcactgttctaggcgttggggatccagcgtgaaccagacaaggcccgcattcggagaaaccagcaaataagcccggagagatgaaatgccagggatgggcagggattccaagccgggcttgaacccaggtcttcggtccccatactcggcgtcttccacgattttgagcagaggacaagctttggcacgaatcagaaattaggttgaagaactgggcggggcggagtgggggtgggggtcagacgtttaaagcgatctcagactggctgaggtttgcagtgggcgcgcagacagtgctttccccctcgcgccacttccctccggcgcggagactgggtggggcgggggagcgagtgtggggcggggccgagaaactgcgtccgcaggcggggtggccgctgcggagatagctgggaccgaggcgcgtgcgtcgcgacacggaccccaga

SEQ ID NO: 38046 - DNA, 713 bp, Homo sapiens
  chr2:137522036-137522749
  hyper
aagtgtcagagagtaagcaaacgactttctgagctgtgactctgctcctcgactgcccacgtgctctccgctgtctgcactcctgcctcacctgggctgactcggactctccacctcctttgctgcttccggcatgagctacccaggagcctaaggcgctccttcccgcaactccggtccccgcgccccgggactgcaaatcctttaaacagaggccccagagctaggggttttcccaggctctggtgggcgtgggctgacagtcgctgggagccccgcaacaggggggatgtccaggcaggtatgcacccagctcccggcgtttcccggagtcaccacaatgtttccctttctctctcccccacgtatgctgctaggggtactccccagataggattttctttgtcttttctcctagtaacaccgaagccctctcgtgcccggggactgcagaggaacgccagaccatccggaccttgcgggatggctcggtgtgtgtgttttactgtgtgtcggagtgtcgcgcatgtgtgcgtgttggggcgcgttatcaacaggggcctagggcacccccactctttcttgctctcttcccccatcacttcatggacctccgaggcgcaaagcgctcgaccctctcctgggctcagtggcttgggtactccgggctgagctcagctggggagtccccttacccagcccgcaccggcacc

SEQ ID NO: 38047 - DNA, 544 bp, Homo sapiens; identical to SEQ ID NO: 1843
  chr2:137522848-137523392
  hyper

SEQ ID NO: 38048 - DNA, 604 bp, Homo sapiens
  chr2:137523516-137524120
  hyper
cggggacgccccacgcggcgacctgagcaccgacctcatgcaacgggaccgaaccttgggacccgggcagcaggagctctgttcccttcacctccagcttggtttgagggatactgatgaaggaaaccgggggtttcccgtcctgcgcggagagcctcggcgcccaaaatcgaaaggccgggagttgttctgcaggctttgcaaacaggttgactgagggtttcctttcccgtagcgctgactgcgaaatctgtgcataggcgttcagtgccagtggaggatagctgagcaagccaagaagttttgcagcttcctctgatttatcggtggagtgtcaggaggctgtagcaacagtttacatttcccctgtccctgcgagtggctaggggcaagctgggctcggacgtgatatcctgctgtttgtggagaggaaactgggaacggggcttgagagtgaggggcagggagggggggacaggcatattttctactgcatcgcccatctgcacctgtcccctttgctgtcttacatgtcccatagtattaaagttatttgaataagcaaatgaaccccgctctttggtgaccgcgtattttgaagttg

SEQ ID NO: 38049 - DNA, 31 bp, Homo sapiens; identical to SEQ ID NO: 1845
  chr2:138436702-138436733
  hyper

SEQ ID NO: 38050 - DNA, 30 bp, Homo sapiens
  chr2:139259138-139259168
  hyper
cagactaagcaaggcgcctccgtgcgccta

SEQ ID NO: 38051 - DNA, 859 bp, Homo sapiens
  chr2:139536963-139537822
  hyper
aggaggagagcgtggcgcctcgcgggaagagagaagagagtgacaacgcgaaccccaaaccacattttaatacgtttcttattcctcagcgcctccgagccacccagaccaggcgggcggtctccctgaaaagacagcttcgagatgcccgagagggggctcctgcgcggagctgggcatgaaagttatatcttgtgtccccagctggcagaaagccccatcccagtccctagcgccagacggaaaacgaagagaaatccaagctgtcccccaaatccgtattttgcctaagttttctcccagcaaggcgccactacctggctctgagaacgaggatgcatgcactatgctgtgctttgggagaagtgtctgtgtgcatctgggcaaaacaccacgtgaaaaataaacaccaccaagcctctcaaactgtgaacaggaggaaggtctttctgccccttctcatcctatcaatttactttccttcctctccttgaccgcttatcaataaaccgcttccttctcccggacctacttcccggccaccttctgcctactttaccccagcgctcaagtcccaacccgtgctaagcccctgagtcgcctgtagatcccgtctattccgttcttcaattcttccctttcgacctctaaggcaacccaaaactccttgccctccgcgcgcccccaaccccacttcccaagcaggcccaggctgggctccaagtcagccgcctgcgcggttttcccgccgaaacgcgtccccggcgtgtgggacggcgcgcgggccgggcactcaccagctgcagcaagccagggaccaccacgaggggcagcggccgcaggcgcatggtgccggctg

SEQ ID NO: 38052 - DNA, 336 bp, Homo sapiens
  chr2:139537850-139538186
  hyper
cgcctgcctctcgcgcatctccacttcgcggggcaggactgaggacgccagggacacagcgcggcgcttccctcccggaatccgagcgctgcgccgtgccgcgcagctctggccgggtgggcgggcagggaagggggagggtgggcggaccggaggtgcctctcccggccccccgcgcgcccctcctcggagggggccggcaaagagcctgcggggcagctcgagctccggcacgcggcggggggcttcagtcgcgccttggactctcccgcttggccgggcttggggtgagcgcgtggggcgcctgcgggagggaggcggcggctcgggcgcttg

SEQ ID NO: 38053 - DNA, 911 bp, Homo sapiens
  chr2:142887728-142888639
  hyper
aggggcctgaatcggcgctttcgccgctccacggacctcgaatgcagcaggtaaggaagttaacctgggagctaagttgagggcggacacgcttaacgcggagaacctggagctcgcaaaagctcgcagttgagggccatcgcggagggaagtctttcggaaatgcgaattctcattccaacatctgcagcgcttagaattcgcggacagaagcgcacagccaagtgcacacactcccggaggggacaaaatggggaccgggaaacggccaaagggaaaagctgtgggggtgccgaggactcaggcacttggttcagaaatcccgcaccgcacctctcacccccgcacagggccagcgcacggtggtcacccggtcccggggagcggagctgcaaggacttaagtttcacactcacttatctgcaagcatcgcccagcaggaaagccaaggaagtcaggggaggggagcggggaggtgttctccttacctcggtcggctcccacggtcagcaccctggcaatcggcaataatcccgagagagtgagtaaggcgaggagaaactcggacattgtggtcgcccggtaaggaagcctgcgctggagactgctcggcggcaccttcggcccggcggcggcggcggcggcaggggccgcttggagcctggaatcgagcggcgtcatttacaaatgtcactggaaattcttcagctcaatgagtccagccagtcagccttctcctgcctggagcaggatgtggaaggtggagggatgcgcgcgtgcgggagagaggaggcagagcgtgtgtgagcgcgagcgagacgcccgtgtgtcttgacttttcaatgcagggtacgtctgatcttacatcacgcaagaggggcagtgagagatgccagcggatgggaattcac

SEQ ID NO: 38054 - DNA, 119 bp, Homo sapiens
  chr2:142888853-142888972
  hyper
ctgagccagccaggcgcctacaatgctccgcagttcacagccagctgagaaccctcagccgagcacagggctgcttctgcaggcaaaacaaagcttctcccttcgttcctcggaagctt

SEQ ID NO: 38055 - DNA, 229 bp, Homo sapiens; identical to SEQ ID NO: 1850
  chr2:144694285-144694514
  hyper

SEQ ID NO: 38056 - DNA, 772 bp, Homo sapiens
  chr2:144694553-144695325
  hyper
cgtggcgggtgcgtgccggtgtgtgtgcgtgacagcgcgcgcgtggcagggagttcgcgcgccagggtgcgcgtgccagcgcgggtgtgcgagggagtgcgcgcgggtgggagcgccaggggctggcggggcccgcgccctgggacgagcccctcgtgctccggctctgcgctcccgcagcgcccacgcagccgagaggagtgggtgatgacttcgtgacctcaacgtcctcccccgtccctcgacatgttcccgcgcctgaaaggtgcagaaaactccccccaccgctctggacgagactgagctaggcgtcgagggcgggcgccgccgcagaccggagctcgggctcgctggccgctcaggcgcagcggtgtggagggaacggacgcgcggcaaggcgacccgctctgggcaacgcgggcgcagctgccccgacgcaaggcactagctggtcgggggctcgggcgagccggggccggcgtgccggggcgtgcgctctctcggcaggcgagcgccgggctccgcggaggtccctgcgcccactgcctgcttctccgcccggcgacccggagtccccaggctgcggtgcgccaggccagacctgaccgagggcggaagacccgagcggcagggaggcagaaagaaaagaggtagcaagccccagacaagggatccttaattacagataaaaggcaaacaaaaccgtacaccacattttccacgtgtcagctgacggccgcgacaaaaggaaacagaacgctggggggtgggg

SEQ ID NO: 38057 - DNA, 34 bp, Homo sapiens; identical to SEQ ID NO: 1852
  chr2:145090079-145090113
  hyper

SEQ ID NO: 38058 - DNA, 1193 bp, Homo sapiens
  chr2:145273317-145274510
  hyper
caaaagacacacacacgcacacacacgcgtacacacacacaaaacctagagagagagagagagagagagaaaagcatcatttgtctctaatcaaaattctctcgtctttgtgttttgctccttccagcacctcacactgcgcccccagccgccccctccccgcgccgcgcagctctggggcaggccgggggcgcgcacaattgtcttctctagaggaaagttgctccaagtgggcccgggcggtccccgcgaggcgcgggctggggctgcggaggccgggaggccgggtgggcgctgcgtcccagcgcctgcctcgggagcgtctacgcggccccgcgccgggtgatcgggctgagagcgaggggagcgagaagtttcctttccgagtctgggctggcgctcgttcgcttgtttgttttcgggggttggtttctttctttttaaactcagttatcctccgtcagctcccccacccccccccggcaccctcgctagtccccagccctctcccctcccccaggcgccttccgcgctcttgccaatcacttttctcttttattcccacgattttgtttggggtaatacctagggggtctctctctcactctcttcctctctctctgtttctctctgtccccccgcgtcccttctctggctgtctccaaaacggacctaccaaactctcacccccccctttaatatcccacctctgatctgcgtgtgcccctcgaacccccatctcctttctccttcctccttcctgactcagcctggataacgggctcctccagaccatgtagaaactgccgggaaaagtctcgctgcgccctgcgactccttcagtccccggcctgggggcagagcctgctggagaggagtcatccgtccccgagccatcatcgaccccaccggaccccgcgcggggccggccgactccctcccaccccggggtctgggcgcgatgggccgggccccgctgcccgcggaccgttacttggcgcaccgagaagcggccgggcgactccggcaagaaactttaagcctcgctgaggcgcagacccggttcccctctcctgccttcgcagtctctctgccacccccgcccccgccccgggatcctgcgcgatccagcgcctgggcccccgccctgccccaggcggacgctcccgaagcccggccggagacccggcggg

SEQ ID NO: 38059 - DNA, 1306 bp, Homo sapiens
  chr2:145274576-145275882
  hyper
cggggctgggggcgcggggccccggccggacccccgcgctcggacccccgggtgcctgacgctcactttgcccggcacttccccaacaccccccggtccagccgccgcgcgcgccgggctccggcgccggccgcggagggaggctcgccctagagccctgggcgccgccgccgccgccgcctcggttccttttccctttccccctccttctccctgggtctcgagccgcgtagtggcccggaaaagtttggttcgggctgcttcttaccgtttttcctcctgggattggcttgtttgcgcctcttgcaccgggggccatccgccatgatcggctgcttcattgataagagcggatcagatggcagttcgcatggactcggcgccctgcttcggcagcacgcaggctcgatctagcaaccaaacacagcgacaatgtgggcatcgcccgcgcccattgaaacgcgcgcgggccgcccaggggagccgggccagggccccggcgagcacccatccgcgccccccaacgccaaagcgaaacttcggcggccccctccccgccccccacccccagccttggccccgaggcgctttgtgtttgttactgtttggtgtgttgcacccgcgaggggatcagagagacaagaattacatcttcaaaatgagtcataactcctgaccgtatgagggaatgcacacggcggtacagtaagaccgcttgactcagggctaggcggaccctttccttcgaaaagtcctcagcccccggctcgggaacttggggtgaggcgaggttttcttttcgttctcatcttttctcatccccccaccccccaattcccagaggaaacaaacaaacaaacaacgcgaaacagcccctggatgaagcacactcgggcaaattgataatagtaattataggaagcccactcgcccagcgccccctcccctccccttttggagtttatcgaggcactgtctcttcctccccccaccctcgcccccaaattaagatttcccgttttacgccgcaatgataaatataattataagcctctttggacactgtcctttaccccaccccccctcgccactttgacaatatttacttaagtatttccccccacctcactcacacacatgctcccccacactggttcccttaaatagttccagtagaattttttttttcccttaagaaaggaaagagaaagtccaaccactacggcaatacttttaagctctactaaatgatcgtatcctttctggcttcgaaacttttgtacctaaaaatcgagagaggcgctgc

SEQ ID NO: 38060 - DNA, 463 bp, Homo sapiens
  chr2:145277487-145277950
  hyper
ggaggaaaaaaaacctacctgcgaagtcttgtttgtagttttggccagaaatggtgagaagaaaaagcatgaagaagccgcgaagtgtgggggagaaaaaggtggaagcgaagaaacagctcccggagcaaactgtacaaaaacctcgccaagagtgtcgggaggcaggaccgttattcctgcagagcaggttagaactgatctctttcggccactccaggaaacacaaacctggggacggactgacgtgttacgcctcttctaatgacatttttttctttttcttttctgtaggagagagacgagagaccctgaaacacgcgccacctatctttgtggggagggataattgaagcgccctgagcgtgagcatcatgtgaaaacgtgatcgccaagtttctctctgggaaaggatctgggatagattataccttgaagtctccgcaaacgctttagtggaaga

SEQ ID NO: 38061 - DNA, 677 bp, Homo sapiens
  chr2:145281301-145281978
  hyper
gtgtgtggaggaggtggggggcggcaggggtccaagccaagccaaacggttttctcacgtgcagactcgcaatccaatccattcggagttgagcctaggataggaggggaaagtctattaaaaaaaaaaaaaatcaggagcatctctctgagaagccctttcaaacaaaaccaaaacaggaccagagaagctcagaccgtccctaacatccctgctgcgagacccgcaggctgtggaatctcgcacgtcacctggccccagcagggcggccagctgaggggttgattttattttatttttttgaagtaaaggctgaatctcggcttcagggcttttgccaacgtctccactgacaggaaccagcaaacttcaggacccaaatgagcatcttaatttattgatgctaaacaggtctggttgttgtccccaattttccgcgcgctctgccactcccccccccacacaccccgccccaacccccgccgccagcttcggtccctgcatttgatctccaggaagggccccgctgcacaggcggaggagcgcgtcgcgggggggggcggtgttcggccccctcccaccagaccgccctcccccagacctgtccccgcccgggatcctgcgacccccgcccgccgcccggtcagctgacctggctcgctcgcctgctccccgcc

SEQ ID NO: 38062 - DNA, 180 bp, Homo sapiens
  chr2:145282041-145282221
  hyper
gggaggtgatgccgggggctgattaccatgagaaaggctgtgcctggaaaagcctcctccacgcgactgtcaatctcactaaggcttggggggcggggagcggggggggggacggaaaggggccctgtaggagtcaccagaaaacttggagtaagttggatgcgacgcaggcccgaggag

SEQ ID NO: 38063 - DNA, 30 bp, Homo sapiens; identical to SEQ ID NO: 1859
  chr2:148389097-148389127
  hyper

SEQ ID NO: 38064 - DNA, 358 bp, Homo sapiens
  chr2:148601210-148601568
  hyper
gtaaacaagtatttgcgcacctattacgtgcaaaacagttttcaacacaatgctttgtgtgtaaaaggaacggcgggaatggattcaagttgcgcatcgtgataaatggcgtgaatatcctgagcgggtggacagcccttcctccgtgagttttttctttttcttttctagtcaccaagacagcacgcgtgtgcagaagctgcagcggtgggacgcagtgctaagtctgggggcgcacacaccagctcgcgcgtcgcgagctcgcctgggcagctcggcgggcgcggcgaaacagctcccacgtccgccttccaccgactcctcggtatcagagcggacgaggcgtccccccagagga

SEQ ID NO: 38065 - DNA, 704 bp, Homo sapiens
  chr2:148601815-148602519
  hyper
cggacgccgaggcctcgcggtatcgagcctccgtccgccccgcctcctcgccctccactccgccccgccctcgctctctcacccctcccccgctcccgcctcgcttccccgacaatctcctcgcgctcccggcccggcacgcgcgctgcgcccggccgccgctgccgccgccgccgccgccgccgctgccgccgagcgttcctccgctgcgcctggcttccagcttcgggccggaaccggaagtttggggggcggagcccggcggaggccaggagaccgaaaacgcggccgagcccggagcccggagctggagccagagcctggaccagaacttggccgccgcctgcaccgccgccgccgctgccgcccgccgccccttccccgcgccgcagccgcctcgccgccaccgccgcgagctcggccgccagtggtcctcggactttaggtgtctgggttgaaggtcggtccggacatcggacccagtcagttcccagactgtccgggcggcagcggacgccgctgccgccgccgcctcttcgtcgcctcagcctggcgttttgttccgagagacgggagaggcgagcggagctgacagtgattttgacagtgatttaaacccgcttttgttgttgttggcttttcgttgtttggttttgtgtgttgtgcgtgtgtgtggcggtttttcccccgtggtgcattttatt

SEQ ID NO: 38066 - DNA, 216 bp, Homo sapiens; identical to SEQ ID NO: 1861
  chr2:148602727-148602943
  hyper

SEQ ID NO: 38067 - DNA, 30 bp, Homo sapiens
  chr2:148778273-148778303
  hyper
ttcacctgccgctgcggaccgtacacaacc

SEQ ID NO: 38068 - DNA, 30 bp, Homo sapiens
  chr2:149402957-149402987
  hyper
cgcagcgctgcttacgctgccgtaaggggg

SEQ ID NO: 38069 - DNA, 30 bp, Homo sapiens; identical to SEQ ID NO: 1862
  chr2:149588676-149588706
  hyper

SEQ ID NO: 38070 - DNA, 273 bp, Homo sapiens; identical to SEQ ID NO: 1863
  chr2:149632584-149632857
  hyper

SEQ ID NO: 38071 - DNA, 1537 bp, Homo sapiens
  chr2:149632888-149634425
  hyper
cgcccgccgcgtggtcgcgggcaggtgggccggggggcgctgggcaggggcggggcagggccagggcaggccggtctgcagccggaggggccggagcggagaagctgcccaccttcccgggctcggagcggccggggctgctcagccggccgggctcgcgatgacctgctgagaagcgtcgtcggaggctgcaggaggcggcctagctgtgggcggtgcagctcgcggcctcctccctcgtcgttcccggccccggccccccacccatccccgtgccccctccctaccgccggccgagatggcggatccagccgaatgcagcatcaaagtgatgtgccggttccggcccctcaacgaagcggagatcctccgcggggacaaattcatccccaaatttaaaggcgatgagaccgtggtgatcggggtaagtggctggggcgtctgccttccctgctgctccgcgccgcagctgggcgccccgacgccccagacgcagcggaggtgtttaggccgccccctcggacattcccgcggggctggcctctcgggtggacctgaccagagacccctcgccccgcgcactatggttccctcccgggcgggtggagaggcggccgggagcggcgggccgggcgggggtggcgggggtggggatggggggcgaagacgggctcggcgccgccattgttcgccgggtgggggcccgggtgggcccattgttccccacgctcgcctcgccgcgtgggtagtgtgttcgggtgaccctcaagccgggtgcccaggccccctttaaagtgtgagctctgcaacccgcaaatgcttctgggcatcaatcaattcgatttaccaaacgccttgcctcttcttctcacgaccctagcaaaaaagaaagaaaaaggggtacaggaaaatttctagtcgcgtctcggagctcccgcggcagtgtagacgcggctccccgcggtgttacacctggctccgcgcgcggaaggcggagggttgggggagtactggtggcctcggtgtcccctggaggcctggtgtgtctcccgcttcctctcacgcctggctgccctggatgtggagtcccggcttgatccctcccctctgggatgacctccctcccatgtctgcagaccctctgatgcgcctcacgctgggtggagaggaggctgtgtccacatctgtggggcgagggggctcagagcgcagtagccccctgtgccaagagcagaagttacttcgtgcggctcggacccccctccctctctatctcccttccccaccttttctcccccaccccctccccctacttagctccctctctgcagctggggctgctggtagggggagggaacaccaatggattgtagttcttaaaggaatctgtcagatgaaacaaaccagctcggtcccccgccccttccccgcccgctgtccgtagcgtgtgtggctgatggtgccccctttgtatgcgagccgcgtggggagggaccgagttaatgggagcctcccggtccccgctgacacgttcctg

SEQ ID NO: 38072 - DNA, 689 bp, Homo sapiens; identical to SEQ ID NO: 1866
  chr2:149645383-149646072
  hyper

SEQ ID NO: 38073 - DNA, 174 bp, Homo sapiens
  chr2:149894864-149895038
  hyper
atcattttcactcccgagggtctgcactcctcgtttctacattggttttctaggaagaaaggggttggaccctcccctctttaagctgggtggggtccgaatcccgtgcttctttcacttcctgagccgggctggctgggtgggaacaggctccttgccgcctccccagcgctg

SEQ ID NO: 38074 - DNA, 208 bp, Homo sapiens; identical to SEQ ID NO: 1868
  chr2:150061810-150062018
  hyper

SEQ ID NO: 38075 - DNA, 30 bp, Homo sapiens; identical to SEQ ID NO: 1869
  chr2:150153324-150153354
  hyper

SEQ ID NO: 38076 - DNA, 39 bp, Homo sapiens
  chr2:150186116-150186155
  hyper
gtggggaggctggttccgagtttccgggcatatccgtgg

SEQ ID NO: 38077 - DNA, 30 bp, Homo sapiens
  chr2:150186691-150186721
  hyper
gcgccagggggtcgcgcacaggaaggtatc

SEQ ID NO: 38078 - DNA, 30 bp, Homo sapiens; identical to SEQ ID NO: 1870
  chr2:150187474-150187504
  hyper

SEQ ID NO: 38079 - DNA, 30 bp, Homo sapiens
  chr2:150444421-150444451
  hyper
gggcttccgacctgcgttaggcgggtcagt

SEQ ID NO: 38080 - DNA, 2069 bp, Homo sapiens
  chr2:151341764-151343833
  hyper
gagaggcgctcgctcgtgcgagacttctcgcttgcctttgtgctgggactgcctctggcgaccctgtcagtctggttccttcctcttgctctctgaacccccgcgtccctcgggggctccagcggttcaagcccagcggttctgtgggaagctcacagaaacacctccacgaggccactccccgctgggcgcggctccacctcggggcctccccgcctaacagcaaacctgcttgttggcacttgcgcgttcctcctcgccagtttcacccggatttggctcggtccgccagcaacccagctccttgctaaattcccagccctaagcgcaggggcctttacccagccttcccagtgggtcctgcttttccatagccgacacccttcttggaaacaaactcgctagacaccgctggttagggcggcgggtgcctatgtcccagcccaagacctcagatggtgcccccctgccactccccggcctttgacctggcctaaacccctaactcagccggggggccggatgccttcccaccgggagggtacctagccctccctaccaccgcgcgccaggtaggtgggtgggcgcatgggaaagcaataacccggccttgaacctcagacccatgaatataacccaccgcggcgccaataattcaagtagactggaaggtcaaaggcgaatagtgttgcccgcggccttggaggcaagccgagtgggggatgcaatagaggtcaggaggggctggtgtggtgaaggggaaacggacgtgatcactgggatggagtgggggaaaaagggaaaagctcggtacaggtgggcaccgaggcaccgcgggcggccggcagcgcgaagaggaggttcagctgctgcccggcccctgcgccaccagcgcattcctgggtgtaggcgtcacgggcgccgcggctgcctgcgctcagtttctttccctcaacagcggcaattgcacgtaaccgcgtcgcctctgggattttctcccgcctcccatcacccccgcggcgctccccgcctccccgccaaccagcaggttagatctaggaggggcgcccgccttgagccgggtggttccgccgaggcgcacgcagcgcccatgcaacaccccacagtatcgggccacctcggccgacccaaggcgacttgaccacgactccgcgggcggactgcgcctggccactagtggctccaaccgcggggtcaccctgcgggcacacagcgctctcctctccccactgctatctcctcgtccacgctgtcgtctgccgcccccacccagaagggatacaattttcgcccaacagggaccgtgggaatcccttgggaggggcgcagacggcttgtagcgcgcggtttcccgagacccgccgcgcatcccccagcgactggaaacccgccccaagcgccacgcggtcctcccactcttacccgaagtgtcccacaggctcaactctattctttgtgtgtcgatttcaaaactggccgtgtaattctcaaacactgtaggaacgtaattctggatagacaaaatgggcaaaagaggaaggaaagagggcaaagaggttacgtttaaacgcacgacacccattgaacacccttcccctccccgctccccagttaagaaagaaaaccttcacacatcagaccacacactaagcacatggaccctttccgaaacccctgtcctactccccactcaccccacccggctctcacagatctgctgacccgaatctcccaaccccaggttatgcacacaggaacgaacaagtttcaggagctaaccagcccatgtgcaggcgcgtcccaaccctaaaagcttccagcgcactttccctttccccgcagtctaatcaggggaaagtagtaaggaccgagaaagacttttttttttctttttttttttttttaagggaaaacggatgaaagcggggaggcccacctcgggactgggatcccactggccgaccccctcgtggaagccgcggccggccacactcacctcggggaagcagtccttggcgaagacatggagcagcgcagtttttccacac

SEQ ID NO: 38081 - DNA, 305 bp, Homo sapiens
  chr2:151344061-151344366
  hyper
cctctgaaacgcggcgcagacgaggaggagagcgagaggagcaggctggttactcccctccaacaagttttaagcctgactcctcaccgcgcctcccaagtccaattccgagccgactgctttgtttcacgctctctgcgcggctttatacgcccggccttccaatcctcttctttctcaatgagaggaggaaactgatctgcctcctccccttttatggagcctgggagcgagcgctgttggcgttgcatgccgaaaatgtaagcagtgcgccctctagggtgcccattcgggatctattttag

SEQ ID NO: 38082 - DNA, 30 bp, Homo sapiens
  chr2:152118185-152118215
  hyper
cgacggtacaggcacggacctgcaccgcaa

SEQ ID NO: 38083 - DNA, 30 bp, Homo sapiens
  chr2:152145855-152145885
  hyper
caagtgacaaggctcgaagccctgacggcc

SEQ ID NO: 38084 - DNA, 110 bp, Homo sapiens
  chr2:152685151-152685261
  hyper
gaggctgtgaagaccgcaagttggggcagatggcttccgactgcttgctgttgcgtccccgagtatttatatttccctcgaattttctccactgcgccataatgtaaaca

SEQ ID NO: 38085 - DNA, 724 bp, Homo sapiens
  chr2:152954360-152955084
  hyper
ttgaccggagcttgacgatctctcccaagatccagacagataagagtattcaaattaggacaaaacagaagaaaccactaaatctcaactcgaatcaaaccaggtccccggccccgaggggtctggttactctaggtcgagttatacgaattaaagacatttctccacgcaccaaagatacaaccagacatatttccagctcttaaattcaacgtccctgacttaagccaggtccccaccgaactgtccacacacatgcacaaactaacttcccggggcggtgcggagacgccgggacgcgaagacgtcaagagcccaggctagagggagagggactgagcccgagcaccggccgaggccgggaagagacgcgcgcgggcttgacccgcagctcccgcacgtgtgggccacggccggctccaggacccccgcgccgcgcgctcggcctcctccccatcctggtctcccgcctccttctcatacctgtctgaggatgaagctggtcgaagtggtgctgccatcggatcttttcaacctgctcctccgggttgtggtgcctcgggccacctggactcgacacacgggggccagagagaagccggtgaggaccgcagcgcagagcggggcgaccacccccggctggagtccgcctccggacccgctccctggggtcccctagagcccgcacccaagtctcctccgcgactcccaaatacagccccca

SEQ ID NO: 38086 - DNA, 30 bp, Homo sapiens
  chr2:152955768-152955798
  hyper
cggattgggagaagcgctctcccacctagc

SEQ ID NO: 38087 - DNA, 131 bp, Homo sapiens
  chr2:152956019-152956150
  hyper
gcagagccaccttccgcgacttcactcatcagcctaatgtgtaaggcatggggttttgtggcttgcttttcgtccgtgtttttgtattgctttggcaattctgtccttagagctgcgagtcacacacatcc

SEQ ID NO: 38088 - DNA, 30 bp, Homo sapiens
  chr2:153191807-153191837
  hyper
tctctggcagggggcggtgtgccagcggag

SEQ ID NO: 38089 - DNA, 339 bp, Homo sapiens
  chr2:153192136-153192475
  hyper
tggattcgcagcagaccgatttcagggcgcacaacgtgcctttgaagctgccgatgccagagccaggtgaactggaggagcgatttgccatcgtgctggtaagtgcgcggcggcggtcgggcgcggggacccggggccccgggccgggcggcgcagctgacccccgcccctccccttcaccccgtgccgggagcgagcctccattcccgagggggaggctcccgctttcccctttgtggccccccagcactcctcttcacccccctggcagtcccccgcgctcagtctctcggggtcccgggatggggatgggggctcagggccggctgcccaaccagc

SEQ ID NO: 38090 - DNA, 31 bp, Homo sapiens; identical to SEQ ID NO: 1876
  chr2:153573617-153573648
  hyper

SEQ ID NO: 38091 - DNA, 162 bp, Homo sapiens
  chr2:153574182-153574344
  hyper
gccgagtcctccgtcgggaaaactctaccaacttccccaggggaagggaagacaacagtgtcccagcttcccgagcttagaccgcctcaccccgtagggggtggggcagtgggggtctgccaccttcaccctccccgcccgagttacgtacgccccacaaac

SEQ ID NO: 38092 - DNA, 30 bp, Homo sapiens
  chr2:153575584-153575614
  hyper
cagggtgtggctctcgtctccacccatctc

SEQ ID NO: 38093 - DNA, 1502 bp, Homo sapiens
  chr2:154333302-154334804
  hyper
gtttaccctagggagcattaacgtcactaacgtcactgtgtaccttagcagctacttttcctcgcattttataattccccttccctccgccccccggccccacccgtgggcagcatcccaaagccgcctggctgacgttggttagggtagagacgccctccctaaaggctgtccaagccgtctcttcctttcattagcggtgtaatcctgtgttcccgccggagcctggcacggaagtgtaatcttcccgcgggggcccttctgtcgtctcgcctacctgagagctgagactaaatgaaatataaaatattcacgataagaggaaacaaaggatgctgcctccaggacggctactgtgcctgaggctgggctccttctcagtcatcccagggcctctccgtctggccccaccctcgcccctccaggggatccacaagttgaatcgcagctctccagggttaattgccctggccgggagccagactcctcaccgccgccccgttcccccctgctggggagcgcagaatgaccaccaggaggccaggaacaaaacgcttaaatgttgcatttattaaggaaatgttaaataagaaaaaaacaaaaagtcaaaacggtgtcacggatgtcaagagcacttttgtggcgtaaaccgtgcagtcacgagctacgagttctattctgggtctttgtcccagggccagcaggaacgctagacgcctcccaaaagacccagtgggaaatgcactaaaagaaacaactcaccccgttcaaattcgcaggctccccctccccccaccccttctcccacaatgacaaaactgtaactcctcaggcaggcaaacaggccactggggcagaaaaagacttatcaaacatttgtattcaagcaaacaaacacaaaacctcttaaaacggcacgttacaatcaaaggtatttatcgcccctcccctccagggcagggggggagcaggagaagagtgggagcgcacccggacacggatttgtgagaccccatgagtctgctgcgtggcttttaacaggtcactcttccggtcacaaggcgatcagtgccgctgggtctctcccctgcccgccctctccacctgcccccagagcttggcccacctgcgggtggagaagggccttcgcaccgtcggtctccccgcattccaagtaagtagcagcttccaaagttctgcgccctaatcgccctcttcttgccactttctgctgagttcagagtctgggcgctctcctccgactgccaggcatgaggactttcagagggcgagggagaaaccggtcgcttctttccgaaaggccgaagtcgagagaaataattgactccgacaggtttgcttcgcccagtctctgatagtgaggggcacagccgggctagcaaagtgggcaggcgtgggagcggttgccgcgggggcagagggcgggtcagtagggccccacgaccaccgcctccacctccttagacggcctccggtccttc

SEQ ID NO: 38094 - DNA, 609 bp, Homo sapiens
  chr2:154335184-154335793
  hyper
gtgcgagggctcctcgctctgctttcgaaagtccctgggccgtgggagtttcccaggagcctctccgacgcgcgcagcagctaggctcttctaaagccgtccgctccagccctggtggtgctcgttcccggcgctcgctcgagggggggctgttggaacttggcggggctggaccagcccggccgtgggaggtgcgggccgcggcggctgcagcggcggggtggctgcgctgagcaaacagcggccccttccggccgcaccgccgcgctgcgcgctgctcttgggaggtggaggaagcaaaggggcgaacctggtcttgctttttattgcttgcttcttttgcaaactccaaaggccaggcagaggtcactgtactcttctagcttgatggatgattaaagagtttgtcgggggagggtgcggtcagctgaaagtttcagaggaactgggacacacgagctctgcgtgtcctttgcctgctgcccccctgacctctgggcgaatggaaagtggcgatgaatcgcaggtgccagatggtgccggctgaggcacccgcccactgcctgtgcttgactccgactcgcctgcgttggatttctagtggagtgg

SEQ ID NO: 38095 - DNA, 133 bp, Homo sapiens
  chr2:154729082-154729215
  hyper
gcccaccttctgctctgcttttctggctaccccggtgagttgttggtggcgggggggggggggggagcggctctggccccctctgcgttctggtgacgttcctccgcgggggtggctcggcctccaagcccag

SEQ ID NO: 38096 - DNA, 657 bp, Homo sapiens
  chr2:154729515-154730172
  hyper
ctgtctttccttttgtctctccgttttgcaacatttgttctctttctgtgtctgcttctcgcagcttatctctgtctccctctgtcatctctctgccccgtcttcccgaacaccagccccgcgatcccgaagcgccttggttaggggagcaagccctggcgcatctaatgggtatctccaggtgcagagattttcctgcggggtcagtggggacgcggaggagacagcctgcccttgtccaggctgtcgtggacctgaaggaggggcgcaaggggttagagtggagggcaccgcagcaggctccccttgccgggtccgagggcgctgcgctgctgcgaacctgagcgcactgaggctgctactctggacagcgaaagctgcgcaagcccctcccgcatacccgattctttgactatggttagttgaatttccaggaggagagtctgcctccccaacctttatagccagctgcagaagaacggacagtgagcaggcaaacatagatgctttggggttcagggaaactaacctcgaaagggtgggagctttcttcaggcaaaggtgttgctagcagaggagaggagctttggggactgaggtatgcctgccttaaactaccatgcattcattgcttaggaaagcggtttccttggagag

SEQ ID NO: 38097 - DNA, 80 bp, Homo sapiens; identical to SEQ ID NO: 1883
  chr2:155553935-155554015
  hyper

SEQ ID NO: 38098 - DNA, 1096 bp, Homo sapiens; identical to SEQ ID NO: 1884
  chr2:155554076-155555172
  hyper

SEQ ID NO: 38099 - DNA, 1261 bp, Homo sapiens
  chr2:157176434-157177695
  hyper
agacgctcgctccagcgctcgcaggcctagggctcattacatgcgttgcgaggagacctgaaagcagggcgggaacgcacaatctatcttcagagctttgggtcgtgagcacacgtgtggagcatggttgtggcatgggcgtctgggcccctctcctagacctccacgaggtgcggacgcgcctctgccccgcccttttgtgcgccctcaccactagaaaaagagttttccccagtgtcgcgtgggaggtcgccccagtccagctcagcgttccaagagaccagagactgaccggaaatcgttgggtgcagggagaagcaggagacgcgctccgcctcctgtgctcgtgccctagcgcaacagacgcgacctagaggcgacggcagcctgttgcagccttcgccctgagggtggggggcgggggggtgtagaacagctgaggaagacgcagggagcagctggggaggaaagggagggacaccgaggaaacaaagttcacccaagtgaatgcgtcctaattgctccaaggctctctccgcaaagtctacgactgcaagccgcaaagtcaaactacgtctccaaaacgcagtgggcagagcaggagggcttgtgtctccattttcgccgcagggcggatcgcggacacaagtcctctccagtaattccgaagcctcgaaataagactatgctgggaggaggggttggggggtgactaataagaaggcgtgggggtgggggtggggagtacgcggcaagaaccctgctttctggaattctcccgccactgtctgcagggcccagagcgcacttcgcggctagggaacaaaattgccgctctcttcgagcgcccccagcgtggggtggggccctgctttcccgcgtcaggaccgccccaccaggcgccctccgacggaagctggacttttcctaaggaaaggcaaagtcaaagtcggaggaaagatctttcttgcggccccagctgtcgctcctaatggtctcggggaacatactaaaggaaaatgactttaaatcacagtcttgccatcctaaatagttatgtgcaatattttggtttctagcaaaatttaaaagtaaaatggggatttccatatgttcattttattattaaaaacgaattactaaaaagtgatgacctgtttggaattcatatcttgctttacgagcagtcagccagtatcgactgaacacaataaatgcaggggtgcgaaacgtgattgctcgggttcgagttctgtcggat

SEQ ID NO: 38100 - DNA, 338 bp, Homo sapiens
  chr2:157177921-157178259
  hyper
tcctattctgacagcggggacaaatggagaggggaccttacaacctcctttggagaagaatatatgagaaactcacttccagacctctattcaatagtgaaaataatactgagaaaaagttttaaaatctccaagaatagatactctcctttccccttccaccttgagggaaacggtctccatttttgacctggatttgagagcatcggggcttgagacaagcgcgtcttccacagagagaggcgaggcccaggcagggagccccccagcctttactctcggcacctcggcgctgccgcgcggcggatacaaaaggaaacggacgagcgtgcgacgcg

SEQ ID NO: 38101 - DNA, 31 bp, Homo sapiens; identical to SEQ ID NO: 1887
  chr2:157188948-157188979
  hyper

SEQ ID NO: 38102 - DNA, 213 bp, Homo sapiens
  chr2:157189364-157189577
  hyper
acgtcacgagcagggccgattttaaggtgggaaccgctctgcgttcaccttggtagccagcttgggtggtttttggtgttttttttcttttctttttttttttccgaaagaggtgtgacctctcccaggtctgcgcagcccgcagcgtcgcgacacttcactttccccgaagcccctgcgcccgcgcagcggctcggccgctcacatgtgggg

SEQ ID NO: 38103 - DNA, 30 bp, Homo sapiens
  chr2:157190296-157190326
  hyper
ctggacaagaaaagcgaagcgggtggggat

SEQ ID NO: 38104 - DNA, 30 bp, Homo sapiens
  chr2:157198054-157198084
  hyper
ctgcctgcctgccacgtgcgagacgctcca

SEQ ID NO: 38105 - DNA, 30 bp, Homo sapiens
  chr2:157198321-157198351
  hyper
ggcctctattatctcggcttctcgggagga

SEQ ID NO: 38106 - DNA, 30 bp, Homo sapiens
  chr2:157257095-157257125
  hyper
gccagctcgttgcgcgaggtctgaatgcac

SEQ ID NO: 38107 - DNA, 460 bp, Homo sapiens
  chr2:157292162-157292622
  hyper
gccgggggagccgggcgagggttctgggctctgacggcggggtcgcagggtcgcccgcctcctggacacgtctgtaggcctagggaagcctgccggccgggaggtacagagtaggagaagccagatcccagggcggacaacgagaagtcgtcaggtaagccagccccgccagcgtgccggcggacgagtgtctcctctcccgcaggcagatggccagggcggcccgcatgggcgagggcacaggaaatcggacaccgccaccgtcttccccagcctggcctagctcaggctttccagtccgccagcccgctggcaaggcggggcggaggtctggagtccggcatcgccgaggcacaaagcaggaactgcagccaggggcgagggcccttgcgtgtggcgctgcgcgaccccacccggcggcaggacccgcgtccccgtctagtcacgttcattgggccac

SEQ ID NO: 38108 - DNA, 412 bp, Homo sapiens
  chr2:158484506-158484918
  hyper
ctcgaaagcaatgtgcgttgcaaaccacacagatttaagctcccactctcgcctccatagcttggcatctgcggcttttggggtattccccgcctcctaaaactcagactaaatcaccacctcccaccaccaccatgccaccatccttgagcagctctcaggggcttagcacagagcgcgtccgacgcatacctgcagccctccaggtccctgcagggtgaacccagctcccagccatgcgcgcacccacaaacgctctcctattttctccgctgcaaactgcccacaaattagtcacccacctcacccctactacttattcccccacgtccctgctgccttttccctcttccgggcggcttcgtccccaacacacctgtctacccctacggctgccagacgtcaggtgccc

SEQ ID NO: 38109 - DNA, 349 bp, Homo sapiens
  chr2:158484949-158485298
  hyper
cgactggcgcttccctgtccgccccgaaggtcagtttgctcggagcaccccctgtcccccacccccgtgctcacccgcagacctcctcccagctcccaccctcgcgggcgtcgggagagaaaccagcaccgtacctggcgagagctcggcggccgctgcgagcagcaggagagcctggcggagcgctgagcagagcgcccgggtcatcgccaccaggcggccgcgccggggctgcgaggccccagagcagagcgaggcagccggggcagcacggcccgctttgaagttcccgggccgcgggaggggagcgcggcaccgacacccttttgaagtgcgcggttggctctag

SEQ ID NO: 38110 - DNA, 30 bp, Homo sapiens
  chr2:158485511-158485541
  hyper
cccggcagtgagatcgcccagagctggggc

SEQ ID NO: 38111 - DNA, 68 bp, Homo sapiens
  chr2:158485822-158485890
  hyper
tgcctctggggaagggcgccctctctgttcatccctggaaatgaccagttgtccgactgccttctgga

SEQ ID NO: 38112 - DNA, 31 bp, Homo sapiens; identical to SEQ ID NO: 1892
  chr2:159313053-159313084
  hyper

SEQ ID NO: 38113 - DNA, 565 bp, Homo sapiens; identical to SEQ ID NO: 1893
  chr2:159313328-159313893
  hyper

SEQ ID NO: 38114 - DNA, 700 bp, Homo sapiens
  chr2:159314097-159314797
  hyper
ctcgcggcggcttccccgctgcctgccgccgcgcgccccaagtcgccctcgacaccactgggcgcccgccctcctcagcactcggggccggctgtctgtccttctagccccagatcctgcaccttggtcccctccccgtcttcccacgcccctgctgcccgcgcggtcttgcgtttgtccccgaagtcctgtactccttgccggtcctgcccacccctctgcctagtgcgcccctctctaccggccgcggatcctcacgctccacccctcccggctccccagcgccgagcctcgccgctgccctcctgcgccgccgcttcctcctctccctgccaggagttgaagcggagctgcggcacctccctggcggatctggtatccccgcccgctgccgaggctgccggccctctcccctggaccgctacccggagagcgagcggcggggccgggatttggctgcgtgttggctgagtgcgacacaccgcgagcgcgggcagtggaggtgccgcggcggccgtggccgctcggggcgcagcggtagtcaggtgtgtgtgtacagcgggggacgcgcgctgccggctcctgggctggcgacagattgtgcaggaatgcgaggaatgcaccaggggcagagtccacacagcccgccgcggctgccctagcgccttccctccccagctctcgccgcgcagccagaggt

SEQ ID NO: 38115 - DNA, 30 bp, Homo sapiens; identical to SEQ ID NO: 1895
  chr2:159660261-159660291
  hyper

SEQ ID NO: 38116 - DNA, 861 bp, Homo sapiens
  chr2:159825049-159825910
  hyper
gagaggaaggtgccttcgggaacacgcgcaagggcggggattcgcgctgccaatgaggccccggtgtgggccgagcaaggcggggggacgggccggagcggaggctttgctgtggcagctgctggagcggcggccgcctcgggagccggaggagaggcagccgcggagcgccgagctggcctcgccccgaggcccggccctgggtgtggggaaccgcgctgaggagctggaaactttcccggcaggtaactcccgcagcccggactccgccgcgggcctgcgagcgccccgggcatggccagctgccagtgtgcggagaggtcgagagggacccggggtggagagggtgatgggagaagggaaaggcgtgtgggaaagtttctggagcgccccctcctccgccgggcacacccgggagctttccgggaataggcacagacatgttgggcgccccgggccttggtctctcggcggctttggggagtccgcaccttccttgcgcggttcccccgcgccggaccgagccggcctcccctggaaccggtgtggtgggaaccgggaacgcttggggcacgctcgagttctgggaccacccccgcccggcgcgcccgctcgccccctttcccgccttctctgtagccctcgggcttggcaagggcctgggctacgcctggtacctggcgcgggggaggcggggggaggcgcgcctggcaccgcggggtcctgggcgccccccggagtgttggggtgcgcgggtcgcgaagttgccgagagaacttaagccggaggcatggtattgccccagtctgggctgaaagtctattgctttgcttccaagaacactgcgattagcatatccac

SEQ ID NO: 38117 - DNA, 137 bp, Homo sapiens
  chr2:159826350-159826487
  hyper
tgccagctccagatccgcgtgcctccagtgttgggaccgttctcagtggcgttgttccctgctggagttaacttgggaggtgaggagggaactttcatcttgaacttgaccccagaagcagcgtcgtccgtacaggt

SEQ ID NO: 38118 - DNA, 507 bp, Homo sapiens; identical to SEQ ID NO: 1898
  chr2:160142448-160142955
  hyper

SEQ ID NO: 38119 - DNA, 30 bp, Homo sapiens
  chr2:160373206-160373236
  hyper
aaacgtgaatgctcacgtgataaaactaag

SEQ ID NO: 38120 - DNA, 30 bp, Homo sapiens
  chr2:160471841-160471871
  hyper
gagttgggagctggcggtcgttcccgggga

SEQ ID NO: 38121 - DNA, 58 bp, Homo sapiens
  chr2:160472575-160472633
  hyper
cgaggataaacagcggcggagggcgagagggcggcggggcgagcgcctccacgcagca

SEQ ID NO: 38122 - DNA, 30 bp, Homo sapiens
  chr2:160568797-160568827
  hyper
gccggccagccagccgctgccgcttaccag

SEQ ID NO: 38123 - DNA, 30 bp, Homo sapiens; identical to SEQ ID NO: 1899
  chr2:160569033-160569063
  hyper

SEQ ID NO: 38124 - DNA, 31 bp, Homo sapiens; identical to SEQ ID NO: 1900
  chr2:160654434-160654465
  hyper

SEQ ID NO: 38125 - DNA, 279 bp, Homo sapiens
  chr2:160760619-160760898
  hyper
gtgaaatccgggaatcgtggggaatccttggcgctgtgggtggaggctcctcttggccctgtggccaaggtgaccaagggccgaaggaaaagcgagaacgggagggacgggacgcaagagggcagatggggaaccccatactccagcaacattatataagagaggcgacgatggagcagcgcacccggccaaaaaagcctccgtgcgcctactctacggtgcaccgcgtcccctctgcaccagaagggccctgtcctcccacatccaccgcgccctcct

SEQ ID NO: 38126 - DNA, 423 bp, Homo sapiens
  chr2:160760959-160761382
  hyper
cggctccagagcccccccgccccaacagcaaagcagccgtgacctgccccaggggcgcagccctgccccaggctggaaggcagcagagctgtggcgtcgaggcacccagcggactgcggggctggcgtgcccgcggttacctgcgcggccagagggctccgcgagatcgaagaaccagaagagcagcatgaggagccccgccgggcggcgaggggtcgcccagcctgtcctcatcctgagctggcgcaagccttccggccgggtcctcgggcgcacgcggctcccgccccgcctgctgagcgcggcctgccccgcccgcacctctgtctaggcctctgggggcgccccggccccgcccccgccgccctcggccaatcagacgtgcgtctcctcggccccggggcggagcgggccaggtgtggg

SEQ ID NO: 38127 - DNA, 850 bp, Homo sapiens
  chr2:160918582-160919432
  hyper
gagggtgccgggccgcgcaagtggggtgctgggcctagacaagaggctgcaggacaccacccgctccccccatgctcaggactgctgacacacgaacccctacaaacgcggccgcccttgcccgccagcttggcccctagcttcgccccttcttcctctccttcgaccaccccgacccccctccccaacgtaccgatccagtccccgaccctgggagactcaccctgccactccaggagccgctcgggggtaagcgccgccgccacaccctcggcgcagccccgcggcgcccccagcagcagcagcagcagcagcgacggcgacagcagcatcgctaaccactgggctctccgggagccccttgtcccgggagccccttatcccgggagcccagagccgcgtcccaagcacccggccccgccgcgcggaagcggatccgtagcctcctccgcgccccaccccctccgggggccttgccagcccagagccctggagacccactccgccaccgctgtctccacagtgaaccgacactcggggctctgggctgggatgcgggaaagtcgcggaggttttcctcgccccacccactgcggcttggggaaggaggaggaggaggggtgggccatctgcccatcccagaaattcctgcctttggggtggggacaggcggagtgaggctgctcgggtcacactctccgctcctctagcttgcagccctgctctctcctttctgggggaggccgaagaggagttgtgggtgagcgatttgagaatctccgggacaaggagcctgacatccgggtttgcaaaccacctggattctggtaaacaccgcggatttgcagcg

SEQ ID NO: 38128 - DNA, 658 bp, Homo sapiens
  chr2:161126280-161126938
  hyper
aagtctctcagagtcgcataaaacaaccgaattctttaattcaaagccacgttttcaattctgagcagcccagagacctgccatcgctttctcgcgccgagtcacgtggtctggcaaggcgcgcggtttcctccctagccgcccccagctgccctgaaccttcaaagtcacatttcagtcactccccagtctgaccaacaacgctcacaatgagggcgctgccagcacaggcgacggcctgcgctccagtcttacgaggaaccccaaattcaagacccctgtgacccaggcctgtgtgccccgacaggctaaacctccgcccaggggcttcccgatgtcggctgcagcgggtctgggttttcggcctgcagagctcgcgtctgacggctgaggaacaaaacaccctccctctagcggctcaagcgcacacaccctcttgccttccgcagccaccgagcgagtcacgggagacactctggagccattttgcggggctggaattccttcgcccggcggagctcggcgcgcacccgtcagctgtgccgaggaccctgcgcccggggggccccgcggccacgtgacccccatctggctctcggcctggactgagggggctgagctcatcgcgttgctattcgaggggcagagactgcctggc

SEQ ID NO: 38129 - DNA, 403 bp, Homo sapiens; identical to SEQ ID NO: 1904
  chr2:161263951-161264354
  hyper

SEQ ID NO: 38130 - DNA, 327 bp, Homo sapiens; identical to SEQ ID NO: 1905
  chr2:161264419-161264746
  hyper

SEQ ID NO: 38131 - DNA, 43 bp, Homo sapiens
  chr2:161349351-161349394
  hyper
gggaggctccgcgccacggcgaggggagcgaagagttacagct

SEQ ID NO: 38132 - DNA, 154 bp, Homo sapiens; identical to SEQ ID NO: 1906
  chr2:161560559-161560713
  hyper

SEQ ID NO: 38133 - DNA, 31 bp, Homo sapiens; identical to SEQ ID NO: 1907
  chr2:162101443-162101474
  hyper

SEQ ID NO: 38134 - DNA, 30 bp, Homo sapiens
  chr2:162164758-162164788
  hyper
cggcggggcgcgagcgaccagggcgctaag

SEQ ID NO: 38135 - DNA, 393 bp, Homo sapiens
  chr2:162271729-162272122
  hyper
cactctgtctccccagatcagcgcttctgacgagcccatttgcacggggactcggccctctcttttcctggcgaggcttttgaacctgtcgccaagccagtacctcagagagaaggaaatgcagagggacgagaaggatgcatggcgcctgcccccagttagatgttcttcagataatctgcaaccaagtgcgctgataaaatatttaataaagagccggtaaacatcactgcaaatacattaaggcatttcagcccgacagcttatgattatttcaaaacttaaaaaggagatcatagattgtcactgtttctgtactcaaccaagaaaccgaaccttcctgaggtgggtggattggtgggtgagttgctgcttttcgccccctctcctccc

SEQ ID NO: 38136 - DNA, 318 bp, Homo sapiens
  chr2:162272996-162273314
  hyper
cattcaggcggatccgagcttgtcttgcacgatcatcccattatctcgaccactgacaacctggagagaagttcacctttgaaaaaaattaccagggggatgacgaatcagtcagatacagacaattttcctgactccaaggactcaccaggggacgtccagagaagtaaactctctcctgtcttggacggggtctctgagcttcgtcacagtttcgatggctctgctgcagatcgctacctcctctctcagtccagccagccacagtctgcggccactgctcccagtgccatgttcccgtaccccggccagcacgga

SEQ ID NO: 38137 - DNA, 268 bp, Homo sapiens
  chr2:162273382-162273650
  hyper
cggagcctacaacagcctcctgtccaactcctcgccgcagggataccccacggccggctacccctacccacagcagtacggccactcctaccaaggagctccgttctaccagttctcctccacccagccggggctggtgcccggcaaagcacaggtgtacctgtgcaacaggcccctttggctgaaatttcaccggcaccaaacggagatgatcatcaccaaacagggaaggtaatactacatttttggctgccgctgctctaggcgc

SEQ ID NO: 38138 - DNA, 113 bp, Homo sapiens; identical to SEQ ID NO: 1908
  chr2:162273852-162273965
  hyper

SEQ ID NO: 38139 - DNA, 442 bp, Homo sapiens
  chr2:162274784-162275226
  hyper
aaaattaaaacttacgaacaacaaaggagcttcaaataacaatgggcaggtcagtggctcaagcgctcgtgttttctctctctctcaccccttcctccctgacatccagttcgtcagtgtaaagcagcatatggaactggatacacgtttctttgcttcattaaaaagacttaaaaattgtatttccaccctccaaatttatattaaatctgtaaagttgttctcattggcaacacctccgtcggcccaattttggagtgcccgaccttcccaagtactaatactgattgattttgagaagaaaccccacaagatctgcaggttgtggaaatctttgttcctccttacaggaggactaggagaagggccctgaggatcgggcggtcggcttcccccttttttccggtgccccggcttatcttcgctcccagaggtgcgaaag

SEQ ID NO: 38140 - DNA, 127 bp, Homo sapiens; identical to SEQ ID NO: 1911
  chr2:162275310-162275437
  hyper

SEQ ID NO: 38141 - DNA, 337 bp, Homo sapiens; identical to SEQ ID NO: 1912
  chr2:162275472-162275809
  hyper

SEQ ID NO: 38142 - DNA, 263 bp, Homo sapiens
  chr2:162280152-162280415
  hyper
ggccaacaaccggctggacttcgcggcctcggcctatgacacggccacggacttcgcgggcaacgcggccacgctgctctcttacgcggcggcgggcgtgaaggcgctgccgctgcaggctgcaggctgcactggccgcccgctcggctactacgccgacccgtcgggctggggcgcccgcagtcccccgcagtactgcggcaccaagtcgggctcggtgctgccctgctggcccaacagcgccgcggccgccgcgcgcatgg

SEQ ID NO: 38143 - DNA, 132 bp, Homo sapiens
  chr2:162280740-162280872
  hyper
cgcccctgcccgcccggccccgccgcggcccggacccccagccagcccctcacagctcttccccagctccgcctccccacactcctccttgcgcacccactcattttatttgaccctcgatggccgtctgca

SEQ ID NO: 38144 - DNA, 30 bp, Homo sapiens
  chr2:162281116-162281146
  hyper
cgacccgccaagtctcggcctccacattaa

SEQ ID NO: 38145 - DNA, 184 bp, Homo sapiens
  chr2:162283418-162283602
  hyper
tccgccactagacggcgttccgtggagttttgtctgccacataaaaaagcgaggactgaatttcctttgtgtttctttcccctcctcacatctaagaactaagtaagaggacaaaagtacaagacacggtgcatgtgtggcgagtgaagtggagcagtgcattcgtgtcatcacccacccgacc

SEQ ID NO: 38146 - DNA, 211 bp, Homo sapiens
  chr2:162283782-162283993
  hyper
ggcgctgcccggcgctacccgccgccctcgggacagtcaccgtgagcaaaagagtcggtgtcatgtgcgtaaacgaagctcttaggagccgaggatagatttcacaggaacgtagtgccttgttctgaaagacgcgctttggttgatattaggaagtatttttaaaaaattggggaggtcgtttcccttgcagctccgccaccatctgctg

SEQ ID NO: 38147 - DNA, 243 bp, Homo sapiens
  chr2:162284264-162284507
  hyper
gcctgagaggaacggcgattcctctccgtaaactcagatttcctcagtttttaacagtgtattttcaaaaagaggacgaaagaagaagacgagcgtgcggctagcactgtattctggctcgtgtcttcccgccactcgcaatccgcgccatcttaactaactttcaatgtccctcggggctgagcgtgccggcggcgggtgctgctcgggctgggagatgctgcggcctgggttctcaacctt

SEQ ID NO: 38148 - DNA, 203 bp, Homo sapiens; identical to SEQ ID NO: 1916
  chr2:162930081-162930284
  hyper

SEQ ID NO: 38149 - DNA, 639 bp, Homo sapiens; identical to SEQ ID NO: 1917
  chr2:162930338-162930977
  hyper

SEQ ID NO: 38150 - DNA, 30 bp, Homo sapiens
  chr2:163174881-163174911
  hyper
tgaaatgtgcgtgccgctgtccgctgccca

SEQ ID NO: 38151 - DNA, 30 bp, Homo sapiens
  chr2:163175111-163175141
  hyper
gtcccggaccggggcgatcctgctgcacac

SEQ ID NO: 38152 - DNA, 337 bp, Homo sapiens
  chr2:163694851-163695188
  hyper
agagcctggagttgccggtctccccaccttggaagcggtggacgccaagtgcactaacaaggcagaaagcgagggcgagagaagagaacaaacgaacttactttgcccttcaaatttccgaatgatggtccccagaaatgtattttgtggtgccacatgccccctgcgcacaggcatgttggccccggtcttccgaggagcgctcccccggagctctggagttctcccgggatctctcctcggctagagcccaggccagcgcgcgagccgctctttgtggcagagcatcctcttttgaaaccagaattctcttcccattagcaccacttctagacac

SEQ ID NO: 38153 - DNA, 177 bp, Homo sapiens
  chr2:163695246-163695423
  hyper
cggactgccgcgggtgagagggtttgggggtggggaacgggaaggaggcggggtgaggggaggtggcgggggagggaaagagggagggagctgtgggggtggggtgggaagggggcggggagtcacaagggcaatcgatctgtttctcttctcccaaacagcgccaatttcccagtg

SEQ ID NO: 38154 - DNA, 153 bp, Homo sapiens
  chr2:163695926-163696079
  hyper
atttagcctcagggtgcagctcggatccctgggttcagcggaggtgggtgccgaagcccgaactgaattggcacgcaggtccctgcccagcgctgagccgcgcctcgggaaagactgaaagctgcccgtgccgctgagcatgcccagtttctg

SEQ ID NO: 38155 - DNA, 890 bp, Homo sapiens
  chr2:164592623-164593513
  hyper
aaggagagagggagaaagagacggaggctgccgtgagggagagaagacgggaggcagtggcgagaggcgggcagtggagagagacgggcagcgggaggaccaggagggagagggagaggcgcacggagcccgcggagctggagggggagaaagggaggcgggaggcgagccggcgagcgagctagagacgcgccagagattcatgggcagggagggctcaatggccgcgccgcgccggccggccggccgctcgggtcatgttacacggccggggccgcggcggccgcccagcctcgccgatgcgctcacgcggcccggagggggccccgaggtcatgattacgcgcgcggggactcgcagctctccctgcacgcactctctggcggcccagcctggggaaaggggagcagcgccgtagggggaagggggctttctttcccacgcgtgaccagccggcccctgcgctccccggcctgcgttggagggcccgggacagagccgcgctgctccccggcccgcgggctcttccctgccggttcccggccctctcgacagctgcggcccgtccgcccttccccaccccctctgcgcacgggacgggatctggtctcgagagcctggacctcaccggcaccctccccggggcccccagcaccagccagaaaacgacttgatctgcttagaagaggcaacttcggggagaaaattcgcgttcgcccagttcccctcccccgcctccctgtgaataaataaaatcctaagtgtctaggtgtgcggtcccctctcgcgctccctggctcccctccctacctcccccaggcggctcgggctggagaaagcagcgcccggggggccctggtgtcggcggctggtgcgcaggcatagacgtt

SEQ ID NO: 38156 - DNA, 260 bp, Homo sapiens
  chr2:165477433-165477693
  hyper
tgctatttataaggcgctgtgagatcgcaatgtcctgctgatccggtaggagccagctcaaaggggattgtcttcagagacttttacaaacttggcccagctctgggcacatggctcaccccctaggaccgcctcctcaccccctcgccggctgcccagccaggacactcccccgcgccctccagggttgcctacctgtctgcagcacagccgcgggtcccgtccggaaggggcaggagcgctcgcgcgtgcagccaggg

SEQ ID NO: 38157 - DNA, 30 bp, Homo sapiens
  chr2:165478237-165478267
  hyper
gcccagggtctgggcggccccggcgccgct

SEQ ID NO: 38158 - DNA, 1157 bp, Homo sapiens
  chr2:165697512-165698669
  hyper
aggaagcagcctccccggccgcgtggaggacagtcagtgagtcaggccgccggcagggcagcgagttgccagccaggtgaaacggccgaggcctcgctgtcctcgccggcctcgccctccccggtgagaggcggcgcggcgctctgggcttacctggctggggcgtcctgcgggcgcggggttcggccgtccatcgccctgcggggcgctgcgcgggctccagctcccaggcggcgcgtcactgctggggtgggagaggccggcgggtcagggcgggacgcgcgccttcccgaggccggagcgaagctggctgagcgtcaagagcccgcccgagccgctccagccccggccggcccgcctcccgggtgcgcttccacctgcgggccccggctcccagcccgcgggcgccgccgccgtctctacaaggtctagcgggcgcccagagcacggcggaggaggcggtggcgctgcagcccccgccccgtggggtttactgggtagccatttggcgcctctcggagggagaggagccgccggggctggaaaaggaggaggagcggggccgggcgcacgggcaccgctgccacgccggcagcgcactcccaggctcctccggccgagtttgcacaaacaaaacgccctaggaaaacttttcccgaagagaagttgggagggctgatctctcttttcccacccaaggctcctacgttcttttccaaaggagacagtagctcgcctgttctccctcgcggcttcctctcctactcttcccttccccggcccgcgctcttgccgctcggctctcaagccaggacttgaatggagaagcggcaacccctgcgaggctcagcccagcgcgggcagggccgactcagcacctcccctgtcccgcgggcggggtgcgggcgctggctgggcgctgggggcctcgctggagcccgctctctcactcaccctgccccatttccctgcccggagtccgggagctcgccgccgcctctgcagcacggccgcacataagtggggaccagctcggcggcattggagcgagggaagcagcgagccggagagaggaacggggcgggggtgggccgggagcaagttggaatttccttcccccagggcttcgggtctttggggtccggctggggaagctg

SEQ ID NO: 38159 - DNA, 247 bp, Homo sapiens; identical to SEQ ID NO: 1923
  chr2:165873392-165873639
  hyper

SEQ ID NO: 38160 - DNA, 476 bp, Homo sapiens; identical to SEQ ID NO: 1924
  chr2:166649933-166650409
  hyper

SEQ ID NO: 38161 - DNA, 791 bp, Homo sapiens
  chr2:166650454-166651245
  hyper
cggccgtcctcccgcctgctctaacgcagcccaggggtaccgcgtctccctccgcctgccgccggcttacctggcgggtgggcagggcagggtggcgggaagcggcggccgggcaggcgctggacgtgggctaggcgccaggtgcaggtggcggcggctgcgactccggttgctgtcgccacagttgcggctcagtagagctcctcctccgccgccgcctcctgccttcccgctgggcctcccgcgttgcctggagaggcagaaccgaggctcggcttccacttggagtctcccaggtgagctccagcctgcgacgtcggcaggggcgaggccccacttccgcgcctgcgcgccagcctcccgccccgccccagccctacctgagcgctccaggtgagaaccttggatcgcgcgcgcagggtgggggcgccgtccgggccaagcctggctgtcgcgcggcttctctctgagtggtcggcgaggctgctgctccgcgcaagttgtggctcccggcccatctacattggaggaatcctgcactgacctggtggcagtgatcaccttgtagccagaacacagtctgctgggtccttggggaaccagaagttctagatttcccccacacggttcctcccttcctcctcggttcgccaaaatgaaggggtgcgctgcctccgaggaccacttcgggagggcagcaactgctggctcatgtggtttcttcgggcagggttcagcagcttctgtcaccagttaggtttcgtgagcttccttcccgtgtagtcttgatt

SEQ ID NO: 38162 - DNA, 30 bp, Homo sapiens; identical to SEQ ID NO: 1926
  chr2:166810402-166810432
  hyper

SEQ ID NO: 38163 - DNA, 22 bp, Homo sapiens
  chr2:167233063-167233085
  hyper
cggtgacgctcaagaccggtat

SEQ ID NO: 38164 - DNA, 30 bp, Homo sapiens
  chr2:167830802-167830832
  hyper
gaagaaaaatgacaccgagtagaaacaatg

SEQ ID NO: 38165 - DNA, 2210 bp, Homo sapiens
  chr2:168148856-168151066
  hyper
tggggaggtgaggggcgtttatttggagggaagacggggaaggtccactctgcctacaactccgacatttctccgtgtgcctctttgctagctggggacacttcgtggctgattactatgaggagtggttcgaagcctaagaagtagtactcttttcagctgccaaagggagaaggacgggggcgctgtctggtgactgttcgcgtgattccttcaaggcggcgaccacctcctgggattcgctctccagccgcgccgttcgtactcgggtcccgcgacccctccccgctcccccctcgccccagcgatgccaagacgctgaaccgcagggacgaggctctggggacaaagtcaccccgcggcgccctttcctgccaagccgcgggctcctggcggtcagaaagcgccccaggcccacccctgcgggcccggctttccctcctcacctaaggctccggggccacgagtcccccatcctgcgcccctcccgcgcctcccccatcccaaaccccagcagcgtcgctgcctctcccggaaacaagcccgctgagcaaaggcggaggaaaaccttgggccttccgctctgattggtctccccccgccgagcggggcgaggcagcgattggctgccgggcgttgtcagtcgccgaggccagagccatcgccggggaagcgcagccgggctcgggtgcttcggctgccgccgcggctgctcggctagtgcagctgggcgagctcgcgcgggcgccgccgccgcctctgctgctgcccaccccgccgcgccgccggcgctgccggtcttgcaggcggccgccggggaggggcggccgagagagcggagcacgaggaggcgggggcggcagagaagtgatgctggcgccggggatcggggcagcggcagcggagcagcagcatcttcgggaccctggctgcagcgtccctgtggcccgcgcgccagcccagcggccggagaccacgcgccccgcgggtaaggttctgtccggcagcgcccgcgacgcccccgggacggctggcgtggtctttgggggttacgaggcgcgtggtggccggggcatcccgacgaaggtgttgggacccggactgcgtgtcccgacgctgggctgtgctactgcccgcgcccgtgcggctccagctggtgcgttctcccttccgcgctcacagactttgacagcgcggggatggcattgtgtgagtgtggatgtggatgcgtgtgtgcgcgcgcgcggcttggggcactttgcagcgagaacagtgggtcccctctgcgtggcccgacgtccttcaaggacccaagctgggctggagtgagtaggatgctgttggctcggcgggaggtagaacgcacggagcgcacgggaaagtccaccgtggctcgtaaagagccgagcaaattgaactttattgcggtgattaaaaggagctgtggacctggcgcgccaggggagaggcgcgttccacgaggctccccaaagtcccactttgccccggggacttcggaggggaagggaagagagggaaaagtaactgttggtccacattgctgaagaaaaggaggaaagagaagttgggggtgggggtgggggtggaggttactcttgggggagtggcgacttttaggtgtctgaagccccgcgtgggaggcttgctacacttttctggagcgcagacttgaggatggagagtcccactctgaggtactggtagcggctcctcctgcctggtggcggcgtagggcgcagcgggacagcttggtggaggcagagcggggctccgacgcccgacggcccggcgtccaggtggggccactgcctccccaggccgctttggcccgctgacctcccaggttgagacccggcctggtgcgcctctggcagctgccaaatgcctggcggctccgctttccgacaaagttcaggcccgctggggtctggtccatcagacctaggacacgttaaccacgcagagtaaccaggttagggtacccagctgcctccagagcgtttttgtttcatattagattatcttatttgataaagctgttgagagttccacccgtgctgcaaagccttccgcagaaggcgaattctttgcgctgctgcaaatggatggtgctactgggccagatccgaatctccgtagttcagtgcagtgggttctccatccctgctcaggacgcacaaacttactct

SEQ ID NO: 38166 - DNA, 1391 bp, Homo sapiens
  chr2:169312408-169313799
  hyper
ctgacccaccgcctccgggcgcacgggaagaggactgagagccctgaaaccccagcggggcaggagccagcattctgagcatgtgcgagccagccagggggctagggcggatttggggggtcgactttaggtcgtcgccctaagcgcaaagcgaaagagcggtgagagcaggggcgggcgacactccccggagcggtgcccctgcgcccagggcgcagcgactgcgccctgccctgcgggtgtgggcgagttggccgcgtgtgtgcctcgctgtttgacgcgaagacgagccaatcagggcgggcggcccgagctgccatgtgacgggcaaggcggcccctttccccagcgcggccagagggaggagagaaccggggctcgccgcgagccttcgagagcagcggccgcggaggaggcggcggcggcgggcgggagcagcggcggcggcggcacaggctcggggccagccgggcgcgcatccccgggcgccctgcgcggtggagagcttggcgggctgcgggtgccgcaggacaggagtggacaaagcaagatggcagggatcttagcctggttctggaacgagaggttttggctcccgcacaatgtcacctgggcggacctgaagaacacggaggaggccaccttcccgcaggctgaggacctctatctcgcttttcccctggccttctgtatcttcatggtgcggctcatcttcgagaggtaagaagggctgaagcccctcctcccctccccctgcgcacacacacgcgcgcacacactcgcgcgctctctggcgcacgcccccgcgcccccaacgctcgcgttcacgcctcccaacctttgtgttcggggaggggttgctgacccccctgccccgctggctttctgggagccagaaagggtctggcttgccacggatttcctcccgggcgccggggaggagccgcggagcgttagggtcgccccctgccctcctcctgggccctgctctcctcccggcaagggcaggcgaacaaaggtgagcggtggtcgggctcaggacccgccgcattccgcggggctcgcccctctccgccggcgcgccacgcaaggctgccaggcagggcttcccgccggggcccgcgccacccacctgacagccaggaacgttccggacgcgcggcccggagggaggaggaaccgcgcacacttcaatctttatgctccggcacacggattgtaggggttgtgcttcaaaagaattcgccagggacttcctggcttctggtcgctgtttggtttttatccgtgaaactatcaggcccacagtcctggcaaataggggataatagcatttcaggttatcagcggtttctttaaaagaggatgtgacaggacgggtccacatcctg

SEQ ID NO: 38167 - DNA, 1026 bp, Homo sapiens
  chr2:170218502-170219528
  hyper
agaacctcgttctcccgcaaagtgctttccaggagcatcggaccaacgcccgtgggaacaaagacagggtctccgtggggtgcgctgtcaccgaaactggcggggctgctttctcaagtttgctgccgctcagttcctggcgagcgaagaggggcgctcccgctccggcttcgcgaagcaacctgagcgccccaccgggagcagctcccgcgccgccgcccggccctagcccctgcccggacgctctcccctccggcctcccgcggacccgaccctgccacagccggggaagtgggggctccacgagaggctctggctgggctcttaccttggccactggccggcgctaggcaggcgacgagagccaggagcagcgtgcacgccactgctgccggcccgcgatccatctccgcgacggtccccggcctcgccgttccttccccgggaggtgggcgcgcgtagcacaccgcaccggcagcgcctctgctagcgaacgctcctttaggtctgcacctccgccagctcctagtggccaaaagcctgcccccacgcccgaggcatcccgttttctacccgcgccagtccccaccctccagacagtgcataaagccctttagacccgaccgccccggaacaagcatgcgggaatccagcgggcaggccccctgccgcccggcccgccccctgcactttgcagcgcggggaggagtgggcactcgaacacacgcgtgctcacacagggacactcacacaggcgtgtgcacactcacacacgcactcatacaggcgcatgcactcctaagtgtcacaccaactgacacagattcactcatacacgccagtcacacacgcgcgcacattccacagtcacacttcaacgccgacatacacagtcccctttacgcgtgcatacaagagcacactcctgtgcgcacactctcacaggcacactcacacgtgcacacgcgctgccctcgcctctccgcagggtttgccccgcacagaagccggcgaggcggctcacgg

SEQ ID NO: 38168 - DNA, 143 bp, Homo sapiens
  chr2:170220114-170220257
  hyper
acacccgccctcagcgcacgtcctcagcctgtacgtgacatcagagcccacagggaggggtaaaaaaggagggttgatgcaagttatttcccggtggtgggaaccctgtgtgagaaggggctgtttgcgggcctgaggccatc

SEQ ID NO: 38169 - DNA, 205 bp, Homo sapiens
  chr2:170430255-170430460
  hyper
tcctggtcccaacacggaacgaaacaggctcggatgtctcgcccaaccctcatatctcagggtttataacctttcttcgagagacatgacctttcccatgagaccttgcccccaaaccaggaaaaaatgcccggcaggcgcagcgtgcactgcggaagtcacgcactacatatcccagggtgggtcgcggcgaggtgggtgaaat

SEQ ID NO: 38170 - DNA, 30 bp, Homo sapiens
  chr2:170441039-170441069
  hyper
ttcagcagtccctgcgtacgaaagcgggaa

SEQ ID NO: 38171 - DNA, 30 bp, Homo sapiens
  chr2:170655306-170655336
  hyper
cagagcacagggaccgctccacctcgtccg

SEQ ID NO: 38172 - DNA, 30 bp, Homo sapiens
  chr2:170655930-170655960
  hyper
aaagaactttgggccgcagatgtacaccag

SEQ ID NO: 38173 - DNA, 30 bp, Homo sapiens
  chr2:170681256-170681286
  hyper
ccggacgcagggcacggggcgagcctctga

SEQ ID NO: 38174 - DNA, 30 bp, Homo sapiens
  chr2:170683892-170683922
  hyper
cggaggagcgcggacgctccgggtatcgcg

SEQ ID NO: 38175 - DNA, 30 bp, Homo sapiens
  chr2:170685038-170685068
  hyper
cgtgcagggaaggacgcttgaggaaaaggt

SEQ ID NO: 38176 - DNA, 30 bp, Homo sapiens; identical to SEQ ID NO: 1934
  chr2:171300632-171300662
  hyper

SEQ ID NO: 38177 - DNA, 920 bp, Homo sapiens
  chr2:171568085-171569005
  hyper
caaggagtggggagatccagccgattaagcaacatcttactgtgaaaggccaaagcattaagaatttgctgaaatgatctaaataatatctagatttttaaaaaatctagcttgagaggggtgactctctggttggatttatgccagaggcatgcgtcccttctagctgcaagaaaatgcccgaggcgaggtaccaagcttgggctggaagtagcaacccctgacttaatcccagagcgcgcagagctggtccgtcccctgcgcaagtgtcactgcgggttcacctaccggcctcttcctctcgcaggtggcatgcagtcggcgctcgccgcccgcccgcaaagaaacggcaatgcaaacttcccagcctgggaaccccgctgcttggagagcagctccgctgtgccagccgccgccaggagactggtattcaacctccccgccccccgccacggttaaagtttgctccacattcgcagctcccaccccacccccatctccgccccgaggcaggaggaccacataggagttcctgggtccaccgtgcgcaaacacacccaccaacaaaagaaagcccattaaatcttccctcctgtgaactcgcgccccaacggatacctctttgaactgacccccgcccccgcagcccccgcgctgtctggggcgcgcctggccctcccgggcttactctctcccccacagctgcgcacttttgcagcgcgctcggtctttgatgtctctttacattatggcagagcagccacacgctcttcccgggcgcggggctttgtgtaatggaactgacatttggccttgatacctgtatctcttggtgattacaacaaatttctaaaataaatattgtactttgatctcccagcattgcatttttaatggacgctctcaacattacttcatta

SEQ ID NO: 38178 - DNA, 131 bp, Homo sapiens
  chr2:171569930-171570061
  hyper
tgggggagaagggggcgtgcgagtgcaggatgtgcgagggacccattgtatttgggtcgcaagcagcccacccgtcttgagtacgatattctcattccgcaggcgcgccctgggcgtgggagaaggtgggc

SEQ ID NO: 38179 - DNA, 8 bp, Homo sapiens
  chr2:171570181-171570189
  hyper
cgtccgtc

SEQ ID NO: 38180 - DNA, 2241 bp, Homo sapiens; identical to SEQ ID NO: 1938
  chr2:171570470-171572711
  hyper

SEQ ID NO: 38181 - DNA, 49 bp, Homo sapiens; identical to SEQ ID NO: 1939
  chr2:171627263-171627312
  hyper

SEQ ID NO: 38182 - DNA, 632 bp, Homo sapiens
  chr2:171627346-171627978
  hyper
cgccccgcccccccggacccgcctcccagccccgccccgggccctcctcgccgcgcccgctccgtcccgcgccctccaccgccctacggcctgggcccgcctccaccctgcctctccgtggttccccgggctgcccctgcccccgcccccgcccccgccacctcccccgccgtcgcccaattcccccagcccccaccctcggctgctgcccgagcttcctccacgcgccgtgcagtctccacggcgacgctgcgttcccgactcggagcccccagctccgcgcgagcagctagccgggctggctctcggtgtgtgcccttcggatggtctgctgaagagggccgccagctggtaagacactccgaggcaacgaccggtctccctctccctagcccggtgtgcagtctgacccagcccccacagcagaccacccccagaccgggcgcccgagtctgcggaccgctctaccgcacctggttctggctctgggccccgggccccgtggctgccaggggccgccgggaagggaggatgcgcgccactggggtgcgcctggcttgcggcaccctcctcccgcagtggtcggaagaggtgaggaagcgccgttcgtgtctacacgggtgtggagataa

SEQ ID NO: 38183 - DNA, 550 bp, Homo sapiens
  chr2:171669896-171670446
  hyper
ccccagttctcgtctcgggagacagacgtttaaccggtgagcactgccattttttttttcctttctggtcataaattagacacttaaaatagattttaaggagccagctgaaacgaaccaataccatggctctaaattacgtttcctggaggctaaaaattctaattgcgtcaaaaaaaattgacgtgtcctgtctactcaccttgactgaccacgttttaggcgtgaagatctccccgcagcccgtttgggcgctccttcaacgcctcacgctcctcctactcacccgtttttccctttgcagaaaaggcttggccccaaatccggttggaatatctttaaacaatcccccacccacccacgacggggaaaggaataaagggcattgtgggcggagggtcgtgttcccaagtcccagcggtggttgacctaaggaaacgttatcctcggcagacagggtggagtagccggggctgcaagctcgcaaatccctaatgccggagagagactggaggggtcgcatatcgccccctccttcttctgcctttga

SEQ ID NO: 38184 - DNA, 422 bp, Homo sapiens
  chr2:171670471-171670893
  hyper
cgcttcaaatacaatcgaaacagctgggcggacaccactcccttccgggccacccctcatcaccggttcgagtccccggagaggatatcttttttccacccccattatcccaagaatcctcccccaggaatgataaaagattaaaggaagagtgaaagacataaacaaaaatataggtttcaaatgttgtttagagccgaatgacaaccacggccactcttagttcaaattcctaccggagagaagagcagtgggcgaaatacctcaccccccaactaggcaaaacaaacagcagttactgtcaggagggaggagggctggggcgagtctggtgggttggcccatagctattggcggaagcaaacgaaacagaggcatggggaccagaaggacgggcgctgtccttcgtgctgaaagatcta

SEQ ID NO: 38185 - DNA, 329 bp, Homo sapiens
  chr2:171671460-171671789
  hyper
aaaggttgaggcgagcgggcgtctatgctggacaatgaagaacgaggggcaccgggagatgtgttgcctcctccttcctgtctcctgccccgtgcgtcttgaatgatttagcactggcacctggctccctgattggtgcgagcgtctcgtttagggaaggctctaggagggccggtggatggaattccgagcttcacctggttgtatgccgcccacttcaagcagcgcagagcagctgccggttgagtggtttggggggacgtttcctacgtggagcagacacccccagcctgtccagccccaagcctcagtgcccggggctgcagtca

SEQ ID NO: 38186 - DNA, 372 bp, Homo sapiens
  chr2:171671799-171672171
  hyper
cgccgtttaggatgttttttgtgtccttaaaaagtgccggggatttcatcgtcaggtggagacaaggcgacaaaacagtagtttctttagtaccaaaggcaacgcgattatttcaaaccccacagcgagatccctcttgctgatcaggccatgtctgcccagggcggacccttcgatctcccttatggaactctcggtaatttataatatttttgtgtgtgtttccattgtgttgtggtgaaaggcgataaggcattcaaagaaaacggacgggcctccgctgaaccagtgaggccccagacgtgcgcataaataacccctgcgtgctgcaccacctggggagagggggaggaccacggtaaataccagtaa

SEQ ID NO: 38187 - DNA, 1777 bp, Homo sapiens
  chr2:171673093-171674870
  hyper
tttccctcctctcacccgacagcctgcctatttccaaaggaaaaaaaaaaagcgtgttgagtacgttctggattactcataagaccttttttttttccttccgggcgcaaaaccgtgagctggatttataatcgccctataaagctccagaggcggtcaggcacctgcagaggagccccgccgctccgccgactagctgcccccgcgagcaacggcctcgtgatttccccgccgatccggtccccgcctccccactctgcccccgcctaccccggagccgtgcagccgcctctccgaatctctctcttctcctggcgctcgcgtgcgagagggaactagcgagaacgaggaagcagctggaggtgacgccgggcagattacgcctgtcagggccgagccgagcggatcgctgggcgctgtgcagaggaaaggcgggagtgcccggctcgctgtcgcagagccgaggtgggtaagctagcgaccacctggacttcccagcgcccaaccgtggcttttcagccaggtcctctcctcccgcggcttctcaaccaaccccatcccagcgccggccacccaacctcccgaaatgagtgcttcctgcccgccctagtccctgctctccacgggtgcgctgcgcagggacccccccccccccgcctccctcgtcactcttcttatccctgccctccggattcacgccccggggaagcacggaggctgaggctctagttgaagtggggcaagagcgattttcccttgagcttccatgctgcgagcgcctgtccctccaaagggcgcctgggcagcagcagccgaaggcgctactaggaacggtaacctgttacttttccaggggccgtagtcgacccgctgcccgagttgctgtgcgactgcgcgcgcggggctaggagtgaggtcggagggagggtgtggaggcgatggccggtgggcccttctctgtggggtcctcgatctacccagattagcccgcaatctctctgtcccggggccttcgggcgccatcgcgccagcgccgagagtcgagcaggggcgccgcgcaagatctttgtccgccgcctcctgcgcgctgcgcgcaagttcgtttccccggtgacgttccccatgcttacttaccccaccctctctggatctgtaccgcgagaaatctggggtcctcagggggctaggtagaggagaaacgctgaaaccggaccgaaacctcgccctaggcttagcgatggctaaaaaccggctgggataagagggaggcaagcaacattccgactcgctgctttctggctgtctggagtgcaaggtgactgtggttcttctctggccaagtccgagggagaacgtaaagatatgggcctttttccccctctcaccttgtctcaccaaagtccctagtccccggagcagttagcctctttctttccagggaattagccagacacaacaacgggaaccagacaccgaaccagacatgcccgccccgtgcgccctccccccgctggcccacacgccggctgctgagtgcccaatggggcttgtagcggctcggctggaaaatcgctcactgagcgctcccctgtgctcctagcctagtcccccacacccttgcgtcttgtactggccttggacccccaccccgaccccgaccccgcctcgtctcggcgcttcactccaggtcgcgccgatgcaccgccagactcgagagcggcccagggctacgctccctgcgccccagtaccggagctagcgcgcacgtctcctccgc

SEQ ID NO: 38188 - DNA, 30 bp, Homo sapiens
  chr2:171677516-171677546
  hyper
gacatgtcttaccgacgtcaggctgtttct

SEQ ID NO: 38189 - DNA, 100 bp, Homo sapiens
  chr2:171678122-171678222
  hyper
actaggctggagacccgccaagaaattatgagacgtttcggtcccagatgcctgtgttccctttctgggctgctgtggtcgccctttgagtctgcggggc

SEQ ID NO: 38190 - DNA, 59 bp, Homo sapiens
  chr2:171678293-171678352
  hyper
cgaccccacctccggagctgccgggcgggggtcgcttacgggcccggaggggcgccggg

SEQ ID NO: 38191 - DNA, 30 bp, Homo sapiens
  chr2:171679350-171679380
  hyper
ggaagggaaaggggacgagcagggacgagg

SEQ ID NO: 38192 - DNA, 18 bp, Homo sapiens
  chr2:171679655-171679673
  hyper
gcgggggaagattaacgg

SEQ ID NO: 38193 - DNA, 76 bp, Homo sapiens; identical to SEQ ID NO: 1943
  chr2:172289936-172290012
  hyper

SEQ ID NO: 38194 - DNA, 30 bp, Homo sapiens
  chr2:172291333-172291363
  hyper
ggaggatacaagcccggaatctgggatagg

SEQ ID NO: 38195 - DNA, 172 bp, Homo sapiens
  chr2:172378954-172379126
  hyper
agaagtcgacgccccggtcccgccgcccggccactacccagagggctgccgccgcctctccaagttcttgtggcccccgcggtgcggagtatggggcgctgatggccatggagggctactggcgcttcctggcgctgctggggtcggcactgctcgtcggcttcctgtcggt

SEQ ID NO: 38196 - DNA, 891 bp, Homo sapiens
  chr2:172379338-172380229
  hyper
agtgctggaggatcgcggggcccggaggagtgcggtgaggagcgcgcgggaagccaagtcggctgggcgggagggaggctggctggctctggggcgggacagagctgcggttcaggaggatcgccgcgagcgcggggccgggggtgcgcggtggagacgcgctgctgggggcggcggagcggggccggccccacttggttaactctttgcggcgactggctaggacgcactggaggggcctccaagacccagaaacttgagcccgggcgcgatgccggagcgccgcgcagtcgggccgctgcagcccacgcgccccggaaagtcgcccctgtggaccgagcctgcgcgatcgggggcgcggaaacactttcgcctcagccttttgctgaacttgcttccaggctgcagatgaggaggggaaggcagcggggaaaagattgccggagcgagaatttgcccgtatttgtaacatcctcggccctgggtaaaggggctggccaaggggggcgagtgaagcatccgccctgggttcctctcctcctagagtgttaaactcagtcgagtccgggaagctgccaggacttccaagtgtgtttcgccgccctgcccagtcattggacggtcttgagcccgacttgtttatgtggcagaagagtggcgaaagttcccccgcggggcttcctattgggcactggcccagcactccgggtgggagatgcccggagagggcccgcggctgcctggcaccgagggatgcctctgctcgggatgcccccggcgcaagctgcgtccgtgtttggcccgcggcgagccagccccgggcctgcattctctgggctgaggctggcgcgggggaggggctcagcagtcgctggcaatgtttgttgtcat

SEQ ID NO: 38197 - DNA, 30 bp, Homo sapiens
  chr2:172544321-172544351
  hyper
gcgagggacgttaccgggaagttgcaggcg

SEQ ID NO: 38198 - DNA, 30 bp, Homo sapiens; identical to SEQ ID NO: 1946
  chr2:172544758-172544788
  hyper

SEQ ID NO: 38199 - DNA, 457 bp, Homo sapiens
  chr2:172750646-172751103
  hyper
ggctgcaggcagggcgctcggaatgtctcttatgcaataaaagcagcagcagagagttggagtcaccttgaccgccatgctgtgctcggaagccggggacgagcgagtgagcgagcagggccgagctgtcagggcgcgcgcgcgccgtcttcccggccgcgcccgccctccctctcgccggcgccgcgcgcgtccctatgcaaatgaactcggggcgcgccgcgtgcggaaaggggcccggcgtcccggccagaaaggcagctggtccagggccggccggccgggcggaggagggggacgcgcctcccacggggaaaacaagcgcgacccatgggatcccgacgcgccgcgtggttgccacagctaggtcgccgccaggaaagccccaggtttcctaaggcctcttagtgggtgtggctttgggcaccgaccagccaaagtcgttttccccgaggct

SEQ ID NO: 38200 - DNA, 344 bp, Homo sapiens
  chr2:172947569-172947913
  hyper
ccacattgagaaaccagctaccgccagcggctcggcatcagagggcccgcgctcagtgctcctccctagacctttctgagctaagaaataattccggagtgtagccatctcttgctcacacacaacccgcttctaaattaagcaaggctctgaaacagtatcccgaggggctcatgccggacttttgttccaagaaggcaaccaggtcccctgtgctaccgcaaaagtctttgatccttttccagctgtggacacagagcacccaagagactgtcgcgatgtgcggccgtctctccccttcccccaccttgcaagtctctggaatacactgtccctaggcggcc

SEQ ID NO: 38201 - DNA, 138 bp, Homo sapiens; identical to SEQ ID NO: 1949
  chr2:172948183-172948321
  hyper

SEQ ID NO: 38202 - DNA, 31 bp, Homo sapiens
  chr2:172948709-172948740
  hyper
gttatgctaatggggcgccttcagctgcgga

SEQ ID NO: 38203 - DNA, 102 bp, Homo sapiens
  chr2:172949180-172949282
  hyper
accacaggcctgggtttgctgcgggtttcggtgtcccccagggactcctaaactctggaagtcgcgctagacctcaggaggccggaaaatgaccacctggcg

SEQ ID NO: 38204 - DNA, 1399 bp, Homo sapiens; identical to SEQ ID NO: 1951
  chr2:172949348-172950747
  hyper

SEQ ID NO: 38205 - DNA, 590 bp, Homo sapiens
  chr2:172950952-172951542
  hyper
gataaatcccagagcgtctcctggcactggctgggcctctgggcggctcggtgtgcagagcacacaatgccccgctggaaaacagaaacccacatgtgcacgtattagtctcggtaattatttattgcgtagcgctataaacaatgtatgcaattaagggtaattaaacctcaactaccgcctgcaaaaatagcaaactttccctgcaaaggcaggagctgagctcctgggaacggctctatccctcctgcagcgtcccgggacaggccctcggattttgggggacccttccctggctttcagagtttcttgaacgttctctccctggtgctgcctccgccacccttcggtagccactcgctctcggctgttcgcactaaaggcggcccctcgtattaacaacgggccctacttctgctgtccctccaggggcggactcggagaagagcacggtggtggaaggcggtgaagtgcgcttcaatggcaagggaaaaaagatccgtaaacccaggacgatttattccagtttgcagttgcaggctttgaaccggaggttccagcaaactcagtacctagctctgccggagagg

SEQ ID NO: 38206 - DNA, 304 bp, Homo sapiens
  chr2:172951779-172952083
  hyper
cgagctgcctgccgtccggccctctgtccctggacaatctgattagggcgcaggaaggatttccccagacgatttgtttgggaactcagaggtcacacgtgcctaaacaactggaacaatagactccgggcttaatccctcctttgcctttaaattgtgtgactaatcactcggggcctgggtccgcgcctcagcctccctcctcctcctccttcttaccggttgggggtggggggagatcctttcctccgccctctcacctctcaagtcccagaccttagagaagaaacgggaccttccttcc

SEQ ID NO: 38207 - DNA, 149 bp, Homo sapiens
  chr2:172952393-172952542
  hyper
aggcgctgtatcttccgcaggcggtagccacggtcggactgagcccctggcaggctaaggcctggatcccggttctcccctcatcacaactcctccctggctctctgagagctgcccccgtgggctgacggcggcgggaggttcggcct

SEQ ID NO: 38208 - DNA, 30 bp, Homo sapiens
  chr2:172952839-172952869
  hyper
gctccccacccgtgccgcccggctggaacc

SEQ ID NO: 38209 - DNA, 17 bp, Homo sapiens
  chr2:172953124-172953141
  hyper
cgcgaggtccggcccag

SEQ ID NO: 38210 - DNA, 168 bp, Homo sapiens; identical to SEQ ID NO: 1954
  chr2:172955234-172955402
  hyper

SEQ ID NO: 38211 - DNA, 474 bp, Homo sapiens
  chr2:172955471-172955945
  hyper
cgggagctggccctccacctttggggggtcttttcaggcgcgcggtggggagcagagcccggaaggcagtgatctgtgttgtgacaagcacccatttttcaattggtgctggtgaaagatcagatgcgccaggctcttccgacgccctttgggaaggggaggaggaagtggtggggctgctgggggtggggggaggcggtgtgatggaagcagggaaagtagtcgggggtgggggaatgatgccggggacctccaagccccttccaggcctgagattgggacttctccgcagcacctagaagaaccagcgctgatgggagagatcagacctcagaaaccaggatgtgggcagtcagatgggcctcaaagctgaggaaagaatgaatttcccagctcccgcgcggggtagggggtcttcctaggttcaatttcccctaggagatgtgactttgctagtgcgaagatttctgtccg

SEQ ID NO: 38212 - DNA, 331 bp, Homo sapiens
  chr2:172957742-172958073
  hyper
aacccctagctccagcgtagacagacaaacggctgtaaaaagtgccttccccaggctcaagaaacatgtcacccccacccaccgctttcctaccccctccctcatcccccaatcttcgaggattaacacttcctgaaacatcaagtgtttttataaaaaggaaaaaaataatcctgacatcgctgacaagaagttttgatggaagaattagctggtgcatacataatcactcccccaccctcctactcccggagcgggagccacggcggcgggcgcagcgcagccttccaaccctctgaaaaatgaaaccggtttccacccttaccttctt

SEQ ID NO: 38213 - DNA, 179 bp, Homo sapiens
  chr2:172958321-172958500
  hyper
ggcgcctcagagcgccgcaggctttttgcagcgctgcgcttgcagaataggactgaaattttcggctatatagcctctgtctttatagctgatgaaaaaaattgcagattattagcataaatgtttactcttcattacgctgatgacattgtgcactcgagatcttggtaatctttggg

SEQ ID NO: 38214 - DNA, 30 bp, Homo sapiens
  chr2:172959099-172959129
  hyper
tgcccgggaggccccgaggggctccccacc

SEQ ID NO: 38215 - DNA, 1275 bp, Homo sapiens
  chr2:172960504-172961779
  hyper
atcctgctagaggccgccagtccccgcaggacctagtgccctagcgccaaggctggaagtaacgcggcccccaggatagcgccccatcctacagcttctaggattcctggaccccaaagttgaattcgaagggaaaggacctatctgtatttttggaggaggagaggatctgtagcttaattctcaaaggagtctccgaccctaaacaggttaaagccactggtggtcgctgttccatggagggaaaggagcgggcttttgacttttgagcgagttcgggggacgccaggagtgggggagttgcactcgagttttactgcccgtaagaacgactttttgagaggggacggggcttcttgctcccggacattgttctcttgggcggaggggaccacttcagagcttctctttgcacccgcctcttctgcccctcgtcttctaccactgaactgtttgtaaacaaagttccagtcttcccccgctctctccgcctccaccaaaccggtatttctcccaaattcgctccatcagtctgggatcgttacacagggcggatattcacaattttcacaagtgatcctgaaagaaggcctaggggaagcctcctaaacggtcccacattgcagcagggctggtgaggcctgggatccattctctctcttttctgcccttcccatcccggagtctcggggccggcggcgggaattccgcgcagccggaggggggtctgcgcccagcggagcgccgtgctggggcgaggtggctgtgggcagagcgtgcaccggggttggggggagaaggggattgaaggggcggggggcgcgggagtacctgggcggcaggcagttggccctggagctcagtgcccgcgttctgcctgagttgggagagccctgccagagggtggagcggagagggccgtgcacccctcactcttcagcttccctccccctgcttcccagcgcttgtcatatcctgtctctggcctgatatttcacgcgagcaattggaaggagattacaatggagatttatgtgtgttctgagcactgctagtttcccagcgtagagagccgagatcgctgcttcccatttccatttttcattcgcgctttggggagctcagtagagcacggggggagcgtgtctgcgcggcggcgggctgatcacaggactccgcgtctccgggcgggccgggagactgtgagaaaggcttgccagcgcgtcgcccccggcggggctggagccggcccccgcctccaggagccaggctttg

SEQ ID NO: 38216 - DNA, 383 bp, Homo sapiens; identical to SEQ ID NO: 1959
  chr2:172963796-172964179
  hyper

SEQ ID NO: 38217 - DNA, 224 bp, Homo sapiens; identical to SEQ ID NO: 1960
  chr2:172964664-172964888
  hyper

SEQ ID NO: 38218 - DNA, 3 bp, Homo sapiens
  chr2:172965295-172965298
  hyper
ggg

SEQ ID NO: 38219 - DNA, 115 bp, Homo sapiens; identical to SEQ ID NO: 1962
  chr2:172965647-172965762
  hyper

SEQ ID NO: 38220 - DNA, 1268 bp, Homo sapiens
  chr2:172965958-172967226
  hyper
cgagaggtacgggatttctgtccacccggtccctttccttccctcccacggcggccccttgggggtttccagctttgggcctagaagcttacttagggccgctcgaggcgcaggcctggaaatccttaaaagtacttaaaatgaactttaaaaagcattgtcctaaacccgcctgcttcccagccatctcaggcccgcgctctcctcgcccctgcagggcgcgagccccacctgagtctgggtgaggcccagagaggccgccagctcggctcgctccggcaaggccaagtattgagtcttttggaaacgccgctgaagagccgccagctggaaactggagtagatggtgcggggtttccggactttctttggcttcccgttcactatccgaatttcaggctcaaggtcctccttctctgcaacgataaagaatcgtaagaacagcgcaacccaggggtcctggagttcccgccctcctagagggcccggcgggggggacttggcttgagcaaagaggtgggtgcactgaactgtggcgccacgggcaggcgcaacttcgcagcgtgcgatcggagccgccaccgaccccgggagctgtaccctccagggaagggggagacaagtgcacacccaagagaaagaagctggtggcaaggagatgcccttatgaggcaggcagagcacgcccacttggctcttgaggccaccaggtcctaccaaaggagagagggacgtaaccggcgacctgcggcagattggaggctggggagggtaaagggcacaagcgggcggtgagcaggcagcgtgaaaatccagagctttcgaaggccccccgccccaaacacgtttacccatccatcccattaactagaccgactcggcactcttgacttcagcgttatgcataccaggctcgttgttggctggggacgaactggttccatagggagcgtaggaggtgtaggcggcggtgtagcccaggtcatagctgctcttggcggagtaagggacgttgttgaggccgctggcttggtactggtaggaacccatgtgcgcgtagggcgagcccccgccgccgccgccgcccgccgggtgctgctggttggtgtagtagctgctgtcggtggcggtggacaccggaagggtgggcgactcctggggcttgtggaggctgctgctgctgctgctgttgccacccgggccggcgccgccgccgctcgggggctgctggtgctggtggtacgtgctggaggcggcgatctgggtcg

SEQ ID NO: 38221 - DNA, 190 bp, Homo sapiens
  chr2:172967804-172967994
  hyper
tgcaaacagactgccgccgaatgtgagcagcgaggcgaggggtcgaggtagcgaggagtcagggtggcccgcagcaggaagacagaaggcgtggagacagactggcgttttgcctcagaggaagaagtggggtcccctctcccattctgtgagcaagtgccagttccagtgattcgtactttcatgtccg

SEQ ID NO: 38222 - DNA, 227 bp, Homo sapiens
  chr2:172968669-172968896
  hyper
aaaccttggcccgacggtgatggactgcacgacttgctggactcccaagtccgaagttcctgcggcagcgcttgctttgtggcgccacctggtgggcagtgtgcgaggttgcggggggcggggtagacggtctaatcacgcccaggcgccagcctctgaaaccccccaaaagaacaaaatagtaattaaaagccacaaaattgtgctagtgcgcaccatctgaagca

SEQ ID NO: 38223 - DNA, 30 bp, Homo sapiens
  chr2:172971335-172971365
  hyper
tacctttgtgttttcgtccccgaagtagta

SEQ ID NO: 38224 - DNA, 434 bp, Homo sapiens
  chr2:173037292-173037726
  hyper
ctgcaggtgagggctcgggcggtggcgggccgtggtccggcgcagtttccccgcggcccgctgggtcgcactgtggccttaggaatgtgggccggggcggggcggcttgggagcgcgctgcagccaacgccgcgttcagccccgggcgcaactgcagccgtgccgggggcctccggggccccgaccgaccgacagctctttcagaccgcagcgaagtttgcacacacgacagcacgtcccggggctaggatcttgcccgcctgcggggctgacctgcaccacccttggggaagcgcgaactgccgccccgctgccgggagttaggcgcccgggcctgggtcgcccccacagacggctcggacggcacgaacgagcggaccccaaggatagtgggctggggaggggtccagtcgtggtcacggaaacgggtggtc

SEQ ID NO: 38225 - DNA, 752 bp, Homo sapiens
  chr2:173099597-173100349
  hyper
gggggacactggggggagcagcggcgggcatctggaggcatcgggggacagcgggggacattgaggggcagtgagggcggccgagttgtcggcggtgggcggcgccgggggagccgcgctcggggacagctggcggctcaacggcagcatcggcagcatcgagaaaggtgacgagttctgcaaataacagctgcggagcaatcgttatgtttggacaacgtgggaagggccattgttcacaaattgttctcttcaacaacacctgcatgcacagataataatccattgtcggtctccggcttcaaagacaaaaggcagccgcggagggaggagtcagcagagcctggagataacaggaccactttgcaaccggggagagtgcaaacgaggactccaagtcgcgtcccgggtctgccgcgacggtcgctcaccgcaggggtctccttcctcttctggcagcgagtgcgacctcttttatcctagcaggccaccaccttcgcggcaacaaacatcatttcctatgcagttgcaaagcatgctcccttgcaatcagcgatcaatactggcaaagtggctccaggataggaaaggtcgcacgtgtgttggtaaatggaaaggtttatgaggcgcaggtggtcgtgctccgcggagattgtggtattagcatgtcaaagacaaaacggaaccaaggtatacaggcacagagtctcttcctggggctccgggaaagcttggcacgaccctcttgagcc

SEQ ID NO: 38226 - DNA, 51 bp, Homo sapiens
  chr2:173292961-173293012
  hyper
taaacaaagtgctttccgccggttcttccctccgggcgtgtttgctgggac

SEQ ID NO: 38227 - DNA, 1068 bp, Homo sapiens
  chr2:173600369-173601437
  hyper
gccggccaccggggtcgccacccccagtgtcccccagcagcgggaccgcggggtccccaccccggggcggaatccccacccacgggcgccgcagtgcagcggcgggcgggcgggcgactcggccctccccgcacccgcgtcccgccccccgggtcccctccctctccccaccgccccaggccgcgggagcccgcggggagggcgggcctgtcgcagccgcgctggtcgccaggcgtccgggaggagcggggtccgcgcggcggacgaggcgggggcggaggcgcaggcagagcgagcgcgggaggtcgccgcagccagggacaccgcgcgccgccgctcaacatggtcgctgcgcacgctgcccattcttcctcctctgccgagtggatcgcctgcctggataaaaggtagctcgccgggggccgcagccgggggccgagctctgcggtgctgcccgggccctgagaccgccgcagctccgcacctgggcgcagcgcggccgggctgcgggtggccggggtccccgagcgggggaaggggttgaggtcctcgtccgggagacaggaggacaaggatccccgcctctcgtggggtgccagcggcatgagattattacacgtggtggagaaaatgcagcgcagtaaggggagagagcacccacctctccaaccccctgccctgccgcgactccaggctccgctcctgggtgggggtttattttctcttggcatcacgggacagaagaatcgatgcataccctttccggctattcagaccttgcggggtatgaagttttaaagaggggtgggggcaccggcaggtgcagagtaacattctttttttgttcttgaaagcaaagtgtgagggacccggtggagctgtcgaatcccttgctgaaattcacagctctctgcccccgcagtcgctcgctcaaggtctgtgttagagaaggtcatttgggaggctgctttcgtcttaatacctgcttctcgggaaaagatctttacgctaaaaataattaaaaccataaagcatgtaactcccgacgacagctctctctaaggagga

SEQ ID NO: 38228 - DNA, 320 bp, Homo sapiens
  chr2:173940415-173940735
  hyper
ggcgggtgccggggcgcggggcggatggtgccccccgggcgcaggccagggaggcccgagcgccttccccacgccccgctcgcccgcgcgtgtgaggggagggcggcccagccgtttcgcgccgggaggtaggtggtgctgttgccgtgactgtcttcctcattggcgccgtgcagagaggcggaatgttcaactcctaactgcagcggaaacgtgggagccgcgcgggccgctgtcgtcccaacccccgccgccctcgtcgcgcgcggggcctccgcgcccccggctgctgctcacgccccgcccgggagccaggtagg

SEQ ID NO: 38229 - DNA, 1055 bp, Homo sapiens
  chr2:174219333-174220388
  hyper
ctcgctcaggaccgcgcagctgcacaaggagagtggtccccgtagcccctaaagcccccctttctcaaaggggattttaggagtgcccaaggctatcctttgaggtcagaatatataggggggtcgtgttttttccagggggccacctagtcttgcgccatgtctggccgttaccacagcttgcaggacctgtgtcccaacgcgggaaagacagcccgagccccgcccctccgggcccgggtcggcgcgcccagcctgccagccgcgctgctgctgctcctcctgctgtgggaccgctgaccgcgcggctgctccgctctccccgctccaagcgccgatctgggcacccgccaccagcatggacgctcgccgcgtgccggtgagggctgggcgggcgaacccgaggggcgggcgcggtgggtgctggacgcaggcgggcgcgggccgaccctctccaactccgcagcctagcgctgccttaactggtggcctgcctaggcgttgcccgcttgggcaagcccctgattttgtgcacctgggataactgagggccatggggacgttcctgcgtggcgtgcgcacccgaagtgcgggcggcgtggagacttgagtcgtttgcaggatggctagcagcgctggaaagccctaggcacgtgcgtccgccaaaggccggacagcggccgggagcgctggccggtcccgattttgcctgccaggcagagccagcctgcctgccccctgggaggttgtcccgcagcggcccagccctttcccgcacacaactcggagccagtgcgtggctcgccgcgtctatacccgcgctcagtgggtggcccttgggcgcgcaccccgcccggcaagagacgcgtccgcttctaaccgctgagggccagcgcgtctgaggtttaaggtcttgcgaaccggtctcctagaacttgggctgcgcacgcagtgtgaagcgaccgtagtcccgggcggtggttaagtgcatttaaagggcttggtgggtcaaagcgttcgccgaccatttgctcgtttcctacttcctccacccc

SEQ ID NO: 38230 - DNA, 218 bp, Homo sapiens; identical to SEQ ID NO: 1972
  chr2:174349950-174350168
  hyper

SEQ ID NO: 38231 - DNA, 1199 bp, Homo sapiens
  chr2:175190773-175191972
  hyper
agaaagagaaactcgcgacaacagagttgccgaaagagaagtgttggcgcctcaaacttgaggatcagcttcttgggccccactccagggtgtcgcgggggtcgggttctttccgccgccccccgaaagattctcagctaaccctttccccgccgagaccaagaggccctcactctgacaccactccgggagccaagctactgtaaggagctgataccacccctcgccggcgcgaaccgcccatctccccagacccgcccaccccctgctgcgaatccctgacgttctagcccggcgaaggtcctcttaaattaggaaacaatagctatttaagaagaagcgcaaataacccgcgctctgcgcgcccaatcgtgggattcttgggagttccccgcgggcaaggaagtctgctgctccccgcagctgcggaggagaggagggagcctgcgtgctggggcagggtgtcgcgaacttggggcaacccacctccagagccccgcccccgctttcccgcctgccggggacctgccgaacgcggaaccaccctccttcctgaggcaaatttgggaggggagaggtccagaagctgtagagtcggggcgccaagcgccagattctgccgctcggaagttgggggcagtccccagtcccgcctcaggcccccgcgctcacagggcgctccgccgagggcgcgggccaggcgcgcggtgtcacctccacgaagtcatttacttgccctgaaggagctggccctcgaccccttggaggatggagattcctcccattccctcctccgcctcccccaggtcggcgaagagacgtggaattgagctggaccgatgattccgcgagctctgtaattatgcacacactgaaatcttcaccgttgacttaagttacttggcgctgcgagggctggggccctgcatattgattaaatgcagcctctatttacctaaacaataaatgtagagattagcaacgttcacttgatcacaataatgggattgacaattaaggggcaatgcatcccagatgtagcggaacctatgggctgcgtgcagcaggcagagggcttctcagagaggggcgctgggcagttgcggcggcggaggtagtgcagagcaggaagcagcgcggaagcacagcgggaggcggagggggacgcccagcctcgtcaaggtcttcggccaccccgc

SEQ ID NO: 38232 - DNA, 391 bp, Homo sapiens; identical to SEQ ID NO: 1974
  chr2:175192084-175192475
  hyper

SEQ ID NO: 38233 - DNA, 30 bp, Homo sapiens; identical to SEQ ID NO: 1975
  chr2:175192843-175192873
  hyper

SEQ ID NO: 38234 - DNA, 450 bp, Homo sapiens; identical to SEQ ID NO: 1976
  chr2:175193194-175193644
  hyper

SEQ ID NO: 38235 - DNA, 104 bp, Homo sapiens; identical to SEQ ID NO: 1977
  chr2:175193808-175193912
  hyper

SEQ ID NO: 38236 - DNA, 30 bp, Homo sapiens
  chr2:175196190-175196220
  hyper
aatccttccgattagcgctaatgaccgaat

SEQ ID NO: 38237 - DNA, 30 bp, Homo sapiens
  chr2:175196457-175196487
  hyper
caattgtaaaggacccggatacataatttt

SEQ ID NO: 38238 - DNA, 1556 bp, Homo sapiens
  chr2:175196961-175198517
  hyper
ggatgaaaaaaatctgtcagacgaaaaaaatctggacttcctccgaaagatttccttggggccccaccttagagttgaagtggcccgggtgtttgcctgcgttcgtttggaagatttccctaacttttattgtgatgcagacgcgtgtatctaaaggaatatgcgagtgcccacgtctagagtctgacagctggaactacggggaaaacggcgggagggggaggggaggggatccgaggggaggaggagaagaggaaggcgagcagggcgccggagcccgaggtgtctgcgagaactgttttaaatggttggcttgaaaatgtcactagtgctaagtggcttttcggattgtcttatttattactttgtcaggtttccttaaggagagggtgtgttgggggtgggggaggaggtggactggggaaacctctgcgtttctcctcctcggctgcacagggtgagtaggaaacgcctcgctgccacttaacaatccctctattagtaaatctacgcggagactctatgggaagccgagaaccagtgtcttcttccagggcagaagtcacctgttgggaacggcccccgggtccccctgctgggctttccggctcttctaggcggcctgatttctcctcagccctccacccagcgtccctcagggacttttcacacctccccacccccatttccactacagtctcccagggcacagcacttcattgacagccacacgagccttctcgttctcttctcctctgttccttctctttctcttctcctctgttccttctctttctctgtcataatttccttggtgctttcgccaccttaaacaaaaaagagaaaaaaataaaataaaaaaaacccattctgagccaaagtattttaagatgaatccaagaaagcgacccacatagccctccccacccacggagtgcgccaagacgcacccaggctccatcacagggccgagagcagcgccactctggtcgtacttttgggtcaagagatcttgcaaaagaggagagaaaacacgggaggcacagttccacatccttgtcacttgcaccggctccgcgacaactcgtcgtttgcacccgagggtttggggttggtagtttaattttttttttttcctaagaagcagggtgtgggtttagtggggagtgtgctatattaaaaccagtgcccaggtctgcccgagggcgctggtatttctggttcaaaaacagcttctggctaccctggagaagaaagagaaagcggggcccagaaagagaaaaacaagcaggtcagcggttgctgggggactcgaagacgcaccctggtctgcttgaggacgcctcttttcacactgacaaggtccagggaggacttcaggatgcttccagcctgcaaaatgtggaagcgcccacgtgtggcctggtcctccgccctcccgggtgaaagtcctggagagatttctcgggcgcgtccgtgaaagcagggcactaatggggagcctacctcttaaaacagcgcacttgccctacggacgagcctctaggccctggtgg

SEQ ID NO: 38239 - DNA, 310 bp, Homo sapiens
  chr2:175199244-175199554
  hyper
gggccctgctggtgcgggctgtgtctgggtgtctcctcccctcctgcctcctttcctacaagtggggagtcgagtaggactgtcagccctaacttgcaacatctcggggtggtttgtgtgtgggggggtgcttgtggctcggtttcattggtacttaaacctggcttggtgcgtgagtgtaaatttttaattgcactgtaatttcttcagtccccagcccgccctcgccccccccccgcaagtatcccccactactcccccccacccccgcggccctagctagctgacttgactggcacgcgccgggagc

SEQ ID NO: 38240 - DNA, 519 bp, Homo sapiens; identical to SEQ ID NO: 1981
  chr2:175199921-175200440
  hyper

SEQ ID NO: 38241 - DNA, 143 bp, Homo sapiens; identical to SEQ ID NO: 1982
  chr2:175200709-175200852
  hyper

SEQ ID NO: 38242 - DNA, 266 bp, Homo sapiens; identical to SEQ ID NO: 1983
  chr2:175200916-175201182
  hyper

SEQ ID NO: 38243 - DNA, 182 bp, Homo sapiens; identical to SEQ ID NO: 1984
  chr2:175201359-175201541
  hyper

SEQ ID NO: 38244 - DNA, 53 bp, Homo sapiens; identical to SEQ ID NO: 1985
  chr2:175201775-175201828
  hyper

SEQ ID NO: 38245 - DNA, 119 bp, Homo sapiens; identical to SEQ ID NO: 1986
  chr2:175202126-175202245
  hyper

SEQ ID NO: 38246 - DNA, 32 bp, Homo sapiens; identical to SEQ ID NO: 1987
  chr2:175202568-175202600
  hyper

SEQ ID NO: 38247 - DNA, 85 bp, Homo sapiens
  chr2:175202633-175202718
  hyper
cgagcgaagagcaatacatagaaaggctccctctttgcccactctccacctccctccaacacccgtctctttccttttctcaaaa

SEQ ID NO: 38248 - DNA, 213 bp, Homo sapiens
  chr2:175203998-175204211
  hyper
gagataaaatgtaaacgttttaaaaagcccccaaactaagcacttgatttgataactaggctttttaatgttatggaagacaactgctcctttccttttcaaagacggctgatctatgcaaatagtgaattggaaatgcctaggtccccgcgccgtcaaatggccctcgcaggttatttgaatatcagtggcgctgcttctgaaaaggttcaa

SEQ ID NO: 38249 - DNA, 319 bp, Homo sapiens
  chr2:175204627-175204946
  hyper
tttttgattactgtccgccttgggaatttgagcgaagattttgatttttaggaaagaaaaaataaattcttgttattaacaatcagcaaaatgttttctcggaaactgttctgaaacaccaagtcgcaaagtagcgataaaacagaacgaaggtccccagcagggagtttgcagcgtgacattcaatggcttcttccttctccttcttgagctccccgcggccaggctgccccgctcttcttactcgagtttttcttcactttggccattttctctccccgatcaagctgttcataaccgggagccccccactccctaa

SEQ ID NO: 38250 - DNA, 512 bp, Homo sapiens; identical to SEQ ID NO: 1991
  chr2:175206393-175206905
  hyper

SEQ ID NO: 38251 - DNA, 652 bp, Homo sapiens
  chr2:175206960-175207612
  hyper
cgggccggagcagccttctgcattgccttcgtcctccggcggacaccccagcccgagtggggcgcggggggcggctgggcaggcaggagccgggccggtcgcgcagggcccccgagggcggcgagaagcccccaaattccccgctcgaggcctccccaaagggtgcgcacaccctcctggagcaaaccgaccccttttgtcctctccttttccctttgaaacccaaatctgaaatcgggtaacagttgggggcgttggccgattttctctcctctcagcgtatcgtcctccccctgccgcccctttccctcctcttccagtccactatctccccgaccccagcccgtcttcatactgcgtggagtgacttcctcctcctccatttttgtgccccccacccccagcgcgtatttattgtattttaatttaaaaagcgacaccttcaaaccctgcgcccgaggcggcggaggcgccgtcacccgcagccgcgagagcccggccaaggcgcctgggtgccgggctccctgaactcgcgccggggagaagcagtgcgtttccggggactcgcagccacctttgcggcgggtaactcggctgggtttgtatttgctgttttaatacaaaccccgccgcactgcctatttcaaagatg

SEQ ID NO: 38252 - DNA, 770 bp, Homo sapiens
  chr2:175208098-175208868
  hyper
aggaaagggtttcagaatgtccgtggggacacgtccctccagggccggctgtcgaggacccggaaaaccacagcccctaagagttccagattttccaagacccttatactctcttcctgtagaatttcatactgggggttttgcattgttttgcaggcatgtaaccatttctgggtgattcatttatctataaaggaaatgcaaagtggcagggtgtctgccccagtccgcattctgcttgcagattgctgacgaaagttgatatcttcatgtttgtcccaggagcttcataaagcgccctcttcacctgtggagcccgagcgaccagaaaaattcgctcgctttcctaactgctgaaggcgagtccggcccgcgcgggggactgcgcccgaggcccggcaagcttaggcggggactagcagggccctcggcgggcgggcccccagcgaaaaggcctgagaattgcttctggggggtggcttgggccaacgggggcgagggagccgcgcagagggcaggccccgacccttccccgccgcaccttgtgggtcgggtgttgggcggcctcctggcgcgggaggcgcatctgctaggaagggtgtgcgctccccccttctcggcctccccatttcggtttggggtgttttcgcaaggttgccagacggtgcatccagaaggaaaccaccagagcacgcaggggggcgtcgcctcaggatgggaaggggcgacctcagccaggattcatcccatcaccctactccacccccatt

SEQ ID NO: 38253 - DNA, 36 bp, Homo sapiens
  chr2:175208996-175209032
  hyper
cggctccggggcagctcgggccggagggtgcgtttc

SEQ ID NO: 38254 - DNA, 232 bp, Homo sapiens
  chr2:175260397-175260629
  hyper
taaacaaactcagccgcctaaccggaactgcgtttccagcagcaagggggaacttccgagatcaaaggtgacagcttccggcaactgatgcctccactggccactcctccctccgtccacctgtcacttcgggtagctgggaggccaggtgaggggcgcgcacgggggaggggcgtgcatagttgagacagaaacccggaagacccaactgtggcgcggcactgcttgaccg

SEQ ID NO: 38255 - DNA, 31 bp, Homo sapiens
  chr2:175320206-175320237
  hyper
gatgtggccagaactccgtgaggaaggttaa

SEQ ID NO: 38256 - DNA, 30 bp, Homo sapiens; identical to SEQ ID NO: 1995
  chr2:175351020-175351050
  hyper

SEQ ID NO: 38257 - DNA, 30 bp, Homo sapiens
  chr2:175351634-175351664
  hyper
agggagctggtgctcgcagggtgccaagca

SEQ ID NO: 38258 - DNA, 30 bp, Homo sapiens; identical to SEQ ID NO: 1996
  chr2:175352180-175352210
  hyper

SEQ ID NO: 38259 - DNA, 1376 bp, Homo sapiens
  chr2:175546699-175548075
  hyper
acaaaggctcacagcgactgggtcagctgctttcccttacactcacaacgctaacagttctttctttaaaaagaaaagtatgtatagtagaaaaaggtaggggacgcgagactgaagtgaagctgtctctggagagttcgggggatcaccccccctcaacccccgtccccactccgggcgaaaagcactgaccgggactggagatgtctctaaggtcgacgcagacccctaacgcgcgcgtctacgccgacctggggcgagcgggccgcccgggagggccgggagggaggcgggctggagcgcgggaggggcacggttcccatagacaggcaggcgggcggtgccagaacttgagccggccccaggggatgcccgaacgtccccctctgtcctagctggggtgtaggtgcagccccagggcatcgccgcgaagcccctgctcgagacctacggagatagtgggtcccgagccccacggggcggccccgggtccgcggagtccagcggtgagctcagcccgaggcgcgggacccaggctgtccacggccccttcctccccgggccatcagcgggcagcagaacgcgcgggccgctggcctggaattgcgcccctcccgaggccgcgcgcccgcgcccaccgctcgcaggggacgcggcctcgacgtccccagccgccccacccgcgtcaccggtgccaggcggcacttccgtgccccgccgtcgagcccagcccctcccggcgtctcccccggcccccgggagcccggaacccgggtcgcgccagaggcgacgcgtcccttaccgcgcagcggctccggacgactccgcagccccgcgccgcgctgggcattttttctgggaaacttctcccggggtccgcagggctgagccgggcgggcaggaaaagcgctcagcgccgggaggctgcgaccatccgggaacttcgccgagatgtgggccctcccctccggcgccgccgcccccccgccgccccgccacatgtggacgcgccgcgaggccccgccggcccgcgccctgccctccgcgcgcccgcctgccccgccagcaatggggctctgcgcctgcagcttcggcccgcagaggatcgcggcggggcgggatggtcggggctggagtccgcagtttcctcagtcccgctcccctgcgcggcgaggggaccgaggcaagaggacaggagtttgcagaggggcgggaactggaaggggagtctagcccagggcctttccccccaactcttgaatcttctccaccttcttgcggctgctggcggggggatcgggtgggggtgttccctctgttcgagccggaaggaacgccttttcccacgctttcccgtctgctctcaaaaaaagagt

SEQ ID NO: 38260 - DNA, 30 bp, Homo sapiens
  chr2:175869673-175869703
  hyper
gcgctcctcccaggcgggctagggatcacc

SEQ ID NO: 38261 - DNA, 30 bp, Homo sapiens
  chr2:176033036-176033066
  hyper
gagtcaggtgattccgtcaggcttaaggag

SEQ ID NO: 38262 - DNA, 30 bp, Homo sapiens
  chr2:176494846-176494876
  hyper
tggaaaaataatcagcggcaacagggggga

SEQ ID NO: 38263 - DNA, 30 bp, Homo sapiens
  chr2:176866830-176866860
  hyper
tcagcatgcctccccgctgcagagccctcc

SEQ ID NO: 38264 - DNA, 30 bp, Homo sapiens
  chr2:176867172-176867202
  hyper
gctcggtgtcgtgtcgcagttatgtactgc

SEQ ID NO: 38265 - DNA, 44 bp, Homo sapiens; identical to SEQ ID NO: 1999
  chr2:176937942-176937986
  hyper

SEQ ID NO: 38266 - DNA, 289 bp, Homo sapiens; identical to SEQ ID NO: 2000
  chr2:176940203-176940492
  hyper

SEQ ID NO: 38267 - DNA, 1007 bp, Homo sapiens
  chr2:176943397-176944404
  hyper
caagaacaatgttttatgtaccgagtctcttatccgtctctcctaatgacttcccttagcgggttgttagtacttgacagcaggtctccgtgcggggaacttttctccaattccacattcaaaggaggtccatcagagagcatgattggcaattttcgtcataatctgcacattattagcatcaaacttgacgtggcagttaacactagtgggttttgatgtacctttcttcaagttcaaggaaacccctccagtagccgggttggcagagcgggtctcagcaacccagcggtggctttgcagaggcgaaggcgcaatagacatgcgtgagaaatatgccaagaaccatttcacccgaggaaaaggaaagcgaggagagaaggggacgagggacatagagagttctaacttagaaaagtgtctaaggaaatgctttaggataatattaatatatctagagattcaagtatttcccagatcgagtggaacccggtagttggaaaactgagctgaaaacgcctctccaaatactacagcgatctatcagtcttacccctaccccaactcccttcctttcccttccctggccgtggcaacctcttttgccatcactttttgcataaaatatgcaagatgcttccattccatcagcactgaaaccaaagaccaaaagagagaaaggtgttggaccgaaaaggaggcggcgcaacggccaccccttccagcacctcggctttgtccttcccggggaaggcggccacatccctacccgccttgctcctgaacgtagtaaacaatctcacaaacaaccaccgctgcccacgctctccatccgtcctcccggccttatcagacctccgttctcccgcactcttcgggcagggtccctaataagctcaggctgaaagaacgtttgccacctcccccaccctcgttgaaagaaaaggaagaaaaacagcagcagcgagaaacctccggggcgactcctcccccgcccccaagcacca

SEQ ID NO: 38268 - DNA, 390 bp, Homo sapiens; identical to SEQ ID NO: 2003
  chr2:176944456-176944846
  hyper

SEQ ID NO: 38269 - DNA, 131 bp, Homo sapiens; identical to SEQ ID NO: 2004
  chr2:176945137-176945268
  hyper

SEQ ID NO: 38270 - DNA, 235 bp, Homo sapiens; identical to SEQ ID NO: 2005
  chr2:176945581-176945816
  hyper

SEQ ID NO: 38271 - DNA, 30 bp, Homo sapiens
  chr2:176946365-176946395
  hyper
aaataaggacaatttcgttgcatttttccc

SEQ ID NO: 38272 - DNA, 147 bp, Homo sapiens; identical to SEQ ID NO: 2006
  chr2:176946720-176946867
  hyper

SEQ ID NO: 38273 - DNA, 141 bp, Homo sapiens
  chr2:176947813-176947954
  hyper
gcagaaacattttctcggactcaggagcgagggcgggtgggcctggtgttccaggctccgcaggcctgagcctggcgggaaagctcaaggagcagaactggaaggcacggtcccagacatgcgtcccgcccccgcccgtgc

SEQ ID NO: 38274 - DNA, 379 bp, Homo sapiens
  chr2:176949490-176949869
  hyper
aatatcctagagttttgaaagcgctttcttgctacgtggccgcggaggtgcattgggcccgcgcctccaaacggaaatcattaggtcctctctgattttctaacaccgtctgcagagtgagatctgaactcgaagtccccggttttttacttttataatcctgctgatagaaagccttctcgcctacgcattttcctgaggggaaacgaactaggctggacgatttgatagcagaattcgacagctaactttaaacacagtggagatttacagcgccatacgggcgctccgaatccacgctcacgttgccagattttcccctccctcctcaaatagaattatttgcggcaaaggcgctggatttcgaggtcaaaagagg

SEQ ID NO: 38275 - DNA, 323 bp, Homo sapiens
  chr2:176950142-176950465
  hyper
ccgctcctcatctcccgcggttgcgcccacccttccctgaccctccaagcactgtgcccacccgccaacggcccagccggagagagattcgcggacacaggcggaggcgagggaggacggggatgggacgcggaggtccgcccgtgagcttctgaagcggctgagagaccctgacaatctgggcgctgggcgcgggtcctgcatccccacatttagcctcaatccgaaccccaaccagggccccctcttctttctgccgacacacccagaacattggggtgtgttagggggcaagctcgagatctattcgcctatagctcttg

SEQ ID NO: 38276 - DNA, 30 bp, Homo sapiens
  chr2:176950695-176950725
  hyper
ggaacggggaaccggcggggaacgcagagt

SEQ ID NO: 38277 - DNA, 684 bp, Homo sapiens
  chr2:176952674-176953358
  hyper
tgcaggtaataaaaatctgtccgggctgcccgaggggaggggcgccggtaaagccgtagctgcagcgaagccccgcgtctgccgctgccggagcctggctctcctcttacgcggggggctgcgggcaattggggccgacaacttgcggtcccgccttgggacgcatgcttgctcgagagctggggctgcagggtgcagtgggacagtaggaccgcgaaagcctgggcttcgagcctcgggctccctgtcttcaggcgaagtgcggtttccacgggtgcaggtttcgctgcataagggaagactcagatttcgagccctcggcaggccagcttctagctctctgtcccttccgggtctctccggttgcttctgtctttcctcctcccactcccgtcgcaatcccgcgccccacggaggaaggtcgtggtgcgggagttgggggatactttcttcctgggctcggtctacgcagacccatcgcctgcctcgagttcctgtgccctcagacgccacgggaaaacttgcagggacatctagcgccaggcgtggggaactgcgcgccgccgggccgggaagtggagccgaacactgcccctccgcctccctttcggctccccccttcgtgcttgggcactttcctcaccttcatccctttgccctgccggtaaggacaatgtggattcc

SEQ ID NO: 38278 - DNA, 486 bp, Homo sapiens
  chr2:176956928-176957414
  hyper
agctcactcggatttggggtctagaagtcgactaactgagggattcagcaacaggataaaaaaatgggcctgttttcacatcattctgatcatctctgtccttcgtcttcattttgctgtgcaactcggggagccgaggagaggtggcaaaaacagcggttgccgagacaaggcgcaggccttggcgcccgcctcagtcgcagacagggcctgggatgggccgtcgcgcaatcaactcgtgggggtggctgcagcgcgtacgcctgggtcgggggggagggcgggaatgggaggtggaccctgcaaggggcaggagaggggtgggggccggagtgggtgggtccagccaggcctgggccgggagccaggctcccccgcgttcctacccccacgtggccgcgcgcagccaatggcacgcccccggcgggggccctcggggcgggaggcggccccccgaccggcccaggccccctcccaacctgaact

SEQ ID NO: 38279 - DNA, 52 bp, Homo sapiens; identical to SEQ ID NO: 2009
  chr2:176957576-176957628
  hyper

SEQ ID NO: 38280 - DNA, 694 bp, Homo sapiens
  chr2:176957914-176958608
  hyper
ggaggctcccccagccaaagagtgcccagcacccacgcctgcagcggccgctgcagcgcccccgagcgctccagcgctgggctacggctaccacttcggcaacggctactacagctgccgtatgtcgcacggcgtgggcttacagcagaatgcgctcaagtcatcgccgcacgcctcgctgggaggctttcccgtggagaagtacatggacgtgtcaggcctggcgagcagcagcgtaccggccaacgaggtgccagcgcgagccaaggaggtatccttctaccagggctatacgagcccttaccagcacgtgcccggctatatcgacatggtgtccactttcggctccggggagcctcggcacgaggcctacatctccatggaggggtaccagtcctggacgctggctaacgggtggaacagccaggtgtactgcaccaaggaccagccacaggggtcccacttttggaaatcttcctttccaggtaggggcgatggagaaaagggaccgacacgagggagggggagagagaaggagaaaagaaaggactaagagtatgcgcccctacttgggagtgggagttgtgcctgtgctccacacgtgaccagggttaacccagtggaaatttgtccagttcgtgtgaaatctgtaaattcctcctctgatttcaactgcctccgtcactgccctttc

SEQ ID NO: 38281 - DNA, 136 bp, Homo sapiens; identical to SEQ ID NO: 2011
  chr2:176959223-176959359
  hyper

SEQ ID NO: 38282 - DNA, 30 bp, Homo sapiens
  chr2:176961738-176961768
  hyper
tcctttctcctaatcgccaacttcccctcc

SEQ ID NO: 38283 - DNA, 337 bp, Homo sapiens
  chr2:176963321-176963658
  hyper
cgagggtcctgctgcaggctgagactggcgccggtcaccgggtctcccagggtcttgggatcagaggcaggaggggaggacccctagtcctctggccggactaggcaagagggccagcgacggggtctgagcacaccgctcccggctaagaactgctgcctttcccacttccctgtttgtcagacccgtgaactccctatccccggcacccctgggggcgctgaggcaaggaactctgctagccagctgcctccgaacgcccgctgttccccggccaggtggttctggctcttctgcctttccacacccagtcgggggagttcgtcctgctttgccc

SEQ ID NO: 38284 - DNA, 83 bp, Homo sapiens; identical to SEQ ID NO: 2013
  chr2:176964066-176964149
  hyper

SEQ ID NO: 38285 - DNA, 154 bp, Homo sapiens; identical to SEQ ID NO: 2014
  chr2:176964179-176964333
  hyper

SEQ ID NO: 38286 - DNA, 378 bp, Homo sapiens; identical to SEQ ID NO: 2015
  chr2:176964389-176964767
  hyper

SEQ ID NO: 38287 - DNA, 97 bp, Homo sapiens; identical to SEQ ID NO: 2016
  chr2:176965264-176965361
  hyper

SEQ ID NO: 38288 - DNA, 232 bp, Homo sapiens
  chr2:176968703-176968935
  hyper
tctcccccagggaggcgggctgaggaggcttccgggatgccggcgggtggaagagaaatctggaaccgttgtaaatattcatgtggggggatgccccttcacccttcacccgcctctcccagctgcattcccccctcagtgatagtgggggagggcaaggcgactgccccactgtccttagacaaaggtgatctccccatatttttgttctccagtcgcttgacttaagaag

SEQ ID NO: 38289 - DNA, 417 bp, Homo sapiens
  chr2:176969196-176969613
  hyper
tcttgggtgactcaaaatcaccgcatcgcgtcctggcgctgtgcggaaagctctttctcgcggagcggctggctgcgccccgaaggcctggtgcgctccctgcgtttcgggtggggccgcgcaggcaaggacaaggccacagagtcggggtcttcacggtaggttctcgagcgggacgcgcgggtccggaggctgcggttttccctgggtttggggaatgggggtaggaactaggagggagctggggccaaagagccaagcgggctgggactggaatgaaagcgctctgggttgtggagtgggtcggggggcaagggtccgcgctaaggagccgaaaggggccggccgcccccttcccctatgcaccggcgcgccactgcagatggctcaccctcccccgccaaatcgctgctcccg

SEQ ID NO: 38290 - DNA, 403 bp, Homo sapiens
  chr2:176969676-176970079
  hyper
cggtcagcaggctccatactgggggcgccgggctgcctgcaccccaccccgtgccgccagtagagagaaggtgcgagaattttgcgaatccccagacacataaagacccgggttgaagtcctcgcagctgccctgggtcctgagctaccgcagggccagtgtgcagcgtccagggagccattttaggagagagatccaggggcgtcgaccacgagcccgaaagggagaggcttgggcctgggatggagatggggaggcagataagtgtgctgggggtctgggttgaggagaagaatgtcagctggaatctgggcgggggtgccagctgcggggagggagcacacaagatgggcagttctagttgggggaggctcgatgccctccagtcgccacagacctattt

SEQ ID NO: 38291 - DNA, 81 bp, Homo sapiens; identical to SEQ ID NO: 2019
  chr2:176971289-176971370
  hyper

SEQ ID NO: 38292 - DNA, 272 bp, Homo sapiens; identical to SEQ ID NO: 2020
  chr2:176972103-176972375
  hyper

SEQ ID NO: 38293 - DNA, 54 bp, Homo sapiens; identical to SEQ ID NO: 2021
  chr2:176972750-176972804
  hyper

SEQ ID NO: 38294 - DNA, 104 bp, Homo sapiens; identical to SEQ ID NO: 2022
  chr2:176972814-176972918
  hyper

SEQ ID NO: 38295 - DNA, 376 bp, Homo sapiens; identical to SEQ ID NO: 2023
  chr2:176975879-176976255
  hyper

SEQ ID NO: 38296 - DNA, 120 bp, Homo sapiens; identical to SEQ ID NO: 2024
  chr2:176976695-176976815
  hyper

SEQ ID NO: 38297 - DNA, 280 bp, Homo sapiens
  chr2:176980657-176980937
  hyper
cgagggacgctttcgcggatagtgaactgctggcaaagaattgtctctgggctgaaagctcccagaggtccggccccgcagaggtcagggtgtggttcctctgagagccgaagcctcgtgtagccctccggggcgcataggaacccggagccaggcaggaggaccgagcgggaggacaacgcagggaccaacccatccatggggatccgggcccggccagctgcttggcctcccggccctcgcggccctttttgcctccgccctcctagagacaccttgg

SEQ ID NO: 38298 - DNA, 108 bp, Homo sapiens; identical to SEQ ID NO: 2026
  chr2:176981376-176981484
  hyper

SEQ ID NO: 38299 - DNA, 126 bp, Homo sapiens; identical to SEQ ID NO: 2027
  chr2:176982293-176982419
  hyper

SEQ ID NO: 38300 - DNA, 110 bp, Homo sapiens; identical to SEQ ID NO: 2028
  chr2:176982517-176982627
  hyper

SEQ ID NO: 38301 - DNA, 339 bp, Homo sapiens; identical to SEQ ID NO: 2029
  chr2:176983747-176984086
  hyper

SEQ ID NO: 38302 - DNA, 14 bp, Homo sapiens
  chr2:176986483-176986497
  hyper
cgaagcggccctgc

SEQ ID NO: 38303 - DNA, 503 bp, Homo sapiens; identical to SEQ ID NO: 2031
  chr2:176986711-176987214
  hyper

SEQ ID NO: 38304 - DNA, 1040 bp, Homo sapiens; identical to SEQ ID NO: 2032
  chr2:176993339-176994379
  hyper

SEQ ID NO: 38305 - DNA, 124 bp, Homo sapiens; identical to SEQ ID NO: 2033
  chr2:176994497-176994621
  hyper

SEQ ID NO: 38306 - DNA, 199 bp, Homo sapiens; identical to SEQ ID NO: 2034
  chr2:176995070-176995269
  hyper

SEQ ID NO: 38307 - DNA, 412 bp, Homo sapiens; identical to SEQ ID NO: 2035
  chr2:176995331-176995743
  hyper

SEQ ID NO: 38308 - DNA, 30 bp, Homo sapiens
  chr2:176996244-176996274
  hyper
aaatttcccgtttcccggcaggaggtgaag

SEQ ID NO: 38309 - DNA, 30 bp, Homo sapiens
  chr2:177000783-177000813
  hyper
atcgcttccccagagcgtgagcagtacatt

SEQ ID NO: 38310 - DNA, 635 bp, Homo sapiens; identical to SEQ ID NO: 2036
  chr2:177001060-177001695
  hyper

SEQ ID NO: 38311 - DNA, 149 bp, Homo sapiens; identical to SEQ ID NO: 2037
  chr2:177001781-177001930
  hyper

SEQ ID NO: 38312 - DNA, 683 bp, Homo sapiens; identical to SEQ ID NO: 2038
  chr2:177005050-177005733
  hyper

SEQ ID NO: 38313 - DNA, 30 bp, Homo sapiens
  chr2:177021872-177021902
  hyper
ccgcgccgggctgggcggccggggctcgct

SEQ ID NO: 38314 - DNA, 30 bp, Homo sapiens
  chr2:177022107-177022137
  hyper
cgtccaggggggccgcgcggtgcccccggc

SEQ ID NO: 38315 - DNA, 14 bp, Homo sapiens
  chr2:177022548-177022562
  hyper
aaccggcccggctg

SEQ ID NO: 38316 - DNA, 30 bp, Homo sapiens
  chr2:177037295-177037325
  hyper
agtctgagacccatcagcggcgcgccctgc

SEQ ID NO: 38317 - DNA, 331 bp, Homo sapiens
  chr2:177042471-177042802
  hyper
tcttgttgggccaggaatgtccgtggttggtgaggaggctgggagaaggcctttttgatggctccattgttcacagcgctgccctacaaataccatatccgtccccacctcctctgcaagggtcgagcggaagagtaggtctggtgagctgagctctagggagctggtaccatcttccctcaatccccctcggttaccccttggggcagcaacgacgccatcccagccccttccagagaacacacaaaggaagccccacccgtccttagacctgaggacacgctcgggagcgggctgacgtggaccccgtttcagggcgccccgggcccct

SEQ ID NO: 38318 - DNA, 85 bp, Homo sapiens; identical to SEQ ID NO: 2040
  chr2:177042913-177042998
  hyper

SEQ ID NO: 38319 - DNA, 297 bp, Homo sapiens; identical to SEQ ID NO: 2041
  chr2:177043266-177043563
  hyper

SEQ ID NO: 38320 - DNA, 762 bp, Homo sapiens
  chr2:177052672-177053434
  hyper
actggccctcatcacgccgccacaaattgcgagggatagaagaaagctgcaaagtcacgttaaaaggaagcctagtcaaaaagtgaaaattttgtcccgccctaggcacacagcactcacagcataagatgtagttccatgagtcctaggaaagggggaagaaaggaaaaaaccaaacatctgctctaggtttagaagagggataacatcagcgccaagcaaaccgaaagcgcagaggactcagaagaggggaagaggaataactttatctgtcctggaggtgggcgaagagcagtctccaccggccgcgcgtcacgctcccatttaaccttttccatgccgcgacgcccacactccgccctcgagggactagccccccccacgatccagagcagaagcggctcgccccgctgcatccacgggccctcacccaagcgtccagtcctgcctttctccccccacctcgcccaatacctgtccgagagcaggcgttctgccctctcgccccgcccttgcccaggcagcccccggtcgcgacggctctcctcggggctcgggggcgctgggcggcggccctgggctgctttggctaacttggctgcggggcaggcgcgaggagcggcgcgccgaccgggccgagcggagaggccgcccattggccggccagcgccacgtggccgcccccgccggtatattaggccactatttacctccggctcactcgccatgggttggagagggcagctcgggtagagagggctg

SEQ ID NO: 38321 - DNA, 84 bp, Homo sapiens; identical to SEQ ID NO: 2043
  chr2:177053618-177053702
  hyper

SEQ ID NO: 38322 - DNA, 47 bp, Homo sapiens; identical to SEQ ID NO: 2044
  chr2:177053906-177053953
  hyper

SEQ ID NO: 38323 - DNA, 371 bp, Homo sapiens
  chr2:177053999-177054370
  hyper
cggcgaacccggcccttttccggcttgtctcaaagcgtcagccgacggccaccctggtgctttccagaccgcatccccggccccaggcacctaccccaagtccgtctctcccgcctccggcctccctgccgccttcagcacgttcgagtggatgaaagtgaagaggaatgcctctaagaaaggtaagtccgcgggccttggatggggccacctggggttggggacggagcctcccccgcggaaatgcgctgggagcgtggtgtcgctgcctttccagacagcggtttgggttttgtggaggagacgcgttcccgggcgaattccatggagtctgcctcgagtacagattcggaaaatgtgccaggcattga

SEQ ID NO: 38324 - DNA, 176 bp, Homo sapiens
  chr2:177134080-177134256
  hyper
gacggagctagccgcgccggcgccccgtaggacggcgcgggggcggggccggcggaagcgctcgagtgccgttgtcggctgcgccggaagtccctagccaggcctggcggtaaccttgggggcctcactgcagccgccgctgctgttggagtgggctttgcgagtctgaacgttgg

SEQ ID NO: 38325 - DNA, 30 bp, Homo sapiens
  chr2:177134722-177134752
  hyper
ggcaagcatctgaacgcttcagtctaagag

SEQ ID NO: 38326 - DNA, 1037 bp, Homo sapiens
  chr2:177502149-177503186
  hyper
agacaaatacttttcagatctcgcacccctctttacaaacctgagcggggctttcggggtaaggggaggcaagactttggtgggagctgctcgtcttcagcaaagcgagggccggctgcaaaggcgcaggctggcagttcgggtcatttcctgccgattccccattcccctcggagcagcttggagaggaagtcggacttcttttccaggcggagcctccacgatgggcgtgggcgcctcgtgcgtgggccgggggcctcgtgcgtgggcggggatcggggcctgggaaaaacgggaacccggtacccgcccgcgccctcgcgcgtcggccaggaacctcggccccatgcgggcgggccagcgcggccaggagggccgggaagaggggtccccggggccccggatgcgctgaactccggggaggggatgggcaggagagagagcacactcctggagccgcgacgtccaaacccggacgcacttgaacccgcagcgaggcccgtggctcgcggccttcggagagcacccgcgccccgcgcagaccggacgccggccttgcccgatcctcggcatccttcggcggggcggccagtcccagggcgctcgctgagggccacaccctggccccagagtttagcaccgccgcgggcagggcgctccgctcccggaccccgaatctgaaagcggagaccaagggctgcctgcggcaaagctcgacatacacttgattttcttccgatttggagaaaatgtcacgggcgagagcaaaaaaaaaaaaaaaaaaaaaaaaaaaaaccctaactgtaaatattatttggaggtgggcgagggcgcggcgtgcgcgcggcggcgggtggcgggcggcgcgggcgcccttgcggggattcccggtctctcagcgcgccctagtggacgccctgcctttcgctggctccccgtgctcgttacaatctgcaatatattatttcttccgaagtattgacaatgtgtgagactccagtaaccccggagctctcgtctgtaatcagcacatttat

SEQ ID NO: 38327 - DNA, 30 bp, Homo sapiens
  chr2:178077175-178077205
  hyper
tctctggtgacgcgcgatcacaaggcgttc

SEQ ID NO: 38328 - DNA, 30 bp, Homo sapiens
  chr2:178128652-178128682
  hyper
gagatggatgacttcgcaaagccgcgccca

SEQ ID NO: 38329 - DNA, 30 bp, Homo sapiens; identical to SEQ ID NO: 2047
  chr2:178257327-178257357
  hyper

SEQ ID NO: 38330 - DNA, 179 bp, Homo sapiens
  chr2:178257856-178258035
  hyper
gaagggaagtgacacgggtgggcggaaggcatcccggtccctgaaagtagggacccacctctctttcgagagagtggactagaccctggattctgtcaggaagggggcgggatgggatggtggattttggtcactatgtgagggtaacaggcttgaagaactctcgttggagaagggtt

SEQ ID NO: 38331 - DNA, 238 bp, Homo sapiens
  chr2:178417675-178417913
  hyper
agactactccgggccgttcagagactgaatctactcgtcccggcatgcaccgttccagtggttccgcggcgcgggtcgtagccgcgctgcatgctgggagacgtagtcccggctgtacctaccgaaccggcggcccgtgggggtgcagggtaactctccttccctgcctcttaaagatgaggggcgctcactgtgtctgttatggcaccgtggtctctggcgcggcggaggaaggttt

SEQ ID NO: 38332 - DNA, 31 bp, Homo sapiens; identical to SEQ ID NO: 2050
  chr2:178483624-178483655
  hyper

SEQ ID NO: 38333 - DNA, 425 bp, Homo sapiens
  chr2:178937428-178937853
  hyper
tcctgttccggaaacccgagctatcgctgctcctgttctggctgccgccgctgctgctggaactgctgctgtaaccggatgagtggaccgctgtgacagggaggtagggcaggacacgcccctgagtgaggcacggagcctggagggaggagagaagaggagggagccgcggacgccagaccagccaaagtccacggcccaggctgccaggcggttcctggaagagtctctggacggccggaatcggcgcctgggtacaggactcctgattggaacacgattagaagagggaaacgcaccttgttccttccccgcttcttgctcccttacctccccaaccctccctactcaccgcgccccttaatccgttagcgtttcgaggaggcccagcgggagcccagtgggagtccgagatacaagtgttg

SEQ ID NO: 38334 - DNA, 30 bp, Homo sapiens
  chr2:179060102-179060132
  hyper
cccctgcatcaagccgggagctgcccgcag

SEQ ID NO: 38335 - DNA, 564 bp, Homo sapiens
  chr2:179278306-179278870
  hyper
catttattttagttcctaagccgcgcggtgctcccagcttccgcgcctctgggcggcccacacccctccccatcctctcctccgcgccgccgtcttcgttgctcttgggtggccgcggcgcccgctccctctgaattcgccgggcagggatacagccgcccggggcctcttgctcgtgcttggttttccggaccttgcttcctaaagggtctttaggggttcccggactcctccgcctgggagcctctatccgcctgggagcctctatgcgccccgcaaagcccccggcagagccgaggggaggcttcattggcgacctggtggggcctcgcggccctgctccctgacgtcagcgccgccgcggtgatttaacagcttttgttttgggcagaagaacctatgggcacaaaaagcaggaacgagtagcggtggctgaagaacgagcaggagcttgaatttcagttttcttatgaggaattttccagaaaagatatcttcactgtgaaataactaaataaatgcccactcagtacagtaagtattgatatcgtcctatagcatttg

SEQ ID NO: 38336 - DNA, 31 bp, Homo sapiens; identical to SEQ ID NO: 2054
  chr2:179316144-179316175
  hyper

SEQ ID NO: 38337 - DNA, 310 bp, Homo sapiens
  chr2:179316376-179316686
  hyper
cgctcttcgggtccccgagccctgtgtttaggaacacgcggggacgtccaaacacccgctcctctcccgccgggcgggctcctttgtcttctgggctttcgtcgcgagatggaacgctgggtcagtgcatcccagcaaaacacgttaggagtaaacgaaggcctttccggggacctgggtagtcggttgtaatggcgtttgcctgggatgcagcacctttggtgggccattagatgacgtgtcgcttctccaggggcttgctaggcactagcagaaatgctcccctgtgcttactcggtgttatggaaga

SEQ ID NO: 38338 - DNA, 30 bp, Homo sapiens
  chr2:179343243-179343273
  hyper
tgctctccctcccgcgtgtcactcgcgccc

SEQ ID NO: 38339 - DNA, 510 bp, Homo sapiens
  chr2:179343484-179343994
  hyper
tctcgctaaacccgcgtattttacagcaggtttcctcagggttcggtgacaacattcgcattttctaaaatgaaactggcataagacgaaataaacagcctgggatgtcgtagagtcagggaatatggttgtcatttctggaagcaaaaggcttctaagacccctagggaacgagcagatagatactggggggagggagaggcatgctggaaaaggagcgtaaaaaataggctggcggtggctttctgggtgcttcggaggtgtccttgaagcgcattctcaggtcggaatcttgcattcagaggttccaggctgagtcgcacaacctgaaggccagcccgatgcaacgaaactgcggtaccgcaactcctctgcctggctgcaggcgtttccgagagccgacctccacaattcagcatcctccgctggcttgcatttcttttccccgccactcggggccgcccttgattcgagggcctctggtagtgcggggaatgttcttttgacttt

SEQ ID NO: 38340 - DNA, 86 bp, Homo sapiens; identical to SEQ ID NO: 2056
  chr2:180129610-180129696
  hyper

SEQ ID NO: 38341 - DNA, 1414 bp, Homo sapiens
  chr2:180725276-180726690
  hyper
aacaagtgcaaacttcggggaccttctctctgctcctctgcccccatctcatctgggttctgctgcagaactctcccacgaccccaagcttcgaccgctaccctcctcacacacctcggtcccctaactacccatttcccggtcattgagagaaagacaaaccccaaacttccagcccaggtgacgaggcgctgcggctaaacatagcggggcactctcctcgtcctttcccctctccatccgtccttgggaattggagcctaccctggggaacagaggagtatgctcctgtggcttccacgacctaatcctaactccagggactcgcaggagttaggattaggtcgtggaagccacaggcgcctgggcgccctcctctacaagtgggaccttgagacaaagtgcaaactctaccgggaggggggctcctggccattccctcgggcggcgcgcccaggtgcaggctcgctctgcggaggagggcgggggccgggcaagcagagggcgcccagtccgggggcgccggtctgggctgggcgcccagagcttacctcggcgcgcgggccgcgggcgcgtggggcagtggctcctccagccgggaagctgttgctcacgctccggtggttgctgcggtcccgccagggctgcaccggggcttcgcgcagacgttctcccgcgatctgctgcagcccaggcggtggcggtggcggtagcagcggcggcggtggaggtggcgcgggcgacagctcggcccggcgcggcccctgaactgtccaactcttgcccgcgccgggcttaagcgcccggccgctgcccccgcgctgagcgcctgcgcaccgggcctcgcccaggtgaggggcgtgtgcccggagcccgctgggcgcgcccggcccggcccggccccgccgcacgcccgcccccctggcctggccgaggaccccggggtttggacgtgccaacgccactctcgcgcgccgaagctgtgacggtttactaagcagagacttgcgaggcacacagagagggaatgaggcggaaccgttcgggggctcgttgacactgcagagcctcccgcagcatcgctgccttaaatcccgcctttccaggcgtgcgcgcacagcgagccagaggaggctccgtcccgacctggggtcccccgcggtcctcagcccgggggctcgggtccccgaagagatccttggcaatggcagaggtcccaaagcctagatgccaagccccgcgatggggcggatgcttccaatattagtcaacccagagtgaaactctcttcttggagatcgtcagaccaactatttgtttttcctctttgaccacccctgggctagcagagcacagctagcagcttcggcatatttggcggagccgggaaggcccggagcgcaagaaggcatcg

SEQ ID NO: 38342 - DNA, 59 bp, Homo sapiens
  chr2:180871765-180871824
  hyper
ctgcggggactccacggagttcgataattacctagagctccaccgcgccgccattacac

SEQ ID NO: 38343 - DNA, 30 bp, Homo sapiens; identical to SEQ ID NO: 2058
  chr2:181179266-181179296
  hyper

SEQ ID NO: 38344 - DNA, 14 bp, Homo sapiens
  chr2:181844776-181844790
  hyper
ccttcctccagctt

SEQ ID NO: 38345 - DNA, 23 bp, Homo sapiens
  chr2:181844867-181844890
  hyper
cggggcggcgggggactcccaac

SEQ ID NO: 38346 - DNA, 31 bp, Homo sapiens; identical to SEQ ID NO: 2061
  chr2:181846233-181846264
  hyper

SEQ ID NO: 38347 - DNA, 481 bp, Homo sapiens
  chr2:182321356-182321837
  hyper
ggcaactgagtgggtgcgtgaaaaggggggatcatcaattaccagctggagcaatccgaatcggttaaagtgaatcaagtcacagtgcttccttaacccaacctctctgttggggtcagccacagcctaaaccgcctgccgttcagcctgagaggctgctgctagcctgctcacgcatgcagcccgggctgcagaggaagtgtggggaggaaggaagtgggtatagaagggtgctgagatgtgggtcttgaagagaatagccataacgtctttgtcactaaaatgttccccaggggccttcggcgagtctttttgtttggttttttgtttttaatctgtggctcttgataatttatctagtggttgcctacacctgaaaaacaagacacagtgtttaactatcaacgaaagaactggacggctccccgccgcagtcccactccccgagtttgtggctggcatttgggccacgccgggctgg

SEQ ID NO: 38348 - DNA, 153 bp, Homo sapiens; identical to SEQ ID NO: 2063
  chr2:182322038-182322191
  hyper

SEQ ID NO: 38349 - DNA, 744 bp, Homo sapiens
  chr2:182322399-182323143
  hyper
cgcgaacccggcccccgaagggccgccgtccgggagacggtgatgctgttgctgtgcctgggggtcccgaccggccgcccctacaacgtggacactgagagcgcgctgctttaccagggcccccacaacacgctgttcggctactcggtcgtgctgcacagccacggggcgaaccgatggtgagtagagttggactgatgcgccctcagcagctcagagcggcgtgagaatggcgccctagggattccctgcccgattcaaactttcctccctcccaaggaggcaggagggaaacgctgcgagagccagctcgctggaaatctgccagggaaactaacttatcttggggcggcagcgccccgggtgcgttatggtgcaaggtcttggagcttcgagtcgggggtggtgggcggaggaggaggtggggaagctgccctgctgcggactgcacatctgtggcgacagggagctcagtgggcagcacagctcacgtctgagcgcacgtgcacgtgtctcgctttaggctcctagtgggtgcgcccactgccaactggctcgccaacgcttcagtgatcaatcccggggcgatttacagatgcaggatcggaaagaatcccggccagacgtgcgaacagctccagctgggtgagttgggtatgggaccaggagttagtgacctcccgaccccccatgtggaccccaccatagggcaagtcctggaaagattcacgttgcctgttactt

SEQ ID NO: 38350 - DNA, 637 bp, Homo sapiens; identical to SEQ ID NO: 2065
  chr2:182521310-182521947
  hyper

SEQ ID NO: 38351 - DNA, 30 bp, Homo sapiens
  chr2:182542701-182542731
  hyper
ttttctcaaactcggcggacggttcgtgtt

SEQ ID NO: 38352 - DNA, 30 bp, Homo sapiens
  chr2:182542948-182542978
  hyper
ggaagcgctggccgtcggcaggtggggggg

SEQ ID NO: 38353 - DNA, 30 bp, Homo sapiens
  chr2:182545194-182545224
  hyper
aaccctggggcctccggacgccgcgcctcc

SEQ ID NO: 38354 - DNA, 163 bp, Homo sapiens
  chr2:182545477-182545640
  hyper
tcctccccggcatgcgccatatggtcttcccggtccagccaagagcctggaaccacgtgacctgcccatttgtatgccgcggagcgctccattccggcccctttgtggccagaagaaagtggcccatctgtcgccagttagagactccgcggacctgttttta

SEQ ID NO: 38355 - DNA, 28 bp, Homo sapiens
  chr2:182545919-182545947
  hyper
ttctccttggcagacgctttgatcattg

SEQ ID NO: 38356 - DNA, 305 bp, Homo sapiens
  chr2:182546229-182546534
  hyper
gcgagctagttctcgcgaggaggccttggttccattggcctttgcgctctcttatgtgggagctggggacttctttgacggttgtattctgccttttaaccatggccactgggttgctggaaagggcaccctcactcagccagtccagggacgcttctggttccctggccagcccgccctggacggcctcggctctctagtccaggcattgaccacaagtacggtggtggacacctcgccacagccggacctgcgctcttgctcccctcagtctcgggtctgtataagatacttgattcagacaa

SEQ ID NO: 38357 - DNA, 104 bp, Homo sapiens
  chr2:182547283-182547387
  hyper
cttcagtgttgggctaaaactcgagggcgtcggagtactagcccttagaagatagtacacagcccgacgtttgcggcagggccaggttaagtactgcccctcac

SEQ ID NO: 38358 - DNA, 107 bp, Homo sapiens
  chr2:182547437-182547544
  hyper
cgtgcctaggctctcatttttccaactttggggagttccggaggagaactggggacggagtgggagaaaggactccagctagcttcgaggtcaggggtagcctagag

SEQ ID NO: 38359 - DNA, 185 bp, Homo sapiens
  chr2:182547746-182547931
  hyper
tctctaatcccactgcgcgttgttcgctcaggcctggagatttgtacaaaggaaaggccactccaggatgtttcagagacagggctgaggttgggtctcacggtagctgtccttgggcttcccatcccgcagcgctccgatgtgaccctcctctgcgcggaaaatttcgacccggggcgccggca

SEQ ID NO: 38360 - DNA, 727 bp, Homo sapiens
  chr2:182548061-182548788
  hyper
cgagagaagagagtcagccggatcccggagaggacagagctgaaggcgcggcggggcttagcactgaggaccttctccgcggccccgctcctcctccttattttcttctctttggacttgtttggacggttgcacacttttccccctcctgattccctaagttttttgtctctcccctcgctgcccgttagctgtactcccccagctcccgtccctactgggcgctgcaggctacccagcggcacgcgaaccgcacgcgcggacaacaaaagcctctttcatgactcactgccctcgagcaatgccccaaatctgccgcctcccgggtccccgctctgagcgcgcggcgcgggccgggcgtcccggccgttacagcggcagccggagcgcccgcgggaaggggggcgggaggaggcgtgtggccaggggtggggagaggggagtgtggcctgggccgggcggaggggaagggggaggcatgtgggaggatgggggtggggaagggatggaggcgtgtggcccggacgtagggggtgggaagcgtgtggctggaggcgaaagcggggagcgggaggtcgggggcgaagcattcacagggccaagataaagcgcaggggccgggccggcgtccctggcggtgacctgtttctcagggaaacagatgctcgctcttgcaaagggaggtttgcgttcaatgaaaggatcaagtgtggccagggcagcccgg

SEQ ID NO: 38361 - DNA, 206 bp, Homo sapiens
  chr2:182548819-182549025
  hyper
cgccctgcctaggagtggggtgtcggggcctgggcgcgggagagcggagtgagggggccgggtggctgaggggcccgcgagaccgtggggctcaggggccgcaggaacggagggctgagagctgcaggtcctgcacaggctgggtagctcggaggctcttgagagcttcgggggatgaaggggggttgatgcgggttctgaccaga

SEQ ID NO: 38362 - DNA, 82 bp, Homo sapiens
  chr2:182549037-182549119
  hyper
cgcctccgccccgggggaggcagttgggctcccgggtcctggcctgaggctggagctgcccaggctcgacaggcaggcgacc

SEQ ID NO: 38363 - DNA, 85 bp, Homo sapiens
  chr2:182549338-182549423
  hyper
gagtgatttagtgccgggcttccccagctcggcctgcctgggcctttttatttattatttatgccctcccggtcccgacggggct

SEQ ID NO: 38364 - DNA, 20 bp, Homo sapiens
  chr2:182549986-182550006
  hyper
aagcaagcaaacaaaaatcc

SEQ ID NO: 38365 - DNA, 36 bp, Homo sapiens
  chr2:182550053-182550089
  hyper
cggcgccggagcgtcgcaagaacaatggttgctgca

SEQ ID NO: 38366 - DNA, 31 bp, Homo sapiens; identical to SEQ ID NO: 2069
  chr2:182756672-182756703
  hyper

SEQ ID NO: 38367 - DNA, 169 bp, Homo sapiens
  chr2:182757467-182757636
  hyper
ccctgtgggtcccgcgaccgttgtaagctacaaaccggaaagtgagccggcggatagcttcctcctctaagcgattagaaatggaagtgctgtgaccgctgattatttggtgaccgtgttgactttacagttaggacttgagctactcacgcatcgtgttagcatcaga

SEQ ID NO: 38368 - DNA, 355 bp, Homo sapiens
  chr2:182818944-182819299
  hyper
agggacccctccccccgcgccccactacccgctaaccgcctcccgccacacacacacacacacacacacacacacacaccccgcgcgcgcgcacacacacacaccccaccccaccaccccgacctccacatacattcccccgaccccctccagcagtgaagtctaagagcaccgcgaagtaatttaaattttcgagggaaagcacagcgccatctgtcggacatcatgccaattactcttgttaagttcctacctgacggttactttatactttgaactgctaggtactccttttggcctaaggacacagtgaaaaatgtaccgagaccttggagagccacgaaccaagaaactt

SEQ ID NO: 38369 - DNA, 30 bp, Homo sapiens
  chr2:183580826-183580856
  hyper
gccggagccggagccggatcccgcgcacac

SEQ ID NO: 38370 - DNA, 104 bp, Homo sapiens
  chr2:183731227-183731331
  hyper
gcaagcagcccggcccgcagcagcagcatccctcccgggctgccgcagaccatgatcccggcaggatggggcagggtgcagccgcgcagtggacgccaaaaggc

SEQ ID NO: 38371 - DNA, 626 bp, Homo sapiens
  chr2:183731466-183732092
  hyper
cgcccctgccgcccaggctgctctttcccaacgtctaagccttcggaagcagcaacatctatttattcctctccctctggcagaagcatcagacttcgcagatcagtcagataagagggacacgagaggaggcgaggaagacataaaaacaaaagtagaattcagctgagagctagttggagctctggggtgtctcctcccctagatcacgcacacaaaaagatgctaaagaaagcattaaattccccaaagtgaggaggacagaggggttggggggaaggagggaggaaaagctcctaatgggagagaagggtgcagtaagagtttacaagtcctgtgtgggctaagagctgcggccgccgctgcggctgcgaccctggctggcaggagggacgctcaggaggagccccgcagggacgtctgtgcctctgcccgggcggctctgcactttcctacctcccgcctgagagggagctccgcccctggggcagtctctgccctccagtgccggctgctcttcccgagaatggagtgggcgcccggggaagagaaggcctgggagtcgcaggcggtggggtgcgaagccgtgcgagtgcgagaccccaagacagcgccgagtcgagcgc

SEQ ID NO: 38372 - DNA, 105 bp, Homo sapiens
  chr2:183902296-183902401
  hyper
tcactgctgccatctccgtaagaatatggaacactcaagttttcctacccacctagaatttcgcccacccaccaccctccctttcctatgggccccatcatgggg

SEQ ID NO: 38373 - DNA, 567 bp, Homo sapiens; identical to SEQ ID NO: 2074
  chr2:183902442-183903009
  hyper

SEQ ID NO: 38374 - DNA, 601 bp, Homo sapiens
  chr2:183903037-183903638
  hyper
cgccccggcagcctcctgccttccgcccgccgcccttccgcccccacccccggcgctctccgccccagcccccaacgagccgccttccccggctgctccactaggtgtggcggcggcggcggcggcggcggcgtctccggcggctgagaacgaggccgcttcccgcagccccggacgggccctcggtcacctgatcggcagcgccggcgcccccgcgaggccggacggggaactgcggccgacgggccctcggcatggcctcgccgccgccgctctggccctggccctggcccggaccgcccactacgcctgatgccgggatgggagtcccaagcggggactgagtggggtcgcgttgtgtgctctttccacttcgccccacaccccactccttcaagttcccaaaagttgcttttccgcaccacccttctaaagaaaccggcagaaactctgctgggaggcggggtgttttccaggcgagtttcgcttaagagtgggctggtggctccaagcgctttttcctcccactgcttgacaggcgctcgccgcagaacacagcagatgttgtgctccgcgaggtggggatcgcctctgccagcct

SEQ ID NO: 38375 - DNA, 50 bp, Homo sapiens
  chr2:183989032-183989082
  hyper
caaaatggctccggcgcctacaacttaagcatagcgcaggtccggaagtt

SEQ ID NO: 38376 - DNA, 30 bp, Homo sapiens; identical to SEQ ID NO: 2077
  chr2:184857322-184857352
  hyper

SEQ ID NO: 38377 - DNA, 1570 bp, Homo sapiens
  chr2:185462254-185463824
  hyper
tgggagggcacagccgggctgatggctgccttggacccttgaaaaccaaccagaaagtctgtctccagggaatgctgcagacccggttccctactttccgtgacaaacccattagttcgtgtgcagatttttccattcaggtcgcttctagggcgaacgcttttgttcgctaccactctgtagtgcgagaggaactagagaggcatgtaaagcaagcttgaggcagcagcgcctttgccgcaaagcatccctttcccctcagctttagcaatttaggaagaactgaggttctcaggggaggtggggtgagaggattgccaggaggagggacatataaatcaggagtccctgcttttaccctctactcacttgtactcgcatcgccacaactaccctcccccgaaactatcatcaacacaagcacttacggtatctacaaatgtgtgggagcaggggtgggtggggggcatattttctttcctcgcctttccctaagactgaacagggtaccagcctccataccaaacacacattaaataacaaaatcaaataagccaaacccagtggatagcaattatcttgagaaagaagccgctgctggcaccggcctggattcgctgcagtcggaagcgggtggctttcggtattgaattattaatttatttatccccctcgcccccacccccacgccgactgccaggcaagaaatcgcggcctcttcgcttcctctccgcccccaccttccaggagtctcccacttggcggtggccgtcgcgtccccggccctctgcggcagcggcgccgcgcggggcgctcccactcgcgctcgggctggcgcggccgcgggtcccggcggcggggtgggcgggggaggcagcgggtgacagatgtactcctctgacagctctcagtatcagcccagtggctccctgccattggctcagtgcaatggaccggcaacgccgctcactataataacactcatgcctgccagcagcagcaactccgagtgcaggcgccgagcgcgggggatgctgccgccgccgccgcttctgctgccgcgcgggcggctcccgcagccccgctccgcccggccaccgcgcgggcactgactcccgctcggttccgtttcgccggcccggccccctcctaggctggaatcctcccgcggggctcgtcgtcccgacgcgaatctgaggagaaacaggagcgagagactgaggggagagcgcggcgagcatgcggaggcgggggagcctcggcgctcaccacagaggggtgcagtgagccagtctccagaggacgtgccgggggtggctgcgtgccctcgtggcgggttcccagcccaccgtcgccggccccggcgcgctgcggctgtgggcgcggggtgcgtggaagcggcggctgcggcggaggaggcggcggctgccccatggagtgttactacattgtcatcagctccacgcatctcagcaacggacactttcgcaacatcaagggagttttccggggccctctcagcaagaacgggaacaaaactctggtaatcgcttctgttttcctctctctc

SEQ ID NO: 38378 - DNA, 30 bp, Homo sapiens
  chr2:187350728-187350758
  hyper
agaggaagcacaaacgcatggactcaacca

SEQ ID NO: 38379 - DNA, 285 bp, Homo sapiens; identical to SEQ ID NO: 2079
  chr2:187454989-187455274
  hyper

SEQ ID NO: 38380 - DNA, 30 bp, Homo sapiens; identical to SEQ ID NO: 2080
  chr2:187558583-187558613
  hyper

SEQ ID NO: 38381 - DNA, 30 bp, Homo sapiens; identical to SEQ ID NO: 2081
  chr2:187558968-187558998
  hyper

SEQ ID NO: 38382 - DNA, 30 bp, Homo sapiens
  chr2:187559313-187559343
  hyper
gggaatctgccctccgggtaatgagctttc

SEQ ID NO: 38383 - DNA, 119 bp, Homo sapiens; identical to SEQ ID NO: 2082
  chr2:188419047-188419166
  hyper

SEQ ID NO: 38384 - DNA, 858 bp, Homo sapiens
  chr2:189156401-189157259
  hyper
ccctccacccacctccggttccgcgtgcacgcgcgagatagtccagtgggcccacagataacgaccatcagagattaaagaaggaaagtcagcgagcttgaacacaggcgtcccgtgtggaaatgtccaaggagaccgccagaagtgcgcaagccggagtcggctagagtttccttctcaccgagagggggagcccggcgttcccggccgggagcgacccggagtccccagccccgcgtcccagctgccgccagcgccagttttggattcggcggattaggaagaggagggaggggggagagagcgcgaagagggaggggaccgaagctggagggtcccgagtccagcgccgtgttggcgtagagaaactttccctctcggcctcggagacggcgccccggccgtgccggagtggagatcgccaggctcggaggaaccggcagctctccacgcccctgcccgaagcctgacccgactgcctctctcagtgaggtacggagatttatctaggctcttccctggctgcgaacccaggctccctccaggtagcgtggaatcgcttagaagctgatatcccgaggggcggtgggggtggacagctccggccaccagtgcccgggaaggagggcgcggggctgcgcgtagccgctggccagcaggttgtaaaaaattaggacagctaaatgctcagggagtcgtccagcactaaaggaggctaagacctgttgacgcctgctatggcagcgcttgagaaatgactgggggagtccagcgaggtcggggacgcagcggtctccgggctccagaaacctccttagccttttgtggtaactttggtccggcggcggggggccggtg

SEQ ID NO: 38385 - DNA, 86 bp, Homo sapiens; identical to SEQ ID NO: 2084
  chr2:189157495-189157581
  hyper

SEQ ID NO: 38386 - DNA, 30 bp, Homo sapiens; identical to SEQ ID NO: 2085
  chr2:190306143-190306173
  hyper

SEQ ID NO: 38387 - DNA, 152 bp, Homo sapiens
  chr2:190445059-190445211
  hyper
attcctccagaactcgtgtagagttgcttgtctccaaagccccacctgggtttccaccatatgctttcggtcaacgacactcaccacagcatcctctctggcggttgtgatctcccgccctggtcatgacactaggcgaccccgctggctct

SEQ ID NO: 38388 - DNA, 789 bp, Homo sapiens; identical to SEQ ID NO: 2087
  chr2:190445444-190446233
  hyper

SEQ ID NO: 38389 - DNA, 228 bp, Homo sapiens
  chr2:190526050-190526278
  hyper
cagccatgcgcaggcgcgaaactcctccccaggccagacccggcctgcgcatgcgttcaagtgagcgcgcagacgctattggtaagactcgcgggaaaagaaagggtgagcgcggctggaagcgcgcatgcgctgtggctaatgccgtaggctccttcagggctgagccatcccgcgtgtcttgcgctcggtggaaatgcccagccgagggacgcgaccagaggacag

SEQ ID NO: 38390 - DNA, 323 bp, Homo sapiens
  chr2:190649066-190649389
  hyper
caggcccggcgctgcgcagcttgcggaagctttcccggacagactcgctgccagcggattggctgcgagcagcgccaatctcacgttgcccccgggcgaggcgggactcagtgccgcgctctctgcacccgctctgccgcgcgcgtgcgtgctgggtgcgggtgcgggtgcggggttgggcctgcgcatcgggtgagacgctggctgcttgcggctagtggatggtaattgcctgcctcgcgctagcaggaaggtagtgtggtgtgactaacgggtatttattatatcctcgatggctcgagggccccgtcccctctactcgt

SEQ ID NO: 38391 - DNA, 202 bp, Homo sapiens
  chr2:191044991-191045193
  hyper
agaacccttagctgggaaggccgcggccaggctgcggggccccctgcaggcgggctcagtgccccggcccagcacctgttgtcccaaggcaggccccgcgggggagaggccttggagggcagcgccccctctcaccagggcggagctcaggagagttcgcagcccagggggccgagaccaggggcagggccagcgaaatgcc

SEQ ID NO: 38392 - DNA, 718 bp, Homo sapiens
  chr2:191045258-191045976
  hyper
cgggtctgttcccgctgcggcgccggcagctgcttggtagttgcggggggcgtgagggcggtggcccagaccaaccggctggcagcccagctccgctccgcccgcccctgcctcggaccctgcgcctgaggaagtatcgaggcaaccctctgccacccgaagttcgtgggtcgctcccagagggcgcgccctggagccgagcgcccttgggcggccatctggaggccaggtgcgggccgcgaacccgcgaggagcgcgcggcgggcgcggcggcgacggcaggaggaggggccgggagcccgggcgccgccgaaggacgccccgtcctccacatgctgccacttggctgagccgggcgccggcgagaaggcggcgccgctgccctggcagctggactgcactttgcccccgcccggcctcagctgccgcccgcccagacgccagcaagcccccctcccacgacagggctgctccgggagcttcggagacccgccccgggcctgagcgcaggctgcctccgggaccccacggctgtccggacgtgccatgggcgcgcagctgccgggcaacgtgttgtgtaagtgaacatctgggaggtgggtgactggtgaagggcgggtgtctgtcggtctttgcttgtcagctgtgccttttagatttttcaatggcagaaacccatgagttacaggaggctttaattaaacgagaccgttctcag
